United States Patent Application Publication US 2005/0228172 A9 - sequence listing, part 41

SEQ ID NO: 153106 - DNA, 453 bp, Homo sapiens
atctttctcaatctcaggatgaaaaattaaggtaagagagaaaaaatataaaactaaagaattatctgaaatcaacttagaagcttgctaccaattcaaaataagaaaagctaatgagagtcacagttgagtcacatcactcattttcctaaatataggcaaaagtcaaatagtatttaattctagtatttctttactaacaactttgcaagtcaaatcatcagaattttatctttagcatgtttaagattattatattagtccagtgtaaactcttagaatgcctttttagggcttcatgatcctggaaragaaaacgtgcaaaaatatttaaacatagttgaattaaacaaaaaaatattatattatttagtacacttaaattcagtgagtttttattaagtacctactttataagtggaaaatcctgcagagcctactaggtttagtgtc

SEQ ID NO: 153107 - DNA, 555 bp, Homo sapiens
agaggactttcttattattagtgacccaaatcttggcttaaatataacttgctctcagatatgaaatacatatagtayaatctttttaaaagtgcatacttgaaaaaaccttatagttgggatcaccaaattaaataaaaataggttgattattgttttatctgacaaatatttatcgagtgtctacttcatgcaaggaactatgtgaagccttagtgatatatggggagataagatggacatggtttctgccctcatggaacttatagacaggcttatgggaaacacagacaaacaaatatgcttcacaatgcaacatgtccaagttcgtcataatctacagagtctctgtgacctgatcatttgaaaatatcaactttgttcatgcacattaaccatactagccttctgtgattgctatttcctgaatctagaattccctttttctaagatcttggcatggctagttgcttatcctcatttagatcccaattcaactattatcttctgtgtagactgaaatttctgcatggctgtgctaattttaagttcaaa

SEQ ID NO: 153108 - DNA, 460 bp, Homo sapiens
tgtaggactgggttttctgaaagagacagaaaaaaaacagttcttaacacataatgtaatattaaacagatagggatggggggaatcgactattatgcaggcaaaaagttgaaagaaaaagaatgtccatgaaaaactccaagacatatctatatatctatatctccatatatagatacaattgcagtcatttgatactatttgttactgaagtgagagaggtttcattatcataataacgtaaacatgacttacttattttcaaagtttaggatcaacctgtagataagtttatagagaaggtaaagaagacctagctacaatttctgaagagaaagtatrtgttcttaaccttgactgtatagaagaaaaaattcaaatttcagaattagaaaggtgggtgtgaaaaacactgaagcaaacgctagaagccctaacaccaattttcaaagtggaagat

SEQ ID NO: 153109 - DNA, 518 bp, Homo sapiens
gttttggggaaaaattcattttgagataagtagaaaaatgtgaagatgggctggatattagatgaaatcaagaaatgcattttgttagataagaaaaaggcatcatattacataagaaaatgttcatacctttaaagaaattcatggttaattttttatacatgttgacgtataaattgatgaaaaaaattacatctcgactttgtttttaaatagtccaactgaaacagagagaaaaagaagaggaatagataagcagcatggtaaattcttggtatttgtcaaatttggaygatggaatatgaggtttacacaaatattttttgagcccacttgtccctagggaacaggactagagaaagataggcaagagattttccttgtcattatagaactttctacatattttttgttttttcttaatcacgcttatatatttctatgaggaaaggaaatttaaaatgactatattttttccacacaaccactaatgaactgcaaagttggattaataagac

SEQ ID NO: 153110 - DNA, 518 bp, Homo sapiens
gttttggggaaaaattcattttgagataagtagaaaaatgtgaagatgggctggatattagatgaaatcaagaaatgcattttgttagataagaaaaaggcatcatattacataagaaaatgttcatacctttaaagaaattcatggttaattttttatacatgttgacgtataaattgatgaaaaaaattacatctcgactttgtttttaaatagtccaactgaaacagagagaaaaagaagaggaatagataagcagcatggtaaattcttggtatttgtcaaatttggacgatggaatatgaggtttacacaaatattttttgagcccacttgtccctagggaacaggactagagaaagataggcaagagattttccttgtcattatagaactttctayatattttttgttttttcttaatcacgcttatatatttctatgaggaaaggaaatttaaaatgactatattttttccacacaaccactaatgaactgcaaagttggattaataagac

SEQ ID NO: 153111 - DNA, 456 bp, Homo sapiens
ggatctaaacatttgattctttttccaaaagaataagcaattataagaaacattttcaattaatttattcaaattcaaactggcactatttgtgagaaaatttggcaatatttgggagataattctaaatgaattaatttgaggtaatttgaggtaatgacaaagtacctgaccataatttgatttaccaaatattttaactttagcaattactaaaaatgaaaatacactcttatgaagagttkttttgaaattctcttctcaacttttcctattagcattcaaatacaaaattcattttatgagagtcaaattattatataaagcaagtatttgcctcaatacttttttcagtactgtgtaccaaacatccttttcaatatttaggggtactaacttaagacaattaccttatgagaaatatacttttattcccattttacgtaaagaaactga

SEQ ID NO: 153112 - DNA, 456 bp, Homo sapiens
ggatctaaacatttgattctttttccaaaagaataagcaattataagaaacattttcaattaatttattcaaattcaaactggcactatttgtgagaaaatttggcaatatttgggagataattctaaatgaattaatttgaggtaatttgaggtaatgacaaagtacctgaccataatttgatttaccaaatattttaactttagcaattactaaaaatgaaaatacactcttatgaagagtttttttgaaattctcttctcaacttttcctattagcattcaaatacaaaattcattttatgagagtcaaattattatataaagcaagtatttgcctcaatacttttttcagtactgtgtaccaaacatccttttcaatatttaggggtamtaacttaagacaattaccttatgagaaatatacttttattcccattttacgtaaagaaactga

SEQ ID NO: 153113 - DNA, 456 bp, Homo sapiens
ggatctaaacatttgattctttttccaaaagaataagcaattataagaaacattttcaattaatttattcaaattcaaactggcactatttgtgagaaaatttggcaatatttgggagataattctaaatgaattaatttgaggtaatttgaggtaatgacaaagtacctgaccataatttgatttaccaaatattttaactttagcaattactaaaaatgaaaatacactcttatgaagagtttttttgaaattctcttctcaacttttcctattagcattcaaatacaaaattcattttatgagagtcaaattattatataaagcaagtatttgcctcaatacttttttcagtactgtgtaccaaacatccttttcaatatttaggggtactaacttaagacaattaccttatgagawatatacttttattcccattttacgtaaagaaactga

SEQ ID NO: 153114 - DNA, 599 bp, Homo sapiens
ttacctttataaagacactttaaataatctaaatcatctaaagacactttaaggggctgggcgaggtggctcatgtctataagcccagcactttgggaggcctaagcaggcggatcacttgaggtcaagagttcgaggccagcctggccaacatggtgaaaccccatctctatgaaaaaaatactaaaattagtcaggtgtggtggcacatgcctgtaatcccagctactcgggaggctgaggcaggagaatcgattgaacccagaaggcagaggttgcggtgagccgagattgcgccactgcactccagcctgggcgacagagacttcatctcaaaataaataaataaataaagacactctgagggagacagactataagctctttgaacttcctttcaaatgatcctataatgcccagaacaaattctgtttttagttaccatgtttaagggacttayagaatacaaaggtattaataacaaattgtgtttgatagagaaaattgtgttaatcattctaaaattatgtttcttaaattactttatgaaaatatagttacaaataagctatttgtaattttttcaattaaagtaaatg

SEQ ID NO: 153115 - DNA, 560 bp, Homo sapiens
taataaaacaaaaacgagttcattctatcttctgattcatatggtcattccttatcattttattccaaataaataattcaaaaacttaaaagatttgtgtgaagacattataacatatgtgaaaagcagaactgagtayagcaggggtgggtacttgcagtaaactctgaaaaataatgtagccttaccaattgtagtccaggggaaatgttaaataggttggagacatcaatgtaaggaaatttatgtagccataaaaacgatagaattcaaaactaaaaaccaataaagaaaagtgttcatgaaatcacattaggtgaagtacaaaatacaattttttaaatacactcttattacaactatgttaaagctatataagccaacaaataaatattggaagtaaacaggaagacagtagttattccacaatggaggtaaaattatggatttttttaaattcactttttaatgttttaagttttgttaaaaatgactttttgatacacttttacatagaaaagagttaagactatgattttatttttaatttgctaaactgt

SEQ ID NO: 153116 - DNA, 586 bp, Homo sapiens
tgtgtgcagcctgtgcatgtcttgctgctgctttgcagaaatgcttcaattacttgcagtcctttgccagataaggcaggtgtccagtgccctggttcctcatctcaactgggcttatgccaatgatataaaatttggtgcagttccctgagccttaatgcttcaagtgtagattttgtagctgttactaagggatgaaaggagcagagtgattaytgaatagagttgaagaagttccaaagtaatagaagatggtgtgatcattggaaagtcaattgacttaaaggataaatataaaaatattgaggctaaacttgttcaagatgttgccaataatataaaggaagaggccagggatgcaccatcactgccactgtactgttgccaatccaggggaaatcaagagaggtgtgatgttagccctagatgctgtaattgttcaacttaagaagcagtctgaacctgtaacaccctctgaaagacatgtctcaggtttctacgatttctgcaaattgagacaacgatattggcaacatcatttctgatgcaataaaaaagtttggaagtaaaagcgtcatcacataaa

SEQ ID NO: 153117 - DNA, 647 bp, Homo sapiens
gtgtgtgtgtgtctgtgtgtgtgtgtgtgtgtgtgtstgtgtgtgtgtgcgtgcgcgtttggtaggggggtggttgtcttgcttttccaattagtcttactgtgattcgaaaagggtagcctttcctaaacaattccagtcaatcaacatttctttcttaacctgcaaggcaccaacctctgactgcatttggagcatagccttgaagtccttttttctttatatagttatatttatttttgtttgctaaatgcctgcttctttgataggagatgagaatttagttgctatttttttaaggttacttcttggctaggagccattacttaaacctgaagattatggaagccaaactctagaggcttgagtattcaaactaatttctctcagctattgacatctaaacacataaaatattgtataccattgtattctagtctctcttggatccaatttgtatccccttgttaaaaagtctgtaaaaggtcctcatcctctctgaaaagaaggcaaacaagcacttcaatgacataaaagactcaattctttggcatttcagttcttctgaagaaatcttcaatttcctgaaggcatcaacctctcttttatgttgggacttttatgttggctgccctcactacctggtt

SEQ ID NO: 153118 - DNA, 647 bp, Homo sapiens
gtgtgtgtgtgtctgtgtgtgtgtgtgtgtgtgtgtctgtstgtgtgtgcgtgcgcgtttggtaggggggtggttgtcttgcttttccaattagtcttactgtgattcgaaaagggtagcctttcctaaacaattccagtcaatcaacatttctttcttaacctgcaaggcaccaacctctgactgcatttggagcatagccttgaagtccttttttctttatatagttatatttatttttgtttgctaaatgcctgcttctttgataggagatgagaatttagttgctatttttttaaggttacttcttggctaggagccattacttaaacctgaagattatggaagccaaactctagaggcttgagtattcaaactaatttctctcagctattgacatctaaacacataaaatattgtataccattgtattctagtctctcttggatccaatttgtatccccttgttaaaaagtctgtaaaaggtcctcatcctctctgaaaagaaggcaaacaagcacttcaatgacataaaagactcaattctttggcatttcagttcttctgaagaaatcttcaatttcctgaaggcatcaacctctcttttatgttgggacttttatgttggctgccctcactacctggtt

SEQ ID NO: 153119 - DNA, 647 bp, Homo sapiens
gtgtgtgtgtgtctgtgtgtgtgtgtgtgtgtgtgtctgtgtgtgtgtgcgtgcgcgtttggtaggggggtggttgtcttgcttttccaattagtcttactgtgattcgaaaagggtagcctttcctaaacaattccagtcaatcaacatttctttcttaacctgcaaggcaccaacctctgactgcatttggagcatagccttgaagtccttttttctttatatagttatatttatttttgtttgctaaatgcctgcttctttgataggagatgagaatttagttgctatttttttaaggttacttcttggctaggagccattacttaaacctgaagattatggaagccaaactctagaggcttgagtattcaaactaatttctctcagctattgacatctaaacacatmaaatattgtataccattgtattctagtctctcttggatccaatttgtatccccttgttaaaaagtctgtaaaaggtcctcatcctctctgaaaagaaggcaaacaagcacttcaatgacataaaagactcaattctttggcatttcagttcttctgaagaaatcttcaatttcctgaaggcatcaacctctcttttatgttgggacttttatgttggctgccctcactacctggtt

SEQ ID NO: 153120 - DNA, 365 bp, Homo sapiens
caccaatcttgaggtgacttctctagtcccatctctagcatcacatgagaagatctgtcaccaaacttgaggtgacttctccagtcccatctctagcatcacatgagaagatctgtcaccaaacttgaggtgacttccctagtcccatctctagcatcacatgagaagatctgtcaccaaacttgaggtgacttccctagtcccatctctagcatcacatgagaagatctgtcaycaaacttgaggtgacttctccagtcccatctctagcatcacatgagaagatctgtcaccaaacttgaggtgacttctccagtcccatctctagcatcacatgagaagatctgtcaccaaacttgaggtga

SEQ ID NO: 153121 - DNA, 560 bp, Homo sapiens
atggcaagaaaactttcctataataatcatacacactttggaaatagtgatggtaattgctactagttactgaatattaactttgtgtcaggcacacagtgccccaaattaattaacctgactctacatcctaaatatatttattgataaaggatttgtatatttcccatggactgcttgacaggactgaggatagaaagaaagaacagattgagtgactgagacaactctggaatggattgtcttgtaagagagaaatcatgcatttgttgtttgagccattgtatcaytgggtctatttgttaccgcagccaagctttcagaaactaatacaagtagtccttaacttacctattttcgaagtgctggttacttaaaggggcacctgtggctctgtatgccttacctcataccaggagcaggtcccaggtcaggctcagctggctgagaaacccaggctgaaggaagaagggctgggcttacctgtttgacttcagcctggaggtgacgtaattggaggcactgctctagccgcttatgagtctgctctgcattgagct

SEQ ID NO: 153122 - DNA, 621 bp, Homo sapiens
acctgtttgacttcagcctggaggtgacgtaattggaggcactgctctagccgcttatgagtctgctctgcattgagctccaattcatgctgcttctcatggagaaattccaataactcttgcacctgggctgccagatcaatgtctttttcacagatcaactcaattcctgattttaaaaaaatggaaacaattaaaaaccagctagtactgtgaaggctacattcccttcaatatgcataagaaaactggaatttggaaacagccattattcataccctcccaaaccctaaatattcctctgtgaaactgggcaccacaatgygcccttgtttgggatgctaaaattacgccatctcttttgtattaactgatcctttgcctgaggagtcaacggatgatcagttccttattatcaacaggaattacagttatatagaggtccatccctagacatgacagcacccagcaattcctgctgggggatttgccaacacccagaatattcacaaacaagcctctaaatcatactggaaaatcaaaaaccaaaccaaaagactgtctcagtactttggccaatgacacacttttttttttagctggtcagatataatttatcat

SEQ ID NO: 153123 - DNA, 606 bp, Homo sapiens
gcaggctcccagcatgtcctgagactcagtccctgcattttcatccatctcatttgatgttgttttatgtgagaaaaacacaggaaataaaatggatgaagacagtgcttattgcacctctgcatgcctcaggaacacatcatgttgtggatggaataaatgggaggaacatgaagatttattccagccacacctagaagaatagaaattaccccctctcccactgcccccaaacacactgacacgagtcctagttaaagcccatcaaatggtaaatatctgtcaatcggcagcaggcagagtttgcttgtgttgactttactgctctcaatctrttgatatatctgtttttcttaggggctcttagaaatgcaaaaagatatttttcctctttccatcaagtagcggaatgtatttgtgaggaaatcatttgtcaggctcttttttaaaaagttctattgagacttctttctgatgtgcccccacaatttcctgtgcccatactccaatcagaacacttccattgaggttggttccttattaacttatctatgttgttccaggaatgcaggcttcttgacgccagagccatgtcagtcgtatcca

SEQ ID NO: 153124 - DNA, 606 bp, Homo sapiens
gcaggctcccagcatgtcctgagactcagtccctgcattttcatccatctcatttgatgttgttttatgtgagaaaaacacaggaaataaaatggatgaagacagtgcttattgcacctctgcatgcctcaggaacacatcatgttgtggatggaataaatgggaggaacatgaagatttattccagccacacctagaagaatagaaattaccccctctcccactgcccccaaacacactgacacgagtcctagttaaagcccatcaaatggtaaatatctgtcaatcggcagcaggcagagtttgcttgtgttgactttactgctctcaatctattgatatatctgtttttcttaggggctcttagaaatgcaaaaagatatttttcctctttccatcaagtagcggaatgtatttgtgaggaaatcatttgtcaggctcttttttaaaaagttctattgaracttctttctgatgtgcccccacaatttcctgtgcccatactccaatcagaacacttccattgaggttggttccttattaacttatctatgttgttccaggaatgcaggcttcttgacgccagagccatgtcagtcgtatcca

SEQ ID NO: 153125 - DNA, 464 bp, Homo sapiens
tttaaatattggtatcagcctcagatacagaacatcttttctcttttcttttcttctcccctctccattcctctgtctgtgtcactccctctacctaacactcagttcagaaatcacaaagtcctttaatgaggtttttagatcagtgttctcaaccctggttgtaccttaaaatcacctgggaagttaaaaaaaatctgggtccactccagaccaattaactaagcctccctgagggatggagcccagacattggtatttttaagaagttcccaggtgattctcaatctaccgacaggttaagaaccattgttytacatcaaggtttcttcttcccttcgtctcagcccctcagatccacattcctattcaccccagagtagctttcattttgaaaaaaaaataaaaataaaaagcccacagattttttttctttcctttttgacactagtaaaattatttgt

SEQ ID NO: 153126 - DNA, 496 bp, Homo sapiens
tctccggataggatgtttcccaccttgaccccaacaagagcatctcttaacctgggaagagcatatgttttgtgtggaartgatgccaaaaaagcctcctgtgtggcaaggagccccgtgtgagagatgaggacgttacaaagaggaacttgagacagatcagattttcattcaaacccaagcatcctcagatcaaatcctggctgtgaaaacagatgaaaatcaggtttccttctattatagcatttcccacaatcttggtatgaattggtatgtacatccttgcacattttgctccccagagacccagcctagcctagctcatgagcgggtttgaggccagatggaaatagctcagaaaaggagaaattcacctgttttgtgtacccatatatagtcactagcccttctaataaggtggacttcccaaaccactcaaagtgcaagaatatgtggatatctgcagtgttcacatgcacatgtgacatttttacat

SEQ ID NO: 153127 - DNA, 580 bp, Homo sapiens
catgacccactacattgatgtgataattcagggtttaaaaaccattgagttatatccgaaaatctcaggggttctccaggtatttccctgttcttctttggcatatcaccattatcagcccacatttcacctcagctcacattagcttgttactgaagttcctcttcaaaccacacaccagcctgaaatgtttcagcagtgttccttcccttataattttttcagagaagagtaccagcaagtcaatttcacttcaatctccctctctccagccaacccggacatgtctggaaatttatagtgattttcagatggagagtatcccaactaggataggtttgtaatgttccattcaataagcatttattttatgtttccagcatgcctgggctaaatggcaaatacaygcactggaactattacagtgcagatggctacttttgtaccattagctggaaaggattcagcagatatccatcaggttaaacaagaagatatttggctgtcacctcattactcagccctgcttggctagaattctataattgtagatttcttctaaagtgtgactgcaaagccc

SEQ ID NO: 153128 - DNA, 328 bp, Homo sapiens
gcttgtactctaaatgtctccattggagaaaggttgaggggcatggcaagsgactatgccatccccaacttcccagagcaatcatggggaaaaagaaagcagagtgaccccctggggcagaggctaaacaatggttcctaactagattgttgcttcaagccaagaaccttacggctgggtgaaaattcaagactctgaagactctctgggttagcgttactgggaaaggtatgtgtattttggccaccaaatacttttcttatttggtgaaatgctacccatctcagtgcctttggaactttgtgttggcatcctcttctgagacagc

SEQ ID NO: 153129 - DNA, 568 bp, Homo sapiens
gatcgtagcatttccacttctgtcactatgtgtccccaaagcctcataatcactttttatttgaaaaatattttgttttttacagcaaataccatcctaataaagcatgctggcttgttagaatttatatcctatgaacccaaaccaatgatttaatacattattttgaagtcagtgtaattatttctttattatttattaacgtggaaaggagccatggcacagatatccacactggtggataacagttrtaattcaattcagctttggaatatattgtgaatttttacccattaagttttctttcctaatggtgtctgtattataaaacattgtttaatacatagtttttagtacaaattggctactggtggaagacagaggccaaaaattagaaagaggccagtgtaggctgaatttttttctactttatctctaggatagcgatattttattttgtttctttgaaatatctatattatttaaaatatttatgatgtgcttagattacttgtgtaaaaaagtagattcttacttgctgataaaaagtccaacacaaacaaaatat

SEQ ID NO: 153130 - DNA, 368 bp, Homo sapiens
gttgtttccttttcactgggggtagattatccagaatttttgcctctgctcttggctgttgttcatcttgtggttattttactcctcactgtccttccatcagggaatattaaaggaaaataagtgaatgaaaacttagctgtagcatctatgataaaaggtttgtcaagaagacgaytgaaatactgactaaaatgaagcttttcagtttatctgggttggtctgccccctatcgccacaaagatactcagaatggtttctagcttgtcaaaaaccaagagataaaaatgggcaaaaagttttactttcatgctaatgaagagaaccagatctaataaataaatatgaccctcttaatgtgaagccc

SEQ ID NO: 153131 - DNA, 613 bp, Homo sapiens
aaaactttatttacaaaaacaggtgacaagcaggatttgactcatctactgtagtttgctgacctctgctgtagactaaaactccttgacataaaatatgaacatgtgactttgtatttctgataccaagcacaatttctggcacagagtgtgtgctcaggaattgttaactgaatgaatgaatgaatgaccagtggaagagaaaaatctcataaatcttaacaatatgatgtgtttcatggtttgatggaagtatacttgtgttctttgtggggcttgaaaaggaatatcagactatagttggttgtgtttcagaacagggattctgcagccattgtacttgaatcccarctctgccacttcttagctgaataactttgacaagttatttaccctcctttcatgtaaaatgggaataataatactgtctatctcctagtgttattgggagggctacgtattgaaatatatttagtgtttagaaaggtacatggcatatagaaaggtgcataaaaaagtgtcagcttttgttaccattattaagatattattactgtcattggaggagtcaggaaaagctttttagggaatgttttaattgggctgaggttgg

SEQ ID NO: 153132 - DNA, 509 bp, Homo sapiens
ttacgacagaccatggcacataacatgtactcaacaacagtgttaatattgtttttctcattattattatcttttaaaaattttgggggggctcctctgtttcatgagccccagcatgggtaggccttgaattttctcattgcagctctattcttcctattatgargtaacttccttctggctttttgcagtagttggtctattattcttagtttttgatgatatggtaagttttcatcgttttctatcattttctgtgtctttttgtgtatactttatattggaaggtcagggacggccatatccagggctgccagacagccagcatttaaactcctcttaatcaaacacaaaccttggaaaaccccaatttgtttatcttcagtgtctaaagtgatcaacaatagcagctccaaatgctgtgctctttcctggaagtgactgtctgggtcaatctctgaatagttttgaggcagttccataggagttacttgcacgagaccccccag

SEQ ID NO: 153133 - DNA, 583 bp, Homo sapiens
tgtcagccctgacaactctaccattccttttgctttagatgtgcattttcagctatctaatgttcatttgcatgtgaatgtcctataaaggcctcaaactcattggaatataactgaattatgcaccccctcttttagttactctttcaattaatgtttttatcatctaccatactacyagtctagactcttcaactccccctcttgctcactgcctttcataagctgtcaagttcagaatattctacccaaaaggaacatggtttctgtctgcacagctgctattaaccccttgctgttatctctttctcatacacttctagtaaatgtctactacaatggatgtctaatatactcatctgagatgactttttgcctcgtactgccgtaacaatataccatagactgggtagtttaaataataggaatttattttctcataattctgtagaccagaagttcaagatcaaggttctggttgattcagtttctggtgaggcctctcttcttggcatgcatactgacgccttctctctgtgctcacctggcctcacatggcctttcttcattgcatgtgtgtatg

SEQ ID NO: 153134 - DNA, 583 bp, Homo sapiens
tgtcagccctgacaactctaccattccttttgctttagatgtgcattttcagctatctaatgttcatttgcatgtgaatgtcctataaaggcctcaaactcattggaatataactgaattatgcaccccctcttttagttactctttcaattaatgtttttatcatctaccatactaccagtctagactcttcaactccccctcttgctcactgcctttcataagctgtcaagttcagaatattctacccaaaaggaacatggtttctgtctgcacagctgctattaaccccttgctgttatctctttctcatacacttctagtaaatgtctactacaatggatgtctaatatactcatctgagatgactttttgcctcgtactgccgtaacaawataccatagactgggtagtttaaataataggaatttattttctcataattctgtagaccagaagttcaagatcaaggttctggttgattcagtttctggtgaggcctctcttcttggcatgcatactgacgccttctctctgtgctcacctggcctcacatggcctttcttcattgcatgtgtgtatg

SEQ ID NO: 153135 - DNA, 525 bp, Homo sapiens
gaataagaagcccaagataaaaaatgaatttcaattccaaggaacaaagagttgagagagagacagagagcaagagtgaagaaattatgggaaaaaaaataagaaattatttctaggccaggcccagtggctcacacttgtaatcccagcactttgggaggccaaggcaggyggataacgaggtcaggagattgagaccatcctggctaaagtagaccatctctactaaaaatacaaaaaattagccgggtgtggtggcgggcgcctgtagtcgcagctgctagggaggctgaggcaggagaatggtgtgaacccgggaggcgagcttactgtgagccgagatagcaccactgcacgctagcctgggcgacagagcgagactccttctcgtaaaaagaagaaaaagaaaaaggaaagaaattatttccagctgcctttgagggctcagaataaatgaagaaccagccagttgggaggaggaggtgatcatgtgaaacagagtagcctatttaatgctgtaccgta

SEQ ID NO: 153136 - DNA, 548 bp, Homo sapiens
tgccatacataagtggctcattacagtttcagcttgctgtttccctgcactgaggtgcaacactgcacaactctgcctgacatatttctctggcttggagctgaaggtaacaaaaaattctacctttaatacgtctgagtgtgactgtattgtgtcccaccatcaaaatacctttaaatcttataaaataataggtgagtagattggaaagtacatcagttgacgataaagagagaggcaagttgggtgattgtgtaattaaagcaacaattgtgtttgactatgaacactaagctgaagaagaaggaaagtgaaggtgtattgcaagtaaccatgaayaggaggtacaaatagagtcaaaagattttgcactgcagctggtgcagttatctgtactgactgtggagctggttacctgagataaagtaacacaaatagttgttaggagtcagaaagtaaaagaaatgaaaatccaaggtgctgtttttatgatctatatagatattgatgattatagtagttttattattctaacaacttcagtaacc

SEQ ID NO: 153137 - DNA, 606 bp, Homo sapiens
aaaataataggtgagtagattggaaagtacatcagttgacgataaagagagaggcaagttgggtgattgtgtaattaaagcaacaattgtgtttgactatgaacactaagctgaagaagaaggaaagtgaaggtgtattgcaagtaaccatgaataggaggtacaaatagagtcaaaagattttgcactgcagctggtgcagttatctgtactgactgtggagctggttacctgagataaagtaacacaaatagttgttaggagtcagaaagtaaaagaaatgaaaatccaaggtgctgtttttatgatctayatagatattgatgattatagtagttttattattctaacaacttcagtaaccactgagacaacaaaaaattattattcactgttatgttgactacataaaattacaagtttaacgtgacagtaccttcctgttcctttttaaaaagatattttctttctttttcataaaaatttttaaaaaaattatttatagctaagtattcatggatctagtgtatctatatttatgagcattccttgctttttataaataccctttgtctaataaacttttgtgtaattaaacattaaatt

SEQ ID NO: 153138 - DNA, 473 bp, Homo sapiens
atgaattccgtatctgttaagtaaatatactttatgtgtgcaagatatttgtagaaagctatttatagcagcattgattatgttagcaaacattggaaatttttcatcaataagattttattgtaataaattgttacattctttaatgaaaattactacaggccttaaagtgatatttaaaatgatatgtgtgcttatacacatatttatatagatagcaaacactataaatacattttaaaggacaagaaactaattccaaaaattaacagtgacttccyatggatgatgaggttataatggatttcacttttaaaacttatttcctaaatttcttttataaataattcatgcacctatccattaatttacatttttcccctttggtttccataacaaagtagactctatacctgtgatcttaaatcttatgttctagctttgaaaacagacattaaataaatattttaaaa

SEQ ID NO: 153139 - DNA, 578 bp, Homo sapiens
atttcctttcttttgctgccttagggtttagagcttttctttttctagatgttttaggtagaaggttaagttattggtttgagatttttcttttctaaggtaggtatttactaccataaatttccttttaagtatacttcatctccaaatgtaacactgcattttcatctttattcacattttatctttattaataattttccttattatttcttatttgacccattggttatttagragtctgtcgttgttaatatccaaatatttattaatttattaagattctgttaataatttctaatttatttttattacgatcagaaaatgtgctttccagaatttcttggctctttcctgaacatgtgcacagtcctaggcatgtaaatggcttcctgggtgcccagaagtatgttggagatttaaaagtaaaagtcttatagatatctcattttcttttaagctttctggtaagtctattgtttgccccaaatgttactcattgcctcaggcagtggtaagttaaaatactggccagtgaatgttttctgagtctgttagcactgagcatgttctatcaa

SEQ ID NO: 153140 - DNA, 490 bp, Homo sapiens
ctgaagtaagagccacacacacaaaaaatgattccacaacagttttgtggaatccaacaccaacttaagatattgaccagattgtgtatgcaattgtttggaaggtgtaacttcagcaagattgcaagcatcttgattagctattgcaattttccaggaagctgatattgtcctcctgtgatataattgtgaatattcaagtctattaggtgctgatggaatcatcttctgcatatgcaaagacaggttcaaaaacaaggggttattattcattattaattataataatttattaaatgtctattgtaagttctggaaaagggtaaagcttgactctacattccatgaatgttaacctacagtatggyttatcatacctacagaatgggatctcaccatttagacatgaggatatcaggaaaaactgcttttaaatcttgtgatgttgcttaacactggtcctcactgttagtggtagtacttaatatct

SEQ ID NO: 153141 - DNA, 558 bp, Homo sapiens
gatcttatatatagaaaaacctaaagactccggcaaaaawctcttagaactgataaataaattcagtaaggttgcattatacaaaatcaacatatacaaattggtagtatttctatacaatagcaaactagctaaaaatgaaatcaagaaggcaatcttatttacaatagccaatagctacaacaaattcttagaaataagattatcaagaaggtgaaagacttttacaatgaaaactataagatgccgattaaagaaattgaagagaacacaaataaatgtaaatatattacaggctaatagatctgaataattaatattgttaaaatgatgatactgtccaaagcaatctacagactcagtgcaaccactgatcaaaatatcaatggcatttttcaaagaaatagaacattctaaaatgcacatggaactacaaaagaccctgaataatcaaagtaatatgagtagtaatcaaaacagcacggtattggcataaaaacagacatatagacatacagacaatatagacatatagacaatgtaacagaatagagaacc

SEQ ID NO: 153142 - DNA, 657 bp, Homo sapiens
aaaagctgaaaatgtttcctctaaaaactggaataaggcaaagatgcccacttgtaccattcttatttaagataatactgtaagttctgccagtagaatcggtcaagagaaaaaaaaaagacatccaaattggaaaagaggaagtcaaattgttcctctttgtggcgacatgatcttatatatagaaaaacctaaagactccggcaaaaaactcttagaactgataaataaattcagtaaggttgcattatacaaaatcaacatatacaaattggtagtatttctatacaatagcaaactagctaaaaatgaaatcaagaaggcaatcttatttacaatagccaatagctacaacaaattcttagaaataagattatcaagaaggtgaaagacttttacaatgaaaactataagatgccgattaaagaaattgaagagaacacaaataaatgtaaatatattacaggctaatagatctgaataattaatattgttaaaatgatgatactgtccaaagcaatctacagactcagtgcaaccactgatcaaaatatcaatggcatttttcaaaraaatagaacattctaaaatgcacatggaactacaaaagaccctgaataatcaaagtaatatgagtagtaatcaaaacagcacggt

SEQ ID NO: 153143 - DNA, 313 bp, Homo sapiens
tccaggggctctgggagtggctgccaggtgagttgracagtccgatttccagtggggtcccgcacagatgggacacggcttaggaggaatcctgggctgcaggcattccttggcctggtggtcagatttctggcacttgtagcaagctcctgggggaggaggttctggaggaacgcctggctgctgtggttcaggcgtttggaagttcttgtgtgctggagatgtggctggggtttgtctcacagtggaggcaaggaattgcaacttttttctattattgtacaccttgaaggcgaggttaattaaatcctgt

SEQ ID NO: 153144 - DNA, 313 bp, Homo sapiens
tccaggggctctgggagtggctgccaggtgagttgaacagtccgatttccagyggggtcccgcacagatgggacacggcttaggaggaatcctgggctgcaggcattccttggcctggtggtcagatttctggcacttgtagcaagctcctgggggaggaggttctggaggaacgcctggctgctgtggttcaggcgtttggaagttcttgtgtgctggagatgtggctggggtttgtctcacagtggaggcaaggaattgcaacttttttctattattgtacaccttgaaggcgaggttaattaaatcctgt

SEQ ID NO: 153145 - DNA, 313 bp, Homo sapiens
tccaggggctctgggagtggctgccaggtgagttgaacagtccgatttccagtggggtcccgcacagatgggacacrgcttaggaggaatcctgggctgcaggcattccttggcctggtggtcagatttctggcacttgtagcaagctcctgggggaggaggttctggaggaacgcctggctgctgtggttcaggcgtttggaagttcttgtgtgctggagatgtggctggggtttgtctcacagtggaggcaaggaattgcaacttttttctattattgtacaccttgaaggcgaggttaattaaatcctgt

SEQ ID NO: 153146 - DNA, 313 bp, Homo sapiens
tccaggggctctgggagtggctgccaggtgagttgaacagtccgatttccagtggggtcccgcacagatgggacacggcttaggaggaatcctgggctgcaggcattccttggcctggtggycagatttctggcacttgtagcaagctcctgggggaggaggttctggaggaacgcctggctgctgtggttcaggcgtttggaagttcttgtgtgctggagatgtggctggggtttgtctcacagtggaggcaaggaattgcaacttttttctattattgtacaccttgaaggcgaggttaattaaatcctgt

SEQ ID NO: 153147 - DNA, 564 bp, Homo sapiens
taaaattatatatttaaaaatatctaattagcatattaattaatgtttcatttacttggaggaatgaaaactttactcctgtaatcaaataggtatgtttactgcaattcaaacatagtattcattagcacagcaaaatgctcagaaactgctacataaagtgccaactacattaactaaactgagttcatcatgtcaatgaaggaatgacaagtggaaagaaaactattttatttgtaaaaatgaatggatagatttttatggatccaattctagtgtttgccacagtactatttcatttggtcaattagagaaactgaacagaccatttgtaaatgtcatcctaggtcagttagagctgcagaaatgcctcagtggttcaagataattatgaggcacacagwtaaaaaatagaaagtatgaattttagtactgtagatttagtactgtagtttcaatcccacatattaagaaaatttacatgatcatgtacatttgacttattccacctcagatatttgcaaacctgctcgtgttcatttgtaaacgtctgaaaatatatta

SEQ ID NO: 153148 - DNA, 418 bp, Homo sapiens
agttatatttccaagaaatttgtctatttattctaagtcatcaaatttattattgtaaagttgtctgtgatacctttgtattatttttataatattttcaagatctgtagtgatacctctcttttcattactrtaattggaaatgtgtatttttaacctttttcttcccatcagcattgctagagagttttccacatttttaaagtttttcagagaataaaattttgaatttctccattgtatgtctggcatatttgccattaatttattctattaccattcttttgttctttcttctacttcttgagattgattaaccgtatttgtttagcttcttgagatgtaagcttacattaatgagtcttttttattaaattcaaaatatgagtattctctggttttcatttggataagtttt

SEQ ID NO: 153149 - DNA, 520 bp, Homo sapiens
ccagcagatctgatatctggtgaggactccytctccacttcagtggtggtgcattgttgctgtgtcctcacatggtggaaaggagcaagggagctccctggaacctcttttataagggtactaatcccattcatgagggtagagccctcatggcttaatcacttctcaaagaccccacctcctaatacaatcaaattgagtattgtgttttaatatatgaatttggggaggacatgaatatttatatcatagcagatggcacttaaaaaattatatgcttagtatttgagaagtactcagcatttcaaatttattggacataatttctactagataaggttcctttatttcaggcattttaaaatttcttaacaatagagaacgtcttgatacttgtttcctatgtttaagctgagtgcatttgtagggcttttggtggggaatctcagaatttcagagtaaggattgtttttcttatggctagtatggcacttggtcagtagcattgtttagaatttat

SEQ ID NO: 153150 - DNA, 492 bp, Homo sapiens
actccctctccacttcagtggtggtgcattgttgctgtgtcctcacatggtggaaaggagcaagggagctccctggaacctcttttataagggtactaatcccattcatgagggtagagccctcatggcttaatcacttctcaaagaccccacctcctaatacaatcaaattgagtattgtgttttaatatatgaatttggggaggacatgaatatttatatcatagcagatggcacttaaaaaattatatgcttagtatttgagaagtactcagcatttcaaatttwttggacataatttctactagataaggttcctttatttcaggcattttaaaatttcttaacaatagagaacgtcttgatacttgtttcctatgtttaagctgagtgcatttgtagggcttttggtggggaatctcagaatttcagagtaaggattgtttttcttatggctagtatggcacttggtcagtagcattgtttagaatt

SEQ ID NO: 153151 - DNA, 470 bp, Homo sapiens
tgatctccaaagattagacaagtgaaacgatttgtgttttctagtatgttgatctgtcttctcactgacagctctacttaaaagaaacatttgaattttatcactctttcttgaggatgtaagtcattacttactctattttcataatacaactcaatgaagaaaagcataggtttctaagtaatctgtcaattgatgtatgactgatagtgttcarttcactcatatttattttaaactagatatcttacaattggatgagtttggttccaaggcacaggacgaagggcactgggcatcccagaaatgtcatgtagaattgcttcctcacttgctctcactagatgacatcacactccatagcagtttgaaaggaaaacctagtttttaacagaaactccacacataattttctacttttcgtttattaaagggaacaaggaaggagcactatcgtaccttcaatatgc

SEQ ID NO: 153152 - DNA, 450 bp, Homo sapiens
tacaactcttctactttacaaataattctacaagaattagggaccatagccccaaacatactgacatacgagtaaaaggagtaattgttaatagcttaaagggtgtatgttttatgacaagtataatactgacttccttagagaggcaaattataaactattatctatagtcactaagtaagaaatgaactgaaaataattcacttcttagtaactataaaacacaactctcaagtgctttatacaactaaaatgtactgtaagtttgagatgtgctacctgttgtacaaaagtaatgggacttccctgttctttcaacagcaacagtaagaagtagttttcctgtttgaagttmttgctgtcattttacaagaggcagactagatattattggtaagattcaagcaatgagctattattgctaatttagataataacattgtccatatt

SEQ ID NO: 153153 - DNA, 513 bp, Homo sapiens
atcaatggatccagaaattaatttttgaaagaataaataagattgatagaccactagctagactaataatgaaaaaaagggaagatccaactctagacagattaaaagcttaaatgtatatcctaaaattataaagcccagaaggtaacgtaggaagtaccattctggacataggccctggcaatgrttttatgttgaagactctgaaaaccattgcaacaaaaataaaattgataaatggcacctaattaaactaaagagcatctgcacagcaaaacaaaatatcaacagagtaaaaagacaacctacagaataggagaaaatacttccgaactatgcacctgacaaaggtctaatatctagaatatataagaaacttaaacttacaagcaaaaagcaaccccattaaaaagtgggcaaagaacatgaacagacagttgtctaaagaagacatagatggggccaacaagcatatgaaaagatgttcaacagcaataatcattagagaaatgc

SEQ ID NO: 153154 - DNA, 568 bp, Homo sapiens
ctctacaaaatcaataggatagtagaagggagagaaaacaaacattagtggacaaatgctcttttatggaaaatataatatgatatggagacacatatgagtatcatataaattagcttgggagggttccctagggatagggaacatttcctaagaaaaccatctctaaataagtccagaaattgacaacattggtagaaagaaagaggttcagaaagaggagaaaatagaaactatttcaagcaaaaagggaagcatttcaatgatatggatgtgtgagagagacataatgtattcaaaagtgtataaagtgtcaggatgagtgcagaggtctaacatgagamgagcggaatctagatgaacgaaagactttgtaagttatgtgaagcagtttagactgaattctaagggtacttaaatactgggtttgtgtaataggtaattctaattgaaacgtatttagggatagaaggttggaagttttattgaaaatatagatagtatgcaaagaatagccattatggaagtaaagagacatcaaaagccacttgaagtgtggttattggca

SEQ ID NO: 153155 - DNA, 472 bp, Homo sapiens
ctagtgtgcggttagataaatgtgaagggaatatatatggtgagaaataaagagacatggagtctattttaaggctaagaaaaaaggcttctgaggtttgcttcaaggttatatcttgaaacctagtggaaagaaaaaaagaaagttttaaaatgaattttgaagttaagctgcccagttacatgtatacaattaaarattatgacaatttttaaacaaaaaaacaaatttctggataaaatatgtaataaatgaatattgtttaaagcctttttattgtggtaatttgtttttatataaagcataggtgtacatatatctatatataagaatatatgataaatatgctttatatttcggtactaaatgataaagaaaattcataaaatatattcttagtaaggcatcacattctggtcccatttcagcctgaatgatttcattatttcttttaagacagatctgatagcac

SEQ ID NO: 153156 - DNA, 472 bp, Homo sapiens
ctagtgtgcggttagataaatgtgaagggaatatatatggtgagaaataaagagacatggagtctattttaaggctaagaaaaaaggcttctgaggtttgcttcaaggttatatcttgaaacctagtggaaagaaaaaaagaaagttttaaaatgaattttgaagttaagctgcccagttacatgtatacaattaaaaattatgacaatttttaaacaaaaaaacaaatttctggataaaatatgtaataaatgaatattgtttaaagcctttttattgtggtaatttgtttttatataaagcataggtgtacatatatctatatataagaatatatgataaatatgctttatatttckgtactaaatgataaagaaaattcataaaatatattcttagtaaggcatcacattctggtcccatttcagcctgaatgatttcattatttcttttaagacagatctgatagcac

SEQ ID NO: 153157 - DNA, 476 bp, Homo sapiens
aatttatttgataaaagctgtcatacgttagaagtagacacatttttctaattgattaaactggaaataagattatttttacagaaataacactaatattggatttatagatatttctcatttttcactattattattctttcagaaaaaaagaatagatgagtctaaaattaaactatcattgacctaaacatatgtataagtgtwtgagctgtgttaattagtcattttatacatttaaaatgcattttcaaatgtaatactacatttaggttttttactacattcagattttatttttattagattcttttttttccaagctttaaaagaaaccagtagattatgactatatgtgtatttcattgatcaatatcaaaaaggcatcagatttctctctgacatcacatactttatatcttataaaacaaatttcctactaacgaacttgcccttattgaacattaattgtattc

SEQ ID NO: 153158 - DNA, 476 bp, Homo sapiens
aatttatttgataaaagctgtcatacgttagaagtagacacatttttctaattgattaaactggaaataagattatttttacagaaataacactaatattggatttatagatatttctcatttttcactattattattctttcagaaaaaaagaatagatgagtctaaaattaaactatcattgacctaaacatatgtataagtgtatgagctgtgttaattagtcattttatacatttaaaatgcattttcaaatgtaatactacatttagrttttttactacattcagattttatttttattagattcttttttttccaagctttaaaagaaaccagtagattatgactatatgtgtatttcattgatcaatatcaaaaaggcatcagatttctctctgacatcacatactttatatcttataaaacaaatttcctactaacgaacttgcccttattgaacattaattgtattc

SEQ ID NO: 153159 - DNA, 560 bp, Homo sapiens
cacagtacctggcacttaatagatggtcaatgaatatttgtccagtgaatgagaatcctcaargagaattcatgtttctggtctcaacctcctggcttcaagtgattctcctgccttaggctcctaaaatgctgggactacaggtgtgagccactgcacccggcccgattcatgtttctgtaccattgctctagttcattgatctctaagtggtgttttgtatatcactagctaatgtgcatggtgattaactgctaataaatgtcaaagctgggacttgaacccaggtcttctgcatgacaagcaagcaacttaagagtttaactggaaggcttgctgcttaaatggctccctcttgattcaagagtgaaaggggtatggtgattagaggcttgccctaggagtactcctgctccaaagtcaatgatctagaactgtaggtttagagatgtggataagtaaatgattcattgggaaatggctctgagccttctgagaaccttaagaaacatattcttttttactcctggctggtcatgcataggacttagaaacgaatg

SEQ ID NO: 153160 - DNA, 523 bp, Homo sapiens
gttcgagtcctgagtgctttctgttgcatcatactacatcccaaggatctctgaagctttgttactaatctgtcataagtttccaactggtaaaacataatagctgcatgtggtagctactaacgtgtcctgaagctgagtagaggaaaagagcayggtgccaggaagcaaataccaatgcacacatctctgatgtcacactaaggtctcagaaatacaggagtctccatgtgtctgttcctctaggggtgagtctgaaaaaactctaaggggatgagaaactcatacattaggtagaaaaagataaaagtggtaggcaaaggaattttacatttaagattcaaggaaaatgacataaacattcagctcagaaaataaaaacttatactgaactgtaacagcaaagaaattctctctggatcccatggaacattgcagactctgatagaaggaggaaatatgtgattcaaaaaggcatactctgttaggtcaatgtgatgtcctaaaattcccaatatccata

SEQ ID NO: 153161 - DNA, 434 bp, Homo sapiens
atttagtgataacattaattattgcttccatttattgagcacttactatgagctaagaactatgctgaacccttcgcaggccttattccatttaatcttcatagcaattctctaagaaagggactatgattcctctcttgtagatgagaatatgaaggttcagagaagtacacttgcttgctaaatacacagtttgtatgtggaagagctggattttgaatccaggctgtctccacactccctgctagtaatggctcggcctcctcaaatcagtctgkgttccttctattagcaccctttcccccagaacagtgactgtcagcctgggctacccagtggctctcagcatgcgctacccattggaattacctattacctccaatgggtaatagggaagctttaagaacttgcatgctggggtcccaccctgaggc

SEQ ID NO: 153162 - DNA, 401 bp, Homo sapiens
aatgaggcagaggtcagggatcaggcaagagctggggatgtcaggaatgggtgagctccatgactgagttattagagcatttttcaatcaccatagagaccttgaggtattttggactgaagggttggragagagggatatggatcctttatgttaggtggctgaaaataaaataaatgtctaagaactaaatttggaattaagaaaacggggtttgccttcttgctgctgcataatttactctgtgacctgtgtgaatggtgtcacgtccctgggccatctgtgaccagggggtgctagctgctcagcctcctttgtagggttgaggcagggatcacacaaattgcatcacaaatagagatttgccttaacatcacgaacatggcaaaacccataccttg

SEQ ID NO: 153163 - DNA, 459 bp, Homo sapiens
tgaaaaatggactaatacaaggaccatctgggaggaccctgtctcgtactagtccagaatgaaatttttatttctatgtatgttttattgtttaggatgtaaatgtacatctgaatttcccgcaaccccttttcttttttctgcatttgtggttttgttctgaattttaaccaactttattcactatagtagtttcttttaactctcaattggaaggttctgggacaytaaacaaaacaaaacaaaatgaaaaagtctcttttaaaaatattattttattgagctatttgctgcacttattttacacacagcatgatgattactttctcaggctttttttctttcctttctttctttttttcttttttgtttgtttagcaataactagataagatatctttaggagacaggcatagacacccaatactaaatgcctagccatgtttgagggagtttcca

SEQ ID NO: 153164 - DNA, 590 bp, Homo sapiens
gtactgtgatatgctttgccaagtcagtcatttcaaattaataatatgatagccatttctttataaaggagaaattgagatgtttaaaaaattacttaaggcaacagatttctgagaggttacattagattttttcaaactttcaaattagacttaaaaaataagtagttggctatggcagggagagttgtggttcaattttagtatattttcttgagtccctggatttcatgctagaatgacttactgatagcccaaataaagtgttgcacttcatgtgattttcctagtctgctttcagctgctccaatacaatgtaaccatttcagatatttgatgacatcagatttaaaagacaatttaaatcgtgcatttgagaagcatgttcagattagyggagtacactgcagaggccaattgccaaccttcaaatcccaatttcaccacgtacctggtgtgttcacttggcacacctgcttggcctctacaaacctcagttctagaagaaagttaaatattttttaaaaatctataccataaagttgttttgaatatcacattaaataatgcatgtaaggtgggatggtttg

SEQ ID NO: 153165 - DNA, 574 bp, Homo sapiens
agaaaatcctttgggaagttcttgcttgtgtaaaagttctggacaatcacaattagcaattaaagcgctataattagaggaaagttaaaattaaggatattagccatatttctaaatgtttatggttgaattcctggaaatatgtagaaattacaagtatgcaattatgtgatgccacacacagcttatccacaaagcaatttttggtgtcaacatcagagaccagatcctgtggcattttttgtattgtgtcctttgatggaatgacagaacatagagaattttgtctccaattttgctccttgcagagaatgcaaaaatatattggtttgtttgtttgtcctacaatttatcacatgattctctaattgcaggagaattgggaaataaagacagaggattaagaggagacctacaggaatgaaataacaatagccagaaagtaacagtgtctgggagacatcactatagaagcattacccctcagttcaggaactcttgcatttggcttttttttwaaaaaaaaaaaaaaaagtttatgtggaaatatttgaggagtttttatgtacatata

SEQ ID NO: 153166 - DNA, 570 bp, Homo sapiens
accctgcaccctccttccatgaccctacactctccttccatgaaccctgcacccttcttccatgacactgctccccattacctcacctcccctgccctccagtgggagtgtgcagggtcatggaaggaggttttgtcattggtactgttttgttttaaagaggggagaaaytgggccgcttaaataatgatgagaaaaagtcaggtggaagaaaaattttgaaacagtagatcaagtaaggcctgagaagaggcaaggaggggtagaaccctgagttcaatagtccttcattttgtacttatgcaaaacacacacacacacacacacacacacacacaaataacacacagatatgtatctattctaatacctttctatgggccttctaaacctcttttgaaatagttgtttgtagtgagctccatgtggggaggaattatgtgtatcttattcattattgtatttatcatgcctataatatatgcttagtaaatgtgcagttaggcatatcaggtgattgtaaatatttacataatgcacgtcgtaggaaggagaacatagtacaaggac

SEQ ID NO: 153167 - DNA, 547 bp, Homo sapiens
agatctgaataggctgcagttcaaggagtttgaatctagtctacaacacaccggatggtttggtttggtgtggtttggcccaacttttctacttttgcaagttatagtgtaacctcttttgaaaagttgattttctgtttcaattctccattcttcttccttcagagttcttctgccagtagggcaaattttatctttattagtacgtatttgtagactatgtattaatatatatacattttattgaattttacacttargatacatgcactttcttgacctatattatacttgaattaaaattcgataaaaccaaaaaaagaaataaatttcctcatttctactctgcttctcttctctttatgttccatggttgttagtccatcttccccactgtaatgtaattccttttcagtcctgtgatcaggctggatactttccaagtcctccttgggaatgtggccgcctctgagcctacacatctttcctgagaaacaagctctcctttcctctctaagacctattctctcctcttcccacaggacac

SEQ ID NO: 153168 - DNA, 547 bp, Homo sapiens
agatctgaataggctgcagttcaaggagtttgaatctagtctacaacacaccggatggtttggtttggtgtggtttggcccaacttttctacttttgcaagttatagtgtaacctcttttgaaaagttgattttctgtttcaattctccattcttcttccttcagagttcttctgccagtagggcaaattttatctttattagtacgtatttgtagactatgtattaatatatatacattttattgaattttacacttaagatacatgcactttcttgacctatattatacttgaattaaaattcgataaaaccaaaaaaagaaataaatttcctcatttctactctrcttctcttctctttatgttccatggttgttagtccatcttccccactgtaatgtaattccttttcagtcctgtgatcaggctggatactttccaagtcctccttgggaatgtggccgcctctgagcctacacatctttcctgagaaacaagctctcctttcctctctaagacctattctctcctcttcccacaggacac

SEQ ID NO: 153169 - DNA, 526 bp, Homo sapiens
tgttcaaaactgcatcttttcaggggtgactaaaaaagaaacttccaagccactagtccctggtggaatgtggaacaaaagcataaaatccccaaactataaaaccagcccctatgcccatacatgtatccaatgataaaagatgaaatgtgcacgggctaaggagctaaagcacaaccttttgatgaaaagtggcttttgctgacttgagacctacccctgcacagctgaactaaatgacaaaaacaaggggaaaataatytaagctgggacatcagagcctacactgccagggaaatagagttcacagaactagttcagccgagtcgctaaacaaacagatgaaacaaacagagagcaaaaacaagccccagtcgggggagaggggtagagtcagtacacagattagctacaatacattgtctaaaatcgtcaagattttaacaacaacaaaaaaatacagaacatgcggagacataggaaagatgacccatattcaagggtttaaagaggaagcaaaagaaat

SEQ ID NO: 153170 - DNA, 613 bp, Homo sapiens
gcttgcctcgtccctcgcaaatgttccaatcacggttttccatcacagcagctacagctctgaagttcattgagaatcatcaatctgctcatataataaatctgtgaagacacatatctttcttctatctgtccttttcagcttcctttgagaatagaggatctagacagtgtgtgtgtggctttacygtcttggtgaatttagtactatttgaatgactttcccgtgattttctagcaagaaacatgatttctttttcaagtttcagggtatatcactcaatttttagaattaaaataaatatctagatttcttcttgtagaaaacaaaccagtcctatatctatattttaatgattatttaaatcaaaaaatttccttcatattaatgtaaaaactgttaactataagaattccaatttttaaatgctgcactttggtcattaatgatgctacacacccctttaagtcaattagagccctgctcaattatcaaaattgagtaaaaattaaatatatcgcatgaaaggggtaacagaatgttagttttccatcactaaagaaacacctcttcaacaacaaagctatttggcaaaccaagtttccaccaactc

SEQ ID NO: 153171 - DNA, 616 bp, Homo sapiens
cattctaggtgagagatatctaaaagcaaacactgaagggcagcaacaggtcaggaactgactgggagcagccaccaaagggacataagctgcccagcagaggacaggactcccagcccaactccacagacgcaggttttgataccactcctttcagttaaataacagaagaagcacaattcagagaagagggctcaaagataataaactattagaatatgtgtattataatgctttggggatttaacaaatgtagttaaggattactcttgggcattgtgtaaaatttttcaaaaaatattcgggtaatccgcaactgacctcaaaagaagggtgttgtmaggagtgccaactcctgattggtcatattgaggactggagtcaacgtccaaagccctgcatagggaagagacctggacacatgtttctagccagagctttgattactgatttctggaggcacatttagaaccagctgactttgcatgcccttggggaaaattgttcatggtctggctgggtcctaaaacatccattgaaggtaaaacatcctgcaactctatttcctaaccaaagaaaaagtgaaaatctgaaatgcaattagagccaggacata

SEQ ID NO: 153172 - DNA, 545 bp, Homo sapiens
  misc_feature (1)...(545): n = A,T,C or G
gaatattacaatcatggtggagcgaaggggagccagaatgtcacatggtgagagacaaagcaagagagagaggaggagtggcatgctactctaaacaaccagctctcacatgaaatcacagactaagaactcactcaatgcggcaaggacagcactaagccattcatgagggatccgcccccatgacccaaacacctcccactaggctcccccttcagcagtggggatcacatttcagcatgagatttggagagaaccacgtccaaaccatatcacctgggaactgctggctgtaaaattatgcatacttggagttaatagggaaccatctgtgggaggaggcttcctgagtgcraagccaactcagaacaaaggagactgggaatggagaaagaccaagttttgtggactctgagtccagcacagtccttcttcccatgcagtgcctctacttttcagttacatgagtcaaaatgttctcattttagttctactgtatgcctatgcctatacctatctatgtctatttatcttatgannnnnnn

SEQ ID NO: 153173 - DNA, 545 bp, Homo sapiens
  misc_feature (1)...(545): n = A,T,C or G
gaatattacaatcatggtggagcgaaggggagccagaatgtcacatggtgagagacaaagcaagagagagaggaggagtggcatgctactctaaacaaccagctctcacatgaaatcacagactaagaactcactcaatgcggcaaggacagcactaagccattcatgagggatccgcccccatgacccaaacacctcccactaggctcccccttcagcagtggggatcacatttcagcatgagatttggagagaaccacgtccaaaccatatcacctgggaactgctggctgtaaaattatgcatacttggagttaatagggaaccatctgtgggaggaggcttcctgagtgcaaagccaactcagaacaaaggagactgggaatggagaaagaccaagttttgtggactctgagtccagcacartccttcttcccatgcagtgcctctacttttcagttacatgagtcaaaatgttctcattttagttctactgtatgcctatgcctatacctatctatgtctatttatcttatgannnnnnn

SEQ ID NO: 153174 - DNA, 608 bp, Homo sapiens
ccacccaaatgggcacctggggattggtctttccaggaaccttagagtaactgagtagaatggcttccaaaccttgccaaagaggttcaagaaaatggggtacttatctaccaactctccactcattggttgaagattgcttctggggctttgaatcttggagaaaaccccaaggcagagaagaagaaagtcttggtgctttagatgagaaactgtcagctggcaagaaaaaagtctaccatttctccaagtgattagatccagagaaataagagtggggcatsagtagtcagccacacaggccatttttatatagctgaaaaccttaggtttgtcatgagaaatgacatttattttctccagcaggaagagggtttgactctttcctgaaaaaattacagtggaatgatttgggacaggtttctcagtagcacactccagtaatattacatgacatatgaacaatatagtagcagaagcatgagaaaatgctaagtgaaatcctaatgtcaagtgaaaaaaatcaggttataaaactgtacaatttcagctatgtgagaaaaatattttataaagaaaaattaggctagaaagaatataccaagatg

SEQ ID NO: 153175 - DNA, 566 bp, Homo sapiens
gcaatggaagactacagttcacacaaaaggaagtgctcatttctaggcttgatcctggggccagtgaaaaactctctaagggagtaytccccttgctatatatggttggcccaaatataaaccaggcttgtttttcagcttcatacttagtgagtcaatatttgcaaaaatgctgcaaatatcaccttatggaaatgttattacagtgttcttgtggtttacttttattgtttgcttgttgtttttctactccaagtttattataaggcctctttcaggcagtttttcagcctaatgtagaatggtatggttcagtgcataaacagccatacacaccctctcatgtccagaattgatcaagtaaactctgacttctcatttccttagacaggattgccccagtcccaaagggaaggaaagctggcacagtaggtatttacccagtgtggtatgcaggggtagtgcaaccatactgtgcaaaggccccagcacaaaaaagaaaagtgcactctttctacaaattggggccagttctctgttgtttctgttctgtttgtttttggcgc

SEQ ID NO: 153176 - DNA, 652 bp, Homo sapiens
taggagctaatatttacaaaaacaggactgtagcagtcgctcatgcctgtaatcccagcactttgggatgccgaggcaggcagataacctgaggccaggagttcaagaccagcctgcccaacatggcaaaactcgtctctactaaacatccaaaaaattagccgggcgtggtggcaggcgcctgtaatctcagctacttgggaggctgaggcaggaaaatagcttgaacctgggaggcagagcttgcagtgagctgagattgtgctastgcactccagcccgggcaacaagagcgaaactccatctcaaaaaacaaaacaaaacaaacaaacaaaaaaatatatatataggactgtagcagaacaaaatgtatgtctgtatgtgtgtataatttcacataacctctgccaactaggtgttattatattattctcattttataaatgagaaaatggaagctcagagaataagaaatcacgcctattgcaaacagatctaagtgttaagctgagacttgaagcttgtaccgtcaggttttaagatcaacattctttttaccccatcatgtgaaatgttactaaaaatccagcttccacttttagaaatttagacctacctctctccagcctcctcttggcaagcagatatggcc

SEQ ID NO: 153177 - DNA, 599 bp, Homo sapiens
atctgcaatcagaatcaggatctgttgttaaagaaatgaaaagcaggctgagcatggtggctcatgcctgtaatcccagaactttgggaggccaaggccagcagatggcctgaggtcacgaattcgagaccagtctggcaaacatggtgaaaccccatctctacaaaaatgcaaaaaaattagctgggcatggtggcatgcacctgtaatcccagctactcaagaggctgaggcaggggaattgcttgaaccagggagatggaggttgcagtgagccgagatcgygccactgcacttcagcctgggtaaaagagcgagactctgtctcaaaaaaaaggaaaggaaaaggaattctagggaggcaaataacaactatttatattattattattaccatcataatcattttttagctaccattatatatatgataccatttaatccctgctgcctggcacatagtagctacataatacatattgaaggaatgggtattttactgatgataaacgtttgttcaacgaaactgccagacagggctgccaagagtcaggtgcataaaggaaagcatacattacttccttgaaacatacgttatc

SEQ ID NO: 153178 - DNA, 503 bp, Homo sapiens
cagcactagggagatggtgctaagccgttagaaccccccccccscgccccgtgatccaattaccacccaccaggcctacctccaacattgggggttacagttcaacatgagatttgggtggggacacagagccagatcacaccaattaatatctccatttaattgttgcagttatattctggaaaacataataccatgctgatataatctaaggatacagtcatgcctggaataggagatttggtgtgtgttgcaggttggaggggtgcctatctatgaggaaagggtgagtcctcaggtgtctcttttattccagaaaggcacatactgaagggcatcagtggcagccatggtagagtgagaggaggtgtttcctaagagactaaatgaggatgtgtgagagaaaactcggccataatatgggctggctagatagtaaccttaaggaacatgttacaagagaatgatgtaagatggtaacagcataatgggtttcaggggtt

SEQ ID NO: 153179 - DNA, 503 bp, Homo sapiens
cagcactagggagatggtgctaagccgttagaaccccccccccccsccccgtgatccaattaccacccaccaggcctacctccaacattgggggttacagttcaacatgagatttgggtggggacacagagccagatcacaccaattaatatctccatttaattgttgcagttatattctggaaaacataataccatgctgatataatctaaggatacagtcatgcctggaataggagatttggtgtgtgttgcaggttggaggggtgcctatctatgaggaaagggtgagtcctcaggtgtctcttttattccagaaaggcacatactgaagggcatcagtggcagccatggtagagtgagaggaggtgtttcctaagagactaaatgaggatgtgtgagagaaaactcggccataatatgggctggctagatagtaaccttaaggaacatgttacaagagaatgatgtaagatggtaacagcataatgggtttcaggggtt

SEQ ID NO: 153180 - DNA, 584 bp, Homo sapiens
gcaattaattatttgcactgtttaaataataactctggatactaatttcagcaaaaagtgaagcattcgtttggaggatgakagaaaggaagagaatgtataaaggagctcagtcttcattaaattattgaagaatgggatattgatatgaaaaacaaagactaggcaaaaaaaaaaacacaacatagcagtttcatgtgctctctctctctctctctctctcacacacacacacacacaaacacacacccagtgttcaaatgcagtcttccaggggctttatgaagtcatcagtgtttcaagttcctaccatatttctgttcccatattctgaaaattggcttctgtattaggtctctattgctgctgtaacaaattaccacaaactaagtagcttaaccaaaacaattagtatcttatatttctgtaagtcagatgttaaacaggagtcttactgagctaaacttaaggtgtcattggaattgcattcctttttgaggtgttaggagagaatctttttccttgcctttcacagctgttagggatcgcttgcattccctgaatcaaggtcctttcctccatct

SEQ ID NO: 153181 - DNA, 613 bp, Homo sapiens
tcagcaattaattatttgcactgtttaaataataactctggatactaatttcagcaaaaagtgaagcattcgtttggaggatgatagaaaggaagwgaatgtataaaggagctcagtcttcattaaattattgaagaatgggatattgatatgaaaaacaaagactaggcaaaaaaaaaaacacaacatagcagtttcatgtgctctctctctctctctctctctcacacacacacacacacaaacacacacccagtgttcaaatgcagtcttccaggggctttatgaagtcatcagtgtttcaagttcctaccatatttctgttcccatattctgaaaattggcttctgtattaggtctctattgctgctgtaacaaattaccacaaactaagtagcttaaccaaaacaattagtatcttatatttctgtaagtcagatgttaaacaggagtcttactgagctaaacttaaggtgtcattggaattgcattcctttttgaggtgttaggagagaatctttttccttgcctttcacagctgttagggatcgcttgcattccctgaatcaaggtcctttcctccatcttcagagctagtaaagctaattattgg

SEQ ID NO: 153182 - DNA, 562 bp, Homo sapiens
caaattaccacaaactaagtagcttaaccaaaacaattagtatcttatatttctgtaagtcagatgttaaacaggagtcttactgagctaaacttaaggtgtcattggaattgcattcctttttgaggtgttaggagagaatctttttccttgcctttcacagctgttagggatcgcttgcattccctgaatcaaggtcctttcctccatcttcagagctagtaaasctaattattggcagagcaaaaagggaaccaagatctaccagttcattggtaaacactactctctagctattgacaagaagatgccctgagattttacgtcaatttcttgaagacagagacagccaagtctctgcctgaaatttaaaagctacttgcgtcttagggaaaaaaaaaaaaaaaaaaaaaaaaccaactttgtagacaaagcaagcaaagaagagcctaaagcagcctcctcaacatgagataatattttataaaaatgttgtcaatacagatgtggtttacaaatatatttttgaggggtttactttctagctatctcaccatgcaag

SEQ ID NO: 153183 - DNA, 562 bp, Homo sapiens
caaattaccacaaactaagtagcttaaccaaaacaattagtatcttatatttctgtaagtcagatgttaaacaggagtcttactgagctaaacttaaggtgtcattggaattgcattcctttttgaggtgttaggagagaatctttttccttgcctttcacagctgttagggatcgcttgcattccctgaatcaaggtcctttcctccatcttcagagctagtaaagctaattattggcagagcaaaaagggaaccaagatctaccagttcattggtaaacactactctctagctattgacaagaagatgccctgagattttacgtcaatttcttgaagacagagacagccaagtctctgcctgaaatttaaaagctacttgcgtcttagggaaaaaaaaaaaaaaaaaaaaaaaaccaactttgtagacaaagcaagcaaagaagagcctaaagcagcctcctcaacatgarataatattttataaaaatgttgtcaatacagatgtggtttacaaatatatttttgaggggtttactttctagctatctcaccatgcaag

SEQ ID NO: 153184 - DNA, 607 bp, Homo sapiens
gtaattaatacacatgtgtttccctatccttttaaataccctaatcctaaaagtcccccactcctgttataggacaaaatgtttcccaaatggattcaaatgaagaatgccctgaacatagaacagcagttccatataatttagatgaatcctctcagaaaggagttgaggtcctacttcaaatgttctttcaactcctattcctttcttcacaaaccaccccaactctaaagacatattttctatcctgtttgtcaatgaaccaaatggcattctgccttttccttacaaataaatggaaaagcaaaagtgttgagtcacagtactgttgaaagtaccacctctataaaatattaaatatgttcaagttattttgctgaataaaaaaattgttaaatttctttctccttgaaacccagaaagataaaaagtgtctgcttgttaatggcttaatataaagccacaaartatcatcctatctgtttatacagtagctaattagattcacacttgaacatattacagaaaaacttttttttaatgtagagaggagcaaccccttaagaaaaaagagaatactgaactctgtaatgagagaataaaaacc

SEQ ID NO: 153185 - DNA, 571 bp, Homo sapiens
agaagctgctacctgtgtgccaacatgtactgtcccttctttgggctaaaagctagctatatttctcagctttctttgcccttgggccatatgactcaatcctctccagtggaatgtgaggggaagtgatgtgaactgcttttagacctgggttatgcacatcttcaaattctgtgcytgagatgtcactgaacacctactctggacagttatatgcacaaaaatgtaaaagcatcaatcgtgttatgctgttgaggtctattttttacaatggcatttagttagcctacttaggctaatagctgagtcaggcaggcatttgggcctgtgctcataataaaccattcaggtgatttttggatatatatgtttttgaacattttcagggaccaaatcattacaacctcctttagctggggaagaggggcaggagtgagaagttccaggcatagagaaaagtaaaagaagcaaaatagagatatggggccacaaacctggagggtttgagaaagactaattgattcagcttggctgcattttcagaagaggagtagaagtaaatgcataattt

SEQ ID NO: 153186 - DNA, 589 bp, Homo sapiens
aatggatcagacctatctagaagctggcttttaatgttaaaaggggaattcacctagacagataatctatttctcaaaagaaattgactttaaaaagtctatttgattgtatccagatccatttattatttgtatttggaaatgccctatctagctggttttccaagcccctaattcctctctactggctctctgacctctgagaacatttacttattggaagcattctcacggctattcagaaagccagataaatataaaatgggtaggagagaaaacctcacttttaggctgcttcccctacagtaggccaccctgaagaattttcaaatgaaaaggtaacttatggctaagaaacagaatatgattgatatggttgaatcatgcaatccagactgacctgacaggcttattctgccatatctatagtcaagtgacttaaagaggtcagagctggccaaagaataacctgttcagccttgttataattctactaatacattttggttttctattgaagttgaaattgtctcrtctgacacttttaaagcacataaaataatttattggagcccacgtggaaatacat

SEQ ID NO: 153187 - DNA, 563 bp, Homo sapiens
ttagcatgattcttaagggccctaggattttcagaatgcaaaatgagacttggcttcagctttaaagtcgctggctgcattagcccctaataaaagagtcatcttgtttttggaagctttgaacccaggtattgactttctctctctagctattaaagtcctatatggtatcttcttccaatagaaggcygttttcatcttcactgaaaatctgttattcagtgaagccatcttcatcaatgatcttaactagatcttctggattacttgctgcagcttctacatcagcatgtgctgcttcaccttgcacttttatgttatggtaacaatttcttttcttaaacctcatgaaccaacgtctgctagctttaattttttttctgccacttcctcccctccatcagtctttacagaattaaagagagttagggcctttctctggattaggctttggtttaagggaatgttgtggctggtttgatcttctatccagatcactaaaactctccatatcagcaataaggctgttttgctttcttatcatttgtgcactcactagagca

SEQ ID NO: 153188 - DNA, 606 bp, Homo sapiens
tcttgggttacaactgtgtgaacccacagattaaaatttctctaagtattaaagaactgggtgaacacgcattgttatatgatctggaccatgatatacacaaatcttataaagaagcacatataataaccaatgtttgatttataacataaaaaaaataagacatttgctggaaattgagcactcctaaggtcatcatgtgtaagtttcaaatatccaaatcccagatttctagtaaggaaagcagaaacataaatctagacatcctcttrtatgaggggtgctctgggggtgtcaggtttgacattattttagctagtcacatggccccacagtacttaacagggcacagaactggcagagaagttaacgttttccacaaagagtgaaggaattagtccaactattcactgtttattattagtagcaatagtaagcaaaacaagttatgttcatgcgaacatgaatgctcttccaactcactgtcaagctgaaagtttatacaatgcaataaaaagccattccgtggctttaaaaaatcaacaataataaaaataaagaaaaattttaaataaaagcaaaaaatactgacactatctgggacct

SEQ ID NO: 153189 - DNA, 606 bp, Homo sapiens
tcttgggttacaactgtgtgaacccacagattaaaatttctctaagtattaaagaactgggtgaacacgcattgttatatgatctggaccatgatatacacaaatcttataaagaagcacatataataaccaatgtttgatttataacataaaaaaaataagacatttgctggaaattgagcactcctaaggtcatcatgtgtaagtttcaaatatccaaatcccagatttctagtaaggaaagcagaaacataaatctagacatcctcttatatgaggggtgctctgggggtgtcaggtttgacattattttagctagtcacatggccccacagtacttaacagggcacagaactggcagagaagttaacgttttccacaaagagtgaaggaattagtccaactattcactgtttaytattagtagcaatagtaagcaaaacaagttatgttcatgcgaacatgaatgctcttccaactcactgtcaagctgaaagtttatacaatgcaataaaaagccattccgtggctttaaaaaatcaacaataataaaaataaagaaaaattttaaataaaagcaaaaaatactgacactatctgggacct

SEQ ID NO: 153190 - DNA, 606 bp, Homo sapiens
tcttgggttacaactgtgtgaacccacagattaaaatttctctaagtattaaagaactgggtgaacacgcattgttatatgatctggaccatgatatacacaaatcttataaagaagcacatataataaccaatgtttgatttataacataaaaaaaataagacatttgctggaaattgagcactcctaaggtcatcatgtgtaagtttcaaatatccaaatcccagatttctagtaaggaaagcagaaacataaatctagacatcctcttatatgaggggtgctctgggggtgtcaggtttgacattattttagctagtcacatggccccacagtacttaacagggcacagaactggcagagaagttaacgttttccacaaagagtgaaggaattagtccaactattcactgtttattatwagtagcaatagtaagcaaaacaagttatgttcatgcgaacatgaatgctcttccaactcactgtcaagctgaaagtttatacaatgcaataaaaagccattccgtggctttaaaaaatcaacaataataaaaataaagaaaaattttaaataaaagcaaaaaatactgacactatctgggacct

SEQ ID NO: 153191 - DNA, 632 bp, Homo sapiens
ttactttgctttgaaaattgaccttttcattaaacaaagctttacaaagaccaaataagtccttataaactttgtttccaatgcatcatcacacatgtgacttgtctgcaaataagaattctgcattcctagggcccagttctcttttatttatacctttgatctcagcacattttctctggaggtctccaaatactactgtccttattggatcttaccctaatgctgcctaatgccgccaaatgcccatgtcctacagtcaactgttccagtgggaaaataatatttacttcttcctttacaagtggccactcagaactgacccatgacagtattcttcatcatcttccctttgtaaacctcctgcatccataagtcaatttctttaggatgaaactttaatgaactaaaatatcacaaatggctgttatcctgtatctgctatatttgtcgtccatttctcaacttggtctttacagttcacatttattcatgattaatgtgtttccagttagtactagtagaaaaaaattccayttcttcatggttcactagagaagattataaaccttctaacttaaaattatgttcatattgaaattctgcccaaatacaaatcccagataaagctt

SEQ ID NO: 153192 - DNA, 581 bp, Homo sapiens
ctccagaaaccctaaagtcaatgaaagaactccatttttcatattctgttcctctagaaccactcctgataccaaaatctgtattagtcagggttccctagaggtacagaactaataggagatagacagacagacagacagacagacagayagatagatagatagatagatagatagatagatagatttctatctatctataaaggggagtttattacgcattaatttatatgatcacgaggtcccacaataggctgtctgcaaggagagccagcctgagtctcaaaactgaagaacgtggagtctgatgttctagagcaggaagcatccagcataggagaaagatgtaggctgggagggtgggccaatctcaccttttcatggttttctgcctgttttatattcactagcagctgatttgattgtgcccaccagatcaagggtgtgtctgccttccccagcccactgactcaaatgttaatctcgtttggcaacaccctcacagacacacccaggattaatactttgcatccttcaatgcaatcaagttgacactcagtattaaccatcacaataagcaa

SEQ ID NO: 153193 - DNA, 383 bp, Homo sapiens
tatctatctataaaggggagtttattacgcattaatttatatgatcacgaggtcccacaataggctgtctgcaaggagagccagcctgagtctcaaaactgaagaacgtrgagtctgatgttctagagcaggaagcatccagcataggagaaagatgtaggctgggagggtgggccaatctcaccttttcatggttttctgcctgttttatattcactagcagctgatttgattgtgcccaccagatcaagggtgtgtctgccttccccagcccactgactcaaatgttaatctcgtttggcaacaccctcacagacacacccaggattaatactttgcatccttcaatgcaatcaagttgacactcagtattaaccatcaca

SEQ ID NO: 153194 - DNA, 383 bp, Homo sapiens
tatctatctataaaggggagtttattacgcattaatttatatgatcacgaggtcccacaataggctgtctgcaaggagagccagcctgagtctcaaaactgaagaacgtggagtctgatgttctaragcaggaagcatccagcataggagaaagatgtaggctgggagggtgggccaatctcaccttttcatggttttctgcctgttttatattcactagcagctgatttgattgtgcccaccagatcaagggtgtgtctgccttccccagcccactgactcaaatgttaatctcgtttggcaacaccctcacagacacacccaggattaatactttgcatccttcaatgcaatcaagttgacactcagtattaaccatcaca

SEQ ID NO: 153195 - DNA, 620 bp, Homo sapiens
ccaaacacgccagagccttgattttctactttccagcctccacaactgtaaacattaaatgtatgtaccttataaattacctactctcaggtattgttttagtggcacaaaatggacaaattcacacacccagacacgtagtcaattttaattctaacctcccttgaccaaacaatgagtacactgtgtcaattcaccttcctaaaccttcctcagatgcaattctttgtccctaactttattgccactgcctttgttcaggtctttgttcaagctcacctggaccactactctaacacctgaacttggcttcctagtaaaaaktttctcctttgtctacttccaattcattctttatggaaaactttgtctaaaatgcagtcaaaccatgtcattcccctgctttaattattccaatgtcacctaaattatcaatcaataaagtctaaacatgtccataggacatatgtaagtctcttaatgacctagctattgattatgttcctgttagactgatttccccataaggcccaaatgaaccctactttgaagtctcaccaacttcctgatgactctatcatttatctgtctattatctatctgtctatctatctatcatc

SEQ ID NO: 153196 - DNA, 498 bp, Homo sapiens
tggcaataggcaaggatgagtaatccttgtattggaaagaygagtgaacacttggaaacaataatgcagtctagctccttttgcctccatcacattcattcgaatagtttatctctagagttttgctctgaataaagacatgatttattcagctttctatccccagcacctaccacaattcctgaaatgcaatgtgttcattaactgtttgctaaataaattattagatgaatgaatagaaaaggaaaaaatgaaggggaaaaggatctaatgtaacaacacttcactgcaattaacttttgacagttatgctgtcttgaacttaaccaaaaatttccagagagcaagtgttttattcaaattcctaacacaccctcctgcaaagtttctgcaaagagcttgtcatgatgtgagtatatatattcagaaaatcttgccaagtaatgaatacataaataaatacagtgaataacaatggttgacccattcatgtaaaac

SEQ ID NO: 153197 - DNA, 498 bp, Homo sapiens
tggcaataggcaaggatgagtaatccttgtattggaaagatgagtgaacacttggaaacaataatgcagtctagctccttttgcctccatcacattcattcgaatagtttatctctagagttttgctctgaataaagacatgatttattcagctttctatccccagcacctaccacaattcctgaaatgcaatgtgttcattaactgtttgctaaataaattattagatgaatgaatagaaaaggaaaaaatgaaggggaaaaggatctaatgtaacaacacttcactgcaattaacttttgacagttaygctgtcttgaacttaaccaaaaatttccagagagcaagtgttttattcaaattcctaacacaccctcctgcaaagtttctgcaaagagcttgtcatgatgtgagtatatatattcagaaaatcttgccaagtaatgaatacataaataaatacagtgaataacaatggttgacccattcatgtaaaac

SEQ ID NO: 153198 - DNA, 568 bp, Homo sapiens
acacacacacacacacacacacttacttacacacactttaaaagaaaagcctttgccctgggatctgacttaaatgttatatcaatacagtgttgactcatagctgaggctaytttaaaattttattaatactgtttagtacatgcctatatgtatgggtctctgtgatctgccagagccatttttccttggttggctttttagatttgctattttgctttcctgtacaaacatacctatgatatctttccagtcctggactagttggccactgcccttcctggaaaacactatacactaagatggttaaaaaaaaaaaaaaaaaaggcatcagctttctggggtctcaggaatccctgcctgcttgtttgcattttcactctaaatgaccttgcatgagccgttgtgcctttagcatggcatctgtccatttcaattgttaaaaggctgagatcaattatcttggcaagaaccaatctcaaagacccatttctcatgttgagccacctgaaacacattttgttcctgtcatctctcccttgatgtcacccaggatctctaaaacaca

SEQ ID NO: 153199 - DNA, 409 bp, Homo sapiens
tgcctatggccactgggctcttcagatggttgagaagccatctctccttttggattctcattttttatttctcttgtactcttccaccttctaaagaggaatctatctttacaaatagtctggaaaattttagagaaaatgagaaggtaagggaatatttggcccaaaccacagaccagctggactcttgttccttctgatctccttcccacttccctgcgtctgtggcattggcaaagacagaaacatgagtttgcaggacagmttacaacatcatcgttccaggggaaaaaaaaaatattcgtgcatgtggtaggtggctccacagtgtaatttcaaacacagtggttcagtgaccctgggtttgttaagagagttcaggatgcatgacaacaaagtgtctcaattc

SEQ ID NO: 153200 - DNA, 430 bp, Homo sapiens
tgctgtaggaaaaacaaaataagccctggagtacaaaagatttggattcaaactttgaagaaggatggggaagtgtttaggaaagtgcttccctgtgtaaaacttagctggtaagtaccrtatttcactgaaatgctgttataataattgaaacagattattatgtggaaaaacaacatcagcaaaactaaaacctagatgagtttaaataagtgccagccatttttctcctgtggggattttagagttgaagtgggtatcttcgattacttttctttatcctcattcttattcttataatttttcctaataagtcacctaagaagggcatttaaataagtgctagccttttttctcctagggggatttagagttgaagtggatgtcttcaattacttttcttctctattctcgttcttattcttataat

SEQ ID NO: 153201 - DNA, 425 bp, Homo sapiens
gctgtaggaaaaacaaaataagccctggagtacaaaagatttggattcaaactttgaagaaggatggggaagtgtttaggaaagtgcttccctgtgtaaaacttagctggtaagtaccatatttcactgaaatgctgttataataattgaaacagattattatgtggaaaaacaacatcagcaaaactaaamcctagatgagtttaaataagtgccagccatttttctcctgtggggattttagagttgaagtgggtatcttcgattacttttctttatcctcattcttattcttataatttttcctaataagtcacctaagaagggcatttaaataagtgctagccttttttctcctagggggatttagagttgaagtggatgtcttcaattacttttcttctctattctcgttcttattctta

SEQ ID NO: 153202 - DNA, 430 bp, Homo sapiens
caaaataagccctggagtacaaaagatttggattcaaactttgaagaaggatggggaagtgtttaggaaagtgcttccctgtgtaaaacttagctggtaagtaccatatttcactgaaatgctgttataataattgaaacagattattatgtggaaaaacaacatcagcaaaactaaaacctagatgagtttaaataagtgccagccatttttctcctgtggggattttagagttgaagtgggtatcttcgattacttttctttatcctcattcttattcttataatttttcctaataagtcacctaagaagggcatttaartaagtgctagccttttttctcctagggggatttagagttgaagtggatgtcttcaattacttttcttctctattctcgttcttattcttataatttttcctaataagt

SEQ ID NO: 153203 - DNA, 430 bp, Homo sapiens
tgctgtaggaaaaacaaaataagccctggagtacaaaagatttggattcaaactttgaagaaggatggggaagtgtttaggaaagtgcttccctgtgtaaaacttagctggtaagtaccatatttcactgaaatgctgttataataattgaaacagattattatgtggaaaaacaacatcagcaaaactaaaacctagatgagtttaaataagtgccagccatttttctcctgtggggattttagagttgaagtgggtatcttcgattacttttctttatcctcattcttattcttataatttttcctaataagtcacctaagaagggcatttaaataagtgctagccttttttctcctakggggatttagagttgaagtggatgtcttcaattacttttcttctctattctcgttcttattcttataat

SEQ ID NO: 153204 - DNA, 427 bp, Homo sapiens
ctgctataaagaaccaccagagactgagtaatttataaagaaaaaggtttaattgacttgaagttcagcatggctgggaaggcctcaggaaacttacaattataggagaaggtgaaagggatgcaatgcacctttttcacaaggcggcaggaaggagaagtaccaggcaaagctgggaagagcccctcataaaaccattagatctcgtgagaactcattcactatcacaagaacagcatgggtgaaaccacccccagattcaattacctccacctggtctctccatgtggtgattatggagattataattcaagatgagatttgggtggggayacaaagcctaaacatatcaggatctcattaaacttattaagagcttctgcatagcaaaagaaactattaacaaaataaacagacaacctacaga

SEQ ID NO: 153205 - DNA, 584 bp, Homo sapiens
atgaagtctttgcatacatctgagttatgcgtatgagtatacatttatatatacttatatatatgtttaagatatatatttctgaggatccatatatgtcagtgaacatgtactcaatgaactttcattattgtgcaaacataaacagtgcagtgttatgggatattccaaccaattataagatcaaatctcttcayttattctatttgtttttgttgttattgttgttgctttttgagacggaggagtcttgctctgtcacccaggctggatggagtgcagtggcgtgatctcagtgcactgcagcatccgcctcctgggttcaagcaattcttcttcttcagcctcccaagtagctgaaattacaggtgcgtgccaccacacttggctaatttttgcatttttagtagagatgggttttcaccatgtgggccaggctgggtttgaactcctgacctaaagtgatctgcctgcctcagcctcccaaagtgctgggactacaggtgtgagccactgcatccagcctctatttgttcatttttataaggcaatttctcactcaagatgtagaatcccttttcttt

SEQ ID NO: 153206 - DNA, 584 bp, Homo sapiens
atgaagtctttgcatacatctgagttatgcgtatgagtatacatttatatatacttatatatatgtttaagatatatatttctgaggatccatatatgtcagtgaacatgtactcaatgaactttcattattgtgcaaacataaacagtgcagtgttatgggatattccaaccaattataagatcaaatctcttcacttattctatttgtttttgttgttattgttgttgctttttgagacggaggagtcttgctctgtcacccaggctggatggagtgcagtggcgtgatctcagtgcactgcarcatccgcctcctgggttcaagcaattcttcttcttcagcctcccaagtagctgaaattacaggtgcgtgccaccacacttggctaatttttgcatttttagtagagatgggttttcaccatgtgggccaggctgggtttgaactcctgacctaaagtgatctgcctgcctcagcctcccaaagtgctgggactacaggtgtgagccactgcatccagcctctatttgttcatttttataaggcaatttctcactcaagatgtagaatcccttttcttt

SEQ ID NO: 153207 - DNA, 584 bp, Homo sapiens
atgaagtctttgcatacatctgagttatgcgtatgagtatacatttatatatacttatatatatgtttaagatatatatttctgaggatccatatatgtcagtgaacatgtactcaatgaactttcattattgtgcaaacataaacagtgcagtgttatgggatattccaaccaattataagatcaaatctcttcacttattctatttgtttttgttgttattgttgttgctttttgagacggaggagtcttgctctgtcacccaggctggatggagtgcagtggcgtgatctcagtgcactgcagcatccgcctcctgggttcaagcaattcttcttcttcagcctcccaagtagctgaaattacaggtgcrtgccaccacacttggctaatttttgcatttttagtagagatgggttttcaccatgtgggccaggctgggtttgaactcctgacctaaagtgatctgcctgcctcagcctcccaaagtgctgggactacaggtgtgagccactgcatccagcctctatttgttcatttttataaggcaatttctcactcaagatgtagaatcccttttcttt

SEQ ID NO: 153208 - DNA, 584 bp, Homo sapiens
atgaagtctttgcatacatctgagttatgcgtatgagtatacatttatatatacttatatatatgtttaagatatatatttctgaggatccatatatgtcagtgaacatgtactcaatgaactttcattattgtgcaaacataaacagtgcagtgttatgggatattccaaccaattataagatcaaatctcttcacttattctatttgtttttgttgttattgttgttgctttttgagacggaggagtcttgctctgtcacccaggctggatggagtgcagtggcgtgatctcagtgcactgcagcatccgcctcctgggttcaagcaattcttcttcttcagcctcccaagtagctgaaattacaggtgcgtgccaccacacttggctaatttttgcatttttagtagagatgggttttcaccatgtgggccaggctgggtttgaactcctgacctaaagtgatctgcctgcctcagcctcccaaagtgctgggactacaggtgtgagccactgcayccagcctctatttgttcatttttataaggcaatttctcactcaagatgtagaatcccttttcttt

SEQ ID NO: 153209 - DNA, 474 bp, Homo sapiens
aggcatttttctgatattgcagagctattgtcatatcctgtaaccaaagtaacctgttgtagtgttatatggggggaggaggggagtagttttcactactacgtttggaaacattctagtctctgytatttatttacctttccagttactaatacaataggtgatacaggtgaggcagatatcaattttggatctattcccctgtatggtgtattttttttctagctgtccttagattattatttacataagtttgtcgcaaagggctttgtgaaggagattttttttccctttctgatgattacaagatcaactgggagaaaagatggtaaataaaaccaatgcactgaatattgatctctgaagtaacatgaaaaagtgatactgattcacaaagagttcagaaactgcagatgcttttccctagtatgtgtaaacatttgagataaagtggcgctcatcaatatacttaga

SEQ ID NO: 153210 - DNA, 474 bp, Homo sapiens
aggcatttttctgatattgcagagctattgtcatatcctgtaaccaaagtaacctgttgtagtgttatatggggggaggaggggagtagttttcactactacgtttggaaacattctagtctctgttatttatttacctttccagttactaatacaataggtgatacaggtgaggcagatatcaattttggatctattcccctgtatggtgtattttttttctagctgtccttagattattatttacrtaagtttgtcgcaaagggctttgtgaaggagattttttttccctttctgatgattacaagatcaactgggagaaaagatggtaaataaaaccaatgcactgaatattgatctctgaagtaacatgaaaaagtgatactgattcacaaagagttcagaaactgcagatgcttttccctagtatgtgtaaacatttgagataaagtggcgctcatcaatatacttaga

SEQ ID NO: 153211 - DNA, 437 bp, Homo sapiens
aatttttttcttttttctttttaaaattctacttgtatcacatttcaaaacctactctgaattttcactcagttcccacaatattaccataattctttgagctgttggcaaaatggatccattttataaagtcatgccttttgcattgagcttttgcctgtctcatatatttagataaatttgaaagcaaaaggaatatccactgtgttgaatatctttaatagcatggttgaaatttataatttgaaattcrtaagttcaaagaacatttatctactgcttgattttatgcttgaaacttcctatgcttcacagcagtttttttttaataggtggacaaaaatccttcctcctatcattcataacaattttctttatacttaagtaaaatatacagaaacttttaaaggaacgtcaaaatcttgttccctcttatt

SEQ ID NO: 153212 - DNA, 444 bp, Homo sapiens
gaacgtcaaaatcttgttccctcttattgttgccacattatttttattatattacccaaccaggtttttatggttwtgcttatactctcatacaaaacagttttagaacaaatattgaaggaaatgcagggtcacaaaatgaataagtttaccttaataacattaatatgaacaatgatattattttattgaacttaaagcacgctcttgagcttaagagcaaagatgtagccacagttgaacttgtatttatttgggctataattactcatactaatacacaggaagcttatttgcaacaggatatttatataatttaaaatattttcagagtttttgtgtgtgttgaaatgttaggaaaacagaactcattcttaagcaatgatttgcaaagagcagtgctcatatgcagatttttaaggcgtagcccaaatggttagaaat

SEQ ID NO: 153213 - DNA, 426 bp, Homo sapiens
ttccagacacctatacagtgctggagacacytaccctacaccacgaaatgccagacagtaattcctagatcaaagtaaatgatctaaagcatgcatcacatctgatctggaagtggtccagaaacaggtgtgttgcatcttctgtagctgtaaatagagattctggaagggtgatactgtttccttttcagggtaaataacccatacttgttatgccatcaagccaagcagcaaatgaataatgtcatgaaaacattattagaacaaattaacaaattacaattacaattatcaaattaacaattagaatatagtagcaccatcattctaaaaatttaaatttgatataaatatacatttccatatcagcctaaatttacaaagtcctataatatgtaggatataaggtcaataagttaagaattc

SEQ ID NO: 153214 - DNA, 492 bp, Homo sapiens
aaggaggagatagggagagatttattaaaggatacaaaattacagttagataggaggaataacttctagtgttctatactactcctgaacccaaaatatctgagacaggtctcagtcaatttagaaagtttattttgccatggttaagaatgtagcctcaggagatcctggtgacatgtgcccaaggtggtaaggttacagcatgcttttyttttttttctttgaggtggaatcttgctctgtctcccaggctggagtgcagtggcgcgatctcagctcactgcagccttcgcttcccaggttcaagtgattctcctgcctcagcctcctgagtagctgggtttataggtgtgcacaaccacgcccagctaatttttgtgtttttagtagagacggggtttcactgtgttggccaggctggtctcaaattcctgacctcaggtgatccacctgcctcagcctcctaaagtgctgggattacagggtgtgacc

SEQ ID NO: 153215 - DNA, 285 bp, Homo sapiens
caacagaaatttatttctcacagttctggasgctgggaagttagagaagagtgccagcatggttggcacaaattaggccctcttcctgatttgtagttgtctgttttcttgctgtgtcctcacatggtgaagagcaaagaaagagtggaagcaagctgtctagggtctcttgttgtaaaggcactaatcccatgcagggcttcacccttattatttaatcaccccccaaaggccccacctactaatatcatgtcattggagattaaggcttcaatatatgaattc

SEQ ID NO: 153216 - DNA, 494 bp, Homo sapiens
tgagatttgggtgggaacacagccaaaccatatcaatctcctgtttccctstccctcatgaagagggcattcaagcttcagtcatcttgcccttcatactttgtgtgactcctgtgcccttgcacgttaacaaatttgtatgccttttctcatgctaatctatctattgtctgtttattttatagactcaaattcttgaagctttagggttcagaacgaaagttcccttcacctgggcactagattcaggcaaggagataattttcatgaccaaagatgcttgtcagtactgtattaaatttttctttaagttgagacattagaaatatattttactccacgaatgaaatgtgacacagagcaaaagagaaacagatagggattaataggatatggatatttataggtatttagacctgtgagtttaattttctttcttctatttttagagacagggtctcacgctgtcacgcaggctggggtgcagtgtgtgg

SEQ ID NO: 153217 - DNA, 494 bp, Homo sapiens
tgagatttgggtgggaacacagccaaaccatatcaatctcctgtttccctgtccctcatgaagagggcattcaagcttcagtcatcttgcccttcatactttgtgtgactcctgtgcccttgcacgttaacaaatttgtatgccttttctcatgctaatctatctattgtctgtttattttatagactcaaattcttgaagctttagggttcagaacgaaagttcccttcacytgggcactagattcaggcaaggagataattttcatgaccaaagatgcttgtcagtactgtattaaatttttctttaagttgagacattagaaatatattttactccacgaatgaaatgtgacacagagcaaaagagaaacagatagggattaataggatatggatatttataggtatttagacctgtgagtttaattttctttcttctatttttagagacagggtctcacgctgtcacgcaggctggggtgcagtgtgtgg

SEQ ID NO: 153218 - DNA, 494 bp, Homo sapiens
tgagatttgggtgggaacacagccaaaccatatcaatctcctgtttccctgtccctcatgaagagggcattcaagcttcagtcatcttgcccttcatactttgtgtgactcctgtgcccttgcacgttaacaaatttgtatgccttttctcatgctaatctatctattgtctgtttattttatagactcaaattcttgaagctttagggttcagaacgaaagttcccttcacctgggcactagattcaggcaaggagataattttcatgaccaaagatgcttgtcagtactgtattaaatttttctttaagttgagacattagaaatatattttactccacgaatgaamtgtgacacagagcaaaagagaaacagatagggattaataggatatggatatttataggtatttagacctgtgagtttaattttctttcttctatttttagagacagggtctcacgctgtcacgcaggctggggtgcagtgtgtgg

SEQ ID NO: 153219 - DNA, 539 bp, Homo sapiens
cgtccttgtgtgcagatccatgtgtttggagaacagggtctgtctgttatgtgaacacagagggcattgagcccaaagcctcatatacattaaaaatataatgagagagatttttatcttccatgaatatttaattcttctgaaagccaaccatctgcatatcacaatgccccgatgcatgtgtgtgattttctctgttgtctttcaaaataaagcagaccatttcactcttcctgtgatgccttgaaagttgcttaaatgtgcattgatcactttgatctaatgagtgtgtgtattttaaaacaaagtcagcactgttgctctaatctatttgtgtgaaggaaacagaacaatggggggaaaccaggtcgggtttcatcgttttcctggtggcctgtatcacaagttcactgccgattttgaaatgctgtttaacttttgctgaygtctttttatcattacggacttcactgtgaaatttaaaaagagtctcattgatatgcaacctactgtgtattatgatatcctgcctgccctcg

SEQ ID NO: 153220 - DNA, 547 bp, Homo sapiens
gttcaaaaataaaactattaaagtactgaataaactacacttgtatacagttaagtatacaagtcaatctagtctttcattcgtgtaagtaggcaatcaaggttcaccagacatttgaagtaaactgcacaaaacagaagatccaaaatgaacacataaataaatgatgcaagaggaagaaagtatgattcatggaacagagggacctttttaaacatcttaattaggatcataaagaaaatatgatatwcataaaacaagaatactatatgtcaccttgaaaaagagttgatggttataaaagatatgattggagaacttatttttaaaaagtgtagtgagaggttgaagtcatagaaatattccaaaacttagataaaataaaaaatagaagatatatgcttaacgaacatggagaatggatttaagatattcagcacgggactaattccagagaaaacacaggaatggagtaacgaataacgttacgttggaatactccaatgttatgaatgagccttcatgttgaaaaaattaatgcatacca

SEQ ID NO: 153221 - DNA, 611 bp, Homo sapiens
ttaaacattttctatttgtaactatatgtcctgacaagtacattgccccttctgagcctcagattctttatctgcagatggaattgatactatcttttgatggatgtagattgatagrcagattaaaattcatagcatatgtaaaatacctaaaatacctagtaaaacacctaggtcaataactgttataaagaaataattgcataaatatatatacataggattttttagttatttgaaaaaaaaatacctgtatatctcaccttttcttttgtcataatgtgtgattttaagttttattatttatgcaaacaacttgtccttctttagtaaattagtgtatgtccttgagaacaagcagtgtagatgttaggtataatgcctacataccatgttttacagatacataagtttaaaaattcctgtggcattaatataagtttaaataaatattatttacccaaaatcattataggagatagttgctgtgttttttgtaaaaggctatcaaaacatatgaactacaaatacccaatttgatttatctttttgtatgtttgcagttattgtaagatgtcactgttatttgatcaggtatcttagcgaatgac

SEQ ID NO: 153222 - DNA, 607 bp, Homo sapiens
aaaaatggatagaactatagttatataaggaagcctataaatactcagcactattatctaactacraaatcccgaaaaattgaaaccgcagctcttagctctgaaaaatccagagatatttgtggtggtttgttcaaaagaaaatttgctttatattttctctggtacacttgggcagacacaaaaatttttaaacatccccgaaatgacaatttggtatataagtgttgcctcatacttacttggcagtaacttaataatgctatttccttttccaatagaattatttctggattctgccactgttaatagttttccgtttaccagaacattagcactttcctacaaggattaatataagggcattctcagtcccactctgtgagtgcttaatgcaaggtttttaaccctaggtaaggatcgcaaaggataggtggacagaagtgtcctttgatgagaaaataaaaatcatctgtttatttgtattattggatgactgaaatttaaaattttcatcaactacaaatataggcaacaaccaatcatagtgttagcagtacctatgattttgtcactaatagaaatcacagatattttcatttcacat

SEQ ID NO: 153223 - DNA, 614 bp, Homo sapiens
tttttttcttaactcagtgaattaacaaagaaagctagtcacataaataccttcctcatttgcctttctcccaattaaaggcaagaaaatacaaactaacttccaaacttcctctttccctccttccttttcttccttggtttttcctattcctttctccttcttcttgaataaattgagatatttggattagctttaagaaactgtggagggctgggaaccatccccagagattctgatttaactggactgggcatgagatatttgaaaagcctcccccggccctgtgattttaatatgcagtaaagtctgagaaccactggattagttcatttygaatgtccttttcaattctagaaactgtaggttcttttaagggactttccagagtgttttaaactaaaacatatgcaaaaagattttgtttttcaaaatgttagagcccaaaacatttttgtctttttatccagtagaccttgattgaagccttatgtcatcagctgtgaaattcaaatagtcaacactgaacagcagattttctccttattttcttcagcccaatatacccttagcatttgaaaacctagctaaaaagaaaaatgtcttaaaaatag

SEQ ID NO: 153224 - DNA, 614 bp, Homo sapiens
tttttttcttaactcagtgaattaacaaagaaagctagtcacataaataccttcctcatttgcctttctcccaattaaaggcaagaaaatacaaactaacttccaaacttcctctttccctccttccttttcttccttggtttttcctattcctttctccttcttcttgaataaattgagatatttggattagctttaagaaactgtggagggctgggaaccatccccagagattctgatttaactggactgggcatgagatatttgaaaagcctcccccggccctgtgattttaatatgcagtaaagtctgagaaccactggattagttcatttcgaatgtccttttcaattctagaaactgtaggttcttttaagggactytccagagtgttttaaactaaaacatatgcaaaaagattttgtttttcaaaatgttagagcccaaaacatttttgtctttttatccagtagaccttgattgaagccttatgtcatcagctgtgaaattcaaatagtcaacactgaacagcagattttctccttattttcttcagcccaatatacccttagcatttgaaaacctagctaaaaagaaaaatgtcttaaaaatag

SEQ ID NO: 153225 - DNA, 289 bp, Homo sapiens
attaataaatcttctgctctttcacgtggacatctatggctttttcttttaaaataacgacaggctctatgactccctactctcttccctctaaatatatagaatggggaragtgtagcaagctaaagcacacattggtttttgtgaaaatgcatgctatcacaaaattaaaacatttaaaaaatccttaactgcaatctactgcctatgctattctcaggagagtttggtgcagaaagccaaagctcaggaatatttatgcagcctgactacagagttcactgtaagc

SEQ ID NO: 153226 - DNA, 630 bp, Homo sapiens
gtctaagaggtttctttgttcatttatttgatttttgtcttctgtggttatttttggattctgtggacactgaggtggagaaatggatggtcttttattgcaaggatgtctaatgatttaccagtaaaatagcagattctatcaatgaagatataattattcctattgacatttgtatcttatttccttctgtatacttccaaattgcaaggtggtctgcaataataactagaatttacttttaaagtacatatgaargtaagaatcagattgcaccttcttaacaaatttatttgaaatttaaattggccacactcataagctttaattgtgagaaaaagctttaaatcaaaacctatgcatcaaactcattagaatgttcaacaagtgaaatatcaatattcaacacaaatggtctctaaagaggcacaaaagcaaattgtgaggctattgttgatttttaaaaatgacatttattttgttccacacaatttcacaggtagtaagtcataagggtgctaacattttctgtgagttttaccaatttgagtatgcaaattctcatgaactttatctaattttaactagaattattactcacttgtgtactagagttggctcattttgtca

SEQ ID NO: 153227 - DNA, 504 bp, Homo sapiens
ctcaacccctggatcaatttggtcaaaatatcatcttgattctaccttgtacatgtttctcaaatctattacctgttttctccctttcaaaagatagtatgctaatgatggaaataagatgaaaatttcgagtgtattagaaatgtgtttccataagcaaaaaagaagaacaaaaattacaaggagaagagagaaaaacatgtcagttaaacaacagttggcatctctaagatataatgagacttgagcagatagtcctgtctcattttgaccacagaaacatgatatgactggcccacatgcctggtagaaaattgactcgatttagcattatcatctagagagggcagcasaggggccatggaaggtttcttaaggcaccagaaaggattcttaaggcactctccataatgatgggataattgaaagaacctcctttggccctgggtatatcaggactgtaggcctacctcagttactatctgatgcaagaacttggttata

SEQ ID NO: 153228 - DNA, 614 bp, Homo sapiens
aaatttaacattttattctcaaataaaatacataactccaaagtcaatttattcaagttaaattatcactgtaaataaaacaggatgtttttagggacttcgaatatccatcagcattttgtagctgttctaatcattasttttcttaggtgataaatatattttatatttctaagcatataaagaagaggatattccagatgcagtgctcttcaaagttttctaaaaaatttgctctgcaaaaattaatgtgtcattggttacattcaaatagttttttaaaaaatctgcgaaatatgtatacttatggatttagagtaacttctgtaatttccacataggtccccattaaggaaatagctgtactttaaaataatttaacaccatgtaaacttgtgcagagattttctctctaactaaagagagaaataattttcaaagttaatagcacaggtaagtttgaaaaaaatttatatttttcgcattagtaccacgaagagtacaagatggaatatatctgttcattataggaaaccaaacatgttttgtcaacctgcataaaccttagagaaacaggacacttcaatggctttggggaaatagttttgaaaaag

SEQ ID NO: 153229 - DNA, 505 bp, Homo sapiens
gcttaatggacttatgctcacttattcatagtaatatagatttggagttatttgatttgtataataggaaaagaaaaatacacatgaagagaaaaagaagagattgttgtcctatcaaatatattttttaaataatgtgattatatctcctttaattttcattcaaacatttgattactgtagtaggccataaaacatttaaaaaagggtaaactagaactaggcrtatataaagaagagtgaagagtttagttaataaaaactataaagaaagggacattctctaaaatcaagaccaatgagagaaggaataagcatttaatcaaagaaagcttaaatcatgttttagagcatctacagcagcagtccccatcctctttggtaccaaggactgggtttcatgaaagacaattttgccacagaaggtgggttggcattagattctcataaggagcacgcaacctacatcccttgcatatgcagttcacaatagtttgtgttctta

SEQ ID NO: 153230 - DNA, 417 bp, Homo sapiens
ggaaatggagaagcttccaaagaactccatttcttgaaaggatttctctcctcagcctctgtatcaatttttctttcttttctcccccagttttatgcttaagtccagctaacattattaggagcataactactcccatgacccaacactttaaatagtacctagtgaatttcggtaaactctgccgtctagtttttatctttaagtagaaacggaatcagcactttgtgatacaataaggcacagcagaagaagttcagttttaaagtcacactgacatgrgctcaaattcaaattgaactcacacagattgttcagtcactctgaacctctgtactttcttttatcaaatgagaaatattttcatctcattggttgctttgtgaattaaatgagttcatacacataaagtgacca

SEQ ID NO: 153231 - DNA, 557 bp, Homo sapiens
aatttaaattatgttttaaaaatactttcatttctagatatgagcagatgtttttgttgtgattttagcatagatttttaaaatagaacaaatgtgctcttaaggaatatttagctacataatttcacatatggattatattaacattgagaaaatgtgtcatttagtaaagtagacactccttttgtataaaaagcagacaatgggaaacaaatgttttccttttaattttatcaacctatataataaaaagagtaaattaaaacatttggcaaaatattatcagatttgcaaataattgatttcataaggaataygaataattatgaaaattggattgagatttttgagttcattttagtatctcttgccctgaatttttcaacacttaattttttaaaggaatagttattatcctgttcacttatatttttcagtaatcatatatatcagatatatatctttaatttatagctgttattcatgtttgtttattacagcattaatattctgttttcactctcatctcctttcaccaatagaattgatgcagaatg

SEQ ID NO: 153232 - DNA, 557 bp, Homo sapiens
aatttaaattatgttttaaaaatactttcatttctagatatgagcagatgtttttgttgtgattttagcatagatttttaaaatagaacaaatgtgctcttaaggaatatttagctacataatttcacatatggattatattaacattgagaaaatgtgtcatttagtaaagtagacactccttttgtataaaaagcagacaatgggaaacaaatgttttccttttaattttatcaacctatataataaaaagagtaaattaaaacatttggcaaaatattatcagatttgcaaataattgatttcataaggaatacgaataattatgaaaattggattgagatttttgagttcattttagtatctcttgccctgaatttttcaacacttawttttttaaaggaatagttattatcctgttcacttatatttttcagtaatcatatatatcagatatatatctttaatttatagctgttattcatgtttgtttattacagcattaatattctgttttcactctcatctcctttcaccaatagaattgatgcagaatg

SEQ ID NO: 153233 - DNA, 519 bp, Homo sapiens
gcagtgcctagttcccacattctaagtcttgcaaatggttttttatctttgcacaaatttttttttatctttgcacataggatarctaacatatgataaataatttttaatttgcatttttctcgttagcagtattgaatgttttcataggtttgttgttcatttttaaaacatcaaataaaacatgacattttgatgatatcataagtctatatccatatagccttatctagtctgtatgtacataaagagatgtaaggcaggatgtttatcagtgattaacagttgcctatatctgggtggtgggttttgggatagttttttctttttacaaagtaaaggtatatttttaaaagtacaattcttcttataagtagcatttttattactctttagagacaggttcttgctctgtcacccagactagagtgcagtggtacaatcatagctcactacagcctcaaactcctggggtcgagcaatcctcctacctcagcctcctaagtagctaggaggaca

SEQ ID NO: 153234 - DNA, 574 bp, Homo sapiens
gaaaaacactgggatgctagttaaacttctscagcttccctcaactgttaaggaccatcagccaagaattcaccctaaaccttcctgagcccttttacctttttatgttcctgccaactccccaggtagagagtttcaggagcttacttcctactaagtgtggcttttgtttccttctaaaattattcctataaagttctcagaactatcggggttctcatagtccaggatttgatggacaaatctacattctgtctatgcacaaactctgatttttatggaccttaaacttacctctccatactctgaacattagaacaagaggctgggtgtaccagaagggatttgattttcattctagagccttctctgcagttttacttttccattattacttttattatttgtatgtacttgtatcatttgtacaatgagtacaaattgcgataacctgtaaggtagaggagggaggaaaaacagagcccatcagtcttcctttttcgaagtaagtgccctgagagttttcctgcttcattcgatgttattttgtctctttgagttaactttcaagaat

SEQ ID NO: 153235 - DNA, 536 bp, Homo sapiens
tgttggggaccggtccaaaagctgttccatgtctgagtgcgcgtacatgtgaacaaagctccatgccaaagcaaatgtgtctccaagctaccctagcagtggcaccaggggtcacttatagagtgtcactttgggctttggaacaaatggamttgtaagcagccttttctcctctatttttttttttttttttgagacagagtttcacttttgtcacccaggctggagcgcaatggcgcgatctcggctcgctgcaaactctgcctcccaggttcaagtgattctcctgcctcagcctcccaagtagatgggattactggtgtgtgccattatgccaggtaattttgtatttttagtagacatggggtttcaccgtgttggccaggctggtcttgaactcctgacctcaggtgatccacccgccttggcctcccaaagtgctgggattacaggcatgagccatcgcacctggccaaagcagcctttttagaattcacctttgaataataataataataatagcaaatacatggtac

SEQ ID NO: 153236 - DNA, 512 bp, Homo sapiens
tagcattaaagatgcactaatggaaacatgaaatctggttttttcttttgaaaaaaatttttatgtcatattgagacaatggaagatttttgtttgccttttgagtaaactacaaaaagtggggagggagagaagagacagattcagctggcctcatgctatcttccttgggtcttgttatttggaaagcaaagtctcctctatcaaggtaaaggctctgcttttccaaatttttggacttaycattttggccaaatgaatgatgtatgatgatctgggattctattttatgacttctagtgttttaaacctttggtatttgacaaacatcccaaaatcaaattataaattatgtctctttctaacctaatcttttagatattaggctctctacagtccaaaagtgacatctggcttatgtggcataaaaatcatacaggaagcattgtcaaatatgaaatggtgtttcactttctttgggctatatttgtgtaaatatgttattggtatat

SEQ ID NO: 153237 - DNA, 448 bp, Homo sapiens
ccagcaatgtgttggtgatyatacaaagctggtataacaatttggaaatttcaagtgtcctaatgtgtggctaattaatcacaatatatttgctatattctgatgctgtctggagaggcaggaaacttctataaaataggatgaaattttctgtagtcttgtagtagataggagactactttctactaaaagaacaatacctgccaaatctgtaaacagtatgggaggccaaagagtaaagttccaaagagcagactgaatcacccaatctttagaggttaatgaggtaaagacctagcaaattatcagtcaaaagtacagaagggttaagtctaatgaataaggaagaacaaaagacagaatgaattttactaaaccagcaatcaaaactgactcagctgacagaacagaattaatcagcccctaatcttatccatatgacaaagga

SEQ ID NO: 153238 - DNA, 429 bp, Homo sapiens
tacagtaaatactaactcttcaatacccagacacagacaaacaccaaaatgcatcaagatcatccaggaaaacatgacctcaccaaacaaactaaataaggcaccaggcaccaatcctggagaaacaaagacttgtgactttgccgacagacmattttaaatagctgttttgaggaaacaaacaaacaaaaaaaccagaaggaattcagaatcctatcagataaatttaacaaagagactggtataatttaaaagaatcaagcagaaattttggagttgaaaaatgcaactgacatactgaagaatgtgtcagagtcttttaatagtagaactgatcaagaagaaaaaagaattggtgagcttgaagacagactatttgaaaatacacagagaagacaaaacagaaaagaacaaaaaataatgaagtac

SEQ ID NO: 153239 - DNA, 428 bp, Homo sapiens
gcaagagaaaagaaacaaataacatgcaatggagtccaatatgtctggcagcagacttttcagaggaaaatttataggccaggagaaagtggcatgacatatttaaagtgctgaaggaaaaaaacttttaccctagaatagtatatccagtgaaaatatccttcaaacatgaaggagaaataaaggactttcccagacaaacaaaagctgagggatttcatcaacaccggacctgtcctataagaaatgctaaaggaagtatttcaataagtaagaaaaggatgctaataagaagaaatcatccaaaggtacaaaactcactggtcatggtaaatacacagaaaacacagaatatgacaacacggtaactgtggtgtaatattctctttaatttatttrttcaaataacttccttatttgaagttttt

SEQ ID NO: 153240 - DNA, 514 bp, Homo sapiens
aaaggctgaaaattcctaagaccagaatgcctcctctcctccagaggatcacaactccttaccagcaagggaacaaaattggatggagaatgaatttgawgaattgacagaagtaggcttcagaaggtggggaataacaaactcctccaagctaaagtagcatgttgtaacccaatgcaaggaagctaagatccttgaaaaaggttagagaaattgctaactagaataaccagcttagagaagaacataaatgatgtgatggagctgaaaaacacagcatgagaactttgtgaagcatacacaaacttcaatagctgaatcgatcgagcagaagaaatgatatcagagattggagatcaacttaatgaaataaagcaggaagacaagattacagaaaaaagaacgaaaagtaatgaacaaagcctccaagaaataagggactatgtgaaaagaccaaatctatgtttgattggtgtacatgaaagtgatggggagaatggaaccaagttggaaa

SEQ ID NO: 153241 - DNA, 460 bp, Homo sapiens
tacgactgtcagattcttttttttttcccctttyctgttcatatacacagttcatccattatgacttggatcatcaagagatttcttttaatgggttacattattttctgtcacacagccacttatttccttggaggtccattgtacacactatccattttccatgggggtaggtagtcctgtttctgaagtatttataagaaattttatcatggtttctatggcaatagaccatgagaacattccttcaagccatttaagatgataattcaccaaaacaagtgcatttatttttgtttactattcggccattgaaaggtctggggtaacttagttggcagtttgaagaaaccttttccttctcacttctgtgcatcaggcagctacctggtcaaaaaaattgattttaagaaacatgaatggccacagagcaattttagcaacagtttttgctgaacct

SEQ ID NO: 153242 - DNA, 465 bp, Homo sapiens
ctcttattcctgtataattccagtgtggaccaatgatacttatcaatgtccaaatgtgattcctaggtgacaaaatgccaatagttagctggatcacagccagctgaagagcagtaaggagcatttggcagcttttgaaaggctgctcataagactgtgagtagttayagcagtgaaacaggatcagcctgatcaaatgttcaaagcgcttgcaacctgctgttaaggaggtgtgaaaaattagaaatctgtttttaacattgtcttttttaagttcctcattattaacacttaagctaaaaaacagattcagagtgtcaaaatctctgccatggaaccaaataacatgaatacccagcctttgttttaaacacacttataacgtattttttatattttcaatgagttttagagaaatagataactgacatactacatacagataatgaagatactgaactgagc

SEQ ID NO: 153243 - DNA, 458 bp, Homo sapiens
ataattccagtgtggaccaatgatacttatcaatgtccaaatgtgattcctaggtgacaaaatgccaatagttagctggatcacagccagctgaagagcagtaaggagcatttggcagcttttgaaaggctgctcataagactgtgagtagttatagcagtgaaacaggatcagcctgatcaaatgttcaamgcgcttgcaacctgctgttaaggaggtgtgaaaaattagaaatctgtttttaacattgtcttttttaagttcctcattattaacacttaagctaaaaaacagattcagagtgtcaaaatctctgccatggaaccaaataacatgaatacccagcctttgttttaaacacacttataacgtattttttatattttcaatgagttttagagaaatagataactgacatactacatacagataatgaagatactgaactgagcattagt

SEQ ID NO: 153244 - DNA, 608 bp, Homo sapiens
ttcaccttcaaaataattagtattgattttatctaaaaaagaaacattttcctacagctcatcgcttagccagaaatttaccatatgcttaaataaaagcataaaaaagcaggaggcaatcttagaaaaatgtgaatcaatgacagttcaataggagagaattatcagaaatatatccatgtataagagggaaagaagttgagccttttaggacatgccagaaaagtctaaggtaacaacttatcttcagatatatcaccaacagtaagtctgcatactatttatgataaataaagcctaaagagataataaattgtagtagacaaaattgatcaytctacatgataaaaaaaaaaataaaacctttatctcatccaaaataatcccaacagtatatggaggtagattagcataatggttaacagtgtgggttctggagccagactacagagatttatattcttactcctccacttcctagtttagccatgttgactatggaaaactacataatctttctgtgcctcggtttcctcacctgtaaagggaggaaaataagagtccctatttcataaaattggtgtgaaattttaaaaattaatacaggc

SEQ ID NO: 153245 - DNA, 462 bp, Homo sapiens
gcccgtttgcagtcattgccartgtagtcatgcaaaatcacttgagtgaaatagactttggggatctaatctcaggacctaaccaccatttataaagcttttttggggaaaatgtgttctggatttcgcacagccagcttacaaatgagctttggaaacacaatccacatgtaagttggagacttcctattattagcattcagccctgcgaggagagcccttgctttgttagcaggcctatgtgtcctcagccctaagttcctaaaaccagcactacttgaggagcttgaattggtgctcttggagttctttagattagttatgagacttcagaacctgcttaccagcagtactgagctcaagaggaagcctaattcatatccttcagaagataattttaagagagtgtgtatgttttcgttttgtgaacaaaggaaagttaatctggtgctccgtgtctgt

SEQ ID NO: 153246 - DNA, 504 bp, Homo sapiens
cttccagtttctgacacccaaaacacattttatgcttagagaaaacaatagcaccctgactttttagaagacatagttttyccttggggatccaaactggaagcagatatttgagctgtgaacacattttttcttagaagagtcaattaggagctgggttgaagcttcagtctatgcacttagagtcaggttttaggaccaagagcaagcactgtgggcacctgttgtaagaaaacatctgacagcacgaggtgctaaattgcttcaaaatcctccatagctcgtggggatgctacctttttagtaggagtttgaagcccagaatgcactttatattataaccaacacagttgaaaaataggttccatgttctataagaatggattcattaaactgcatgttctggaaaaaggatgtattagagactttgaatttgaggatcctgtgttatatacatctctgagccatcttatcaggaagaaaagcagctccttaaggtgcctg

SEQ ID NO: 153247 - DNA, 504 bp, Homo sapiens
cttccagtttctgacacccaaaacacattttatgcttagagaaaacaatagcaccctgactttttagaagacatagttttcccttggggatccaaactggaagcagatatttgagctgtgaacacattttttcttagaagagtcaattaggagctgggttgaagcttcagtctatgcacttagagtcaggttttaggaccaagagcaagcactgtgggcacctgttgtaagaaaacatctgacagcacgaggtgctaaattgcttcaaaatcctccrtagctcgtggggatgctacctttttagtaggagtttgaagcccagaatgcactttatattataaccaacacagttgaaaaataggttccatgttctataagaatggattcattaaactgcatgttctggaaaaaggatgtattagagactttgaatttgaggatcctgtgttatatacatctctgagccatcttatcaggaagaaaagcagctccttaaggtgcctg

SEQ ID NO: 153248 - DNA, 634 bp, Homo sapiens
ttgacagtatttaattatgctcacaattgcattaccttcaacgtagatcctttatgcagaggatctactacagtggtattgcccctcccacacttgttaaacatgtgatatgtctctggttggttgtttgtaggacatttaagtgatttaacacttcgcctcttcaccttttaaatttaataattcttttcctcaagttgacctatccatatcctattccagacctacttttcttagagctgtgtggttgtgtgactcactttcggaacgtcggcctacctagtggggcaagtttggtttatgatgatatgtccaaggaatttttgtagtcttaggctcaacctagaatgatttgtactgtcatattycattcaaggttatctaggatactaccttctcccactcatttatactcaaacactttgcagtaaactttcatacttcctcattctctcctaggccacagcccaatgcagtcaatcaccgagttatatgaggtctcgataatattttgtacatttctaactgcattagaattcagacccccatcaccttgattcagagaactaaatctggtagttttacttctagcagcactcccttccaatttattcttaacactgtcattagtaaa

SEQ ID NO: 153249 - DNA, 476 bp, Homo sapiens
cttgggttttttttttccacaccttttcctcttttccttctcccttaaaatatcccattttatgtccactatattattgataactcctcctgccccccctcacaaaatcccttggaattaggcatattttatctaaatgcagaaagataggatgtagagaaggccttccatgggagaagaataagmgacaggcaggcttttcccaggataggagctatacactgggcctctaacatttatttacctgtttaaaatatgttcaatatattttcattaagacagaggtgaggatgagggtatagagtaggtatggtgacagagatcagactaggggttaaagcccaggtaggaagtgccccaaggatgaactttgattacatcactggcttgtgtggggccagaactggctagaaagacaggtttttgttccacataaactctgctggaaggaaggcatccaaagatgaaagggaaag

SEQ ID NO: 153250 - DNA, 582 bp, Homo sapiens
ctgccctccctgcagagagtgacacttcttgattcagtgtttccaggggccccagttacttagctctttccaactctgtcccctcaataaactagtcaatttattatcacacattatcacyttataataaatgtgaaacagcattttgttgcgaagaaatagataaaaatggcaacttctggacatttctcaaaggatctcttatgattgactcttggaaaccatggaatttatctgagcaaaatctctgccaaatcagcctttttcctgtgctttacttcctatagcttctaacatccatcttgcaaaacagctccttccctttaattgtgctgaaattgattccccatcccttctcactcttctcaccttaggtcacaagaagttgttttggggtggacaacgtcacccctcagcttgggtgatcactgtctgatctaagttgtctctctccctactttcttgtctcctctccagtgagtccaatattctagttaccttctccatcttgtccttttgcattcccagctcaattcattccttctcaggaaatcttctcccatctacgtctttaggaattcc

SEQ ID NO: 153251 - DNA, 582 bp, Homo sapiens
ctgccctccctgcagagagtgacacttcttgattcagtgtttccaggggccccagttacttagctctttccaactctgtcccctcaataaactagtcaatttattatcacacattatcaccttataataaatgtgaaacagcattttgttgygaagaaatagataaaaatggcaacttctggacatttctcaaaggatctcttatgattgactcttggaaaccatggaatttatctgagcaaaatctctgccaaatcagcctttttcctgtgctttacttcctatagcttctaacatccatcttgcaaaacagctccttccctttaattgtgctgaaattgattccccatcccttctcactcttctcaccttaggtcacaagaagttgttttggggtggacaacgtcacccctcagcttgggtgatcactgtctgatctaagttgtctctctccctactttcttgtctcctctccagtgagtccaatattctagttaccttctccatcttgtccttttgcattcccagctcaattcattccttctcaggaaatcttctcccatctacgtctttaggaattcc

SEQ ID NO: 153252 - DNA, 281 bp, Homo sapiens
atttttctaatattttgatttgcaacttggatttttagcatcagtttcctcaggcaactcctgaggtcgagactaggctcatggttctcacactttcgtggattggactacctgttccatgtaaacacagacacgtaattagataatccattctctgaggaactgaatacacagttttctaaaccgagtggtattatttatggtgaacttcaaaatacccaggggaacaaatattgttggtttcttcaggtagccmaaaataggaaaaattagaatgaaca

SEQ ID NO: 153253 - DNA, 583 bp, Homo sapiens
aaggaatttcaggcaagaacatacattagaacagagaaatgtgtgctaatacctcatgaagtcttctggaacaagtgacaactctgccaatgggtgagggtgaccctggctgtgacttacacatgcaaataattattatattactaacaataaagaagaagatgataatgcctcacatttacaggtctcattatttttcaataactttttwaagagctttgaagctgctaacacatttaatccccacagtaactctctaagaaagtactatttaacttatttgacagttgaaggaactgaaacacagagaagttaaataacttccttaaaatatcacagatgagaagcagtagaaccagtctttgaacctgggaaatcttgtttcaaagcctcccatattagctaatacctcttactaaataaaataatgatatattatatcaactaatatgatcacctttaaatgaaataataactattattaatcatggataaaagtatattttttccaggtatttattttggctaaaatatttagataacatttgttagttttctttaaaactctatatatcatgacctc

SEQ ID NO: 153254 - DNA, 534 bp, Homo sapiens
agactaatgtaattttttttcctttatagagatggggtctcactatgtttctcaggcttgtctcaaaattctggcctcaagcaatcttcccaccttggcctcccaaagtgctgagattgcaggcatgagtcaccatgcttgccctaaaaacaacgtattcgatatatgcattataatgctaagagtggaacttcacattcaggaaaatagtttggctatatttattaagctttaaaatatgtacatgaggatatatattatatatcataaatgcaatattatgatagagtgatcaattctcaaaaaagggagaaacagaggtaaagactatgtaaatatgtttctttcatatgagttataattatgaaatattaaaactatgcttaaagataaggcaaatgaataaatacatcatgccacatytaaatgatagaatcttatgcagtcatcaaaatggtaattttggagagtaagtggggctaatgtagtaagaaacttagtatgtacaatataaatgccattttcccacatttt

SEQ ID NO: 153255 - DNA, 624 bp, Homo sapiens
ttactaatttttggtctgctcagaattcctatttcttcatttttcagtcttggtaatttgtatgtttctaggaacttatccatttcttctaggttatgcagcttgttggcatataattgtttatagtagtcctttaggatcctttatatttctrggttatgattcgtagcgtctcatctttcatttataattttatttatttttgtcttctcttattttaaggtaacttaatcaattttgttgactttaaaaaagaactcttagtttcacttaattttttctattgattctctaattttttatttctgctctaatcatttctctcttctgctaactttggcttagtgtattctatttctatttatttgaggtataacattagtttaattatttaatatttttgtttatgcaagcgtttattactataagattctctctttaaactgcttttgttgcattctacaagatttggtatgttttgtttccattttcatttgtctcaagattttttttatttccctgttgacttctagtttcacccagtggttgctcagaaatgtgttgtttaaaataaacgtatttgtgaatttttaaatcattccttgttactgatttctagtttca

SEQ ID NO: 153256 - DNA, 624 bp, Homo sapiens
ttactaatttttggtctgctcagaattcctatttcttcatttttcagtcttggtaatttgtatgtttctaggaacttatccatttcttctaggttatgcagcttgttggcatataattgtttatagtagtcctttaggatcctttatatttctaggttatgattcgtagcgtctcatctttcatttataattttatttatttttgtcttctcttattttaaggtaacttaatcaattttgttgactttaaaaaagaactcttagtttcacttaattttttctattgattctctaattttttatttctgctctaatcatttctctcttctgctaactttggcttagtgtattctatttctatttatttgaggtataacattagtttaattatttaatatttttgtttatgcaagcgtttattactataagattctctctttaaactgcttttgttgcaytctacaagatttggtatgttttgtttccattttcatttgtctcaagattttttttatttccctgttgacttctagtttcacccagtggttgctcagaaatgtgttgtttaaaataaacgtatttgtgaatttttaaatcattccttgttactgatttctagtttca

SEQ ID NO: 153257 - DNA, 541 bp, Homo sapiens
cattcatattgttgttttcccttttttaagactctgcacctccaatgacatttcagaaaattaccagtatatcagtgaaattgcaataaattattgagatgtgaacctattttatgatattatcctgatattttaaaaggaaatatctatttgaaaaacctcactgttatatgtaattattttactggttgagaatgaattattgaacatcaattttcttaaacataaaagatagtattttgaaaaattggaggtatagtttagcatttttaaataataggcttctattaggcagctattaggtttttcctatctgaagactaggtttgaatgatttgctaagcyatattttccattgttttgttttgacaaaaagaatatacaattgtaactgcaattaagttcttttttgataaaaataaaattagagactaatcgaaataagcaaatctggacaggatcatggctgcatattctgagaaacatgcaaggcctgggcttaaattgccacccatttttcaacatccagagggaagataaa

SEQ ID NO: 153258 - DNA, 541 bp, Homo sapiens
cattcatattgttgttttcccttttttaagactctgcacctccaatgacatttcagaaaattaccagtatatcagtgaaattgcaataaattattgagatgtgaacctattttatgatattatcctgatattttaaaaggaaatatctatttgaaaaacctcactgttatatgtaattattttactggttgagaatgaattattgaacatcaattttcttaaacataaaagatagtattttgaaaaattggaggtatagtttagcatttttaaataataggcttctattaggcagctattaggtttttcctatctgaagactaggtttgaatgatttgctaagctatattttccattgttttgttttgacaaaaagaatatacaattgtaactgcaattaagttcttttttgataaaaataaaattagagactaatcgaaataagcaaatctggacaggatcatggctscatattctgagaaacatgcaaggcctgggcttaaattgccacccatttttcaacatccagagggaagataaa

SEQ ID NO: 153259 - DNA, 608 bp, Homo sapiens
aaatccacattttcagaaaaaaaataaatagtagaaattctcttaaaaatcattttactgtatagtatactatgggccagatwtataaagttcacttttataattccagtgaaatatatgtcaccctcaagataggctcttccaaattgtactggtatggtactcctgtctttttatctgaatttcttgatagatactaccaaataaacttctttgtagaaagtaataatagccgtttctgacaattgcacaatttacatgctaaatcttttctagtacatgaagatattcaacatttcacatcacaattattaaaaaaaaaaataaccacatggagaacgttttgtgtcttttaccagtcgtgtgtaaattcctttcctggggtagaaacaccaagggattgtgctagtcagagcagcaggtgaagaaagtcttgaggaagaaaaaagggatttaacaatataggacagagaggccagtggagcactgctcaaggacagaattgccagagagtagaacccctggatagcaacagagttaaaaagtgatttgggactttattaaaaaaattgtattgtgtatagaataaaaaaagtatctgttatttg

SEQ ID NO: 153260 - DNA, 608 bp, Homo sapiens
aaatccacattttcagaaaaaaaataaatagtagaaattctcttaaaaatcattttactgtatagtatactatgggccagatatataaagttcayttttataattccagtgaaatatatgtcaccctcaagataggctcttccaaattgtactggtatggtactcctgtctttttatctgaatttcttgatagatactaccaaataaacttctttgtagaaagtaataatagccgtttctgacaattgcacaatttacatgctaaatcttttctagtacatgaagatattcaacatttcacatcacaattattaaaaaaaaaaataaccacatggagaacgttttgtgtcttttaccagtcgtgtgtaaattcctttcctggggtagaaacaccaagggattgtgctagtcagagcagcaggtgaagaaagtcttgaggaagaaaaaagggatttaacaatataggacagagaggccagtggagcactgctcaaggacagaattgccagagagtagaacccctggatagcaacagagttaaaaagtgatttgggactttattaaaaaaattgtattgtgtatagaataaaaaaagtatctgttatttg

SEQ ID NO: 153261 - DNA, 608 bp, Homo sapiens
aaatccacattttcagaaaaaaaataaatagtagaaattctcttaaaaatcattttactgtatagtatactatgggccagatatataaagttcacttttataattccagtgaaatatatgtcaccctcargataggctcttccaaattgtactggtatggtactcctgtctttttatctgaatttcttgatagatactaccaaataaacttctttgtagaaagtaataatagccgtttctgacaattgcacaatttacatgctaaatcttttctagtacatgaagatattcaacatttcacatcacaattattaaaaaaaaaaataaccacatggagaacgttttgtgtcttttaccagtcgtgtgtaaattcctttcctggggtagaaacaccaagggattgtgctagtcagagcagcaggtgaagaaagtcttgaggaagaaaaaagggatttaacaatataggacagagaggccagtggagcactgctcaaggacagaattgccagagagtagaacccctggatagcaacagagttaaaaagtgatttgggactttattaaaaaaattgtattgtgtatagaataaaaaaagtatctgttatttg

SEQ ID NO: 153262 - DNA, 557 bp, Homo sapiens
accactgtagagttttgagtaaagcaataacaaaatttgacttatttgtcaataaaaccacggcggatgttgagttgaggttagatttaaagggaactagggtataaatcaaagatcagatagaagggaattataaagattgtcttacaggagataatggtggcttatgctaggatggtagctgtggaggcagtgagaaactgtcagatgctgcatatagttggaaggaagagtcatcatggtttcttgacagactggatatgagttttgaaaaaaatatattaaagtttttgcacagaacttttatttttccatctttctrtgtttctagtttgctatcctctgcattccggcgttagccctcaggcttgccctctcatagttgcagaatgattgctgccatttccagcatcacctgatcacacaagaatattcaaaactagaagaaagaaccttcatttattgtgtgcctgcatttgtaaggttataccatttgtagtttataccatacagcctaggtgtctagtacacgataccatctaggtttgagtaaatat

SEQ ID NO: 153263 - DNA, 557 bp, Homo sapiens
accactgtagagttttgagtaaagcaataacaaaatttgacttatttgtcaataaaaccacggcggatgttgagttgaggttagatttaaagggaactagggtataaatcaaagatcagatagaagggaattataaagattgtcttacaggagataatggtggcttatgctaggatggtagctgtggaggcagtgagaaactgtcagatgctgcatatagttggaaggaagagtcatcatggtttcttgacagactggatatgagttttgaaaaaaatatattaaagtttttgcacagaacttttatttttccatctttctgtgtttctagtytgctatcctctgcattccggcgttagccctcaggcttgccctctcatagttgcagaatgattgctgccatttccagcatcacctgatcacacaagaatattcaaaactagaagaaagaaccttcatttattgtgtgcctgcatttgtaaggttataccatttgtagtttataccatacagcctaggtgtctagtacacgataccatctaggtttgagtaaatat

SEQ ID NO: 153264 - DNA, 606 bp, Homo sapiens
tgctaggtgtttacctcctttattaatcgtttggaagagtcaccatttggctttattaatttttcttttgtatcactatttttttctttgatatttgctcgttttaacatattattctttattagtttttagtttggctttaatttgttgttctttttctagcttagataatttatttttaaatttccttcttttatactacatgatttttgaagctataaattcccatatgaagactgtagtatgtaggttacacaaattttggtatgkcatatttacgttatcattcagcttaggacatttaaaatgttctattgtgttttctttcctttgtccaggggggtggtgttaattagtagtagtttccttaatttccaaacatctgcaaggagacacagttgtcatcattctactaatgtgttttaatttaattttgctgtggctagagaatataaattgtacaatttcaatactttttaaatgctgaggtgttctttacgtctctagttagaaaatactttggaaaatattctatatgtacttcgaaagttttttctacaaatataggtgtaatgttctgtaaatatcaatcaaagtaaattagca

SEQ ID NO: 153265 - DNA, 606 bp, Homo sapiens
tgctaggtgtttacctcctttattaatcgtttggaagagtcaccatttggctttattaatttttcttttgtatcactatttttttctttgatatttgctcgttttaacatattattctttattagtttttagtttggctttaatttgttgttctttttctagcttagataatttatttttaaatttccttcttttatactacatgatttttgaagctataaattcccatatgaagactgtagtatgtaggttacacaaattttggtatggcatatttacrttatcattcagcttaggacatttaaaatgttctattgtgttttctttcctttgtccaggggggtggtgttaattagtagtagtttccttaatttccaaacatctgcaaggagacacagttgtcatcattctactaatgtgttttaatttaattttgctgtggctagagaatataaattgtacaatttcaatactttttaaatgctgaggtgttctttacgtctctagttagaaaatactttggaaaatattctatatgtacttcgaaagttttttctacaaatataggtgtaatgttctgtaaatatcaatcaaagtaaattagca

SEQ ID NO: 153266 - DNA, 554 bp, Homo sapiens
acataaagacaaataagccattccatatgccttcctaaagttcagactttgctagggaaaacggacaagtaaaacagtaactacaaattaatatgatcattgtttggattgaagaaagatttcctggatgccttgatacttgaaagataagaaccaagtaactacatcaaaaagagagataggttctccagacaatgatagcaacatataaaatggtatggaggtataaaacttgatacatttgaaaaattggattgcggagcaaggaaagagagcagggagtggggaggtcaggtaaggaagtagaaacatcagtcttatataataaaccaaggagtttgaactgaattgcactaccagaaactgagggaaattattggagaattaaacaagcagtgacttgagcaaattttcattttagattcttcacttggcaagcaatatggaggatgaattaacrggtagaaagcataaagaaagttaagccagagtgaggtatgtcggcatggccagtgacagggcaagaaactaagttcatttactggatgcttttc

SEQ ID NO: 153267 - DNA, 555 bp, Homo sapiens
cggcaggctcccaggtgcacgtacagcaactctcagctccctattagcctgaatctcttcctccagctcactgctgaattcctatagagccacagtgcctaccacatcaggaggtacacagccaccagcaacatgctaggctgggaaaagatagaaaaccctttccatagtttacatagagatgagcagggatttcaatggtttctgttgtgttatttctcaagtattagatgtttataaagatgagtccaagtattgcatgtgtgtaaagaaaaataatcacccaaaatctactatgtattacctaaaaaataacaatggattaatattttgagctatataactccaatacattcaagaattttttgtaaatatgcataacaggtacatctatatatctatctatacatcattcaaaacttgtttcattcaatgcatattatactgtttctttttattactcaactttatatctgaaatatgtgtatgttaacaaataaatatacaattacyttattacttatattggagaagttgtacttcatagtatttgaa

SEQ ID NO: 153268 - DNA, 438 bp, Homo sapiens
aaactaggaagaaaaaagaaccaactaagcccaaagtccaaaaagaaaggaaataataaagataaaagaagaaataaatgaaatagagactggataaacmatagaaaagatcaataaaaaaagagttggattttttgtaaagataaagtcagcaaacatttagctagactagaacaaagaaagggaacactcaaataacatttatttttgagataatggggaagaaactattattgataccacagaaatatagggatcataatagactactatcaacaattatacaccaataaatttgataacttagaaaaaatgaataaatttctagacatatacaacctgcagagactaaatcatgatgaaatagaaaatctgaacagacaaatcacaagtaaggaggtgaatcactaataaaaagttttgcatcaaataaaagac

SEQ ID NO: 153269 - DNA, 383 bp, Homo sapiens
taataaacaaattccataacattgaaggatacaaattcaacacacaaaaatcagtataaaaaatattccatgttcatagattgaaataataaacattgttaaaaaaattccatactacccaaagtgatctatagattcaatgtagatgctttgaaaattccaatgacatttcttacagaaatagaaaaaaaagtctaaattcatatgaagccaagaaagaccctgactagccaaagcaatcttgagcaaaaagaacaaaactagaggcatcatactacctgattttaaaagctactataggctggtcayggtggctcatgcctataatcccaacaagccaagaggactgcttgagcccagaatttcaagacctgcctggacaa

SEQ ID NO: 153270 - DNA, 560 bp, Homo sapiens
aaatttatgaaaaatcagtgaattgtacacttaaaatgagcacatgttgtacctcaataaaggttacaaaaaaataaaaacagtaatgtaattgaatacaggaaagaattaccattacagatgaaaatgtttgaggaattctgaaagctattaaggaactaagatttattgaaagaggtatcagaccaagaggaccagcaacacaatttacaaggcccagtacaaaatgaaaatccatgtccaaaaatcattaagaatttcaagagggtgaaaggagagcattaaaccaagttcaagggccctcttgagtacagaaacctgtaggactgtacaggtctcatgtcctaaaaccagccatgcagataagaaaaatcttactctgaaatatggaagagagaagaattctatgaagygtgaaggatgctccaaactaaaagcaaagagatccaagaagtagataggtcttggtggtgctcacagtggaactggagaatgcacatgcagctacagacaggtcagcatctacttcgccttctgtttatgctgaacaatagctgaga

SEQ ID NO: 153271 - DNA, 615 bp, Homo sapiens
aaagagttaccccttctcctttaccaccttctttatggaaagtggtggtgggagggagaatgtggcatgtccaggacccagctttctaactattcttttttcctttttcttgcctcttccttccccttcattttaatggtgggtcagttttaggcagatacaactagaagytggttagctacagagaggttaaacaaatacataaacatattatgaataaaaagagtcaggtttcttattaatgaagaatagttttacaaggggaaaggagaaagaggcctaaggtggtgaattggaatgtgaactcatgatagacagatagatggtagacagatagatagatagatagatagatagatagatagatagatagtgtatttgaatacatacacaaattttttagctcttccaatagatagagaaagcctccaataatgcaactaattataatgagcacacctagcactcagaaaatggtttctaaatctcatacttcattaaaagaaaccaggactctctgaaaaaacagctgactgttacagctaggaatggaaaaatatgaaatggaaatgggccatcttattgtactacaaagtaaggaattgctcaaaaaat

SEQ ID NO: 153272 - DNA, 458 bp, Homo sapiens
tgttttccaaatatattatttgcttttgtgtaatttttacttagtcagacctatcagtatttcctagaatggcactgggttttatgttttgcttagaacaggtttctctattcctaacttattttttttaatcccatgattttcttttatcattttgtaaaaagttattccctacatttcatatttgattcatcttatatttcttttaggatgagaaatcaggtagagactgattcttattttgcatggacccatcaattgtcctgaaaccatttattgaataattcttcctttccactgaatgtccaacttcattggagtcaatttctgtaayctgtcttctgattaatgaaactaaacaatttttaaaacaatatgcccctctctgatttattttatagattcagtagaaactacatggcttgggtaatgcagttattattaaaattatagaatta

SEQ ID NO: 153273 - DNA, 540 bp, Homo sapiens
ccaactcaaactttctgattccaagtctagtgctcattccactatacctcaagtaatatcaaatcaataatttaataataaaaagattataatttatcaaatatgtttattgtaaaatatgtaatctcattttatagacataaacacctcttaaaatccttagaagaatgaggtaggatgtatacagatgtggaaagtatatacatttgtatccttttatagttggtaaatctacccagaggtgtgtttcaggaaacagaactgacacattaaacaaagattctytgtactgacctctgaaatacaaccacctctaacacattcaatggtaagaacttagcagtgtttaaaaaccctgtatacatacacacacacacgcaccccccacacacacacagactttatatatatgtaatttaccaagtctaggctacaagaggaaactggcaaaaattcactaattgaaatggagcttggccaagacatccatatctaatcccccttttctgattccaaatcagggagagtacatgctttgtg

SEQ ID NO: 153274 - DNA, 531 bp, Homo sapiens
aagtctagtgctcattccactatacctcaagtaatatcaaatcaataatttaataataaaaagattataatttatcaaatatgtttattgtaaaatatgtaatctcattttatagacataaacacctcttaaaatccttagaagaatgaggtaggatgtatacagatgtggaaagtatatacatttgtatccttttatagttggtaaatctacccagaggtgtgtttcaggaaacagaactgacacattaaacaaagattctctgtactgacctctgaaatacaaccacctctaacacattcaatggtaagaacttagcagtgtttaaaaaccctgtatacatacacacacacacgcaccccmcacacacacacagactttatatatatgtaatttaccaagtctaggctacaagaggaaactggcaaaaattcactaattgaaatggagcttggccaagacatccatatctaatcccccttttctgattccaaatcagggagagtacatgctttgtgttttctggtaaaa

SEQ ID NO: 153275 - DNA, 462 bp, Homo sapiens
tccccgcgcctgcggtagggaccgcctgcctccctccccaggcactcccacctcttggcgtttcttcctgacaagaagtaccaatcggcttggggacagcagcgctccccattcagggactcactcagtaacatcgctctgctcgcggaaaccactgccctcccactccttccccacccccayttccccgccccccgtgcagctagttctgggttaggggaaaggagcccccaggctcttagggggcaggccagcaatagacaattgagtacgatcacttcttctcgggagcacacaaaactgtaaaatcagcaaagaacttggttacagcgtgtttacgcgcccacagagcttgcctgtcccatcaaagggaagtgtcaggctcaaggctcctgccaacctgaaagagacactgagaaaacgagatccttcggggacctagagggaaagtgtaagaattcc

SEQ ID NO: 153276 - DNA, 604 bp, Homo sapiens
ttttacaacaaaatatgctgtaataattaaataaccacataaaaaataaaaattttgatccacattctgcacaatataccaaagttaatttaaatggatcataggcctaaagatgaaacccacaagtacaaaacttccagaagaaaacacaggaaaaatctttgcaatcttgcrttacacaaagatttcttggatatggcaacaaaaataggactcgttttttaaaattgatcatttgaattttataaaacttaaaacttctgatttttgagtatgctgttaagagaaatgaaaagacaggccacagaccaggagaaaatatttgaaatcatatcagatgtcataaatctgataaaggacttgaatcaagactctataaagaactctcaagctcaatagtaagaaagtaaacaacctgatttcaaaactgcacaagagattgaatgggtgataaagcccaaaacatttaaaaagagggtcattatcatagtcactgtcaagaaagagcacacccacctcagccctttagtaccattgtctagaacagctgaagcaggaaacttcacaagtagctctgactttgggagagtttttacccaagcca

SEQ ID NO: 153277 - DNA, 595 bp, Homo sapiens
ttgtagtgacgttttcccatggtgaaacctggtctaagtcttagttcttccttccccagcgtcctrcaggcaattcgaaagaccatctgtgactgggagggagggcgagagccccctaatgacccatgcttgagaggggagaaggaccccaaaggtggatttgatatcaaggtgccccggcgtgctgtggggccatccagcacacaggtaagcggctccaggcacaggccagctgcgttgactcagaggccagccgggctatggtagatcatcatggctggccatgggcagtgggactgggagccgtcggtcaggaggggcagggttgagtggctgctccggtcttattctgccatcttgttttgatataggaaggaggaccactggcttaagattcaggagacctggattctagtcctagatacctgtgtgacctcgggcactttacagatctctctgtgcctcagttgtttaaactggctaatggggataataccaccacatccaccttgcctggctatcttctagtcctatgaagtatagattccaaagtggaggaggaggttaaagtggaatctatctgcatgcatctatg

SEQ ID NO: 153278 - DNA, 563 bp, Homo sapiens
ttcttgcggcctggatgctaagttctctagctccctagctgtgatactttgggcaacatctttgcctatctaggtcaaacttcagctaatgcttcttttttcttcacttggtaacaaactgccacaccccagcsccaatcacgagtgtggagacgtgattcaagttggtactgccaaataactgccctggtgacagttatctgtcccgggaaggtctgtgaagcaggttcactgtgcactgcttaccaatctgtctgagtccagagagacagaacatactcatatgcaacaaattatgtgaagtggatccactatttataggtaggcagcaagggacacagaagcctaggattcattgtgagttggtctcccaatgctaagaaagctccctggggtggatggagtctgaacggtgcatatctgaattgcactgtagaatagggaccctgtaaggacacctacccgggttacataccacagggttacatgactcactgggctaaagtgttgggggacattctgtttctaggggaggctggaccagagcccaagatgttcagcca

SEQ ID NO: 153279 - DNA, 563 bp, Homo sapiens
ttcttgcggcctggatgctaagttctctagctccctagctgtgatactttgggcaacatctttgcctatctaggtcaaacttcagctaatgcttcttttttcttcacttggtaacaaactgccacaccccagcgccaatcacgagtgtggagacgtgattcaagttggtactgccaaataactgccctggtgacagttatctgtcccgggaaggtctgtgaagcaggttcactgtgcactgcttaccaatctgtctgagtccagagagacagaacatactcatatgcaacaaattatgtgaagtggatccactatttataggtaggcagcaagggacacagaagcctaggattcattgtgagttggtctcccaatgctaagaaagctccctggggtggatggagtctgaacggtgcatatctgaattgcactgtagaatagggaccctgtaaggacacctacccgggttacataccacagggtyacatgactcactgggctaaagtgttgggggacattctgtttctaggggaggctggaccagagcccaagatgttcagcca

SEQ ID NO: 153280 - DNA, 415 bp, Homo sapiens
ggtatgggctgtgaattagacccccttcggtgttctagcaggggtgctggtaaagactggaattgctcacatttaggaagacctcgcttcctaaagtgttatcagactgtgttagtctgctaggactgccataacaaagtgccacagactggatgcctkaaacaacagaaatttattgtcttacagttctggaggctggaagttgaaggtcaaagcatccgtgaggctgtttccttctgagggctgtgagggcaggctctgttccagggctctctccttggtgtgtagatggccatcttcatgttcatgtggagtgctctctgtatgcatgcttgtgtccaaatttctcacaccagacatattgggttaggggcccaccctactctggtatgacttcatctgagttagttacatt

SEQ ID NO: 153281 - DNA, 405 bp, Homo sapiens
gtgatgagtacttaaaattgacaccaaaaacacaactcattaaaacttttttgagaaattggactttattatcaaaagtttaaacttttaaactttcactctaagaaaggcactgttaacaagaatgaaaagtcargtgctgaatgggagaaaacatttggaaattccaagtccagcaagtgacttggattatccaaaatatacaaaggactctgaagaacttgccagtaagtgtgataggaagaataatgcccccacacccccatcacccaaagatgcctacatcctaatccaaaagggagtgatgatgtagaagaggaagtcagagatacgatgtgaaaaagactcaatccaatgatgttggcttggaaaatgaagaaagagaaatatgagccaaggggcatg

SEQ ID NO: 153282 - DNA, 522 bp, Homo sapiens
aaggaaattttacaaaatatgaaatacctgattactactcttcacaagtgtcaaagccataaaaaacaaggaaaagtctgaaaagctatcagattggagagaccaaggaaacacgacgattaaatgcaaatggaatcctagattggatcttagaatcaaaaaaagatattagtgggaaaactggtgaaatacacataaagtctgtaattcagttaataataatattgtaccagtattaatcatttaattttgacaaatgtaccttgattatggaagatgctaacgttaggagaagctcaatagaggatatctgggaactctctgtactctctttgcaactttcccgtaactttaaaattgtttcaagacaaaatgtttatttaataaaggtacattctgtcaacaaatatttatgcaaatgaatgagcatctcttcgttgatcatccttttattaattgcctattayaatctttgtccattttttaggttaagtgcactattacatgttattgctatctgtg

SEQ ID NO: 153283 - DNA, 334 bp, Homo sapiens
tgtgtcttctttttctatacagtatttcactcaaataaaatagtatcagaaaaatggctgactgaattttgcttttttggaaaaacttrctagaatgtttgttaatcaggtaaaactgaaaatattaattgccagtccaaatgaagggaagtttgccttttttgttgttgttgttctggcaaactttattaaaaaacaaaaacaatataccaatggacagaattttctctgccacttgaggagcccctatcccaaaccaaaactactgaagctgatcacacaggtatacacatcactggtaactctataagaaataaaaggaaaaatgaatatg

SEQ ID NO: 153284 - DNA, 419 bp, Homo sapiens
ccatgtggaaatgccccatttctgatgatatcgtggaagttttgctttttggtttctgtgtttattttggtttgggtttttgcttcaaggtagatcarcaggtaaaatctggtttccccatccttttattgtctctctttgcatttgttcaatatccctctgggcatccccttcgtaagactttctctcactacccctgttctctcagctaaatacccttggccttcctaggcagcgctctagtctccccacacccaaccccctcctcacttcctatccatccccctacccagaaattttggctgccttgctcaaatcctttagaaatgtacactccccaagcaagagttcctatcatttccaagaaaattaagtcacctgtgtgctgtggtctgaatgtttatgtccccacagaattc

SEQ ID NO: 153285 - DNA, 637 bp, Homo sapiens
atacttgcagattcataatagcaataattttatatacttagtctctcttcatttctttatcactgtaaccctgttcctacccctcaagcccattaccttatttctggatacctcttcctgggcttcccttttagatagctctcgtgatgcctccttttattctctctctctctcccccaactccgcccctcaggtctctctcttgttctggaatttatggctgttaacatagtacctagtccatttataatgtaaattgtcaagagcttgtcttatcagtagattttcaccgcactttccaaaaaacttagggttcagaaggtccagctatttaaatagccaggtacttcatatttaagaatatttgagaagtactgggttggaggggagtagagtgagaaattatgattcagcccatacctcacctttgttatgcattatagattgggagctggactcaaagacaaatgataatggagtttttgaatatgaatgaatatcaagccagagaygctaaatggcttttaatgttacatagatgtaagaaataataatgagtttagaacccgatttccttgctctaaattaatatttcttccaaaatacgcctccccaggaaataaaacaagaggaaact

SEQ ID NO: 153286 - DNA, 637 bp, Homo sapiens
atacttgcagattcataatagcaataattttatatacttagtctctcttcatttctttatcactgtaaccctgttcctacccctcaagcccattaccttatttctggatacctcttcctgggcttcccttttagatagctctcgtgatgcctccttttattctctctctctctcccccaactccgcccctcaggtctctctcttgttctggaatttatggctgttaacatagtacctagtccatttataatgtaaattgtcaagagcttgtcttatcagtagattttcaccgcactttccaaaaaacttagggttcagaaggtccagctatttaaatagccaggtacttcatatttaagaatatttgagaagtactgggttggaggggagtagagtgagaaattatgattcagcccatacctcacctttgttatgcattatagattgggagctggactcaaagacaaatgataatggagtttttgaatatgaatgaatatcaagccagagatgctaaatggcttttaatgttacatagatgtaagaaataataatgartttagaacccgatttccttgctctaaattaatatttcttccaaaatacgcctccccaggaaataaaacaagaggaaact

SEQ ID NO: 153287 - DNA, 637 bp, Homo sapiens
atacttgcagattcataatagcaataattttatatacttagtctctcttcatttctttatcactgtaaccctgttcctacccctcaagcccattaccttatttctggatacctcttcctgggcttcccttttagatagctctcgtgatgcctccttttattctctctctctctcccccaactccgcccctcaggtctctctcttgttctggaatttatggctgttaacatagtacctagtccatttataatgtaaattgtcaagagcttgtcttatcagtagattttcaccgcactttccaaaaaacttagggttcagaaggtccagctatttaaatagccaggtacttcatatttaagaatatttgagaagtactgggttggaggggagtagagtgagaaattatgattcagcccatacctcacctttgttatgcattatagattgggagctggactcaaagacaaatgataatggagtttttgaatatgaatgaatatcaagccagagatgctaaatggcttttaatgttacatagatgtaagaaataataatgagtytagaacccgatttccttgctctaaattaatatttcttccaaaatacgcctccccaggaaataaaacaagaggaaact

SEQ ID NO: 153288 - DNA, 550 bp, Homo sapiens
agatctctctccttttttgacttagctgtttattttgctataccgtttcctcttagaactgcttttgctgcatccaataaattttgatatgtcatgtttccattctcatttgtctcaggatattttgaaatttgtcatctaattacttctttgacctgatttgagaagtttttttcagaagcatattgttttattttcacatatttaaaacatttgcatggtttttcctgtttgatttttttcctgatttctagtttcatacgcttggtttggaaratttgttataatttgttataagatcaaatttgttgtaatttgatcttaagtttgttaagactcattttgtgtctaacatatgatctaccatagagagaatgttctgtgtgcactcgagaagaatgtatatgctgttctgttagatggaatattctgtctgttaggtatatttggtctaaagtgtagttcaagtctaatatttctttattgattttctgtttagatgatctgttcagtgatgaaagtagggtactaaaatcccctactattattg

SEQ ID NO: 153289 - DNA, 609 bp, Homo sapiens
tgtctctggctttctctgtgtgcgttttcggggatgagtgaatacaacatgcaaaatgtagttgtctaaaaattatgggtaaatttctgtgaaacttcctaggaattcccagggaatgggaattttattttcatgagagaaaaacattttttttcacaattctttccccttagagtttctattagtctgttttcacactgctataaagaactgctcgagactgggtaatttagaaaggagagaggtttaattgactcacagttcagcatggcttgggaggcctcasgaaacttacaatcatggtggaaggcaaaggggaagcaaggcaccttcttcacaaggcaacaggaaggagaatgctgagcgaagagggaagagctccttttaaaaccatcggatctcatgagaactcactactgagagaacagcatggggaaaaccgctcccatgattcagttacctccacctagtctctcccttgagacgtggggattatggagattatggggattacaattcaagatgagatttgggtggggatggaaagcctaaccaaatcggatttcatacataataatttcaacagaaaatgataaatttaaaagggct

SEQ ID NO: 153290 - DNA, 593 bp, Homo sapiens
tgctttggcacttccgccatgccyggctaatttttgtattttcagcagagacggggtttcaccgtgttggccaggctgatctcgaactcctgacctcatgatctgcccgccttggccccccaaagtgctgggattacaggcgtgagccaccatgccctgcccatttttataattttatactttaaaccttattgttcactcttctgctcattaaccacagtcccttatgcacagaatcccagcccactgaagagtcggcttagggtgtgaaagatttgaatacatttcttgaatacatttcttggtcacaaaagaaagtccttgattcatgcaaaattcatttagcttatcgttttcaaggtgagcaagaaaacataacacaaatcaaagctgataatgcagtgaatgaggcatcttctaggtgatatttcaggcagaagatttaatctagtgtagcttaaaccaaagattttttttgagccatgaaatttagagagcttccagattatattagtaccttcataaattccagcatggtatcttttttcacccctaaacaatatgcaattttctctaaagaagataaaaaagtg

SEQ ID NO: 153291 - DNA, 593 bp, Homo sapiens
tgctttggcacttccgccatgcctggctaatttttgtattttcagcagagacggggtttcaccgtgttggccaggctgatctcgaactcctgacctcatgatctgcccgccttggccccccaaagtgctgggattacaggcgtgagccaccrtgccctgcccatttttataattttatactttaaaccttattgttcactcttctgctcattaaccacagtcccttatgcacagaatcccagcccactgaagagtcggcttagggtgtgaaagatttgaatacatttcttgaatacatttcttggtcacaaaagaaagtccttgattcatgcaaaattcatttagcttatcgttttcaaggtgagcaagaaaacataacacaaatcaaagctgataatgcagtgaatgaggcatcttctaggtgatatttcaggcagaagatttaatctagtgtagcttaaaccaaagattttttttgagccatgaaatttagagagcttccagattatattagtaccttcataaattccagcatggtatcttttttcacccctaaacaatatgcaattttctctaaagaagataaaaaagtg

SEQ ID NO: 153292 - DNA, 498 bp, Homo sapiens
ctcttagtgtttactctaaatgcatcagctttctgtgtcctcctctggagtttctcctctcttgcccatcctctcttttgaattttgacagatgagtctcccaggaaacttgtgcatcttttcaagattaccctgtataatttcaatccataaaaatggtgacaaaatcaaccamccatatcactccatttgaagctcttagaatcactatcttcttttgtgagtatagctcaaatgattatggcatcaatactatattattggttcctttatttcctttttattatgagttttttctttttattgtgagttttaaaattgcaattgtataaagaaaaagatactggatgtttattgtcttgcatataatcatactggccttcatgttttcaagatggaaagaccaaaaggaaaagtaaagaattagagctttatttacatttccttagtcatctagtctccaaaatgtactttttctagattcctctgcttctgctt

SEQ ID NO: 153293 - DNA, 467 bp, Homo sapiens
aattgcaaagctggttttaaaatggagaaaagtcttctccccactgcagcggaatgtgtgttgttcctgttttgtgctgtatgtgtttctgttagggaatgctgttgctcatgaactttcagattgctgcaggttttctctgaacagtgaatctcttgtgggtagaagctgtgggggaagagagcacacctccctctcccgcygagaagctctgcaggagggcagccattgtttccagtggggtgcttagtagaagccaagacagaaagaacctttgctctcagattatcttttgaaatctgaaaagatgtcagttttctcattctctggcaaattaaccaaaccattttcagtgtgctgttaatcaggcccagacctgtttggccaagtcaacaaatttcacatagagcagatcaaaaccatttccttagagcactggaaggtgaatggatctagggtttagctgg

SEQ ID NO: 153294 - DNA, 643 bp, Homo sapiens
ttactgctcaggagataagaaggatcaggtaatatatgtggcagataggagaactaaaccatttgggtgtctttaaagaaagaaaagaaacacatattttaccaataaccaggtatttcagccaggcatacacgttgaataattttctttttctgctcgtgaatttgtcctgattcatccacagttggggaagatgaaataaagtgaagttagctggcctgagatgatcaaatccatgtccttggtttcgttagcactgtgttctcatcaagtgatcaattatctgtggacttgaggttgacattgacagccaaagggaaatcagtcatggatgtatttactttagttatttaagataaggaactttaaccatgtagtagttctgtcttatccagggggaatatattccaagacccccactgaatgccagaaaccatgggtaggattgaaccctatatatactatgtttttttcatatatatgtatatatatgtacrtttatatatttacattttttatatatacatatgtacatatatatacctatgacaaactttaacttataaattaggtgcagtaaaagattaacaacaacaataataataaaatagaacaattataactatatactgtaataaaaatt

SEQ ID NO: 153295 - DNA, 643 bp, Homo sapiens
ttactgctcaggagataagaaggatcaggtaatatatgtggcagataggagaactaaaccatttgggtgtctttaaagaaagaaaagaaacacatattttaccaataaccaggtatttcagccaggcatacacgttgaataattttctttttctgctcgtgaatttgtcctgattcatccacagttggggaagatgaaataaagtgaagttagctggcctgagatgatcaaatccatgtccttggtttcgttagcactgtgttctcatcaagtgatcaattatctgtggacttgaggttgacattgacagccaaagggaaatcagtcatggatgtatttactttagttatttaagataaggaactttaaccatgtagtagttctgtcttatccagggggaatatattccaagacccccactgaatgccagaaaccatgggtaggattgaaccctatatatactatgtttttttcatatatatgtatatatatgtacgtttatatatttacattttttatatatacatatgtacatatatatacctatgacaaactttaacttataaattaggtgcagtaaaagattaacaacaacaayaataataaaatagaacaattataactatatactgtaataaaaatt

SEQ ID NO: 153296 - DNA, 683 bp, Homo sapiens
gatttcctggtgtggagataataacgtcttcttcatagggattttgtgacaattaaaccaaaacatagtgagcaaatgatgactaacagaaccaagctggcaatgcaaccagggcaaacaatgcaaaatatacacttcaggagggtctgggaaaagatgtccttgcttaggcacaaaagaactctcagacccaatagccccatcctccatccacttctgctggctgccaatggggtcagtggagtagatctgtgtcaggaacaaacctgtcaacaaggcagagcttcataagggtgtaggaagcttaaacatttgtacaattaaaagaaatcattatgaaaatgttttgtttcacttamattttgatgtccaggatcaaatccttggtcatgccattttaattcgagtgctgtttgatttagtgtgatcaccaaactgcatgcaatttaaccctcacaaacctctttcaagttgggacttttatctccattttacttttatcttcatttctataaggtctcccatatagttgaggattataagcctagagacaaaatgaaagactgatcatgtatgtagtttatacacagtttgtgtatataagcatgcagacttggactttggttctacagagttaaaggcaaatgttagtattttttaaacatcagatggatagattactt

SEQ ID NO: 153297 - DNA, 297 bp, Homo sapiens
taaaaaagcattttcattagtagcacaagaaaaatgtttaattgtaacttattgttttatttattcttgcaagaaatatttaatgaagagtatactgtrtcaggcactagttgacaccaggtactttgtggcactcaattatctctgcatttaagcattttatttggacccatattaaaaaatataaaggacctgattttattctagatgtgatttccctaattattttgatttttaactgctttatcttgtcatggtatctgtgtgactaattttagttttgaaagtgggcatagt

SEQ ID NO: 153298 - DNA, 637 bp, Homo sapiens
atacttgcagattcataatagcaataattttatatacttagtctctcttcatttctttatcactgtaaccctgttcctacccctcaagcccattaccttatttctggatacctcttcctgggcttcccttttagatagctctcgtgatgcctccttttattctctctctctctcccccaactccgcccctcaggtctctctcttgttctggaatttatggctgttaacatagtacctagtccatttataatgtaaattgtcaagagcttgtcttatcrgtagattttcaccgcactttccaaaaaacttagggttcagaaggtccagctatttaaatagccaggtacttcatatttaagaatatttgagaagtactgggttggaggggagtagagtgagaaattatgattcagcccatacctcacctttgttatgcattatagattgggagctggactcaaagacaaatgataatggagtttttgaatatgaatgaatatcaagccagagatgctaaatggcttttaatgttacatagatgtaagaaataataatgagtttagaacccgatttccttgctctaaattaatatttcttccaaaatacgcctccccaggaaataaaacaagaggaaact

SEQ ID NO: 153299 - DNA, 437 bp, Homo sapiens
tcttatatgggcatgctttgtggcaccccaaaacaattacaatagtgacaataaagatcactatcacagatcagcataacacatatcatgataatgaaaaagtatgaaatactgtgagaattaccaaaatttgacatagagacatgaagcaagcacatgctgttggaaaaatggcaccaacagttttgctccacataggattgccataaactttccatttgcaaaaaacactgtatttgcaaagcccaacaaagtgaaatatatgaaaatgaggtatgtctgtgtatatttttcttaagtgcacgtggcatgtcctctggggtagaccatatgctaarctacacaaccagtcttaatacatgtgaaaagactgaaattatactaagtatcttttacaatcacaatacaatagaactagaaattgacaacagaagtat

SEQ ID NO: 153300 - DNA, 577 bp, Homo sapiens
attatgtgtttctctctccatcacttacaaaggttgcaagtgttgggactgtcaaaattcaaacataatatgaactagagctttcaccatccttagattccttttgattatttttctccagatgacatcagtgctccttggaagactagtgtcaacacacatttctttttctttctgcccaagtaaatgtagtaatagaawattttgttctttaaaattgaacttgtttgaaataatagcaggtaacagaaacaggatggaaatacattttgtttgtttagttggttgttgtttttccttggatatatatattgcaatgaaccttcccactggaagctaaaacagcttagacaattagaattacctgactttcagaaacatggatgggtagtatgtttttcctggacccaacaggaactttcatcttcatcaaaagtagcatgtacctccccttcagcatgtcagagcctgggcaccacctccagttttgcctatgcctcctgtatacattaatcaggcacaaacagcatatttttagatatcaaaatgactttaaatgctgatcctttgatgtcct

SEQ ID NO: 153301 - DNA, 571 bp, Homo sapiens
ggaatcaacccaaatgctcaatgatagactggataaataaaatgtggtacatatatactatggaatactatgcactcataaaaaggaatgagatcatgtcctttgcaggcacatggatggaactgcaagccagtatccttagcaaattaatgcaggaacaaaaaaccaaacaccacatgttctcactcataagtgggagctgaacaatgagaacacatggatacagggaggggaacaacacacactggggcctgtccagggtgggggtgtgaaggggaagggagatcatcaggaaaaatagctaatgcatgctgggattaatrcttaggtgatgagttgatacgtacagcaaaccaccatggagcatgtttatctatgtaacaaacatgcacatcctgcacatatacccaggaccttaaaataatgaaaaagtaaaaaagttagcatacagtattctcaacccttagacataacaacatgaaatagctaggatgtatttaagaagagccaatggcatgtgtggggaactgtttcatttggggacagtgatgcaataagggaggtgggaacc

SEQ ID NO: 153302 - DNA, 571 bp, Homo sapiens
ggaatcaacccaaatgctcaatgatagactggataaataaaatgtggtacatatatactatggaatactatgcactcataaaaaggaatgagatcatgtcctttgcaggcacatggatggaactgcaagccagtatccttagcaaattaatgcaggaacaaaaaaccaaacaccacatgttctcactcataagtgggagctgaacaatgagaacacatggatacagggaggggaacaacacacactggggcctgtccagggtgggggtgtgaaggggaagggagatcatcaggaaaaatagctaatgcatgctgggattaatacttaggtgatgagttgatacgtacagcaaaccaccatggagcaygtttatctatgtaacaaacatgcacatcctgcacatatacccaggaccttaaaataatgaaaaagtaaaaaagttagcatacagtattctcaacccttagacataacaacatgaaatagctaggatgtatttaagaagagccaatggcatgtgtggggaactgtttcatttggggacagtgatgcaataagggaggtgggaacc

SEQ ID NO: 153303 - DNA, 390 bp, Homo sapiens
agatcttgaactggagtttaatctctacaaataaagttragtgtgggaaagttaatgtctctttgtccttatctgttcatagcctacttggaataataaaggagggtccagtaccaatgacgtaagacggggattctaaataccacagaaacctttctctgaattccattttgattggggtggctaccatattacattaggaatgagatggcatagctgggccaagattttaaaaattattgtaatttggagattatggaaattttctgacagtttctcattaggttggtgcacaagtaattgggtttttgccattattttcaatggcaaagcttcaattacttgtccaccaacctgatagtattttgtaactttaatttaaatttttgg

SEQ ID NO: 153304 - DNA, 524 bp, Homo sapiens
agtgttcttgaacaaaccacaaaaactgatatttactgggagatctagaaattgattctagatttgtgatagctagctacataacttcagctaaataatttaaccactaatgtcttcatttccttattaaaagaagtgtgtgtagggggtgggctgggggcagggggtggtaaaggttagccaaaatttaagcaaactatattgagaagtttcttctgccagattcttgggggagagcctgactctgtatttagtaaaaccagcccaattgtcccacagaactgatgtttatggktcctttgaataaatatagaaattgatcttcccagtcttaaaacttgagggagtcacatttgtcttatctgagttcctttctcaggaaaccaaccatgacgcttcccaaatagtatcaaggaactgaaattcaccagatcgatcatctggatcaatgggatgccagacccccttgcccatcgtgattgtgtaactgaccacatgcttcctacgaccaacttctcttactt

SEQ ID NO: 153305 - DNA, 625 bp, Homo sapiens
atttgagcaacccagttataattgccaacatatttttatctttatgatgtgtgtatatgtgcatgtgtgtgtgtattccaagcaatatttatatatttatgggaagaaaaaagttgagcatcaaaaatagaattggtcagaaaatattcaaagtatttaagcaagcaaattatttggacttttagaaaaatcattttgacagtaacaagaaatagaatcaggaaagcctaaagacaaaaaatataaaacacaaacagttaaggaaatcataactatagctcagatgacattgtttattaktagtattattagttgtgggtgtagtaactattatttgctgtctgcaatatgcaaacttaatgctacctttctttatgcattatcccaattaaactttataatatcttggtaagtgaagcatcattttcacttatcagtcacggttccggtttagggagatgaggtaatttatccaagctcatgtagatagtagttagtaaattcaagattcacatgtaagtccatctgaccccagtacccatgacccaaaccactacttaccatactttccagattatgaggacttgaactaaagcaagacaaaaacattttggtacaaggcata

SEQ ID NO: 153306 - DNA, 625 bp, Homo sapiens
atttgagcaacccagttataattgccaacatatttttatctttatgatgtgtgtatatgtgcatgtgtgtgtgtattccaagcaatatttatatatttatgggaagaaaaaagttgagcatcaaaaatagaattggtcagaaaatattcaaagtatttaagcaagcaaattatttggacttttagaaaaatcattttgacagtaacaagaaatagaatcaggaaagcctaaagacaaaaaatataaaacacaaacagttaaggaaatcataactatagctcagatgacattgtttattagtagtattattagttgtgggtgtagtaactattatttgctgtctgcaatatgcaaacttaatgctacctttctttatgcattatcccaattaaactttataatatcttggtaagtgaagcatcattttcacttatcagtcayggttccggtttagggagatgaggtaatttatccaagctcatgtagatagtagttagtaaattcaagattcacatgtaagtccatctgaccccagtacccatgacccaaaccactacttaccatactttccagattatgaggacttgaactaaagcaagacaaaaacattttggtacaaggcata

SEQ ID NO: 153307 - DNA, 449 bp, Homo sapiens
atgaaataataaaaacctaacaacagcagaggaacttccatgaatggggagagctggtgaatgtgaaggagaaaaagatgatggagcttttttacagcacgaagacaaaaattcctagctttggaagtgggtctctgaaacatgagggcatatttgattaaaaaaaaattaagaacaataaagggaagaaagctgatggtaaagaccasattcttaatacaccatcaaaaatggagggcttctagtaacctgctatgaactaaattgtatctccccccaaatgtatatgttgaagctccaacccccagagtgatggtttctgaagatggagcatttgggaaataactgggttttgagaggtcatgagggttgtctcactcagaatcaaagtcaaaccaacaaaactatctcttaccatgaccaacaagaccatctctcttcaccatcct

SEQ ID NO: 153308 - DNA, 617 bp, Homo sapiens
ttggggtctgtctttctttagctataataatatttattagcatatagatttacaattgtatatcctcttgctgaattgatmtctttgtcattatataatgatcattttgtcactttttgttttttaacttaaagtctagtttgtctgatataaatatagctactcctgcatgcattttgtttgtgtggtatacttttttccattccttcactttcagtctatgtgtatctttacagatgaagtgaatttcctgtaggcagcatatagttggtttaaaaaaaaaaatcagccagtctgtctcttttaactaggaaacttaaactgtttacattcaaggttgctatggataggtgaggacttactcctgtcattttgttaattgttttctgattgttttgtatatcctccattctcttcttcttattttattgttttcctttatgatttggtagttttttgttatgagagtatttgactcttttctctttctcatttgtgtatctgcactaccagtgatttttatactttggtgtgtttctatgatggtagatgtcattcgttcacctccagatgtaggactcccttaagcatttcttgtaagtctggtctagtggcaa

SEQ ID NO: 153309 - DNA, 617 bp, Homo sapiens
ttggggtctgtctttctttagctataataatatttattagcatatagatttacaattgtatatcctcttgctgaattgatctctttgtcattatataatgatcattttgtcactttttgttttttaacttaaagtctagtttgtctgatataaatrtagctactcctgcatgcattttgtttgtgtggtatacttttttccattccttcactttcagtctatgtgtatctttacagatgaagtgaatttcctgtaggcagcatatagttggtttaaaaaaaaaaatcagccagtctgtctcttttaactaggaaacttaaactgtttacattcaaggttgctatggataggtgaggacttactcctgtcattttgttaattgttttctgattgttttgtatatcctccattctcttcttcttattttattgttttcctttatgatttggtagttttttgttatgagagtatttgactcttttctctttctcatttgtgtatctgcactaccagtgatttttatactttggtgtgtttctatgatggtagatgtcattcgttcacctccagatgtaggactcccttaagcatttcttgtaagtctggtctagtggcaa

SEQ ID NO: 153310 - DNA, 617 bp, Homo sapiens
ttggggtctgtctttctttagctataataatatttattagcatatagatttacaattgtatatcctcttgctgaattgatctctttgtcattatataatgatcattttgtcactttttgttttttaacttaaagtctagtttgtctgatataaatatagctactcctgcatgcattttgtttgtgtggtatacttttttccattccttcactttcagtctaygtgtatctttacagatgaagtgaatttcctgtaggcagcatatagttggtttaaaaaaaaaaatcagccagtctgtctcttttaactaggaaacttaaactgtttacattcaaggttgctatggataggtgaggacttactcctgtcattttgttaattgttttctgattgttttgtatatcctccattctcttcttcttattttattgttttcctttatgatttggtagttttttgttatgagagtatttgactcttttctctttctcatttgtgtatctgcactaccagtgatttttatactttggtgtgtttctatgatggtagatgtcattcgttcacctccagatgtaggactcccttaagcatttcttgtaagtctggtctagtggcaa

SEQ ID NO: 153311 - DNA, 392 bp, Homo sapiens
gaattcagtttcttgtggatattgtctaaaggggcaagagcctttggcagaatgggtctgatgcgacttcttggtcttcctcaaggactgcatctctggaagccttttggctaccacagaaagccagggatcctatgtctttgcctccttgccacaatggataaaaccrtgattgctgagatttatgacattataaactttagggagaagctttaacttgtcaacaataaaccataataacagtgttcgactgtataaagttagggttattttgactacatgctaatttaatgtgctaaaaatatttctccagctaaagaaaggaaaagaaaccagtagtcatgtttggtatgcatggttttgtgagtgggcatgtgttttaggaatctgaa

SEQ ID NO: 153312 - DNA, 503 bp, Homo sapiens
gaattccttggctattggccccttttcattttcaaagccagcagtgattagtcagtctttcttacaatgccatctccctgattctgactcttctgacttcctcctttctgcttaaggacaattgtgattacattgagcctacctggattaattcagaataatatttgtaaggtcggctgattagtaaccttgatgccccctggccatgtaacgtaacagtcacaggttccaggggttaggatatggatatcttttggaggagccattattctgcctaccataatactgtatcacacaaatacatataatttttctgccttgattattctacaatatgrgtggttgtttcttaattatacttgcctaagaaataagttaaataataaacttcttaaagggacaggagtcattattgagctaaagagagagctcattcatatgacttttaaaatgtcaaatttcgaatttatttgtgccatatactctagttggtacccatgttt

SEQ ID NO: 153313 - DNA, 434 bp, Homo sapiens
cagcttttgctcgtgaagtttgacagtagtcagaaagtgcctctttaataaagcacacctttaaataactctcacagattcattccagcttttaaagtgagaagatggcttgaactcccactgctgccagctcagctgtggatctgaaatatccagctgtgccctctctgcctctctcatcaccaataacagactttgcagtcagaatctgtctggcacgtgtgttgatgtgtgaggygagatagcattttgctcaccgtattggcttctccgcgctagaccatagtaaacatttgtctttgtcagcagttaaagcactgtgatttgaggatgtacagggattacggacacttctgctctgttatgcttttgtctaggtctacatagaaatttatattcaaaaagagtcgatttaactgttagaatagaccagt

SEQ ID NO: 153314 - DNA, 434 bp, Homo sapiens
cagcttttgctcgtgaagtttgacagtagtcagaaagtgcctctttaataaagcacacctttaaataactctcacagattcattccagcttttaaagtgagaagatggcttgaactcccactgctgccagctcagctgtggatctgaaatatccagctgtgccctctctgcctctctcatcaccaataacagactttgcagtcagaatctgtctggcacgtgtgttgatgtgtgaggcgagatagcattttgctcaccgtattggcttctccgcgctagaccatagtaaacatttgtctttgtcagcagttaaagcactgtgatttgaggatgtacagggattacggacacttctrctctgttatgcttttgtctaggtctacatagaaatttatattcaaaaagagtcgatttaactgttagaatagaccagt

SEQ ID NO: 153315 - DNA, 598 bp, Homo sapiens
tggagaagggtcagaatgaatagctgcctctttttggtttggaagccarctatgtaagaaatatatccacttaaagttatgggtgacttttctcttccctttaggtactaactcatggatgtttcgttaatctaaaaagtatttatcgagtgtggtccttggcctcacccttgggccacatagaaaaagacctggtgagctgtcataggagaccttgtgtttctgtccggcgagaccagtattgaaatgagaagggaacagtgtggggcttgggtagtctggctgtggggaagtcccaaagccgactgaagaaaagtttccagcaactatacagagcttcaatcaaattgaaatcatgctcagaataaaatcatgtattcatgatgaaaaacagagcatcaattgaaacaaatgccatgtcccaaagggctgggaatttagcgaaacaggatggtaggaaacactggcaatgcaggggccagtgccaaagtgggaggattttgagctagattctcgtctagtaacacatatttgtaggacaactttgctgctctgttttggtgcctggccaccccttggtagctgtaagattaagctt

SEQ ID NO: 153316 - DNA, 381 bp, Homo sapiens
ggtccagaattcttttggttgttcatagcaggtgygtatctctctctctgtgtgtgtgtgtgtgtgtgtgtgtgtgtatgtgtgtgtgtaagtaaagaagaacaaagggggtggaaggagggtactgaaataaacagcaaactccaatagtaataaaggtaacttggaaaagaattgaggaagtcagaaatccacatgtgtatgtagacttcagtgtggaagatggcagaatagctggactaggcctccagtgaatcattcacaagggaaggatcaaggaacttaactatataaaaatttaaaaccattggaaatctaaaattaagataaatataaaaaaatactgttggaagtatttgcatcagatattacagataagca

SEQ ID NO: 153317 - DNA, 393 bp, Homo sapiens
ggatctgaccaaccagcactcctgttcccatcaaccatctctacccaccaggcagcacaccatcaggagaagcccccaaacgttyccctcttttcctgccacttccgcataagaattttaccacatactcatgtgctgttgttccagacccccaaagcacaaatgcagtgatgggagcggggagcgcacgccggccggccgtaaaggcgttgtagctgctagcttgattagaaataccatcaggtcccaggcactgtcacaagctgcatcttggccctttttcttcttttgtccagagtcagaactggaaaggggcacgtttcctgcctcctgccgcggtgctgtgggcacaccaaagactggattccggttcgtgtggggcctcaacaaaga

SEQ ID NO: 153318 - DNA, 548 bp, Homo sapiens
cagtcaataaaaaatatatttgtcaaaattaagaaaaatgcttatgtgctctgacataatgatgtaacttgagacttgtggaaatgtctaaatgttctggcaaaagcttttttttttaaatatggagattggccaggtgcagtggctcacgcctgtaatcccagcactttgggaggctgaggcaggcggattgcttgagcccaggagtttgaaaccagcctgggcaacatggtgaaaccctgtctctacaaaaaatacaaaaattagctgggcaggtcctgcacacctgtagtaccaactacttgaaaggctgagatgggaaaatcacctgggcctgggaggtcaaggatacaatgagccatgtttgagtcactgcactccagcctrggcaggagtgagaccccgtccccaaaaaaataaataaatagcacaaaacaattaaatattggagattattaaatttggcaaggacatctcatttttctaacttacaggaaaaatagtttagaaactcatgtttattgggaatttatgcatcacatgactag

SEQ ID NO: 153319 - DNA, 407 bp, Homo sapiens
cccgaatatctgggaccacaagtgcatgccaccatgcccagccaagtttttaatttttttttgtaaagaagaggtcttattgtgttgcccaggctggtcttgaactcctgggcttgagtgatcctcctgcttcggcttcccaaagtgctgggattataggcgtgagccaccactcyagtccctgactctgtttttgatgtttaactgctgatgactcctctttttttttccccttctgtctacttctgggccagctggtaaaaaacctaggtgctccctccttctcattcaaaccatgtgaaccccatgccatgagcaggaacactcagcccagcaccacaccctaaccaccatgcaaactccaagccagcctccttttcctaatctctcaagttgttttatgacct

SEQ ID NO: 153320 - DNA, 323 bp, Homo sapiens
aatagtgtgataggaagaataatggcccttaaagctgcccatgtcctcatcttcagagctatgactatgtcaccttacctggaaaaakaactttgtgtgtttaaggttacatgcagactttgtgtgtttaaggttacatgcagaggtgagagattaacttagattatgtaggtgagctaaatacattcgcatgagttcttaaaagcaaaaaacatttcctaggggtgatcaaagagaaagatgctatgatagccaaaggattttctgggtaattgtggaaaaggacataaatatctctgaaaacttacttcatttgattaaaa

SEQ ID NO: 153321 - DNA, 533 bp, Homo sapiens
atgatttactttaaccaatgacatttaaatggaagtcatatgtatctcttccaggtggaagcctttaagggtttgccagtgatagtttgccatggtcctttccccttgtcgttgtgatcagcaatgtttcatttggtggaggcccatcagcctacctccctgagtgcctacgtggaacagaggctcctgctgaagcgcggtgggtatgtggcctgagtgagaaatgaactttgctgttttaagctaccgagaatttagtttgttactgcaggataatccatcctattttatttagagtaactgatcatcaaggcagcaataactaamgccaaaaactgatgttcatagtttattttcagagaaaattcttttctagaagaatcggacactttgcctatttattaggggaccctgagacaagtctaatcattctaaaaaatgtgactcacctactgccaatgttatcaaagtaaatgtttatgacaccagctaggcttgtgagacatcatatgcatggttaactattatctgcc

SEQ ID NO: 153322 - DNA, 533 bp, Homo sapiens
tgcccatgggtatccttctaggactacaatgaaactcctcaacaacactacacacaaatctaattcagagctcttaggatattataattccagctgttcatttaagctggctgatggcactcaactgctcagttaagacaagcttagaggaggagaagagttagcttcctttgccttgggtagtctgtattctttgcttagtataatgaagtcaagttttctgtcttctaattccatgacaaggcttgccatcatgattgcttctattgaagtaattataatgtgtcctaaaaagacttatgtttctgagcaaaccagaataaaaggagctmgatttactgtcctactcaagacagcttaaactctgaacaaaaatatagaaaacaatggcactcaagatattagacatcaagcaatgaaggacaatgatcactgaaagatgggaaacaaatcagatgaaccagataattgcccaagaaactttctctattgcatgtgagaagtttccaggttgcagcgcagggagagagaac

SEQ ID NO: 153323 - DNA, 533 bp, Homo sapiens
tgcccatgggtatccttctaggactacaatgaaactcctcaacaacactacacacaaatctaattcagagctcttaggatattataattccagctgttcatttaagctggctgatggcactcaactgctcagttaagacaagcttagaggaggagaagagttagcttcctttgccttgggtagtctgtattctttgcttagtataatgaagtcaagttttctgtcttctaattccatgacaaggcttgccatcatgattgcttctattgaagtaattataatgtgtcctaaaaagacttatgtttctgagcaaaccagaataaaaggagctagatttactgtcctactcaagacagcttaaactctgaacaaaaatatagaaaacaatggcactcaagatattrgacatcaagcaatgaaggacaatgatcactgaaagatgggaaacaaatcagatgaaccagataattgcccaagaaactttctctattgcatgtgagaagtttccaggttgcagcgcagggagagagaac

SEQ ID NO: 153324 - DNA, 424 bp, Homo sapiens
tcaatttaaaccaaaaagatttcattctctcagaaaaattattcctgcttccttgcaatgctgtggtttataatagagttattattagctttgaccacaattatgccactctgacagctcccacctgcctggaccaagagtgacttcttatccctggaatgctggttactcttgttcttcatgctactgggctggcactcagcattgcacaatgatgcttagccttttatgggcatagctatttcctcaaggagactgaactcttggaggacaaggaccctgccttggtatgtcttattatagatcccggaagtgcccagtactggccccttttatagaakatgctcagtatttgtttgtgatggtaatgatgattcatgtttgactggggtgacaaattaattttattcattctgtttcctca

SEQ ID NO: 153325 - DNA, 424 bp, Homo sapiens
tcaatttaaaccaaaaagatttcattctctcagaaaaattattcctgcttccttgcaatgctgtggtttataatagagttattattagctttgaccacaattatgccactctgacagctcccacctgcctggaccaagagtgacttcttatccctggaatgctggttactcttgttcttcatgctactgggctggcactcagcattgcacaatgatgcttagccttttatgggcatagctatttcctcaaggagactgaactcttggaggacaaggaccctgccttggtatgtcttattatagatcccggaagtgcccagtactggccccttttatagaagatgctcagtatttgtttgtgatggtaatgatgattcatgtttgactkgggtgacaaattaattttattcattctgtttcctca

SEQ ID NO: 153326 - DNA, 428 bp, Homo sapiens
gtttttttgtttgggtttgtttgttttaacatagagtcctgaagggaaacactcagaaagttgcagtgcctagaaaggtacttcagacacaggccgttaacaagaattcacactaagaagggttgacccatcaaggctgaggaccactgtagtgtttttatacctgataaggcatgacttgccttcmacgaatgctgcatttttcctcattgctgtatcagcgtactcattttcctgtattcatttatttacatacccaccctcacttgagagcagggtcaatgaccttctactctgtgccaggcagggcccagcactgatgagactgcaaatctaaatgcattggaagagaaagagtgttcccatgtattctggatcctactgtttgggacgtcatgcagattttaccaaataatatcttactttcc

SEQ ID NO: 153327 - DNA, 590 bp, Homo sapiens
cattagtctctcctggtgtgctcactctaagcaataattcatcactttattaatttaaaacataactactagcttmtgtcttcatgctgtgaaacttaacttatagaattgatttttttttaaaagccacttaaatgtaactggctacatgtgaaagtgcattagtaaatttgagcatttaactgaccagaatcatgtctgccatgctcttgcattaggtctgagcttctccttcttgctgaaatttcttagcattgctccataggcactttcctattagtatcacttcttaggagcctttagcaaaagatttaagcatttcagaaaagcttatttattaatttacacattagcagagattaacttcagcaatccctattcccatttgctatagaagcctggcactaaattcccgagccaagctgagtatacgataatgaataaaaaggtatttgaaaagaagatgtaaatcagtttagtcagaatacaattttcaagccagcatgtgagttggtctcaaacgtatctccaacttccatttgttaatcactggtttatgtgttcactataaggacaactgggtcgttttc

SEQ ID NO: 153328 - DNA, 319 bp, Homo sapiens
tgtagtcccagtactcaggaggatgaggcaggagaatcgcttgaacctgggaggcagaggttgcggtgagctgagatcgcrccactgcactccagcctgggtgacagagcaagactccatctccaaacaaaacaaaacaaaacaaaacaaaacaaaacagaacaaaacaaaagaaaccattgcattaaatctgtagattacattgagcattatggacatcttcaaaatatttcaacttttgaacaggagcatgctgaagagtgtgttgttaaatatctatatatttgtacatttttaatttttttttctgttctatact

SEQ ID NO: 153329 - DNA, 510 bp, Homo sapiens
ttcaacaacgttggatcagcacctaggaatcaggagtttgggcagaactggggacttaacaactgttcctatcaccccactgacaaccacgtggaccagtgtgattgaacactcaacacaagcacaggacaccctttctgcaacgatgagtcctactcacgtgacacagtcactcaaagatcaaacatctataccagcctcagcatccccttcccatcttactgaagtctaccctgagctcgggacacaagggagaagctcctctgaggcaaccactttttggaaaccatctacagacacactgtccagagagattgagactggcccaacaaacattcaatccactccacccatggacaacacaacaacagggagcagtagtagtggagtcaccctgggcatagcccaccttcccataggaacatcctccccagctgagacatccacaaacatggcaytggaaagaagaagttctacagccactgtctctatggctgggacaatgggact

SEQ ID NO: 153330 - DNA, 622 bp, Homo sapiens
ggggcttggggtacagattacatcatcagccaggtaataagcctagtacctgatcagtagattttttttaatcctctccctcctcccagcctccaccctcaattcacatgtctccatgtgtactcaaggtttaattcccacttatgagtgagaacatgcggtatttgtaaactacatctttatttttgctaacctcgaactgaaatttagcatttgttttattgatgaatagaggtaacaaaacaaaccacattaatcctagcagtgcctgtgcctttgccaacaacagaaattccggacactttcatatcctatgacaattgttgcaagcacttttaaaaatcatgtacgactttattcataattatagtggttattaggcttttcaatagatcttatttaatgagttagtaaaakaagtgcctgtattattgtattacatttgtttattaagatcttgataacaacatttcaatataatcatttcctttgttttttaaattttagattcaggggtatatgtgcaggtttgttacgtggatatactgcataatgatgaggtttggcttctagtgaacccatcagccaaatagtgaatgttgtgcccaataagtagtttttc

SEQ ID NO: 153331 - DNA, 646 bp, Homo sapiens
cagatctgatcactatacattacatatatggaaacattactatgtacctcataaatatatacaattaaaacattttaaaaggagtcagagtattttttttttttgagacagagtttcgctcttgttgctcaggcaggagtgcaatggtgcaatctcagctcactgcaacctctgcctcccggatataaatggttctcyggcctcagcctcccgagtagctgggattacaggcacccaccaccacacctggctaatttttttgtatgtttactagagatgggggtttcaccatgctggccaggctggtcttgaactcctgaccacaggtgatccgcccgcctcggccttccaaagtgctgggattacaggtgtgagccaccgtgcctggccgagtcagagtatttttctatctcaaggaagccagtgaatgctctgtgattaaattactaatggaatcaaggaactgatctcagacatcctcctgccctgacacctaagctttcactgaattactctgtcactcctcattcttctacagctcttgggaaaaatttaagtatcaggaacccgaagattcatcccttaagcttcttgatgagcctctctctaaggaagcaccagtcctatcctatctggacctctgcac

SEQ ID NO: 153332 - DNA, 646 bp, Homo sapiens
cagatctgatcactatacattacatatatggaaacattactatgtacctcataaatatatacaattaaaacattttaaaaggagtcagagtattttttttttttgagacagagtttcgctcttgttgctcaggcaggagtgcaatggtgcaatctcagctcactgcaacctctgcctcccggatataaatggttctccggcctcagcctcccgagtagctgggattacaggcacccaccaccacacctggctaatttttttgtatgtttactagagatgggggtttcaccatgctggccaggctggtcttgaactcctgaccacaggtgatccgcccgcctcggccttccaaagtgctgggattacaggtgtgagccaccgtgcctggccgagtcagagtatttttctatctcaaggaagccagtgaatgctctgtgattaaaytactaatggaatcaaggaactgatctcagacatcctcctgccctgacacctaagctttcactgaattactctgtcactcctcattcttctacagctcttgggaaaaatttaagtatcaggaacccgaagattcatcccttaagcttcttgatgagcctctctctaaggaagcaccagtcctatcctatctggacctctgcac

SEQ ID NO: 153333 - DNA, 555 bp, Homo sapiens
caatatgatttttaaaagtgtttcaaactttcccccaccaaaagatctgcttttcgaaaactgtaaatctttggcaactctgaaatttgcccagcatgcctttctttkgggtctctgagtctcatttcttttaatctgagaacttgatgatttagacattaacaactagaaacagatttaatgcatcagtaaactatgactcaagactggaaatgccagaaaaatacttgcttctacttaagacttagatattaatggtcaattctacaaaatcatattcaatatttatactctgaattttgatgcatttttgttgattttccttccagacttttcaaaaccaaaaggttcttttcttatcattatcttccttcttctccatgcatttattaacattttgatttttttttttttttcttgagacagagtctcgttctgtcgcccaggttggagtgcagtggcgcgatctcggctcactgccagctctgcctcccgggttcacgccattctcctgcctcagcctcccgagtagctgggactacaggcacccgccac

SEQ ID NO: 153334 - DNA, 496 bp, Homo sapiens
ggaattcccccaccccttgcrcttcccgcgtgaggtgatgcctcaccctgcttcggctcatgctcggtgggctgcatccactgtcctgcacccactgtctgacaagccccagtgagatgaacctggtacctcagttggaaatgcagaaatcacctgtcttttgcgtcactcacgctgggagctgtagactggagctgttcctatttggccatcttggaacctccctcaatgtgcaggttttaaatccaactgctcatctaaaatgggaatgctagacaaaaagatctgtgctttgctgaaaaagcaaaagttaaaaatctggcatgacaaccagatgcctacaaaggaagaataagcaaattttgaatggtgtttcaaacaaaggagtcctctgaaaggagttttgaaaggcaagcataggagataggaaaggaaagggaatgatttgggctcagttgctgagttcaggctcagagatcttgaatgggagcctgga

SEQ ID NO: 153335 - DNA, 422 bp, Homo sapiens
actgggcaccgtggtctcaccgaggagacacacaaagctgactgtcacccaccctttgaaagtctgcaagccctggtgctgacggcccccgtgcttagtcatccygggctcctgggccatgatgcagcctctgtgctctgtgtttgagaatagtgcccaggggatacagggaggatgtgaccacttggggacagtggctcttaaacacagaagtaggggacttagtgttgacagggtgttcagctcctcaccggtgttctttcagacctagaacgctgcctcttcctggaagcccaccatcctgtagttccccaaactgggggaacgtgactgcacctagtcccgtgggtctgcgcaggtggcagcagtgcttgagggccctgccttcctcgggagcagcggctcaactcctgcggggattt

SEQ ID NO: 153336 - DNA, 367 bp, Homo sapiens
ccctcacccgcagcctgccgcctccagatgtgaagccctccaacatcctcgtgaactctagaggggagatcaagctgtgtgacttcggggtgagcggccagctcatmgactccatggccaactccttcgtgggcacgcgctcctacatggctgtgagtccccgctggctctcccctccagctctcctccctgctgctctcccccaagctctccccacccagctctgccagccagctctccccctcagctctcacccccatgtctcctgcgcagctgtccctcccagttctcctgcgcagctctccccgcctcccacgaggctttcccaactatttcgtgggcacacactcctacatggctgttagca

SEQ ID NO: 153337 - DNA, 443 bp, Homo sapiens
tgaactgcctgataaacaattcaaaataatcacttaaagaaactcagtaagctgcagataatacagatagataactaaacgaaatcagaaaaacagacttagaagcttaacaaatagaatagaagccatagaaaagaaccagtaagaaattctgggcctaaagaacacatgactgaactgaaaaatttcatatagagtttcaacagcagacttggtcmagtagaagaatatatgcaaatcaataaatgtaatatacacattaacagaataaaggatgaaatcacatgattatctcaaaagatgcagaaaaagcatctggcaaaattcaacatcacttcataattaaaaactcttaacagattaggtgaagaaggaatatacctcaacatgataaaagccatatgtgccaagcccacagctaacaacatactcgatggcgaaaa

SEQ ID NO: 153338 - DNA, 535 bp, Homo sapiens
gtttagaatgctacctattgmgttctggatagaatcacaactctttaccacaatcaacaccgcttcagccctgcttctatatccagcctcatctatttctgctcctcctcattttccttctggccatgctgatggattgtcagcttcccagatgtgtgagaatctctcctcccttcctaacattctcatgctctccctctgcctctcaagaacttcctgccccatctctcatgacaaatcctttctacattctttaagatgcagcccttttgctccttccttaaggatgtcttgtctggctctattttgggtgacgtgctccttctgcatctcccagagccagcctgtgtgtgtcagctacaacatttctttgcatctctgtgtcatatatcaccaaatctgcctaagcttgcatgagtcactgcatgacaacttcagactccaccagcattgtccccactaaccacaaggcttagacattcgtccagtatgctcggggttgtggggtggtagcagtaactggctggtgaccatc

SEQ ID NO: 153339 - DNA, 535 bp, Homo sapiens
gtttagaatgctacctattgagttctggatagaatcacaactctttaccacaatcracaccgcttcagccctgcttctatatccagcctcatctatttctgctcctcctcattttccttctggccatgctgatggattgtcagcttcccagatgtgtgagaatctctcctcccttcctaacattctcatgctctccctctgcctctcaagaacttcctgccccatctctcatgacaaatcctttctacattctttaagatgcagcccttttgctccttccttaaggatgtcttgtctggctctattttgggtgacgtgctccttctgcatctcccagagccagcctgtgtgtgtcagctacaacatttctttgcatctctgtgtcatatatcaccaaatctgcctaagcttgcatgagtcactgcatgacaacttcagactccaccagcattgtccccactaaccacaaggcttagacattcgtccagtatgctcggggttgtggggtggtagcagtaactggctggtgaccatc

SEQ ID NO: 153340 - DNA, 543 bp, Homo sapiens
agaatgctacctattgagttctggatagaatcacaactctttaccacaatcaacacygcttcagccctgcttctatatccagcctcatctatttctgctcctcctcattttccttctggccatgctgatggattgtcagcttcccagatgtgtgagaatctctcctcccttcctaacattctcatgctctccctctgcctctcaagaacttcctgccccatctctcatgacaaatcctttctacattctttaagatgcagcccttttgctccttccttaaggatgtcttgtctggctctattttgggtgacgtgctccttctgcatctcccagagccagcctgtgtgtgtcagctacaacatttctttgcatctctgtgtcatatatcaccaaatctgcctaagcttgcatgagtcactgcatgacaacttcagactccaccagcattgtccccactaaccacaaggcttagacattcgtccagtatgctcggggttgtggggtggtagcagtaactggctggtgaccatcatttcttacatc

SEQ ID NO: 153341 - DNA, 481 bp, Homo sapiens
tcaacaccgcttcagccctgcttctatatccagcctcatctatttctgctcctcctcattttccttctggccatgctgatggattgtcagcttcccagatgtgygagaatctctcctcccttcctaacattctcatgctctccctctgcctctcaagaacttcctgccccatctctcatgacaaatcctttctacattctttaagatgcagcccttttgctccttccttaaggatgtcttgtctggctctattttgggtgacgtgctccttctgcatctcccagagccagcctgtgtgtgtcagctacaacatttctttgcatctctgtgtcatatatcaccaaatctgcctaagcttgcatgagtcactgcatgacaacttcagactccaccagcattgtccccactaaccacaaggcttagacattcgtccagtatgctcggggttgtggggtggtagcagtaactggctggtgaccat

SEQ ID NO: 153342 - DNA, 481 bp, Homo sapiens
tcaacaccgcttcagccctgcttctatatccagcctcatctatttctgctcctcctcattttccttctggccatgctgatggattgtcagcttcccagatgtgtragaatctctcctcccttcctaacattctcatgctctccctctgcctctcaagaacttcctgccccatctctcatgacaaatcctttctacattctttaagatgcagcccttttgctccttccttaaggatgtcttgtctggctctattttgggtgacgtgctccttctgcatctcccagagccagcctgtgtgtgtcagctacaacatttctttgcatctctgtgtcatatatcaccaaatctgcctaagcttgcatgagtcactgcatgacaacttcagactccaccagcattgtccccactaaccacaaggcttagacattcgtccagtatgctcggggttgtggggtggtagcagtaactggctggtgaccat

SEQ ID NO: 153343 - DNA, 481 bp, Homo sapiens
tcaacaccgcttcagccctgcttctatatccagcctcatctatttctgctcctcctcattttccttctggccatgctgatggattgtcagcttcccagatgtgtgagaatctctcctcccttccyaacattctcatgctctccctctgcctctcaagaacttcctgccccatctctcatgacaaatcctttctacattctttaagatgcagcccttttgctccttccttaaggatgtcttgtctggctctattttgggtgacgtgctccttctgcatctcccagagccagcctgtgtgtgtcagctacaacatttctttgcatctctgtgtcatatatcaccaaatctgcctaagcttgcatgagtcactgcatgacaacttcagactccaccagcattgtccccactaaccacaaggcttagacattcgtccagtatgctcggggttgtggggtggtagcagtaactggctggtgaccat

SEQ ID NO: 153344 - DNA, 489 bp, Homo sapiens
taccacaatcaacaccgcttcagccctgcttctatatccagcctcatctatttctgctcctcctcattttccttctggccatgctgatggattgtcagcttcccagatgtgtgagaatctctcctcccttcctaacattctcatgctctccctctgcctctcaagaacttcctgccccatctctcatgacaaatcctttctacattctttaagatgcagcccytttgctccttccttaaggatgtcttgtctggctctattttgggtgacgtgctccttctgcatctcccagagccagcctgtgtgtgtcagctacaacatttctttgcatctctgtgtcatatatcaccaaatctgcctaagcttgcatgagtcactgcatgacaacttcagactccaccagcattgtccccactaaccacaaggcttagacattcgtccagtatgctcggggttgtggggtggtagcagtaactggctggtgaccat

SEQ ID NO: 153345 - DNA, 531 bp, Homo sapiens
agaatgctacctattgagttctggatagaatcacaactctttaccacaatcaacaccgcttcagccctgcttctatatccagcctcatctatttctgctcctcctcattttccttctggccatgctgatggattgtcagcttcccagatgtgtgagaatctctcctcccttcctaacattctcatgctctccctctgcctctcaagaacttcctgccccatctctcatgacaaatcctttctacattctttaagatgcagcccttttgctccttccttaaggatgtcttgtctggctctattttgggtgacgtgctccttctgcatctcccagagccagcctgtgtgtgtcagctacaacatttctttgcatctctgtgtcatatatyaccaaatctgcctaagcttgcatgagtcactgcatgacaacttcagactccaccagcattgtccccactaaccacaaggcttagacattcgtccagtatgctcggggttgtggggtggtagcagtaactggctggtgaccatc

SEQ ID NO: 153346 - DNA, 577 bp, Homo sapiens
tcactgttgaagtgggaggttacaaattagcaaggtgagaagactagaatgattcatgtratagtagatcagaggtggagacatcaatgtaaacttatgtttagtttaatatagatgcacagttctacatagaaaactttgtaattaggtgtgtcaaggtaggttagacacacacatatacttcctagcattgccaataagggagaagatacaatgtgctcattcagcagccagatgtaagttttcctaccattctgaaaggaatctgactctttgaagaaatgtctgatactagaactgggacagtaaatataggagccaggataatctggaaggatcagaaagtaagtaagtactaaaaaaattaaaatatatcaaagaaaaataagagccaataaaaacagctactgatggccaacacaggaatgaattgtgcaacataatactgtagtgttgaataataactaaagcttaaagtaattatctaggtgtctgtatttgtatacataggtgaataagcaaatggagttgcatagaaatctcctttgcaaaagaattccaaataattgatgtagac

SEQ ID NO: 153347 - DNA, 569 bp, Homo sapiens
acatgcctttctgggaaaacagtccacagctcttattctcagcaggcttcacggtgaaaaaaggttagaactcttgctacagagctgtggaagcagccaggtgaggggcctgccaagggcactctgggcactacctgggcactctcgagcccatcatcccctaggcaggctgcactgcttggtatttgcagagctgagggggtggggcatgtggggactgtgaaatcgccctgagatgacccacagtcctcagctrggaagtgagcgctgcatctcctgcagcgtcctccatccctacagccatggggccaggagaaccggcccttgcagcaagtgagaagcctattattgattccctccctagccatgtagacagtgaaccaagacactcatatcaggtaaatgccttgttctctgttaccaaggtaaccagtaggcattcccagatacagcgaaggtcctcacaccaagatatgcacctggccacctgaggaaagagaaaggactatctgaggggatggggctgagctgggtgtggagtggtccttgtgggtcttggagagtgggag

SEQ ID NO: 153348 - DNA, 569 bp, Homo sapiens
acatgcctttctgggaaaacagtccacagctcttattctcagcaggcttcacggtgaaaaaaggttagaactcttgctacagagctgtggaagcagccaggtgaggggcctgccaagggcactctgggcactacctgggcactctcgagcccatcatcccctaggcaggctgcactgcttggtatttgcagagctgagggggtggggcatgtggggactgtgaaatcgccctgagatgacccacagtcctcagctgggaagtgagcgctgcatctcctgcagcgtcctccatccctasagccatggggccaggagaaccggcccttgcagcaagtgagaagcctattattgattccctccctagccatgtagacagtgaaccaagacactcatatcaggtaaatgccttgttctctgttaccaaggtaaccagtaggcattcccagatacagcgaaggtcctcacaccaagatatgcacctggccacctgaggaaagagaaaggactatctgaggggatggggctgagctgggtgtggagtggtccttgtgggtcttggagagtgggag

SEQ ID NO: 153349 - DNA, 569 bp, Homo sapiens
acatgcctttctgggaaaacagtccacagctcttattctcagcaggcttcacggtgaaaaaaggttagaactcttgctacagagctgtggaagcagccaggtgaggggcctgccaagggcactctgggcactacctgggcactctcgagcccatcatcccctaggcaggctgcactgcttggtatttgcagagctgagggggtggggcatgtggggactgtgaaatcgccctgagatgacccacagtcctcagctgggaagtgagcgctgcatctcctgcagcgtcctccatccctacagccatggggccaggagaaccggcccttgcagcaagtgaraagcctattattgattccctccctagccatgtagacagtgaaccaagacactcatatcaggtaaatgccttgttctctgttaccaaggtaaccagtaggcattcccagatacagcgaaggtcctcacaccaagatatgcacctggccacctgaggaaagagaaaggactatctgaggggatggggctgagctgggtgtggagtggtccttgtgggtcttggagagtgggag

SEQ ID NO: 153350 - DNA, 465 bp, Homo sapiens
cctattgttgcaaccatctttggagaatacaatctgcagcaatcacctttggagactaggaaaccaatgcagtattctgaaactcgtaattctgaaaactaatgaatatgaatggaaagaatcaagcatttatcctccctttcctacacatgctatccctctaagtaatcagatagttgatgtgtggggattttatttttataaaaggattcctgtaatggaaatttcagtaatggaaataaaaggattccagtaatggctgaaagagagacacaataagaaagtgatcattttgcarctcctaacaacaacgaatctaggcaatgatcatgaatgaatgcatgacattatgcaaaaggcaatcactttacaatggataaatcacattgatgacacttaagcccactaccaaatctaatcacaaaaacagtgacaagcagaccttgccaaaataattgaacttga

SEQ ID NO: 153351 - DNA, 448 bp, Homo sapiens
aatgccctcttgagcccataaccaacaatgtcctcattttcttccctatgaacagaaattccatcttctaaaccaaaactcattgctcagctggagcgaggggaagcgccctggagagaggagagaaaatgtccactggacctctgtccaggtgagtgttgagtgtggggtagacgggataatccacagcttggcagataggaaggaggaggcatctctcagatactgggaagaagctcttcttcaggcctcctaagccaagagaaacgttgcctgacatggtcttcyttccggaacataatcttcagttgagggagggacttccctggttcccttgtctcttccctacaccaggaagcctcccttcctcatttgtcttctccgtaatgcttagtctttcctcattcactgtcttctttctcacctgatcttaaaaattgcatctacc

SEQ ID NO: 153352 - DNA, 496 bp, Homo sapiens
actgtatcacatttaggggagtgcttctctgaaaatgcagtgttgcttggattattccagtgattgttttaggacagtttcagggctgaccctgggatacattattaggtaggcaatgtttttgacacaagccttctatgatcctcatctgcaaccttctatttcaaaggactccaggctctgaaattaaatatttttaatgtatgttcatttattcacaggccttggtttcctttttcctcttatttctctcttctcccttatcccttctgcaatgtctgcacctttgttgttttacttgattctcatgggtaagatgttaggaaatgattgtagtacccctctcttcctaaaagcttagctaaatgcrtgccactaccatccccaaggcattgagaatcacactcttcagatgtgggaatgcgcctggatagttccagtggatatccaacattatcaatgttttgaatcactttagtcaatgtgtttaatttat

SEQ ID NO: 153353 - DNA, 529 bp, Homo sapiens
cctaagcctctacactgtatcacatttaggggagtgcttctctgaaaatgcagtgttgcttggattattccagtgattgttttaggacagtttcagggctgaccctgggatacattattaggtaggcaatgtttttgacacaagccttctatgatcctcatctgcaaccttctatttcaaaggactccaggctctgaaattaaatatttttaatgtatgttcatttattcacaggccttggtttcctttttcctcttatttctctcttctcccttatcccttctgcaatgtctgcacctttgttgttttacttgattctcatgggtaagatgttaggaaatgattgtagtacccctctcttcctaaaagcttagctaaatgcatgccactaccatccccaaggcattgagaatcacactcttcagatgtgggaatgcgcctggatagttccagtggatatccaacattatcaatgttttgaatcaytttagtcaatgtgtttaatttatgcttgaatttcagatcttgt

SEQ ID NO: 153354 - DNA, 383 bp, Homo sapiens
aaatattaactggttcacagcaccctactctcaattctttaaggttcctcatcacattaagaataaaatttagaactcttgccttgcccccaaggcctgtttgagttggcctctgactactgctctgacccatctttctacttctccttctattctccctggatcactatttccacrtctcattggccttttggcgttcctccaaaatggtaggccctcctggctcaagacgtgcattctcccttcatgttttttctgggccactttcttcagctgtatgttcaagtggccccttttcagagaggcctgccatgaccactgtatctaaattgcatccttcccttcattgcccatcacccttgtcctgctgtacttttcttcac

SEQ ID NO: 153355 - DNA, 632 bp, Homo sapiens
ggacattaggggtgagattaattgatggacatgttgaggacattgagttatttctgaatttgcaaatgtcttctttttctctgtgattaaaccatctgcatttgttaattgacttccatcaaaattagactcctatcctcccacaaagaatggagatggcacagggcaccatcttctttgatgtttacacttcagagatggtttccaggcccttaagaaagatattttcttggctataaaattggcaaaagtctggaaatcgatttacatatcaaaaggacagagaaagtatttataattgtatttttctaaaattaatgctctaagaaaaagggaaatcagggcctatggtcaagaagaaacctgtctaaagtttagccaacccgaaaggaacattaagtyggcaggggtcaagattgcattattagaaccgctgcagatgcattcattttagtcattacagttgttgactagaagtctccattattgaattcctatccccatttccacgaaatcaatcatctattataacacatgtgtgcttatgtgttgtgtgtgtctttataaaggacctttggggacttagaaagggttcttgttgttttccctgcttacaatagactcaatgtttg

SEQ ID NO: 153356 - DNA, 555 bp, Homo sapiens
cagcactgaaccacagggacaggcctcactgctaagctaactcatgacagcaactaatggagaacatttgcaatagactgaaggtttgtgtaccaccaaaaatccatacattaaaattctaccccccaatatgatggaggaagggcctttgggaggaggtgcctttgagargtgatcatctcataataacagagctctcatgaataaaatgagttctcttataaaagaggcccgtttctgccatgtgagggcacactgagaagacactctatgagccagaaagtggaccctcaccagacactgaatctaccagtatcttgatcctgcacttctatcctccagagctgtgaggaataaatccctgttatttagaagacacccagtctatggtattttgttgtagcagcccaaatgaactaagacaacaattgatatcagtgaatagaacaactcccaagaggaaggggagataaagccacagacataaataaattcccttcttgtactaaattgtccattaggtacacttgcagaaggaatgagttagggggtgaa

SEQ ID NO: 153357 - DNA, 562 bp, Homo sapiens
tggagatcagatggctgtaggagtgcagctttatttcttggttgtctcacctatyccgttggtctatgtgtctgtttctgtaccagtatcatgctgttttgctttagccttatagtacagtttgaagtcaagtagtatgatgcctctggctttgatctttctgcttaggacagcactaaacttttaggctctttcttgcttccatatagattttagaacagtttttttttttccaattctgtgaaacatgtcattggtagtttgataggaatagcactgaatttgttcactgctttggacagtatggccattttaattatatcaattcttcctatccatgagtatgaaatgtttttccatttgtttgtgtaatctgtaacttctttcagcagtgttttgtaattatcgttgtagagtgcttctccctgtttagctgtatttctagttattgtattctttttgtggctattatgaatgagattgcattcatgatttggctctcagcttggatgttgttgatgtataaaaatgctgatttttgtacattgattttgtattctga

SEQ ID NO: 153358 - DNA, 562 bp, Homo sapiens
tggagatcagatggctgtaggagtgcagctttatttcttggttgtctcacctatcccgttggtctatgtgtctgtttctgtaccagtatcatgctgttttgctttagccttatagtacagtttgaagtcaagtagtatgatgcctctggctttgatctttctgcttaggacagcactaaacttttaggctctttcttgcttccatatagattttagaacagtttttttttttccaattctgtgaaamatgtcattggtagtttgataggaatagcactgaatttgttcactgctttggacagtatggccattttaattatatcaattcttcctatccatgagtatgaaatgtttttccatttgtttgtgtaatctgtaacttctttcagcagtgttttgtaattatcgttgtagagtgcttctccctgtttagctgtatttctagttattgtattctttttgtggctattatgaatgagattgcattcatgatttggctctcagcttggatgttgttgatgtataaaaatgctgatttttgtacattgattttgtattctga

SEQ ID NO: 153359 - DNA, 562 bp, Homo sapiens
tggagatcagatggctgtaggagtgcagctttatttcttggttgtctcacctatcccgttggtctatgtgtctgtttctgtaccagtatcatgctgttttgctttagccttatagtacagtttgaagtcaagtagtatgatgcctctggctttgatctttctgcttaggacagcactaaacttttaggctctttcttgcttccatatagattttagaacagtttttttttttccaattctgtgaaacatgtcattggtagtttgataggaatagcactgaatttgttcactgctttggacagtatggccattttaattatatcaattcttcctatccatgagtatgaaatgtttttccatttgtttgtgtaatctgtracttctttcagcagtgttttgtaattatcgttgtagagtgcttctccctgtttagctgtatttctagttattgtattctttttgtggctattatgaatgagattgcattcatgatttggctctcagcttggatgttgttgatgtataaaaatgctgatttttgtacattgattttgtattctga

SEQ ID NO: 153360 - DNA, 592 bp, Homo sapiens
tataggtgtttacaatttatttttaaaccattaaaatattttcatgaatgtttaaagacatttcattcaactgttaataacatgtttctccaaagtgagtaaacttgcagaatttgggacaatgtttagcactgaagatttctatctcagagagccctagctagttatagaatgaactctgctccagtctatcttgtctcccacttagtctggttgataaaggcaagacatcartcaggaaagagcataactatctagtgctttagggagaaatatggacaccttagcaagaacatgaaactgttatggaataatttgagtttggatgaacatagatcaaaaacataacttcttggaaaatgtcactgtcatagaaatcagaccttacactgaagggatgtagtttccttaaaagtttcgaacttgattccttttaacaaacactaaaatgttaaacatacccttaaaagccatgatatttaaatgcacaaaatctaaatgttcaataaaaacaaattttagttacataaatacatgcgtgacacatccaactgctctgtcaacattctctttctctgtaaatggtaccaac

SEQ ID NO: 153361 - DNA, 592 bp, Homo sapiens
tataggtgtttacaatttatttttaaaccattaaaatattttcatgaatgtttaaagacatttcattcaactgttaataacatgtttctccaaagtgagtaaacttgcagaatttgggacaatgtttagcactgaagatttctatctcagagagccctagctagttatagaatgaactctgctccagtctatcttgtctcccacttagtctggttgataaaggcaagacatcaatcaggaaagagcataactatctagtgctttagggagaaatatggacaccttagcaagaacatgaaactgttatggaataatttgagtttggatgaacatagatcaaaaacataacttcttgraaaatgtcactgtcatagaaatcagaccttacactgaagggatgtagtttccttaaaagtttcgaacttgattccttttaacaaacactaaaatgttaaacatacccttaaaagccatgatatttaaatgcacaaaatctaaatgttcaataaaaacaaattttagttacataaatacatgcgtgacacatccaactgctctgtcaacattctctttctctgtaaatggtaccaac

SEQ ID NO: 153362 - DNA, 557 bp, Homo sapiens
gactttgggcttttgagttggtgcttaaataagttaagactttgtgggctattgggatagaatgaatgtattttgtatgtgagaagaacatgagttttaagagtccaagggaaaaatgctatagttttaatgccccttctaaaattcatgttgatattaattgccattgtgacagtagtaagagatgaagcctytacaaggtgattaggccatgggggctctgtctacgtgtgtgggtttaatgcctttaaatgggtactctcttgctcttgagtgcactctcttgtccttctgccatatattaatgcaggaagaaggccctcacaagacgctgagcagatgctgggatcctgttcttggattttccagcctgcagaactgtgagccaaataaatttctattgtttataaatgacccagtctatggtattctgttagagccacagaaaatagactgaggaacctaccatagtggcatggactggccaatgcagaaacttacaattcatctttacatagaactcagagacttaggtggaacaagatttctaaagccta

SEQ ID NO: 153363 - DNA, 578 bp, Homo sapiens
aattgcacctccagctttgaacacttacaggatttttttttttcaatcttagtccctgaattagaatgtgttacttctgtgttctcttcccagcactggacaggtcgttgttggtgcttccgtgtggatggatcacatcccragggtggacattttgctcctgtattcctttgtttgttctttttcatccaggagtttttatcattctccttgtccttctcttttgaactctcctgtggtcagctgtctgctttccttgctcagcacggtgttgggatggggtttgtaaatttaatttcagataacatcttgtttgtgaaaaaaagaaaactaaagatcagtgtaacaataatagtgaagcatatggaataaaactaaagatcagtgtaacaataatagcgaagcatatggaattgtgaaggaaaataaataggtttagtatacacaagaacatattgctctgatggttttattttattttatatttgttttttctctgactttaaatgctcctaaagacacatttggcatttttgcgccagtagcaaggatgtgcagagatgtattggtggaagaat

SEQ ID NO: 153364 - DNA, 664 bp, Homo sapiens
catgaggaaaccttgccaagaaggcaggggaagccccagtggtcactcccacatggcattcagacggagggtcctccagcatcgtgggctcaagagttgtccaagtgtgtgttcgtgtgtgtgtggtgtgtgtgtgagagagagagagagcacgctagctctcaggatggggatgttggggaggaggcctagaactgggtttctccctctgtgtaatctactctctctttatcctcctcccagatacctctcaccctcgggagaagactcttagagaagcttgttacaaatgcatattcctcagccaccccctcctgaattcctgtttcagcaggagtggagygggcccaggaatgtgcattttaaatcaggatcattctgaagctgaaggtgtagcctaggcttcgaccctaagctgcgttaaatgacttcttgctagagaagaccccactaaaagagtccagtgtcacccgccctggtttattaacacttgaactgggatgggaaggttttaacttattgcagagccaaacaaattaatctttaatggtgagcattgcttctgctcaccaagggaggggacctctgggagctctctgcagtgctcccctggccagctcctgggggaggggcctggtcactgtgaacacattctggttgtgca

SEQ ID NO: 153365 - DNA, 642 bp, Homo sapiens
cgaattccaacatctctgccaacatccaacatccctgtctggttttcatgcttactgtgtctcttcaaatgttttttttttctttaatttgccttgtawtcttttcttgaaagctgcgcatgatgtaccaggtaaaaggaactagtgtatacaggactttactaatgtggtaggaaggtgtaggggaagaagaagcattttatagtcctctgagtagtgctcagtctttcagttagcctgtgcctctgggttgtggacttcacaggtatttctcagtcttcctcccccttaggtgagacaggggtctagagtgagctggagttgggtatttccttcctcccagtagaagactagaaggggcttgagttgaacattttttcttcttccaagtcagttatgatatgatagaacctcaacacattaatctctggctaaatagtttcttgttgtggcaggtgttgttaagaacgaatgctcttgcatgtttcagaatggttctttttctctcccctgttgaaagcacaaggggattgatttctgctgctcaccatgagaacctggcagagctcctggaggtcaaacttacaaaaatctgggggcctcccaatgactggggtcctttgtagttttttactctcagac

SEQ ID NO: 153366 - DNA, 563 bp, Homo sapiens
cctgggattgggatgttttgtgtcctggcagtgatgacagaggagagttgactctgtacttcccgaattcaggaagacagtctcctgggatgtccagccttggcagcaagggagttccaggctgggtctgcagggagaccgtctatcagcagccagccaagagaaaagggataatcatgacatggcaaaataaaatgttatttatcatggtgccagtgtcaccaacctgtaatttttattgttcttcagagtaatggaatttattaaggccattcatcctcaagtcacatggaaaacactacgtttgaatgacgaagagcatggctgaatatccaaaaggcacaagaacctgaaaatgagttacaaagctgtctttcaaagctttaaaattctgccctttaaggaaaacagagactactccagggatgtggcagcaaagcagaagtagaagttcctgaaacagctcaatttaggaaaatgtgaaaattacaygacgttggtgaaatcacagacacaaaataaaatgaaaacagctgtggacacaaaaatcccatgtggacagg

SEQ ID NO: 153367 - DNA, 497 bp, Homo sapiens
cgaattcaggaagacagtctcctgggatgtccagccttggcagcaagggagttccaggctgggtctgcagggagaccgtctatcagcagccagccaagagaaaagggataatcatgacatggcaaaataaaatgttatttatcatggtgccagtgtcaccaacctgtaatttttattgttcttcagagtaatggaatttattaaggccattcatcctcaagtcacatggaaaacactacgtttgaatgacgaagagcatggctgaatatccaaaaggcacaagaacctgaaaatgagttacaaagctgtctttcaaagctttaaaattctgccctttaaggaaaacagagactactccagggatgtggcagcaaagcagaagtagaagttcctgaaacagctcaatttaggaaaatgtgaaaattacacgacrttggtgaaatcacagacacaaaataaaatgaaaacagctgtggacacaaaaatcccatgtggac

SEQ ID NO: 153368 - DNA, 385 bp, Homo sapiens
atatcctgaatcattaaaaccacactgtctagcaaactayaccttagatccccactatcaaaaatatacttgtattataccttttattcattttttttctaatagcacttgataagcccctgggaagcggttgatcctggaattttggttggttagtttttattttccttttttctcctatagataatatatatgatatagaataaaaaaggcacaaaaagagtgtacagtctaaagtaagatcctcactgcaaagcatctgatgttactaagttcaagaaataatcccgtggcatagatttttcattttgagaccttcctatcacagactcatctcttagttatcaatggcagtagctgtggctgaaaaaatcccctaccacct

SEQ ID NO: 153369 - DNA, 449 bp, Homo sapiens
acttccctaaatggtaagtagagaagccacacagttggactcaagtcttttctcttaagcactatgttaaacactaagctatagtaatgttggcacaaaaaatctgttctttaaatcagccaaactkgttacttggtattctgtggaaaagtagtttggctaataattgtttttagtggttttggagacaatggctcagaaagacatcatctcccccttctcaggatgtttgacctccatccaggatgctggggggttgcctgagattccagtatgttattagggattcattgtgcccattcagtcattcaaccttctcctccagcctccatgggaagtgtacattggccacatgcatccattggacatggcaaattgcaccattcactcatttgatagattttaaccagcttccatgtgccaaacaccatcctgggcacttcacatac

SEQ ID NO: 153370 - DNA, 522 bp, Homo sapiens
taaggttgggagtggggaatgggatgggtaaaagggatattaacttgtatatgttgctatatcactggcatttttcctgaatatacattcwtgtatcactcaggctaaacataaaaacattttcaattcctatggcatctgaaatgctaccatgggcataagctgcataaaaatggcctttaatgcttatatgctgtggtgggaacgtaaattagttcaaccattgaggaagacagtgtggcaattcctcataaactaaagacagaaataccatttgacccagcaatcccattactggatatatagctgatatggtttggctgtgtccccacccaaatctcatcttgaattacagttctcataatccccatgtgtggtaggagggaatccagtgcaaggtaattgaatcatgggggcagtttcctccatgctattctcgtgatgctggtaagttctcaggaaatctgatggttttataaggggcttcccccttcactccccctcagccctgcagaaccatga

SEQ ID NO: 153371 - DNA, 617 bp, Homo sapiens
cagccttaacatcactggaccactcactcagtgccagaaactacctgcctctagacaccttgctatgtaaacacgaataaatacattttcaactgtttaagaccgtctggattagagttttttaaaaaaggcttttgaactgatacaatggcatgttgtaaagagagattaagttccaccacctgttccagtttgccaatattcctgttaatgaggcacctcagatcgaaggctctattccaggagaatcagatttttatcaaatggagggaggctgtcattttttctcattttaatgtatacatgtatattattatgtcccaagatcaagcttgctcatttggtagccttataacactggtgagtcatcttaaacttactgccaactcaggccccagcatccttgactagcagtttggtatttataaggcagtgttcctkacagtaagtagaaagtataatccatgactggtaagcagaggctcatacaggctaaagtactttccccaaagccatgcaagtcacagaattcctttggacccttctttcccctaagaacttctcgttcagtctgcccccggtgggctcccatgcacccatgtttgcattcttggtcc

SEQ ID NO: 153372 - DNA, 459 bp, Homo sapiens
gtttcacacacgtgttccatagctctgtctactgaggggggtggaaaggcctgrgaacagcaacagttcaacagcaatgaacacatctagcacaaagttgtcttttaagtagcattctttcccaaaagaaaccaatagaaatggcagattccagtgctgtaggcagggaaaaataagatgaaactggcatctgctgtgccagaaagcaaagaagtgctcatgcgggacatatcaccatgacaagaggtgatcctgaagtggcttccactggaaaaatggcaacaagttaagatcaacatgatcaatgataacaaaagattttagccattgcgtaacataggcaatttagagttcatacaaatagatagatagataaattaattgatagaaagttttatgaggaagaggatacttatgtaatacctccccacaaaaatgcttattaactgcaaaggaaca

SEQ ID NO: 153373 - DNA, 649 bp, Homo sapiens
tacttgttctttaggtttgaaatatgactatacatttatgtatgttccttagagctcaagagctgttcaagttcttgccttaccagaacctaattattcagctgtcttttcagttctagaatatagttcacagacgtstaaagcatttagtttgtgataaagaacaaactgtctttggagaagagttttatttgaattataggagttcatggctgagcaggagttggaactcggtgcttctggcactgtgcactttaggcatctatttacttgccactgatttttagagaggccaaagagactcttaggctaaactctattcagaattaagattcagagatgtacagatagagggtgaactgggatagctctggtgaaagccagattacagagtggagggtgatgtttctattggttcatgagcaaggactgcaaggaaaaaaaacaggactggcccagcacaccacactcaacaggagggcctcactgtgagagaaagttttagttcatggcactgtgtggcagctagtactgaaaatgatcccaggtcagtctgtgcatcaggaagagaagaacaattgagaaattaaagggctgctttgctaaggacacgaatgatttggggcttaagcaatcctggttgggaatc

SEQ ID NO: 153374 - DNA, 632 bp, Homo sapiens
agtagttcattcctttttattgctcattattccattgtatgaatgtgccataatttgtttatacattcattcattgaagggcatctgaattgtttctatattttgataattattaatagagctgctataaacattcgtgttctggcttttctgtcaacatagtttttgtttctctagggtaaaacagtttgaacatccctaatccaaaatctgaaatccaaaagatgtcaccaaggacatcttttcccaaatctgaaactttctgagctctgatatgacaccacatatcagaggtcaggtgcaatattccacactttacctcatgtgatagrtcacggtcaaaacacagctgcacaatgcacagtttatttagtatccccaagggagaaaagacgttcgtagcccccttcatctgtgatacatttttttctgcacacactcagattcctcaatgcaagcacactcacaaagggtaagaaaaggagtgcaggctggatacaccaatgcgggttccccatgatgtcctgcatagggccaagacctacatacgtgactcactgtgtttttttttttgctatattcttcactctgtggtgtaaagatattgttgaaaacctcaaaaaggcccgcag

SEQ ID NO: 153375 - DNA, 610 bp, Homo sapiens
actaataatagctaatattctttgagtccattctacaagccaggcatcatactaggctgctttgggagcacatgttactaaccccccagagaatccctatgaaggagatattatcaccattttcattttacagatggagaaggtaggtaacggagggattaatgaacacgcccagtgttacatagctagcaagtggctgagctggaatttaaatttagtgacctaactcccttaccaatgtgctcatagttactaggtgggcctagtaacacagctctgcaatatccttgaatagcctggcttcctcaggcttttgatttcatttacaagattgagattattgagtgatgagttataggactggtaaaaagctgaattccaacagtckcacatatggaatgtcttagctttagaagaagtaggaatatgggaagatagggtgatggtaacttctacaaagtgctttcagctgaaagcctgaataggtctcctactccctctgcttctgcctacttccagagaaacctcttagcttaagaactacagggatcagtaaaaagataaaactcttccgaattggccacaagtgtgggtctgtttcaggaccaag

SEQ ID NO: 153376 - DNA, 283 bp, Homo sapiens
ctgggaaagccaatgggaaaagaatcaacctatttgtagcgatctgtaatttctgttcagattcttgtttcctttccagaatgttcccccagtgagagctctgaccccttyagaaacaacctggtgagtgagtgaagcagttctcagttcttttgattggtccagctccgtgttttgttacaagcattgcacagctactatctgaaaaggaatctacctctttatgggaacatacagctgctgctgttaccatacgatccattttcctttaaaaaaccctgtt

SEQ ID NO: 153377 - DNA, 620 bp, Homo sapiens
cctctcctccttcttcctggctgttagaagaatattccagccagaggaaacactcagttgcaagtaccttgaggtgggagcacacctaacaggagctcttgagtgaggctgcagtgaagtgagtggggacagagtcaccagatgagatcagaaagtgatgggcaccaaatcatgtgtgacattgtgagtgcaagagtttggcttttacattagtaagatgggaaaccattggagggtttggggcaagagagtaacatggagaattttggacttgaattgatttaattttcttatcttgtcacttattttccaagtcttgcttttttttatactaattttttggagattttctcaactttgtttttcagtccrtctacagatttttaatttcttctgtaacattttttaacttcccaaaactctttcttattctcagacttttgagtatcccatttcatgaatgtgttatcttctcattgtctcaaatatatcgattgcagcttctgcaagctttccttttctgcccaccttgacttttttgtgaaagtcacaaggctattctggttgtttcaggttctatctttcatattagaagctttccttaaatactgaaaggtcct

SEQ ID NO: 153378 - DNA, 620 bp, Homo sapiens
cctctcctccttcttcctggctgttagaagaatattccagccagaggaaacactcagttgcaagtaccttgaggtgggagcacacctaacaggagctcttgagtgaggctgcagtgaagtgagtggggacagagtcaccagatgagatcagaaagtgatgggcaccaaatcatgtgtgacattgtgagtgcaagagtttggcttttacattagtaagatgggaaaccattggagggtttggggcaagagagtaacatggagaattttggacttgaattgatttaattttcttatcttgtcacttattttccaagtcttgcttttttttatactaattttttggagattttctcaactttgtttttcagtccatctacagatttttaatttcttctgtaacattttttaacttcccaaaactcyttcttattctcagacttttgagtatcccatttcatgaatgtgttatcttctcattgtctcaaatatatcgattgcagcttctgcaagctttccttttctgcccaccttgacttttttgtgaaagtcacaaggctattctggttgtttcaggttctatctttcatattagaagctttccttaaatactgaaaggtcct

SEQ ID NO: 153379 - DNA, 559 bp, Homo sapiens
aaaaattatcaacaaaaagaagtccaagaccagacagattcacagcagcattctaccagacattcaaagaattggtaccaatccttttgacactattccacaagatagagaaagaaggaaccttccctaattcgttctatgaagccagcatcaccctagtaccaaaaccaggaaaggacataaccaaaaaagaaaactacagatcaatatccttgataaacatagatggtaaaatccttaacaaaatactagctgactgaatccaacaacatatcaaaaagataatccaccatgatcaagtgggtttcataccaggggtgcagagatggtttaatgtacacaagtcaataaatgtgatacaccacatraacagaattaaaaacaaaaattccatgatcatctcaatagatgcagaaaaagcattcaacaaaatccagcatccctttatgattaaagctctcagcaaaatcagcatacaagggacatacattaatgtaataaaaactatctatgacaaacccacagccaacgtaatactgaatggggaaaagttgaaaga

SEQ ID NO: 153380 - DNA, 582 bp, Homo sapiens
tatattcctttgttactgtgcataatccctggctataactgcattaataagtaaggccattacatcaaatagggatctaacaaaaactttcgaatggactatcaaagaccagattcaatgcaggaaatcagaaggaaatggcatttatgtcctagtgtagttcagttaaaaggcctgcccttaaggattacaactgccataaaagggcaccatgcaagaatggaaaacctgtttacaacaaaatatcaaattattatctgactttcacaatgaaccacattattctatgactgccagtcatacatctggactactataccatttgtgtgcagttacagcagctccagttctatatggctagttttgaacttagtctgactttaaaacccatcccatttactatcctctgctttttttttttttttggtgtatattgtgggaaattccataaatgatttttataaactttagccagtaatcgggaaaaactgtaagattttgtttgtaagctttataaacgttacttataagattttaattgaattctaaattaatttctratttgaacctctcccttctctt

SEQ ID NO: 153381 - DNA, 578 bp, Homo sapiens
aagcttcaaagcagcagggcagaaagggacacctcacctaaagaagaataaaaattaaaatgacagcagattcctccccagaaaccacggaagccagaaggaaatgatgcaacattttcaagtgctgaaagaaaagatctgtcaagacagaatctgattctcagtgaaaatatccttcagaaatgaaggggcaattgagacatactcagacgaagggaaactcagagaatttgtcactggcagacctaccctaaagaaatggctacagaaagttatcaaaatggawgagaaatgataaaaagaagaaatactggaacactgggaataaggaaaattgaaaagagcaaaaatacgcgtaagtattattggggctcaggaaacaatgtcccaaagtatggtgctttggcatgctgagtgctttgaatcaaggtttctctgaccttctcctcaccctcctccagtcccctgctgcccctgtctctcatctcttgcccctctttccctcccaaagtgcaggaaggtgctttctctgaagttcccttatctgactaagggaagttcctccagaagaaatgcaa

SEQ ID NO: 153382 - DNA, 544 bp, Homo sapiens
taccctggaggcaacagaccatgcgacctgttgcttcagtgatataattcacttgagaaataaagctgtgttatggaaagtttattcagagctgcatcatataatggcccacctgaatgtgccccattctaccaaaaaacaaattccaaaatataccaccattcatggcgagagtacttgacatgctcttgtctttgttgtctaaaaaataatygtccttcacccgagacttcgcaaaatgcaagaactaaatgcagtttccccatgacacagatcatctacatccttccacaatccccaacacacacacactagatttgtgatatcaatgacaaagtttttcttgggctcgttatatagaaaggaaaaaggatgtttggaaattttgtgaaacacctaattcctaagaaaaacatttgtatcatcatcattccaatcactggtcaggtatgattaaataatatataattggcatgattaaggtagagcagcctttctacttactaacagaaaatacattttccacctcatactgactacaggc

SEQ ID NO: 153383 - DNA, 427 bp, Homo sapiens
aatgtgcccatgcccaaactaatcaccagcaagagaaaaagacagcatgattggcttgggctaatcacaatttatcccctgggtctgggccaacctccctaagagcacagggttgctttaaggaagacggggtaggggcatgrtcctgcacaaaatcagggtcctatgatgaaaaaggaaagggagaaatggaaaacaataatgtcttctgcaaccattcgccatcttgcttcccttataattgttattctaggatctgctggtaaaaccaatctttgcacctgcaatcaagagccctgttaataaatatcagcttgcctgggctgagccactgagagtggcagtcttctccagcttacgtcttctcttcccacccccatggccccaccccaagtttagttgcctcttttgaacacagccagcatct

SEQ ID NO: 153384 - DNA, 475 bp, Homo sapiens
cccattagggagaaactccccaacctcccctccccttcctctggcaaccatgaatctgggttctgtctctggatttgtctgctctggatattttttataaatgyaatcatataatatgtggcctcttgtctctgttcctttcacttagcataatgttttcaaggctcacccgagttgtagcttctgtcagtacttcattctattctctcttcatggtagacatatacatagcagttaggtaagagtcaccacctcccttttgcagataataaaactaaggcccacataacacagctcttcctgaatttacctttttgtgtgcatgtgtgtgagacagggtctcactctgtcacccaggctggaatgcagtggtgcagtcaccgctcactgtagcctcaacctcacagggtcaagtgatcctcctgcctcagcctctcaattagctgggactacaggtatgcaccactgcacccag

SEQ ID NO: 153385 - DNA, 475 bp, Homo sapiens
cccattagggagaaactccccaacctcccctccccttcctctggcaaccatgaatctgggttctgtctctggatttgtctgctctggatattttttataaatgcaatcatataatatgtggcctcttgtctctgttcctttcacttagcataatgttttcaaggctcacccgagttgtagcttctgtcagtacttcattctattctctcttcatggtagacatatacatagcagttaggtaagagtcaccacctccmttttgcagataataaaactaaggcccacataacacagctcttcctgaatttacctttttgtgtgcatgtgtgtgagacagggtctcactctgtcacccaggctggaatgcagtggtgcagtcaccgctcactgtagcctcaacctcacagggtcaagtgatcctcctgcctcagcctctcaattagctgggactacaggtatgcaccactgcacccag

SEQ ID NO: 153386 - DNA, 454 bp, Homo sapiens
aacaggcaaatgaataaaaaatcaacatttgaagaaagttaataaattgaaatatacagctgaaatatttattcagaacgaatgctgcaaggtagatggaaaacatgaaagcgagactgcaattcatatgggatcagtgagaaggtataagctacatctaatctaatcccaatagaacaaaatagacataatggaaagaggcaatttaaaaaaacaaaaacaacaatggatctagttctctaggtctggtcaaaaacataaaccaatgaaactcaacacattgaaacaggataaataaaaagaaattttcrttttctactgaaactgcagaataccacagaccaagagaacttctaggaagcagagagagggcagaacacaaagggagagagtaaatgcagaattcataagagcaaagacagaaggcagaagacagtggaataattatcaggaa

SEQ ID NO: 153387 - DNA, 546 bp, Homo sapiens
gagttattgtttctgtagctgtgtaattttctttaaatttcttatttatactccaattctctgcagaaagtattcaatttggttttagttttctaaaaacatattagccacaattattctcatgtcacatctaataaactccaatatctacatcttctgtgttctgtttctattgtatgtttttactcttagttttttgctatagatcttctccactggattagttgcattttaggaacaaaaagcaccttaaaggcctatagtaaactgaaagaattatattccttgaccatttacattatgatgggaaaagatcttatttattgaagtgaaaaatatgattttcttttttatctgctttattctcatcagaagatgatccatacaaaatcttctttgttttacatatgcgtatatacaaacrtgatattacaaaataatagatcatgtctatgccttattaaaaaatatctaatattttgagatatatagtttttaaacactgtgaaaatccatgaacaagacattagaaaaaaatttcataaa

SEQ ID NO: 153388 - DNA, 547 bp, Homo sapiens
catggccagggtgcaaagcatgcctgtgactcttcataaaaagtatgggaactcttttttatttctggtcaagatgtatcagattatttattcttctgtgtgaagtaataaatcaggcacaatatataaaatcatttttagatattgaataacagtcagtgaaggacagtcatcagtgaaagaggggaaacaaataagtgagttctataatcaacaggccacagtcaaaggcagagtttggtggtctctttccctggggacacggagctgggagtatgagggaattgggggcacctagggtttacatgaatgagaactgattgcctcaatattggggcaaattagccwtagactaaagatctagtcctaccttacaaaatttaaaaacaaaacattaaaaaattaaactgtttttatataactgcatccctgaaaaaaagtttaagaatataaaagaatacagagatatctagcactcagcagagtaacatttataatgtttggtctccaataaaaaattatcagatatgcaaagaagcagaaaaat

SEQ ID NO: 153389 - DNA, 547 bp, Homo sapiens
gggcacattgtacttcacctttaggatagatgattgttcattgcactctggcatcttagaacaacaatttgtgtcttccatctcctgtcctgactatttaggaaagtttctgaatgcttgttaatttgatactacgttctcaatgctttcctcatatctaggaacagtgccctgtctgcaaattagataaaagcttctggcaaactgttttcttatgtaacagtcatattatagacactgagtgcgcttagctaatcactgaccattctgtgagacacttcttttaaacatatcacctaagaaaaactaaactgtgatcaaatgagattattttgatgtttcaggacctcaaactgctttacaatgagaataagagatgtttctcagtgagagtgaggtattgggtccagagcctcaaagtagttgatgtgatatagaaaaataattatacacagaataactagctccaacaaggataacactagaaaaagtactcagaggagtaaaatratgagtctcgtgtgctttctagttttacccatgtaga

SEQ ID NO: 153390 - DNA, 622 bp, Homo sapiens
aaatatgaagcatcgtctttagtggggagtaatgggctggattaggagtgtgcacaagatatgagaggtctgtaggtgagagaaggtataaagtagatatcttagagaatgggaatttgaatttattagggataaaaccagtacaccagttgatgcttggggtcacgaatatggagtgaaactttcagactgattatgtgatttatctcctactatggctttttattttmctcttgatccatctcactagagatttgtcagttactaggcttttcaaaaacaacctttggctttggttctctttgttgtatatctgtttcctatttattaatatctgctcttatgtttattatcttattctacttgctttaggtttatgggcttgttgtcatctgatctccattctaagaaaatcagctcatcaacttttagcctttcttctatcttaatataaacatttaatacaataaattatttttaaacagaatttgaacaaaaggctttgtatagtttttttgtttctaagaaaattggatgaggtagtaatgaatactggtaagcaggcagcagtatcagctatatcttattaaatgtaatatgatcatttaaaaaaacaaatttg

SEQ ID NO: 153391 - DNA, 601 bp, Homo sapiens
aacacttactatttctctgtattgggaacatacaacagcctccttctaactatttgaaactatatattactgttaactgtagttatcctgcagtgctatatagaacactagaacttattcctcctatctatgtgtgatttttttatcttttaaccaatatctctctctctcctcactttccccttacctttcccagtctagtaaccactattctactttctgcttctttgaggtcatcttttttagcttctacatgtaagtgagaacacgcagtatttctctttctgttcctggcttatttcacttaacataaggctctctagcctcactcatgttgccatgaatgacaggaattcattcttttttgaggtcgaatagtattcgtgtgagtgtgtgtgtgtgtgtgtgtgtgtgtgtgatattttctgtatccattcatctgtaratgggtgcctaggttaattccatatcttggctattctgaacagtgctgtaataaacatgagggagcaggtatcttttcaatacaatgatttcctttcttttggagatgtatatatccagtagtgagattgctggatcatacgatagttcaatttgt

SEQ ID NO: 153392 - DNA, 555 bp, Homo sapiens
ctagaaagaaagactttcaccatggaagcactggcaactgaatttccataatggattcaaagatctaaagaatatcctcaatttacatattctttctgaatttatgttcaaagaaagggtattaatataaacataaagtaaaataagacaaagcccaagtgtattaagactattcaaggcctgccatgcaaattgcagtggaaaagtctaccagtaggttattgggaaacagagagaamcttggagtccaaagataggagaggatacccaccactaactttcaatgaaaccacaagctggccacttagcttttcttgtgctgtagagtcaaatgtgaaacaataggctttatttatttaatactttgtataaggcactttgctcagtacattatatattgtctcatcctcatagtgagcctgaagggtagtaatttcattgtaccttacagatgaataaacttagacttagagaccggtcaaatagcctgcccaaaacaaccagttaataaatggaattgggatttaaacttagatttgtctgattccaaagctt

SEQ ID NO: 153393 - DNA, 562 bp, Homo sapiens
agagggccaaagagcggttcttttaggaggtgaatgaagctcaactccctggcaagcctgttaggggaaaaaaggaactaaaaagctaaaataataatcagtggtcaggcactatgaagcaaatttttgctaatgatcttaccatcattaaaaagataagtgaattatgccaataggtttgaaaatgtagyggaaatggacaaagtcctagactcatagcaggggttctgcaatgtttattacgattgagaccttaacagtttagaccctgtattgctcatcccatgctatcctccggaactcggtcttggaaatgccagactaatgtgcatgagagagagaagcttagtgcaaaattcagcaggcaggaaggatgtggtcaccatctgacaagatcctcaggaggcttagaggcaggaggggccatctgccctgccccctgtggcctcatggctgcatccgccgctccctggatggggctcgggggtacctgggagcatgatccgtccttatactcctctcacatcagtatctaaactcagagtttacagaacaagggaaa

SEQ ID NO: 153394 - DNA, 367 bp, Homo sapiens
tttgccctcacccaggactggcaaattagctttactcaacatgscctgagtcagatactaaaatacctcttagtctaggtagacactttcactggatagatacaggcctttcctacagggtctgagaaggccaccgcagtcatttctttccttctgtcagacataattcctcagtttagccttcccacctctatacagtctgataacagaccagcctttattagtcaaatcagccaagcagtttttcaggctcttagtattcagtgaaacctttatatcccttacggtcctccgccttcaggaaaagtagaacggactaaaggtcttttaaaaacacacctccccaagctcagccaccaacttaaaa

SEQ ID NO: 153395 - DNA, 367 bp, Homo sapiens
tttgccctcacccaggactggcaaattagctttactcaacatgccctgagtcagatactaaaatacctcttagtctaggtagacactttcactggatagatacaggcctttcctacagggtctgagaaggccaccgcagtcatttctttccttctgtcagacataattcctcagtttagccttcccacctctatacagtctgataacagacsagcctttattagtcaaatcagccaagcagtttttcaggctcttagtattcagtgaaacctttatatcccttacggtcctccgccttcaggaaaagtagaacggactaaaggtcttttaaaaacacacctccccaagctcagccaccaacttaaaa

SEQ ID NO: 153396 - DNA, 597 bp, Homo sapiens
gactctactattcctcatggtaaccatgcctaccttgattttggtgcttaagtgctaccacttgaccccagccaccccaagatgcaattaamtccattatatttagggaatctcacttcaagggcatcataatttctgacccatgaaggagaacaaacacagagcctctggtggtgctgggaagccccttgcaaatttgtttctcacagtcatggtgaaaaaaatgtgtcctctttttctgtttccttcctgcactgggttagcagtccttacatcttcatttccctaagctgtttgatacttttcagggtaccaagacagatctggtattatatttttatttagtgtagtccaccctttcatccatgtttaattcaattaaccaaacagagcccctttaacctattgggctacaacgatgaatcaagaatctctgtctagtggcctcatatcaataaattcaatctaatcaaactttacatacctttcaccattacctcacatactcttctacacatgtaccccagatttttgtcatacatattgttcttttggtgtatagtgaaccttcttatgggtaacctttgacactttctg

SEQ ID NO: 153397 - DNA, 597 bp, Homo sapiens
gactctactattcctcatggtaaccatgcctaccttgattttggtgcttaagtgctaccacttgaccccagccaccccaagatgcaattaaatccattatatttagggaatctcacttcaagggcatcataatttctgacccatgaaggagaacaaacacagagcctctggtggtgctgggaagccccttgcaaatttgtttctcacagtcatggtgaaaaaaatgtgtcctctytttctgtttccttcctgcactgggttagcagtccttacatcttcatttccctaagctgtttgatacttttcagggtaccaagacagatctggtattatatttttatttagtgtagtccaccctttcatccatgtttaattcaattaaccaaacagagcccctttaacctattgggctacaacgatgaatcaagaatctctgtctagtggcctcatatcaataaattcaatctaatcaaactttacatacctttcaccattacctcacatactcttctacacatgtaccccagatttttgtcatacatattgttcttttggtgtatagtgaaccttcttatgggtaacctttgacactttctg

SEQ ID NO: 153398 - DNA, 597 bp, Homo sapiens
gactctactattcctcatggtaaccatgcctaccttgattttggtgcttaagtgctaccacttgaccccagccaccccaagatgcaattaaatccattatatttagggaatctcacttcaagggcatcataatttctgacccatgaaggagaacaaacacagagcctctggtggtgctgggaagccccttgcaaatttgtttctcacagtcatggtgaaaaaaatgtgtcctcttkttctgtttccttcctgcactgggttagcagtccttacatcttcatttccctaagctgtttgatacttttcagggtaccaagacagatctggtattatatttttatttagtgtagtccaccctttcatccatgtttaattcaattaaccaaacagagcccctttaacctattgggctacaacgatgaatcaagaatctctgtctagtggcctcatatcaataaattcaatctaatcaaactttacatacctttcaccattacctcacatactcttctacacatgtaccccagatttttgtcatacatattgttcttttggtgtatagtgaaccttcttatgggtaacctttgacactttctg

SEQ ID NO: 153399 - DNA, 564 bp, Homo sapiens
gttgtatgatatatttacctttttaaccaattggtgttttcttagatattaaagaggaggaaaaatcataccaagttatcaggtggttttcacctgaagatcatcaaaaaagaattaagaagcattttgatagctacatagaaacagcattggatggcaggtaacttcttttcattctatgaagcaaagagtcactattttagtgatacaaatgaatagagagatgcatgatatttggagtgagttttagagaaatagatgggtgggtgatggatagatggagaaatagatgatgtgtgagtggatgaatggatagatggatggacagttggataaatgaggggatggagaaatagaggacagstgggtggttgagtggatagagtagacaaggtttgcattcccaacaattgagtctatagtgtccttcttctaccgtaagggttctatagaaagcaggggattgctcctctgagccttgcttacaacacttcacctataatctctgtatgcattctccccaacaaagaagctaggatcttcaactcttttgtttgtcaagaa

SEQ ID NO: 153400 - DNA, 530 bp, Homo sapiens
agtttggattttggaaacgttaatattttgcataccaagtatatgtttaaataaacaaggagagaaaagccaagaactgaaatacaaacggaaacaaatgaaatcaattttttccaaatgaaaatgtaactatactgtagtgaaaaaaattagcatcattaccttttaaacacagtacttttactatatactgtatacaatcaatcaaaagaaaaaaaaaagaactccaaacgaatcttgtagtctattgagtaattgtgttattctcagttggcaaattagtgtatctgaacctaatttctgtacttgctaagattgagtaaatgcatcaatgacagtgagattcaggtttcttattttggmaaaaggaattagaaatgtgaggaaggggaagattagaataacccctgtagtgttgtattggaattagagttatcagtataaatttataatttttcataatacaaatataaatataggtatagggagaaatataggtatgtattctttatacccacatttatatattt

SEQ ID NO: 153401 - DNA, 488 bp, Homo sapiens
ccagctccatccgtgtccctgcaaatcacatgattttgttccttttaaggcttactctttacatcaatgtgtagtagcaactcaatttcccttagtaatcaggtcttgcatgataaatccagtccaacatttcagtctccctaagcctttagataccttcctcttcagtgtcccaaggtaattctggtatttcagcttcatttagcrtaggccaccctttgtttcatccttaactcaaccaaacccatcgagctgcaactctatattgagaatttgtgctttgtgggcctgtatcaataaattcaccttgagtcaactttatgttccttctaccattatttcacactattaacttacattctcacatgtattcaccagatttctgtctgtataaattgaaaaaatacgcattacttttggaatgtagtatgtctcccattggttcgcaattttaatctctctttcaagcctgttgggactagagtctt

SEQ ID NO: 153402 - DNA, 543 bp, Homo sapiens
ggcactttgatcttggacttgccagcctccagaactgtgagaaataaatttctgttatttataagctaccaagttgatagcattttcctatagcagcctggatggagtaagacaatactattaattttacaaagttagtgcaaagattagggataatgcttaacaagtctttacctggtgctatggactctcagtaaaaagctaatttggtcttgttctttcattactcaacaaatacttagtatggacctcactggggatacagtaaracagacatggcccccctgccttttggtcttacggtcctgggaggttatgaactggggctctgggtaccaatcctggctggaccacttattagctgtgcatcttggacaagtaacttctctgtttcctcatttctaaaaacagattcaatttcatgggttgtcctgaagtttaaagagatagtatttgaaaaatggttagccgcattcctgggttatggaaagtactattgtttatattctattgataatacttggcaggtgttgccacacggtc

SEQ ID NO: 153403 - DNA, 539 bp, Homo sapiens
ctgagatagatctacacatctgtaacatagcacctttaacattttccttctctcagggcctttgtgctggattagggcttcactctcagttcttctcacaggccaacttgggagttctactgtaggacagacccccacgaagttgtttgttttccctttctggaacttgatcagaggcagctggtgtcttgcctggataagtagcaaagtgggagagaagacagaaaggaggtattggtgggcaagagaagctccagttgttaatctagtacatcagaagaragaagcaatattgctacatcttggggaagcccaagaatatggtctttgatcatcaaatgagctaattggtgtgcaattttattttatctttttaggactcattgcttcatagttgtgctgaaaagccttcaaacctccggggacaaacatttccttaatcagaacaaagtttcaggaatttattaacaagtattcgttaggtacccattgtgtgttctgcaaggtgtttactactattgaggacacaaagaaatata

SEQ ID NO: 153404 - DNA, 380 bp, Homo sapiens
atctcggacaagatattcaatctctatatgcctcactgacctcatctttaataagggatataaattgtagcagttcataggatgtggcttcaatgagttaatatctgtagcatgcttaaaagaatgtcatagtaaatatgccttacatagtaaatattctctattgtttttgcctattgttatttcaattgttttaaccattcttctggtgtatcatatggagctatgtgtgtgtgttttygtgtgtgttctccataaattaagagtctgtttgtagcatagccatgaaggagatcattttgaaaatggaattaaatcaggaaccaaaagcatcaaatcatgctactgttttagtatgggcttcttttgcagaaactgaa

SEQ ID NO: 153405 - DNA, 568 bp, Homo sapiens
ggatttgaggattcttttaaattttgctgcaacccwccagccatttgcaggtgataagttgaaaaacacttgatgtctataagttcactttttattggtaattaaggaacttttggagaacaccatggagattaaagaggtcttatagaaaatataacccaatttcctcatttgcagatgaggaaactgaggcccaataaaaagtgaatgagatcacagaactaaagccagaactaaagtcttcctcccagggctgtgcttgcatgctctgtgtccaagtgggcaattatacgtccccagggtgaggttggccacttagagagctttcagaagtgaattttctactcagtgttagagaccaaatggagcatcatgtggcttttcattttcaaggcattaaaataaaagaaatcaggatttaaggcatttccccagcatggaagggagaaataggatctctcaattgtggaacatggaatattccatggtgataagttgtagattccaaggatagagaggagaccaggagtgagggaaaaatatagtagttatttttcataaacaatat

SEQ ID NO: 153406 - DNA, 568 bp, Homo sapiens
ggatttgaggattcttttaaattttgctgcaacccaccagccatttgcaggtgataagttgaaaaacacttgatgtctataagttcactttttattggtaattaaggaacttttggagaacaccatggagattaaagaggtcttatagaaaatataacccaatttcctcatttgcagatgaggaaactgaggcccaataaaaagtgaatgagatcacagaactaaagccagaactraagtcttcctcccagggctgtgcttgcatgctctgtgtccaagtgggcaattatacgtccccagggtgaggttggccacttagagagctttcagaagtgaattttctactcagtgttagagaccaaatggagcatcatgtggcttttcattttcaaggcattaaaataaaagaaatcaggatttaaggcatttccccagcatggaagggagaaataggatctctcaattgtggaacatggaatattccatggtgataagttgtagattccaaggatagagaggagaccaggagtgagggaaaaatatagtagttatttttcataaacaatat

SEQ ID NO: 153407 - DNA, 554 bp, Homo sapiens
ataagttaacatgcacaggatccagggattaggacatagataccgttatkcaagcaaccacatctctgtttaacaccagctcacaaaatttctggatatttagcaaatggtccttacaagcaggcacatgggggctccagcacaccattgaatgtaagcttcttgtaggagaagactgaggctaccaattaattgtatcctctacaatccttagtctggtgaagcttgtataaactagagctcaaaaaaaaaatacttttgaattgattaagaaatctgacaactccaaaattgattaatgccaaaccactcaggttgtttatttctaggaaaaaccttcaaattgtgagaattgtcgtagaaataaatagtagaaggctatgggaaacggccaaaactcatagttctgtgagaaaatcttgtggatcatgtccaagtttgtgtagtattgagctctttggaaagcccacatatccgcagtgactccttttctgagtgttcccctcagctcatgtcttccggtcctgatttttatttgtcatatgctttgtttc

SEQ ID NO: 153408 - DNA, 554 bp, Homo sapiens
ataagttaacatgcacaggatccagggattaggacatagataccgttatgcaagcaaccacatctctgtttaacaccagctcacaaaatttctggatatttagcaaatggtccttacaagcaggcacatgggggctccagcacaccattgaatgtaagcttcttgtaggagaagactgaggctaccaattaattgtatcctctacaatccttagtctggtgaagcttgtataaactagagctcaaaaaaaaaatacttttgaattgattaagaaatctgacaactccaaaattgattaatgccaraccactcaggttgtttatttctaggaaaaaccttcaaattgtgagaattgtcgtagaaataaatagtagaaggctatgggaaacggccaaaactcatagttctgtgagaaaatcttgtggatcatgtccaagtttgtgtagtattgagctctttggaaagcccacatatccgcagtgactccttttctgagtgttcccctcagctcatgtcttccggtcctgatttttatttgtcatatgctttgtttc

SEQ ID NO: 153409 - DNA, 554 bp, Homo sapiens
ataagttaacatgcacaggatccagggattaggacatagataccgttatgcaagcaaccacatctctgtttaacaccagctcacaaaatttctggatatttagcaaatggtccttacaagcaggcacatgggggctccagcacaccattgaatgtaagcttcttgtaggagaagactgaggctaccaattaattgtatcctctacaatccttagtctggtgaagcttgtataaactagagctcaaaaaaaaaatacttttgaattgattaagaaatctgacaactccaaaattgattaatgccaaaccactcaggttgtttatttctaggaaaaaccttcaaattgtgagaattgtsgtagaaataaatagtagaaggctatgggaaacggccaaaactcatagttctgtgagaaaatcttgtggatcatgtccaagtttgtgtagtattgagctctttggaaagcccacatatccgcagtgactccttttctgagtgttcccctcagctcatgtcttccggtcctgatttttatttgtcatatgctttgtttc

SEQ ID NO: 153410 - DNA, 458 bp, Homo sapiens
ttaggggctacatgtacaggtttgttacatgagtatattgcgtgatgctgaggtttggggcagtgctgatcccatcacccaggtagtgagcattgtacccagtaggtagagtttcctcccttattcccctttcccctcctggcttttggaatcctcagtgtctactgttaccatctttgtgtccatgtgttaaagggtaggagtaattttgaggcttcaagcttctgctgatttttaagcatttttctgaaataaaactttcaaattagttcawaaatcaatgtaacagatgacatctgtcaatatacattattatatgcataaatcatatgcataaataacatgcattattttattatgattttataaaagattgacacaacataattcaaaataacttatttactacaaataggactcaccacatgaaaattagaatctaaagcaattaaaaaaac

SEQ ID NO: 153411 - DNA, 458 bp, Homo sapiens
ttaggggctacatgtacaggtttgttacatgagtatattgcgtgatgctgaggtttggggcagtgctgatcccatcacccaggtagtgagcattgtacccagtaggtagagtttcctcccttattcccctttcccctcctggcttttggaatcctcagtgtctactgttaccatctttgtgtccatgtgttaaagggtaggagtaattttgaggcttcaagcttctgctgatttttaagcatttttctgaaataaaactttcaaattagttcataaatcaatgtaacagatgacatctgtcaatatacattattatatgcataaatcatatgcataaataayatgcattattttattatgattttataaaagattgacacaacataattcaaaataacttatttactacaaataggactcaccacatgaaaattagaatctaaagcaattaaaaaaac

SEQ ID NO: 153412 - DNA, 458 bp, Homo sapiens
ttaggggctacatgtacaggtttgttacatgagtatattgcgtgatgctgaggtttggggcagtgctgatcccatcacccaggtagtgagcattgtacccagtaggtagagtttcctcccttattcccctttcccctcctggcttttggaatcctcagtgtctactgttaccatctttgtgtccatgtgttaaagggtaggagtaattttgaggcttcaagcttctgctgatttttaagcatttttctgaaataaaactttcaaattagttcataaatcaatgtaacagatgacatctgtcaatatacattattatatgcataaatcatatgcataaataacatgcattattttattatgattttataaragattgacacaacataattcaaaataacttatttactacaaataggactcaccacatgaaaattagaatctaaagcaattaaaaaaac

SEQ ID NO: 153413 - DNA, 406 bp, Homo sapiens
ggtatttctgtggtagggtgtgcgggtagaaacaggagccttggataggatgtggggaggcaggcttctcttccattctcacacctttccttttaaattcctccatttaattacagataatatgaacatatggtccattcactacaattgattaggagtccattcttttagattgttggttcatctctgttrgcatgaattaaaaacaattttatctattaaaagtagaaaaggtataagaacattttccaaactgttacattgaatactagtttttgagatgttaagagtccagttgaataataaaaacaagaaaaagactagagagtcaaataatttgtaaatatggcttcaaaatcttaaagaaaatatttttttttattacgtgacttctaagagctttaaa

SEQ ID NO: 153414 - DNA, 312 bp, Homo sapiens
aaactgagaaaagatatattgtcaatctatcgaaaaagtattttaatgtatgtccttggaggatattataggatgtgaggatccctttactcccaaatatttgctttataatgtatttatttgcctaaatgtatgctagtaatgattagctccttgaaatattgtgtarcatgtgaaagctgctttaaaaaatgccaatattcccttaaatccttagtaccttagaagaattatcacattttatttggttgctgacctgagaaatactgtaaggaagtgaacatttgtgttagagggaggaaatatgcaaga

SEQ ID NO: 153415 - DNA, 425 bp, Homo sapiens
ataaataactcttaatctgcctcaaagatccttaaaatccaccccctgccaagaaaaaccttgaccttttctgtattgcttttgagctctgtttatgggattttacatcatctgacataaaaagctcctcccttggatactcccttggacaagaggatgtatccacttccaacaatttatactagccctttataccaagcccaatcaagacatatggggaccccagcaggataacaatatgatatcgctttacwttagtattccttaaacatttgttcaccatttatttaatggtagaagtaagcaatgattttctattaaaattttctactccttacttcaaaatgtgaggtttatcatatgcatgaatattaacttctgctttttccccagtgtcttctaggatgctctcctgtgatagatta

SEQ ID NO: 153416 - DNA, 592 bp, Homo sapiens
tcctttttctacttgttgggacttatttcatggtctagtatgggagcttcagcaaggcaaaactggcttcatatacatttggattcaaggatctgtccttctctttttgttacctttactttctttcttctattcattcttggacaagtgcttgcttgtctgctggtaaaaatactcccagaaagttatagagtcacataatccttaagctcatgttcacaaggaaaaaagaaagaccctttccctttaattcaaggattctgtttggcaagaacttagatcatgaactaactcctattaagggtaggggataaggttctgcacaagaaacagaagttttgctgtgaggaaaagggagatagaagwttgccatgcagttaccactgtttatacaatagtgatctccaaatgctttttttcaaatgtttttgactgcacactctattaattttaaaattgtatatgaatccccatatatgtaaattattttaaaataagtatatataaatatacaaattatttatttataaagaaatttaaatttatttgtcagtaaataaatataaataagattactggcatttatttcttg

SEQ ID NO: 153417 - DNA, 599 bp, Homo sapiens
gggatcacactgacccagaatctccagactctggtgctgtatgcagattgtggtaaaagcaatgcaatgtctgaacacaattttgtgcttggaaacctgaggacgtatagtttttcaatgtaagagatattactggggtctgagtaaagaataggcatgtaaaaattcatgcgtgagtcaccttttcagatgattacactatatattttctgatgattcattcttttcccctcatgcctttccaggttgctaacctgaccagtcctgcagtggaggtagttatacccaaggtgtgatttgggatcactaaaaggaatttctctaactactgaagtgtctaaaatacctaggttagctctgagctcagatcccagtccatcagactcgctgttttcaagaggaggaagcaagggagaacaaaagctagcctgtccatggaacaggcttaacagatgaatttcttcttgtattgtttcctttctgttatctcctatgtttcaaacacaaacttgtattgaatcttttttttwaaattaacaactttatttaccataaaattaacttactgtaagtatacaattcaactattttttgtatgt

SEQ ID NO: 153418 - DNA, 463 bp, Homo sapiens
tgcatgaatattttcaattaaaagtttattaagaaaagatggagccattgcaatgtatggatcttgattctaataaaaaggcattttttaaagccctttttgcaattgggaaatctgagtacaatatttgatgacatgagttattaatgttttaagaataatagtggtgtatatttttttagtacttttattttagaaatacagggaaataatgaaacgatatctgatgaaatgatagatgaaacaaagttggtcacacttggacacttgaaactggatgatggctacatgagtgttcattatactgttttttttttacttttgtatatgtttgaaattttctgcaatgcagttaaaacatttacacaaacacatatatatacacrtatataaagttaaattgacagttcgccatttcccaccctaatcaattttcaccaattattcacagtattcttgaccc

SEQ ID NO: 153419 - DNA, 541 bp, Homo sapiens
agagtaactgcactggggaaaggggaatgatcagacttttcagggacttactggatactggctctgagctgacattkattccaggggacccaaaacatcattgtggtcctccagttaaagtaggggcttatggaggtcaggtacttaatggagttttagctcaggtcccactatagtgagtccagtgggtccctggactcatcctgtggtcatttccccagtgtcagaatgcataattggcatagacatacttagcagctggcagaatccccacattggctccctgactggtaggatgaaggctattatggtgggaaaggccaaatggaagccattagagctgcctctacctagataaatagtaaatcaaaaacaatattgtaaaaacaaacaaaaaacaacaacaaaaaccaatatcgcatccctgaagggagtgcagagattagtgccaccatcaaggacttgaaagacgaactctcctatttggcccgtgcagaagagagatggatcttggagaatgacagtggattatcgtaagctt

SEQ ID NO: 153420 - DNA, 290 bp, Homo sapiens
cataccagctgccgtgtaatttgcgattctagtgggtttccagttatgatggttttgcacttaatttagttgagtaaaacagaatgaggggatcaaaaccaactcagccagaaatttggagctggagccagcaccctcacctctttgcctttatgagctatttattccttacttccctcatcccacatcctattaacagtgctggtgtaggtgttcatgtcttagtctgtccacyctgctataaggaagtactagagactgggtgatttatgaacaacataaatgtattt

SEQ ID NO: 153421 - DNA, 582 bp, Homo sapiens
cattgtcctgtaaaatgtacaatagtgaaaagatcttacatttaacaagctctcctcatatatccaatccccaacatagttttcaaattcatgtatctccaatagccctagatacaattaaatgccattttttaaaggtgagtttcatgtatcaccagtgtgtgtaggctttgcatcattcttgggtcacatgtacactttaacttattggttacaggctgtgccttagtcaaccctcagtcccagagccaggaatggtgacagttaatgtacattcactgcatatttattaaaacgaacagaagttaaatgataatgagatagtatttcttctatgccaagattcattttgttgcagcattattttttctagtgctcaaagatactattggtgaaagggatgaaacaggctgctagcacaygttctgtcttacagaattacaatctatttttaaagagcacaagagtgtcctatttcttagtcttacagaaccccctaatggagaatactgtgtgctgcattctgaaactgccagccaagtgcattagaaattccattatgcaggcattaaactacacaaa

SEQ ID NO: 153422 - DNA, 596 bp, Homo sapiens
atatattcacatatacatatacatgagaatatatatatacacacacacacactctgttggtgcagaagctacaagtgtaaagtttgttggatgtaatcatcattaaagatgttcagaaatacagaattccctgtacatatcaaaatcatgtagcaaaagcagttttcatcaagactggacttttaaggaagcatttcaacttctctgagatttttgtttggtattacatatcttactctaatgcttttgctcttatgagtgcttaaaaggaaaaataacagccaaatcttggggaagggggtggtggtgacgaaagagacaaaagtgtcaactctcatgagtgacacagcgatgacgtgaacaagtggaaacctttgtgaaggarcaaaggtcttctccaccattggaagtcaaaagaatgtcttggttagaatcagaatcagacaaatacttgctttagttttcagtccattaaaaagacagctctcaaaataaataaataaatatgtttttaaaaagcattcttccacatctttatttacattctccttcaccaacctaaagggcaaacaaatagagaaaatgcttttagggac

SEQ ID NO: 153423 - DNA, 580 bp, Homo sapiens
acctcgtttggcttccactctcattccccacccaccttcaatgacttgtcacatgggaaagacagcaatgtgacttgacacagaaatgcaggcagctgaggacacatgtgtcctcgaagagtgaatcctcattcccrctccttctgcccttacacacagcagtgcaatgtcagagaagtattttaaagcttccactcataatatgctgtttttaatctagaagtttcttgctttataaaaagaggaaaggaaagagggagaaagcgggggaagagagagacgtatgtcttgcagtttgaccaatgtgagattgatgaaaagtacttaggcttcacctcctggacattcagcaagggaaagtcatgatggacctactacctccctgctctagggaaattttttactgctgacggatttgagatataaacacaaaacagggtagagatagcatgcagagataatcacatgagctagctattgctttgtaatacattactgcaaacttcatggctttaacaacacacattgattatctcatagtatctaagggtcagagctggggcacagctgagctgggtcc

SEQ ID NO: 153424 - DNA, 580 bp, Homo sapiens
acctcgtttggcttccactctcattccccacccaccttcaatgacttgtcacatgggaaagacagcaatgtgacttgacacagaaatgcaggcagctgaggacacatgtgtcctcgaagagtgaatcctcattcccgctccttctgcccttacacacagcagtgcaatgtcagagaagtattttaaagcttccactcataatatgctgtttttaatctagaagtttcttgctttataaaaagaggaaaggaaagagggagaaagcgggggaagagagagacgtatgtcttgcagtttgaccaatgtgagattgatgaaaagtacttaggcttcacctcctgracattcagcaagggaaagtcatgatggacctactacctccctgctctagggaaattttttactgctgacggatttgagatataaacacaaaacagggtagagatagcatgcagagataatcacatgagctagctattgctttgtaatacattactgcaaacttcatggctttaacaacacacattgattatctcatagtatctaagggtcagagctggggcacagctgagctgggtcc

SEQ ID NO: 153425 - DNA, 483 bp, Homo sapiens
tgtcatacagtgtgctgagcacttcacatgctttatctcctttaaatctcataaagactcatcacataggtactgttttcattcccatttttaaaatgaaatttaaagagactaaatgacttgaagaaggtcacaaaactaaatagcagtagggtcattattttaggccaggttatctaactccaaagcccttagcttaatcactaggctatactgaactttatggaattacatccaaaagggrtgtgtgtgtgtgtgtgtgtgtgtgtgtgtttgtgaatttttccgaagactcacatttccaaagatttataagtcatgtcgttctcaaaggggtctctggtctccaaaatttgaaactctttgcaacagggtggctatgttttagaatgacataaacagatacaatgttctccagagtccagagcagggtctaaacctattgggatactatacttgtgttatcaactgaaccacttggtt

SEQ ID NO: 153426 - DNA, 587 bp, Homo sapiens
aaaggaaatacagcagcacttagaaaattttaaattagatagtttttcttctgaaatccagtattgaattagtgcaaaattctgaaagtcaattacaaaattcattttatgtcaacattactgactccatgcacaaatgtttattctagttttaaaaactagtattctgtaccttttaatagccaatgtaatttgttgacaaatattgaaatttatacgttaccagaggtctcacgtattgttaccttttaaaatgatcatttattaaccagtattgcctaatgaggcaatcaaaatgtcatctgttgcataggtaacaggaaactaccattactcatgttgtgagatggtcaaagaccttatcatattttatggctaacaaactcatgatgttgtcatatatgccctcatcacagtgtttatgatacctaaaagttagtgcctaaaaattagaaacaaggacagtgaagttagattgtttaatcctgcatatcttaaagatctaacaytttctagctgttaaatatgtttatcattatactagtaatgtacgtgcaccatttttattatattaattcattgccact

SEQ ID NO: 153427 - DNA, 634 bp, Homo sapiens
tattagaagggaaaaactcctattaatattttcttgtttatgtttgtgttttcatgttagtcttaaaacaagttactgtttgagaatgtragaattttaaccatttacaaaatggtgtatgatatgacatgtatatgatctctcacaagtgaaatgataatggaaagtttactgaaaatgtcttaacagttctaggtaaaacttaatttttccttaatttgaaaattaataaaagtatgaattagatttaatctaaatttattattctgttaaagtcacatgaatgtggaaaaaaatcagtatcacttctaactaaatctggccttgaaacttctttgacatagtcttcttaaaatatatatatcttatattctaaattgtatattatttagaaatatgctatttctaaactgaaatgtctgatatttctaactgatatatatatctatatatgatatgatatatgattatatatatgttatctatatgatatataatatatgatatatatttctaactgatataacaatgtatctcagttcttagagatatgtaaattatattttaatagtagcctacaaagatgatacaagaagataagaaataaatatacttttatatataaaatagttca

SEQ ID NO: 153428 - DNA, 634 bp, Homo sapiens
tattagaagggaaaaactcctattaatattttcttgtttatgtttgtgttttcatgttagtcttaaaacaagttactgtttgagaatgtgagaattttaaccatttacaaaatggtgtatgatatgacatgtatatgatctctcacaagtgaaatgataatggaaagtttactgaaaatgtcttaacagttctaggtaaaacttaatttttccttaatttgaaaattaayaaaagtatgaattagatttaatctaaatttattattctgttaaagtcacatgaatgtggaaaaaaatcagtatcacttctaactaaatctggccttgaaacttctttgacatagtcttcttaaaatatatatatcttatattctaaattgtatattatttagaaatatgctatttctaaactgaaatgtctgatatttctaactgatatatatatctatatatgatatgatatatgattatatatatgttatctatatgatatataatatatgatatatatttctaactgatataacaatgtatctcagttcttagagatatgtaaattatattttaatagtagcctacaaagatgatacaagaagataagaaataaatatacttttatatataaaatagttca

SEQ ID NO: 153429 - DNA, 655 bp, Homo sapiens
ttcagcacttttaaccatgatgattccctaaaagtgtggttttacaatatcctgtgatatgccctctcaggtggcatcactgattacttaccccctcattcactctcctatacctataatcgtcttctcaccatcttcctagcataccaaacacttactgtttcttctgcctggaaggctctgccctgaggtatccacataagtcccttacctcattcacatctctactcaaatgtcacttccttagaaagacccttattagactaccctttctgaagtagtgacctacctaccttacatctacattcttaatttctctacttagtgtggtttttcttcatagtacttattgccacctaatacatattttaatctttttctaccctactggactataaayctcacaagaaaaaggtgttttgggttgtatttactactgtacaaataataattcaatgttattgaatgaatgacattttattaagtatatataaatgagattcatatgttggtctctcccagttgtatttttaacattagatacatgatttggaactatgcaaatataatacaaatacaatagtggaagacattgttagttcactaacttagcacctatttccagcctccttctttgcctgcctttactgtagaa

SEQ ID NO: 153430 - DNA, 279 bp, Homo sapiens
ttttgctctgccagtagcagaaattaagagtatttctagaaacattaatattggtgtatgtatagtaggtttagatttaaagacctttattcctaacatgactacaggctacttcagacaactatgacagggacttgaaaatggacagtagacttcctatagagaggatctggagggcacttargtccacggaaatttctaaagtatgactactaacataccatgattagcccctgatatttaccctatcttacttgctccactgctttgttgctgaat

SEQ ID NO: 153431 - DNA, 554 bp, Homo sapiens
tttagtataaatctgagtgatatacatatagccctcaaaatatagatgttcctcaacttacagtggggttacatcctgataaactcataacttaaaaatatcataagtcaaaaatgtatttaatacaccttacctatcaaacaacatagcttagcctagtctaccttaaacgtgctcagaatgcgttcattagcaaaatcatctaacataaagcctattttataataaagtgttgacaattttcacgtaatgtattgaatactgcacagaatgtgaaaaacggaatggttgcatggggacttgaagtatggtttctgcagaacatgtatcacttttgcaccagtgagaagtcaaaaaatttcaagtcaaaccattataagttggggaccatctgtaatctgctaaattgcaggaagcagtatggctgaagcaggtagtcttctcagaaatgaatctttaattggacttyggaagaaatttttaaatttgtgggaaatgattagaaagcttaatagtatgaattttagaagagcttaatagtatgaatcaagata

SEQ ID NO: 153432 - DNA, 436 bp, Homo sapiens
actcccaaaggcaagcctgcccagacagtttttaggttggtagttcactgtccaggggacccagctgccactattctacagggctttttccaaggggtaacacaataatcacaatagatwataacaacagagaatgtgctatttttagcatttcatatcccttggctcatttgatttttattactatgccggataaagcaatggtgctaagagaagtaacttgcctgaaatttgtatttttatccattataattcgttgcctctctaggatccaatggccccttagtaaaaaatactgatgctttaactctaggttcccaaatgccatttagctccccaagcatcgtactgtggcaaaaactacatgcactttgaaatcagatctgaatttgaataggttctgttacttgccagctaggggaccttaagcaaagct

SEQ ID NO: 153433 - DNA, 584 bp, Homo sapiens
aaactttatttaaaacactgttttttttgaacacttccttgtttaattatttataccatgaattactagtaattgacactgttaactagtcctgtttttttaaataagagtatttatgacacaaaaaattaaacagtgcagactgatacataaatcaaatgttctttacatgttttctgttgcagtagtaacacatatgtgtaaacttaattatcacrtttttcttgtgctgtggttgtgtcctgagttcattctctaaaatgctgttcaccttagaccaggaaaaatattaaccatacagactctgttttaattcatagctaaatattttcaaaagagtgactttgtaaaaatatgttccaatggcaaattgattcattgtgatgggatcacttattccaaagacttcctgtctttattttgttgccatgcctaccttttagccatgatacaacagaatcaaatattggccactgggaaaaaatattcaaagcaagaaagaatgtgaacagaacttatgaccatgatgattcaatgttttaccacaatgctttctaaaacagaagagtgtaaaaggatattca

SEQ ID NO: 153434 - DNA, 584 bp, Homo sapiens
aaactttatttaaaacactgttttttttgaacacttccttgtttaattatttataccatgaattactagtaattgacactgttaactagtcctgtttttttaaataagagtatttatgacacaaaaaattaaacagtgcagactgatacataaatcaaatgttctttacatgttttctgttgcagtagtaacacatatgtgtaaacttaattatcacatttttcttgtgctgtggttgtgtcctgagttcattctctaaaatgctgttcaccttagaccaggaaaaatattaacyatacagactctgttttaattcatagctaaatattttcaaaagagtgactttgtaaaaatatgttccaatggcaaattgattcattgtgatgggatcacttattccaaagacttcctgtctttattttgttgccatgcctaccttttagccatgatacaacagaatcaaatattggccactgggaaaaaatattcaaagcaagaaagaatgtgaacagaacttatgaccatgatgattcaatgttttaccacaatgctttctaaaacagaagagtgtaaaaggatattca

SEQ ID NO: 153435 - DNA, 584 bp, Homo sapiens
aaactttatttaaaacactgttttttttgaacacttccttgtttaattatttataccatgaattactagtaattgacactgttaactagtcctgtttttttaaataagagtatttatgacacaaaaaattaaacagtgcagactgatacataaatcaaatgttctttacatgttttctgttgcagtagtaacacatatgtgtaaacttaattatcacatttttcttgtgctgtggttgtgtcctgagttcattctctaaaatgctgttcaccttagaccaggaaaaatattaaccatacagactctgtttyaattcatagctaaatattttcaaaagagtgactttgtaaaaatatgttccaatggcaaattgattcattgtgatgggatcacttattccaaagacttcctgtctttattttgttgccatgcctaccttttagccatgatacaacagaatcaaatattggccactgggaaaaaatattcaaagcaagaaagaatgtgaacagaacttatgaccatgatgattcaatgttttaccacaatgctttctaaaacagaagagtgtaaaaggatattca

SEQ ID NO: 153436 - DNA, 584 bp, Homo sapiens
aaactttatttaaaacactgttttttttgaacacttccttgtttaattatttataccatgaattactagtaattgacactgttaactagtcctgtttttttaaataagagtatttatgacacaaaaaattaaacagtgcagactgatacataaatcaaatgttctttacatgttttctgttgcagtagtaacacatatgtgtaaacttaattatcacatttttcttgtgctgtggttgtgtcctgagttcattctctaaaatgctgttcaccttagaccaggaaaaatattaaccatacagactctgttttaattcatagctaaatattttcraaagagtgactttgtaaaaatatgttccaatggcaaattgattcattgtgatgggatcacttattccaaagacttcctgtctttattttgttgccatgcctaccttttagccatgatacaacagaatcaaatattggccactgggaaaaaatattcaaagcaagaaagaatgtgaacagaacttatgaccatgatgattcaatgttttaccacaatgctttctaaaacagaagagtgtaaaaggatattca

SEQ ID NO: 153437 - DNA, 488 bp, Homo sapiens
ttgaactatggatacggcagaagaaaacatgaggatttcacagatttaaggtgcaaaaagtcactgggttctctaagaagtctgggattcttctgctggaaaaataagtttgttgagaaaaaatgagttggaggaggctgttattgaagtgaagcagaattgtttttactaatctgcttattacccactctgtagtgtggaaacaaattattcatgcacaaggtcctcttactgttcctagaatgcagtggaaagagaacagattagttttcctccctcagaacacaacccctagaaacatcctacctcagatgagatattgcctaattattttcaaaagacagtraaacatcatggatgtaaatgtttgctgcaaaataaatacgtgctagaaacagaagcatctgggtcacagctatattagagctacctgtgttcccctgtcactgacattaaaacaaaaatgtccaatacgatccttcacagtg

SEQ ID NO: 153438 - DNA, 488 bp, Homo sapiens
ttgaactatggatacggcagaagaaaacatgaggatttcacagatttaaggtgcaaaaagtcactgggttctctaagaagtctgggattcttctgctggaaaaataagtttgttgagaaaaaatgagttggaggaggctgttattgaagtgaagcagaattgtttttactaatctgcttattacccactctgtagtgtggaaacaaattattcatgcacaaggtcctcttactgttcctagaatgcagtggaaagagaacagattagttttcctccctcagaacacaacccctagaaacatcctacctcagatgagatattgcctaattattttcaaaagacagtaaaacatcatggatgtaaatgtttgctrcaaaataaatacgtgctagaaacagaagcatctgggtcacagctatattagagctacctgtgttcccctgtcactgacattaaaacaaaaatgtccaatacgatccttcacagtg

SEQ ID NO: 153439 - DNA, 488 bp, Homo sapiens
ttgaactatggatacggcagaagaaaacatgaggatttcacagatttaaggtgcaaaaagtcactgggttctctaagaagtctgggattcttctgctggaaaaataagtttgttgagaaaaaatgagttggaggaggctgttattgaagtgaagcagaattgtttttactaatctgcttattacccactctgtagtgtggaaacaaattattcatgcacaaggtcctcttactgttcctagaatgcagtggaaagagaacagattagttttcctccctcagaacacaacccctagaaacatcctacctcagatgagatattgcctaattattttcaaaagacagtaaaacatcatggatgtaaatgtttgctgcaaaataaatacrtgctagaaacagaagcatctgggtcacagctatattagagctacctgtgttcccctgtcactgacattaaaacaaaaatgtccaatacgatccttcacagtg

SEQ ID NO: 153440 - DNA, 380 bp, Homo sapiens
aattttttttaaagaacacttgcagtgtttgaagtgacaaaggctactgtgacaaaaaagcagggaaagggaattttttttaaaaaaagcaaacaacaacaacaaaaaccccagagaaaagcaaacaacaaacaaacaaaaaacagaggaagaagtcaaacaccctgggctgtgactacttccaggaaggggctacaagaggcagctggaaattctatttgctttgcaactgtgggttttcyggcctgcttccttctaaagtatattactctgcttttggttcatgaagttatccatttctgttttctggaacagctatgtattttctttatctatcatctatctatctgtttaccatctatcttttctaccttttgcta

SEQ ID NO: 153441 - DNA, 380 bp, Homo sapiens
aattttttttaaagaacacttgcagtgtttgaagtgacaaaggctactgtgacaaaaaagcagggaaagggaattttttttaaaaaaagcaaacaacaacaacaaaaaccccagagaaaagcaaacaacaaacaaacaaaaaacagaggaagaagtcaaacaccctgggctgtgactacttccaggaaggggctacaagaggcagctggaaattctatttgctttgcaactgtgggttttctggcctgcttccttctaaagtatattactytgcttttggttcatgaagttatccatttctgttttctggaacagctatgtattttctttatctatcatctatctatctgtttaccatctatcttttctaccttttgcta

SEQ ID NO: 153442 - DNA, 380 bp, Homo sapiens
aattttttttaaagaacacttgcagtgtttgaagtgacaaaggctactgtgacaaaaaagcagggaaagggaattttttttaaaaaaagcaaacaacaacaacaaaaaccccagagaaaagcaaacaacaaacaaacaaaaaacagaggaagaagtcaaacaccctgggctgtgactacttccaggaaggggctacaagaggcagctggaaattctatttgctttgcaactgtgggttttctggcctgcttccttctaaagtatattactctgyttttggttcatgaagttatccatttctgttttctggaacagctatgtattttctttatctatcatctatctatctgtttaccatctatcttttctaccttttgcta

SEQ ID NO: 153443 - DNA, 534 bp, Homo sapiens
tagaatgctacctattgccttctggatagaatcrcaactctttaccacaatcgacacagcttcagccctgcttctatatccagcctcatctatttctgctcctcctccttattttccttctggacatgctgatggattgtcagcttcccagatgtgcgagaatctctcctcccttcccaacattctcacaatctccctctgcctctcaagaacttcctgtcccatctctcatgacaaatcctttcttcattctttaagatgcagccccttggctctttccttaaggatgtctgtctggctctattttgggtgacgtgctccttctgcatctcccagagccagccggtgtgtgtcagctacaacatttctttgcatctctgtgtcatatatcaccaaatctgcctaagcttgcatgagtcactgcatgacaacttcagactccaccagcattgtccccactaaccacaaggcttagacattcgtccagtatgctcggggttgtggggtggtagcagtaaccagctggtgaccatc

SEQ ID NO: 153444 - DNA, 521 bp, Homo sapiens
tagaatgctacctattgccttctggatagaatcacaactctttaccacaatcgacacagcttcagccctgcttctatatccagcctcatctrtttctgctcctcctccttattttccttctggacatgctgatggattgtcagcttcccagatgtgcgagaatctctcctcccttcccaacattctcacaatctccctctgcctctcaagaacttcctgtcccatctctcatgacaaatcctttcttcattctttaagatgcagccccttggctctttccttaaggatgtctgtctggctctattttgggtgacgtgctccttctgcatctcccagagccagccggtgtgtgtcagctacaacatttctttgcatctctgtgtcatatatcaccaaatctgcctaagcttgcatgagtcactgcatgacaacttcagactccaccagcattgtccccactaaccacaaggcttagacattcgtccagtatgctcggggttgtggggtggtagcagtaacca

SEQ ID NO: 153445 - DNA, 521 bp, Homo sapiens
tagaatgctacctattgccttctggatagaatcacaactctttaccacaatcgacacagcttcagccctgcttctatatccagcctcatctatttctgctcctcctccttattttccttctggacatgctgatggattgtcagcttcccagatgtgcgagaatctctcctcccttcccaacattctcacaatctccctctgcctctcaagaacttcctgtcccatctctcatgacaaatcctttcttcattctttaagatgcagccccttggctctttccttaaggatgtctgtctggctctattttgggtgacgtgctccttctgcatctcccagagccagccggtgtgtgtcagctacaacatttctttgcatctctgtgtcrtatatcaccaaatctgcctaagcttgcatgagtcactgcatgacaacttcagactccaccagcattgtccccactaaccacaaggcttagacattcgtccagtatgctcggggttgtggggtggtagcagtaacca

SEQ ID NO: 153446 - DNA, 449 bp, Homo sapiens
gtctctcctactaatgtatctattgtcagttaacttgaaggtctccaaccctggaacaaagttagaagaggaaggttctgctccccaaaatgcataaccaaattstgctacattcatgtaatggaatactatttagccatagaaaggaacaagatatcaacacacacaaagacatgagtgaatcttgcatgcacattgctaagtggaagaagacagtctgaggaggatacacacagtgtgacctcatttaatgagacactggagaaggcaaactacacagatgggaagccattggctccatggggtgggggtttgaggcattccatatgatactttaatagtgggatatctgccacaatgcatttgtcgaaatatgcagaattttacagccaaatggttaaagcaaactctattcaaattaaatcaaattactcaggatgtggagtatc

SEQ ID NO: 153447 - DNA, 481 bp, Homo sapiens
tgtaatccaatgagtagaaagtttggtaccccatttatggctgtcaacctgccasttctcaggagtttgtataaaagcctaaatccgaaaggatctcatcccattaggacccttgtctccttttctgttgcctttgcccactggctctggcaacaggggtctttctttctccttggctatctttggatatgggggctccatcttctgtgccaccttagggaatgccttttgcaggcatggctaagtcattaaaaagcctacagtttcagtaacattttgagtgagcactctctgaagctgcgttggaatctcaggcttctttgtctggaagataactcttgggctacaagtttcttatcctagctttggttttgaggcctctctgttctcctcttgggttggaagttattcctggctttttgtttcaaggtgtctctgtgatcttgatcttgctgctttcatgggaacttctcagttcact

SEQ ID NO: 153448 - DNA, 449 bp, Homo sapiens
gtctctcctactaatgtatctattgtcagttaacttgaaggtctccaaccctggaacaaagttagaagaggaaggttctgctccccaaaatgcataaccaaattctgctacattcatgtaatggaatactatttagccatagaaaggaacaagatatcaacacacacaaagacatgagtgaatcttgcatgcacattgctaagtggaagaagacagtctgaggaggatacacacagtgtgacctcatttaatgagacactggagaaggcaaactacacagatgggaagccattggctccatggggtgggggtttgaggcattccatwtgatactttaatagtgggatatctgccacaatgcatttgtcgaaatatgcagaattttacagccaaatggttaaagcaaactctattcaaattaaatcaaattactcaggatgtggagtatc

SEQ ID NO: 153449 - DNA, 449 bp, Homo sapiens
gtctctcctactaatgtatctattgtcagttaacttgaaggtctccaaccctggaacaaagttagaagaggaaggttctgctccccaaaatgcataaccaaattctgctacattcatgtaatggaatactatttagccatagaaaggaacaagatatcaacacacacaaagacatgagtgaatcttgcatgcacattgctaagtggaagaagacagtctgaggaggatacacacagtgtgacctcatttaatgagacactggagaaggcaaactacacagatgggaagccattggctccatggggtgggggtttgaggcattccatatgatactttaatagtgggwtatctgccacaatgcatttgtcgaaatatgcagaattttacagccaaatggttaaagcaaactctattcaaattaaatcaaattactcaggatgtggagtatc

SEQ ID NO: 153450 - DNA, 529 bp, Homo sapiens
aaggttctgctccccaaaatgcataaccaaattctgctacattcatgtaatggaatactatttagccatagaaaggaacaagatatcaacacacacaaagacatgagtgaatcttgcatgcacattgctaagtggaagaagacagtctgaggaggatacacacagtgtgacctcatttaatgagacactggagaaggcaaactacacagatgggaagccattggctccatggggtgggggtttgaggcattccatatgatactttaatagtgggatatctgccacaatgcatytgtcgaaatatgcagaattttacagccaaatggttaaagcaaactctattcaaattaaatcaaattactcaggatgtggagtatcccaggacagaatacatcatgtgaaaaagaatttatgctacaaattactatggtttggatgtggtttgtccccacaaaaactcatgttgaaatttgactcccactgtgtcagtgtggggcggtggggcctagtggacggtgtttgggtcctg

SEQ ID NO: 153451 - DNA, 550 bp, Homo sapiens
attagcaaggcgagaaggctagaatgattcatgtgatagtagatcagaggtggagacatcaacgtaaacttatgtttagtttaatatagacacacacagttctacatagaaaactttataattaggtgtgtataggtaggttagacacacacatatacttcctagcattgccaatgagggagaagatacaatgtgctcattcagcagccagatgtaagttttcctaccattctgaaagtaatcaggctctttgaagaaatgtctgatactagaactgggacagtaaatataggagccaggataatctggaagtatcagaaagtaagtactaaaaaaattaaaayatatcaaagaaaaataagagccaataaaaacagctactgatggccaacacaggaatgaattgtgcaacataatactgtagtgttgaataataactaaagcttaaagtaattatctaggtgtctgtatttgtatacctaggtgaataagcaaatggagttgcatagaaatctcctttgcaaaagaattccaaataattgatgtagac

SEQ ID NO: 153452 - DNA, 481 bp, Homo sapiens
tgtaatccaatgagtagaaagtttggtaccccatttatggctgtcaacctgccagttctcaggagtttgtataaaagcctaaatccgaaaggatctcatcccattaggacccttgtctccttttctgttgcctttgcccactggctctggcaacaggggtctttctttctccttggctatctttggatatgggggctccrtcttctgtgccaccttagggaatgccttttgcaggcatggctaagtcattaaaaagcctacagtttcagtaacattttgagtgagcactctctgaagctgcgttggaatctcaggcttctttgtctggaagataactcttgggctacaagtttcttatcctagctttggttttgaggcctctctgttctcctcttgggttggaagttattcctggctttttgtttcaaggtgtctctgtgatcttgatcttgctgctttcatgggaacttctcagttcact

SEQ ID NO: 153453 - DNA, 550 bp, Homo sapiens
attagcaaggcgagaaggctagaatgattcatgtgatagtagatcagaggtggagacatcaacgtaaacttatgtttagtttaatatagacacacacagttctacatagaaaactttataattaggtgtgtataggtaggttagacacacacatatacttcctagcattgccaatgagggagaagatacaatgtgctcattcagcagccagatgtaagttttcctaccattctgaaagtaatcaggctctttgaagaaatgtctgatactagaactgggacagtaaatataggagccaggataatctggaagtatcagaaagtaagtactaaaaaaattaaaacatatcaaagaaaaataagagccaataaaaacagctactgatggccaacacaggaatgaattgtgcaacataatactgtagtgttgaataataactaaagcttaaagtaattatctaggtgtctgtatttgtatacmtaggtgaataagcaaatggagttgcatagaaatctcctttgcaaaagaattccaaataattgatgtagac

SEQ ID NO: 153454 - DNA, 505 bp, Homo sapiens
gtgttcattgtcttgaaagctttttaattttttttaatttttaattttttgagtacatggtaggtgtgtatatttatgggttccatgaggtattttgatgcagtcactcaatgataataatcacatcagtataaatggtgtatctatcatgtcaagcatttatcctttgtgttgaaagcttttttaaaaaacatacattttattgagatatactttatattaaatacattattttggccaattgaacttaaaaaaaaaatagtacctggtacctttaaaggcaactaacagagttagacttaggactctatttaattgtttgaccytttccctggaagatagttttgtgaaaggattagctttggcaccttaaaactacattattctctgaaaaatacagaaaacattgatgcaaatacttattctttagcacagctaaagtagaataatcacctctatttttgttcattagattacacgtttaaaagctgtatattaaatacct

SEQ ID NO: 153455 - DNA, 540 bp, Homo sapiens
cctttgcctcaccatcactccttcatggcaataccttaggggctatttcaattttccacctccactggtggatctcatgaccaaagggcttggtgctgtgtgagtcagggtccagatagaaaatagaaaccaatatctgtatttaaaacaagggaatttcatgtgagaattggttagctagaactgaaaaacccacctgaagttgcaaataaactcatagatgagcaagaacaggaaatcacgttgcactaggctgcagggacaaaggtaggagggctattatcagaaaaagggaatgtctaggatagatacgacattaaataaagtttgaatagacacaaaaagcattaaagtattaagtaatggcaactggaactttaacaacmcttctgtccttctgtagtctgttgatatagattggatgtgtgtcctctgcagatctcatgttggaatgtgatccccattgttggagctggggcctaatgggaagtattggttcatgggggcacatcccacataaatcgcttagtgacatcccct

SEQ ID NO: 153456 - DNA, 602 bp, Homo sapiens
ctgcagatctcatgttggaatgtgatccccattgttggagctggggcctaatgggaagtattggttcatkggggcacatcccacataaatcgcttagtgacatccccttggtgataagtgagttccttctttgagttcatgcggggtctggttgtctaaaagagtatggcacctctccccagctctctcttgctccttctcaccatatatcatggtagttcccatttgccttccaccatgattgtaagtttcctaaggcctcaccaggaacaggtgccagcaccatgcttcctgcatagttgttcactcttattcttcagaatggctactgcaaatattgtccagatgtcaaagctccctactccactctgtgcccctcctacactcaacttgttaactctttgctcccgatgcaaactcacttgtcctttctgtcaccgtggatgtctctctcctcccagtgcagttaccctcctgtgatttggtttccatttcctttcctttcattaggaactttagatcattcattttaaactctcctctgtgtccttaagtttttccactagtcattggtatcgacattttaacatgctcaagtctcc

SEQ ID NO: 153457 - DNA, 583 bp, Homo sapiens
tgcacttaaactaactagaatatgcatttgacttttgtgttactgctggggaagaccagggataactatctggaacctgtctggagaaagaggaccaccagtaartaattttggttctggtttgaagtgttgccagttttaatcgtcctttgactttcatttttgtttagcagggcttttataattctgatatctttctgtgcaaaatcattcaaccaatcttcatgactatataagtttggagatactttaattttagtttagattgtcaaataatgatccttttcaatgcagttaaatggtttcaactgttaatagtggcaaaatatgaatcaaacacagagctttggttcactgtataaagactatgatattgaacttccctatagtttttatagtatatataaactcatgcatgacagtcataagttcatgaacatgtgttcacatatgaataaagatactaatgtgctcaagtccaaaacccacacaagttcagccattcacccaagcagctgtagaagtcttatcaaagacattgtccaatatgtcagtcaatactgcttttataaactttcatgta

SEQ ID NO: 153458 - DNA, 583 bp, Homo sapiens
tgcacttaaactaactagaatatgcatttgacttttgtgttactgctggggaagaccagggataactatctggaacctgtctggagaaagaggaccaccagtaaataattttggttctggtttgaagtgttgccagttttaatcgtcctttgactttcatttttgtttagcagggcttttataattctgatatctttctgtgcaaaatcattcaaccaatcttcatgactatataagtttggagatactttaattttagtttagattgtcaaataatgatccttttcaatgcagttaaatggtttcaactgttaatagtggcaaaatatgaatcaaacacagagctttggttcactgtataaagactatgatattgaacttccctatagtttttatagtatatataaactcatgcatgacagtcataagttcatgaacatgtgttcacatatraataaagatactaatgtgctcaagtccaaaacccacacaagttcagccattcacccaagcagctgtagaagtcttatcaaagacattgtccaatatgtcagtcaatactgcttttataaactttcatgta

SEQ ID NO: 153459 - DNA, 583 bp, Homo sapiens
tgcacttaaactaactagaatatgcatttgacttttgtgttactgctggggaagaccagggataactatctggaacctgtctggagaaagaggaccaccagtaaataattttggttctggtttgaagtgttgccagttttaatcgtcctttgactttcatttttgtttagcagggcttttataattctgatatctttctgtgcaaaatcattcaaccaatcttcatgactatataagtttggagatactttaattttagtttagattgtcaaataatgatccttttcaatgcagttaaatggtttcaactgttaatagtggcaaaatatgaatcaaacacagagctttggttcactgtataaagactatgatattgaacttccctatagtttttatagtatatataaactcatgcatgacagtcataagttcatgaacatgtgttcacatatgaataaagatactaatgtgctcaagtccaaaacccacacaagttcagccattcacccaagcagctgtagaagtcttatcaaagacrttgtccaatatgtcagtcaatactgcttttataaactttcatgta

SEQ ID NO: 153460 - DNA, 625 bp, Homo sapiens
tcaaatataatgaggactgttaatttttgaaaattaagattatttgaagttttagccactatctggccccattaaacactgtatattactattactatataggtgtattaatggaaccaaactactgaactgtctggaaagaaagatcttacttcccttctccagcaagcaattcytggttttgattcaaattattactggtaaatatgaatggataaatgctataatggacaccaagaaaaatagggggagataattcagctagagatattaggaggagaaatggtttgattatatgttgtcaaccaccaaatctcacttatctgtactgaagaagatgtttcctgcttataaatccttccacccacttaggaaagaaaagaggaaaggaaaatgacaaatgtcagccccaaacactgaaacccttcctctctctttctctctttctctctctttctatctatgtcacataaaagaatgtatgaatatataaaaaatcgtaccagttctggcattgaaaaatgctgatatggctacatttattcagcaagcaaaatgtcttgctggataatggtcatttggtttaaggttgaagagtatagaaccacaggctgacaaatgggaa

SEQ ID NO: 153461 - DNA, 611 bp, Homo sapiens
taagtgtaatttctcatgctctattgtttgggaaatgaattgtgtataaattgttcctaaaatagcatgacaatttattaacatactttcagtgacttccaggagagtgttctaagatacaaaggccacgtctgtatgtaatcatagaatttatcattttaatgtagttttttggtaggacatcttatcaggccagtttggaatgacagtggtataataaactatctttttttttttaatctgttgttttgctctacagaaacaagcaaaagtgaaaggaaaaaacatcacttaattgactcagtacaagtgtgctttaamtagtctctccagaactggttcaccttttttgttgttgttttgttgtgtttttcaaatcctttccctctctgtctctttttcctttcaataaatgtaaaacatgatgtagaatgtacaattttaatgaggtttccatttatatcaactcattcctacccattcattatttatttggcaattaagggaatctgtactgctattcagtttattttgtcaacaagcatttgctacaaagctactaattttcctgggttcaaaagaagtggaaatcctggcatattcccagcagc

SEQ ID NO: 153462 - DNA, 549 bp, Homo sapiens
tatcatttggagtagaatttagaatgtatacgtgccaaaataagttcagtttatcatagtgtgaatactataaaatatgtactgagagtaatgccaatcacttatttaaatagtaacaaacctgtagttttctcatctgtgtatgtaattcactaggaaaatgaaccctactctgggtgaaatgactcagattaaccaaagtttgaatcctattactaattgtgtgatcttggggaagttaatttttttaatttgaaataaaacttacctacaataaaatgcacaaatcttaagtttacagcttaaatgtttacctatgtgtgctccttgtaaccatcacctaaatcaagatgtgaaacatttctatcaccctaaacagtttcctcttgcccctttacagtcaactccctggcccagagcactattctgatttttatcaccataaattgggctttgcctgttattgaacgtcatataaatggaatcayagagtatctctcttttgtatatggcttcttttgttcaacataatagctgtgagattcatcc

SEQ ID NO: 153463 - DNA, 540 bp, Homo sapiens
taggaatttaacctttttgtccttacttgcatgatgtgggagtagcttgtttctttctttcttatctttactcaaaatgtgccaaccaaactgaaaaatatctttctagaattcttaacttttttgaagggacaaggtgctttcaaatgctatattttaacttttaaatattaggttaagtggcttaattttatgtttctttagtggctgtcttttgacatcgtatacgtttctttcaatggagaaattayatttcatgatgttctataaatattaaaaccaaactatttaaactgtaatatattcaaagagccttgatgaatattcatcttttccatttgcaaaaaagaaatgcattataagaagtcagggaaaatttactaaatgtatgcaaaagtgtatttttcctttttaattcattcagaatgtagagacataatgtcagcatttatttagggtacagactttatttgcagtcatttagtattatatcaatacttcattagccttatagctcaaaaccaaaaacctgatccgaag

SEQ ID NO: 153464 - DNA, 540 bp, Homo sapiens
taggaatttaacctttttgtccttacttgcatgatgtgggagtagcttgtttctttctttcttatctttactcaaaatgtgccaaccaaactgaaaaatatctttctagaattcttaacttttttgaagggacaaggtgctttcaaatgctatattttaacttttaaatattaggttaagtggcttaattttatgtttctttagtggctgtcttttgacatcgtatacgtttctttcaatggagaaattacatttcatgatgttctataaatattaaaaccamactatttaaactgtaatatattcaaagagccttgatgaatattcatcttttccatttgcaaaaaagaaatgcattataagaagtcagggaaaatttactaaatgtatgcaaaagtgtatttttcctttttaattcattcagaatgtagagacataatgtcagcatttatttagggtacagactttatttgcagtcatttagtattatatcaatacttcattagccttatagctcaaaaccaaaaacctgatccgaag

SEQ ID NO: 153465 - DNA, 534 bp, Homo sapiens
atttgtcttcctgtatttgtgtcacatcataaaattcttctcatttcatggtatgtttaacatctaagtaggactggtagaggagccttatcatgcttgcagttaaatttattttcacttacatttaaaagacttctccccattttagcatttttatatctctggcagtatctttatcattttctttgaaaaccagtgagaaaaaaatcatcccttgtgaaaatattgaactgcagctacttttatatagtcatagtccttttgggttgtcattggggaatctgtagttttgtcagttttccttgttcagctcctagcctgggcactgcagtgttgaaaggccatccccgaggctgatgtgactagttctcttggagttttatgacacataaccctggaccttgttgtttcctggagcagaactcaatgatgactgaagccatcagcctgcgaagctggacctgggtggtggcaggtctccaaaggctggggatgttttcagagacaggcrttgagattgtgaggtccagatct

SEQ ID NO: 153466 - DNA, 578 bp, Homo sapiens
agatcttctttcgacgtggaagtttgcttccattgccaatctcaggggctactgctttgattttatgaagggagagaccaagcttccttttaatttgcagttgtgaaattataaatgcctccaactgccatgctagcggtagaggtgttctctgctatggaaactttttcttgctggcagtgtcacaggagccaactaaaggagaagcgaaacattaatgactgcaccactttgctgggcatgagctttttccctgaactrtctctaccctgagttattcagaacatcctctgcctcttgtgctgatgagaaggatgtgctcaaagggagatgggtgctgacagcacatcaggaataattcccctcatccatcaagcctgacaacccttggattccttaccctgtcagagcagggagaggcttgggcaggattgaatggtcctcacttgtctggcattttaaacaaatctgcatctgatatgaagttaactagatgcagctgaagttgctgatggcaacagttttcactaaagtcggaagcttctaacctgtcccacaggctgtggaatgtcacacac

SEQ ID NO: 153467 - DNA, 438 bp, Homo sapiens
  misc_feature (1)...(438): n = A,T,C or G
nnnnnnnnnnnnnnnnnnnnnnnnnnnctaatattcytcatacgtggatcatattttttaactgtgcagggaaattaattgtttcagtgatttctgttatatgtttctctttatttgtttttaatgaaagtatccgtatccctaatgtgatagatcctaaggctggagaacaatgaacaataggcatcgtaaggcaggcatgacttactaaaagagaggggcatcccagagcggctgacgatgcctttcctgccatcctctggtgctttgctctgcctggcatcatcttctcatgatcacctccccacacacgccccccaattaaatattaccatttccatccacttccagactctcacgtgcagctagaatgtgaaaaaatgttttccccaaatttcctctatgatgcagttaaacatcaacgaaaagcaatgaaat

SEQ ID NO: 153468 - DNA, 557 bp, Homo sapiens
  misc_feature (1)...(557): n = A,T,C or G
aatcaagctattaagtgagctgagaacataaaacattttaataggaatttcatataactaaactaagtatttgagagcccaaccagagaattatggctctttgaaaacaaactttatgggacttagtgttcttagtctaccctctattacagttcttaaaaaaactatagcatttctatcgttgactttaaatctttgtcacttcttgcatatgtaaagggttaaatgtgtctctgcttaatgacttgggggccatatctgtttgaagactgagttttggtctctgtaggtctttagagtttagagtctatttttttctattgagagtcttagtgtgagtgtctctcttctaatttgggagtgtggaggattgttttatttttccagttgtgatcctcataaatcaccccaacactttcagygtcatgaccttaattctctaggacatgcaatatacctttcccaattaagtggactcatggtctggctcaagagtgatattctcagaatggagagagcacttcttcctgaccctcttagaatgnnnnnnnnnnnnn

SEQ ID NO: 153469 - DNA, 603 bp, Homo sapiens
gaccatttttgccttgtagagattttaatctactgaaaataggtgtgactaaaaatgcatagctgcatcttcataaggtacacagaaaaaccagtgttggtattttatggctattcaatgcatgagagaatcagtatatttctaaaccttgtaacaaactgttgtataaaaagaaacctgtagattccactttgtttttcctgacttgggagagactctggtctatatgtttagattcatgctttgttctagcccttcgttatgtcttattaactktactaatggaaggcatctctttgtttgaattgccacaatttaattatattagtgaactcaaattaaaacggtaaatttccatatgcagtgttagaaaataatatggttcatcaatgtctggaattcaactgaatagaataaatagattttgctctaggattagcctgataatatgtttatatgtaaaacaaaattgattttaatgattgcagtacaaaaacttcacttctaagttgagttaaattaacaaactcctgatctatctctgctatgaaatactaaatgattagatattttagcccagccatgcaagttggaacacattct

SEQ ID NO: 153470 - DNA, 554 bp, Homo sapiens
gtagtagtattgaagtatctaaaaaggcaagtcctcattttttccccattcccaacagctcccttagtctccaaaagcacccttattctcacaaggcagccactgtggacagcrtggttcatattctgagacatttttcctcacgaacacacatgtgcagacatgtgcacacatatatatgaagttttaaaataaataattcagaaaatggtcttcagtttttttctcttaatatatcatgaatatcttatgttagtactgttattatatagttgttttaattgtagtacaatatttcatagtatggatatatttagcttttaactcactgaatgactttgaggaggttgtttccatttttccctgtatatacactgttgctgtgaccatctttatgtgtgagtgtgtgtgtgtgtgtttgtgtgtgtgtgtgtgtgtgtgtgaatttgtatagatataacagattcttagtagtagaaatgccagaatgaatgatatatgcattttgaattttgtaagtactgctgaacttcccttcaaaaattaccagtttt

SEQ ID NO: 153471 - DNA, 597 bp, Homo sapiens
gtgaatacatcatcatcatgaaatctggttttatgtgctctatgaaatacttggagaattgtttttgtttttgctttattaggtcacacaaaacagaatgaattggcagaaaagtgctctgtatgytataaaatagcatttactacttcaatttaaattgtttttactaacaattgtagacctttttgatgacactgattttatgtatgcttttaataaattttgtacttattagtacttaatgaacccttcctgcctcaatataaaattactaaacttggagaattacagattttatcgtggaccctgatattagtcactttggagaagctacaaatttggccaaaatgaaggatccaatgaccctttaaattatctttattttatatttaatattatgtgatcctggactacactgatttaaaacatgctttttgaaaaatgtcttaataatggggcagtaatcttcagtgtgcttcaaacactatttgcaccaaaatcatgtaggtattggcagtggttctcaaactaggataacaaagacacctgcagagtttgcttaaacacaactgctggcccctgcccctgctcctagag

SEQ ID NO: 153472 - DNA, 484 bp, Homo sapiens
gtcaaaattgttaaattctgcaaaataaagggtggagcaacttggttaggtaaggtgtgcaggaaggtagcctcagcatcttgcgtccttaaatgatccactttgccacayggtaaagtgttcaagaactttaagacatctgcactacaagataaggagcagaaacagcactaaccaaggacacagaatatttgggttccagttccaactattttattagctatgaaactttggctaagaaacttagccacttcgagactcattgtcttgtcctgggtggtgcaaagtaattacagtaaggttatgaaattccaaaagcaacaataatagcttgtatttattgagtgtttattatgtatcaggcataactttgaatactctagatggattaacctagctagttttgatttttatactgtcttagtctgttttctgttgctgtaaatgaatacacgagactgggtaatttataaagagaagaatt

SEQ ID NO: 153473 - DNA, 484 bp, Homo sapiens
gtcaaaattgttaaattctgcaaaataaagggtggagcaacttggttaggtaaggtgtgcaggaaggtagcctcagcatcttgcgtccttaaatgatccactttgccacatggtaaagtgttcaagaactttaagacatctgcactacaagataaggagcagaaacagcactaaccaaggacacagaatatttgggttccagttccaactattttattagctatgaaactttggctaagaaacttagccacttcgagactcattgtcttgtcctgggtggtgcaaagtaattacagtaaggttatgaaattccaaaagcaacaataatagcttgtatttattgagtgtttattatgtatcaggcataactttgaatactctagatggattaacctagctagttttgatttttrtactgtcttagtctgttttctgttgctgtaaatgaatacacgagactgggtaatttataaagagaagaatt

SEQ ID NO: 153474 - DNA, 666 bp, Homo sapiens
aaaaagcaatacacatttctctcatgcccagtaactctacatatgataaagtcagcatgtgaaaatacagctatctgtttgggaacgaaagaagacagctttttgcatgactcagttctcaagcttaaatttccctgtggcatagtgaatttggggtgccatgattctattttttttccacaacagtaactatgcccaccttgtctttggcagttgagtaccaccacttagccctaccatcctaggatccaattattcccrctgcatttaggtttcccaattcaatgactgcagttctcactgtctgcagagaagagcaatcacagaactcttcaaagatgctggggttcccctcacagatttattcctattcctcacggtactgctaaaagtatgtcttctagaccctccagtgtgggtgagtagttcttaaatgacaaatccactctgacattccaatctccctaagcctttgaatctcttccacattaaaccaaggcaagtccagtatttccaatttgctcaccctgggccactttttggtccatgtttcaacccactaacctgactgttagaacactttataactgcctgagctgcaacagtaaatgcagaatttctgcttaattagttaatatcaataaattcaacctgatctaactttat

SEQ ID NO: 153475 - DNA, 666 bp, Homo sapiens
aaaaagcaatacacatttctctcatgcccagtaactctacatatgataaagtcagcatgtgaaaatacagctatctgtttgggaacgaaagaagacagctttttgcatgactcagttctcaagcttaaatttccctgtggcatagtgaatttggggtgccatgattctattttttttccacaacagtaactatgcccaccttgtctttggcagttgagtaccaccacttagccctaccatcctaggatccaattattcccactgcatttaggtttcccaattcaatgactgcagttctcactgtctgcagagaagagcaatcacagaactcttcaaagatgctggggttcccctcacagatttattcctattcctcacggtactgctaaaagtatgtcttctagaccctccagtgtgggtgagtagttcttaaatgacaaatcyactctgacattccaatctccctaagcctttgaatctcttccacattaaaccaaggcaagtccagtatttccaatttgctcaccctgggccactttttggtccatgtttcaacccactaacctgactgttagaacactttataactgcctgagctgcaacagtaaatgcagaatttctgcttaattagttaatatcaataaattcaacctgatctaactttat

SEQ ID NO: 153476 - DNA, 601 bp, Homo sapiens
agcttcctgcacatggccaatccctggcctagcactgactctggctcatggytgcccagagaatggtggaagaatatgatgcagaaggaccttcagggctccaacgaggtgggtttggtaagactgaacccctccacatgcattttcctatatttctctttagctagaggcaacgaggcatgccagggtcttggtgacagatggtcatttgctcaagtcctgtctctgccctcttcctagttacatgaacttgcacaaactagttgatctccactggcttctgtctccttgactgtaaatgtggataatactatattacatattcacagagctgctggaaggcccaacgatcagatcatttgactggccaggggcatggtctctggctggctttgcaaaactgtgagggaggaagcctgggtcttcagaactctcgactctcttttgtgccttcagctttcaccatagcaacatctcttctggtcccacgtgttctttccagctgtgttccctctcaaagcccacacacgcaggaagcgacctgtagtaaagccatttactacagaacacagaggttcctgctaaagtctacatattatgt

SEQ ID NO: 153477 - DNA, 526 bp, Homo sapiens
aattctgtttatcataggaaataacttgggcccataaggaaggagtagagactcttcaggagagggacattttagtccataatttctctgatttagtgccaaaagcttttttgagagactattcaaagctgtcttaagtttcattgttggaaattgatagctgctrtatttctttttaataactgttttaagttctttctgttttgtcttctcggttgctaaattcctgaagattacaaaaaaagtgtgcttaaagtaaaagtgttatgagacaaaagctttattctgtggataggataatacttcttttgtaacattttctgtttgcaccaaaagtgagaagtcaatgccttgcctttgtgcatcccattactaatggaggataagaagttattttcttcaaaggctgacttccagaatttttggctgaacactttttgtcaagtgtatattccctttgtaggcctttctgtatagagcccacaaacatcgtgaatgtgaatcatgtcattcagagggttagtga

SEQ ID NO: 153478 - DNA, 521 bp, Homo sapiens
ataaggaaggagtagagactcttcaggagagggacattttagtccataatttctctgatttagtgccaaaagcttttttgagagactattcaaagctgtcttaagtttcattgttggaaattgatagctgctgtatttctttttaataactgttttaagttctttctgttttgtcttctcggttgctaaattcctgaagattacaaaaaaagtgtgcttaaagtaaaagtgttatgagacaaaagctttattctgtggataggataatacttcttttgtracattttctgtttgcaccaaaagtgagaagtcaatgccttgcctttgtgcatcccattactaatggaggataagaagttattttcttcaaaggctgacttccagaatttttggctgaacactttttgtcaagtgtatattccctttgtaggcctttctgtatagagcccacaaacatcgtgaatgtgaatcatgtcattcagagggttagtgaccatgcctctgccatgaacaagagaatt

SEQ ID NO: 153479 - DNA, 584 bp, Homo sapiens
aattctttcttccgaagtacacaaatcctaataaaaatcagaagcaaaaccatcaatacttatgacaggtaactgaaaccatctacaaaccttctactcaaaagaagaaaccaagttactaaggaagaaccaaagctcaaaaaacctaacagtttggacatgtggggaaagacttacagtcttcccagaccctgtttgagcrcaagccatcaaatctcgtcctgcaagtatgataggaatactgtatttttgcacaggagtaagcttagtataaccagctttagcaatgttgttattcagtgtctgacagagattagcttcttcaaaagtctgaaaatttaaaaaaaagcagtgattacattctatatatcatatgcagatcatttataagcatatttcattcgagctactttccaagttctgttaattctactttatatactaaagtgactttagtaacatgcctccactcagaagtaaatattcaaagcctgtatattataatatgatttgacagaatcatgaagtattctccacaaatggtggctttaaaaacatttttcctgcccccttaaaacctatga

SEQ ID NO: 153480 - DNA, 483 bp, Homo sapiens
aaggtgagcaagttgcaaacaattctcatgtatggctcaaaaagagactctaaaagaaatcaaaaggagaaaggtccttaagagttktctgaaataattaagatattctgtttaaaaaatgtacatgatgtcatatagtttctccttggaaaccctctaagttacaagctgagttttatttgttaagtcaaagccccatgggtggttgtggggtgggaggcagaggagataatgaagggatgtgcatgaaaatgttcacgtgattcattttgaagagtgggattcgggatgttttgttttgttgcccaaaccccatgtgcctacccgaaacaagcagaacacagctgcataaatacagtggtgactaacccttaagaaatgaagtctctttgtaacctaaatctatatatacacatagacagagatttagggatattatttcctatctttaataactcctaaaattgcccaacagaaaagtga

SEQ ID NO: 153481 - DNA, 483 bp, Homo sapiens
aaggtgagcaagttgcaaacaattctcatgtatggctcaaaaagagactctaaaagaaatcaaaaggagaaaggtccttaagagttttctgaaataatkaagatattctgtttaaaaaatgtacatgatgtcatatagtttctccttggaaaccctctaagttacaagctgagttttatttgttaagtcaaagccccatgggtggttgtggggtgggaggcagaggagataatgaagggatgtgcatgaaaatgttcacgtgattcattttgaagagtgggattcgggatgttttgttttgttgcccaaaccccatgtgcctacccgaaacaagcagaacacagctgcataaatacagtggtgactaacccttaagaaatgaagtctctttgtaacctaaatctatatatacacatagacagagatttagggatattatttcctatctttaataactcctaaaattgcccaacagaaaagtga

SEQ ID NO: 153482 - DNA, 483 bp, Homo sapiens
aaggtgagcaagttgcaaacaattctcatgtatggctcaaaaagagactctaaaagaaatcaaaaggagaaaggtccttaagagttttctgaaataattaagatattctgtttaaaaaatgtacatgatgtcatatagtttctccttggaaaccctctaagttacaagctgagttttatttgttaagtcaaagccccatgggtggttgtggggtgggaggcagaggagataatgaagggatrtgcatgaaaatgttcacgtgattcattttgaagagtgggattcgggatgttttgttttgttgcccaaaccccatgtgcctacccgaaacaagcagaacacagctgcataaatacagtggtgactaacccttaagaaatgaagtctctttgtaacctaaatctatatatacacatagacagagatttagggatattatttcctatctttaataactcctaaaattgcccaacagaaaagtga

SEQ ID NO: 153483 - DNA, 184 bp, Homo sapiens
gagcccaacatcatacaagtgatcttattagcaattctgtgtacaatgtttgcttttaagattttctcctaattacataagatagatagcactgmatgcacagtgtaagttatgaggaaaaaacccacagcataaaaagaatgtttttcatttaaattgttttgctttttagacagcttgactt

SEQ ID NO: 153484 - DNA, 642 bp, Homo sapiens
cctgtcaatttgaagcaattgtgaatagtccttactaaatatttctaatgccatttgataggtgtcactgacttttaagaaaaccactgagccacttcctttcctgacygtgtttggaattaccgtacacatctttttcctggcctctggcagaagcttgtaatgtagataagttcatatggctggttggaaaggaagaaggtgtgtattactagacccagtacaacaaaaggtgtgcacggtttcaaccaaaattaagaataggagtgccttagagagacgctcctgaaattcttctacagacgataccctgctttggggaataatttttctcactattaatgctcctcctttctgtctccgtttccacccacactccaaaactgtagtgaaaccagtgttcactgtaaaaatagttatgaggaagtctgaatagccagaaaagatttgaataaaagggatgacgatatgcctgtatcacaaatgagatcctaaaaaatgtttttttgtttcgtttttccagaagcttccatatgtgactactttttaaattctctcccatggacacatttataccttaaaactttgccttatcgtttccttggctatgggatgaaagagagtttcagaattctttcaaca

SEQ ID NO: 153485 - DNA, 642 bp, Homo sapiens
cctgtcaatttgaagcaattgtgaatagtccttactaaatatttctaatgccatttgataggtgtcactgacttttaagaaaaccactgagccacttcctttcctgactgtgtttggaattaccgtacacatctttttcctggcctctggcagaagcttgtaatgtagataagttcatatggctggttggaaaggaagaaggtgtgtattactagacccagtacaacaaaaggtgtgcacggtttcaaccaaaattaagaataggagtgccttagagagacgctcctgaaattcttctacagacgataccctgctttgrggaataatttttctcactattaatgctcctcctttctgtctccgtttccacccacactccaaaactgtagtgaaaccagtgttcactgtaaaaatagttatgaggaagtctgaatagccagaaaagatttgaataaaagggatgacgatatgcctgtatcacaaatgagatcctaaaaaatgtttttttgtttcgtttttccagaagcttccatatgtgactactttttaaattctctcccatggacacatttataccttaaaactttgccttatcgtttccttggctatgggatgaaagagagtttcagaattctttcaaca

SEQ ID NO: 153486 - DNA, 642 bp, Homo sapiens
cctgtcaatttgaagcaattgtgaatagtccttactaaatatttctaatgccatttgataggtgtcactgacttttaagaaaaccactgagccacttcctttcctgactgtgtttggaattaccgtacacatctttttcctggcctctggcagaagcttgtaatgtagataagttcatatggctggttggaaaggaagaaggtgtgtattactagacccagtacaacaaaaggtgtgcacggtttcaaccaaaattaagaataggagtgccttagagagacgctcctgaaattcttctacagacgataccctgctttggggaataatttttctcactattaatgctcctcctttctgtctccgtttccacccacactccaaaactgtagtgaaaccagtgttcactgtaaaaatagttatgaggaagtctgaatagccagaaaagatttgaataaaagggatgacgatatgcctgtatcacaaatgagatcctaaaaaatgtttttttgtttcgtttttccagaagcttccatatgtgactactttttaaattctctcccatggacrcatttataccttaaaactttgccttatcgtttccttggctatgggatgaaagagagtttcagaattctttcaaca

SEQ ID NO: 153487 - DNA, 625 bp, Homo sapiens
gggagatagaaacattcaatccaaagcaattatcctcaaagtaaaagtctgctacacacccaggcttgtgtcattggcactttggagagytgaaataatcaaggcagtgagcgtccagaaggaagcaaactggtgtgaagaagggagagaacagcagtcacacaagccaagattcacagcagagacagggagtaatgagaagaaacaaccacctcatgaagattttggagataaggaatgtggtaaagaatgttcatttcttggttggcattgaggctggagagggtgacctcagtcatctgaaaaaattgtaaacattcaggcagctgattattaggttcccacttgtggggctcagcatcccagaatgtacagtgcctgtttatctatcacggtgatggtgacaatgatgaaggtagcagagccacagctgtgtgctccaccctctgggcatcttggttctaaaaaaaccacaaacatgtacacacttatctatggttctaaaaaaaccacaaacatgcacacgcttatctatgaaactgagacagatgctcctggcctattcaaataaacacatactttaatcagtcatctttctgatatgcaaaactgtaagagttattca

SEQ ID NO: 153488 - DNA, 410 bp, Homo sapiens
gcacaactttcagattctgtgtcctattgaacactggctatccttacttgccttttggactaaggtctacccttagctataggaggaatgaaggtttggtttggactttaggaatgataacaagtctcttgataattcgaatatgggttcatttgtttttcrtaaatgaaagagccctgaaggtgtaaactttcttgacaggaccaaagtcatcaatgccttattgtgaattgttttactagatcttttgattgaaccaatgttagaacaggtgtttgggagaaatggaaaagaaggagagaaatttgaggcacagacagtaaccttagcatgtcaggccctgaagaagacctataaaagcaaaagatagcataaggaaaccacatctttgataaagactgataattaaa

SEQ ID NO: 153489 - DNA, 636 bp, Homo sapiens
ttttatgggcccagttctccttttagggtttatagaattatgtgccsagttcccattaaatgtaaaaaaacaactaatgcacaaaatctcaccacacactacagtcaaaatgtgacttgagaccaaagagttattccatttcttgcattgaccaaaacctcattttgttgttctgtacctagatgaaacttttcatgacctctttacagtaataaaatactctgtcctttgactctatctatggagtcctgtctatttccccacttctcagttctggtactcctaacctactttatactttggacacttattatctgtttcctttgttcatttatccactcatttaagaaagaaaaattgattgaataccaaagtccaacccctccctaaggggaaaaaaataatgtatcaatccaatttcagtcgactacaatttaaagatgagatgacatgttcatcagtaattatattctggggtttggtgtgatctttagctgtacagagccaagttccataggaattcacctgtgtaacctccagacagatcatgaaaagttttcatcagggagatgaaatgtaagctggactttgaagactatacagcaagagtagagacagagaagggaggtcactgtt

SEQ ID NO: 153490 - DNA, 636 bp, Homo sapiens
ttttatgggcccagttctccttttagggtttatagaattatgtgccgagttcccattaaatgtaaaaaaacaactaatgcacaaaakctcaccacacactacagtcaaaatgtgacttgagaccaaagagttattccatttcttgcattgaccaaaacctcattttgttgttctgtacctagatgaaacttttcatgacctctttacagtaataaaatactctgtcctttgactctatctatggagtcctgtctatttccccacttctcagttctggtactcctaacctactttatactttggacacttattatctgtttcctttgttcatttatccactcatttaagaaagaaaaattgattgaataccaaagtccaacccctccctaaggggaaaaaaataatgtatcaatccaatttcagtcgactacaatttaaagatgagatgacatgttcatcagtaattatattctggggtttggtgtgatctttagctgtacagagccaagttccataggaattcacctgtgtaacctccagacagatcatgaaaagttttcatcagggagatgaaatgtaagctggactttgaagactatacagcaagagtagagacagagaagggaggtcactgtt

SEQ ID NO: 153491 - DNA, 636 bp, Homo sapiens
ttttatgggcccagttctccttttagggtttatagaattatgtgccgagttcccattaaatgtaaaaaaacaactaatgcacaaaatctcaccacacactacagtcaaaatgtgacttgagaccaaagagttattccatttcttgcattgaccaaaacctcattttgttgttctgtacctagatgaaacttttcatgacctctttacagtaataaaatactctgtcctttgactctatctatggagtcctgtctatttccccacttctcagttctggtactcctaacctactttatactttggacacttattatctgtttcctttgttcatttatccactcatttaagaaakaaaaattgattgaataccaaagtccaacccctccctaaggggaaaaaaataatgtatcaatccaatttcagtcgactacaatttaaagatgagatgacatgttcatcagtaattatattctggggtttggtgtgatctttagctgtacagagccaagttccataggaattcacctgtgtaacctccagacagatcatgaaaagttttcatcagggagatgaaatgtaagctggactttgaagactatacagcaagagtagagacagagaagggaggtcactgtt

SEQ ID NO: 153492 - DNA, 471 bp, Homo sapiens
ggatttaaatggccactatgactaaaataatatatggcttaaggcatatttttgtactctgttgaagcatttccattattagaatgactagggwttgcatttgcatctattttagagaaacataaaataaacacgagtaacacttaggccaaatttgaatgggaacaaattttaatcattctttgtactatccacaattacaatatgttttcattcaaggataacattttattatatgcagtgcaaaaattgagactgtgtttacgcttaagtgacataggaaacttgccattaattctattaaaaacatggataattatgaaagagtttgttaaaatttccatatcacattttgagtctggttttcaaattttaaagaaataaaagttatcatttctgtcccatgagtatgccaggtgttagaatgacagatggaatcagagtctactctatcccatcacttactcttct

SEQ ID NO: 153493 - DNA, 589 bp, Homo sapiens
tttttacataaagtcaacaacaaattaatgaggccagtgcagacatttgggggaagacaatatatagtcttcctatatttttcatctacataaccaagctataagatgatatcttacatatatgacatgcacacaaatttgtctgccacaatcacacaaacttctgagttagattttacaaatcctactctattttgattctttatgttaatagtcattctccccgtctttattcattttgaagtgaaaaagttaaggaaagaaatacagagatcattaaaaataaaataagaraaatagaataaattatagaggagacaaaaaaatgcctaaaatttacctaagttaaaagatttgttgctgtttttcctgttggaggcaactgaaaacctatccaaaactggcttaaacataaaaaggaaattattggctcatatatttgaaaagtccagggaactgctggcttcagatattgtttgatgcagagactcaaacacctctgggccttagcttctctctttacatttcttgactccgcctccttgggcaaccttacacttcaaagaagcaggataacttcagcaagtct

SEQ ID NO: 153494 - DNA, 428 bp, Homo sapiens
ggtgactgggcagagcacgatcaaaaacagggtttagataaaacatcaaagtataccacaagtttaggctttttaccgagcaaactaccaataaaatattataaaaacaacatcaagaatgtagacttaaacagggtgttacatatatgcacattcatatgtatcatgccatttatttattctgaagcagtagaccattttttagatgatgaaactgagaaataaagaggttaggtgccagttctaagtcacagtgctgggaggtgacacaggtcataccaaagatcagcttttctcaaatatccaaagtctagtcctctttctgaatattaggytgaatagtgaagaagttaggttatagttttttttactttggctttctgtttgatgttatcatctcgcttttgaacctttgttcatgtatgtgc

SEQ ID NO: 153495 - DNA, 497 bp, Homo sapiens
taatgttttctttttttttccaccgagaaaaccttatgtataatagattttcttaaaattcaccagaatatctaactcatgtatttgtagactaattgtttcaatgaacctttatcaatgcttagtgtgtcaggcactgtgccgagcattaaggatgcagaggtattaaataaatacattgttttatgcttctcgagagactgagatagaagctgtttgtgtcagttacaacacactatgctaggtgcagtgagagaagacgctatgagaacagaaagggggcccctaactcagccttgggatgaggatgggtggtgctccagaggcttcctakcactcaaagaatgaagccaaaatagaaatcaggcatatcccaaaaggagaaaatcattcgacttcgctccttttgtgaaacttttaaccaagggtcaataatgaggttcagtgcgggtagaatgtcccgcacactccagagcccacttatggccctgtccaaa

SEQ ID NO: 153496 - DNA, 292 bp, Homo sapiens
gcctccctggatctcttctaccatgtggtcaagtacatgggctttgcrctcagtgcccaggttggaatcctgcttgtgactataaccttgggcaaatcactttgtctttctggttttctgtttccttgctataaaagagagctaataataccaccttggtttatttggttgttgcaaaaaataaattttaaaatgcatggaaacataaagtgcttattttatgggtcagcactgggcttgataaatgttgctattattagtagtatcatcaaatgaggaggttgagccagaa

SEQ ID NO: 153497 - DNA, 456 bp, Homo sapiens
tcctctgtttttcttgaagacaaagtgggaagagatgtgctaaaatggcaaaggaaaagtttaagawcaaatgcataaggaagactgtcttgttttgtcaaacatgggaagttacatggggaggttgctgtccattcttaatgggaactttccaaaggaatgcattttaatctgggtgcaatggtgtaaagaaagaaagcagtgaattggtgacttataaaggctcctgcctccaaaaaaaccctttttaaattaaagggtgtcatctggcacacagaatagttccctgagcttacaggaatgatttctacagatattttttagccagacggagaattgtcatcctgggagtcaaaatcagactaattttttccagacctagaaacctcctgggacttggctagtgcaggtgcctgtcaggaccagggtttgtacatcgtcagattctttcttcct

SEQ ID NO: 153498 - DNA, 456 bp, Homo sapiens
tcctctgtttttcttgaagacaaagtgggaagagatgtgctaaaatggcaaaggaaaagtttaagatcaaatgcataaggaagactgtcttgttttgtcaaacatgggaagttacatggggaggttgctgtccattcttaatgggaactttccaaaggaatgcattttaatctgggtgcaatggtgtaaagaaagaaagcagtgaattggtgacttataaaggctcctgcctccaaaaaamccctttttaaattaaagggtgtcatctggcacacagaatagttccctgagcttacaggaatgatttctacagatattttttagccagacggagaattgtcatcctgggagtcaaaatcagactaattttttccagacctagaaacctcctgggacttggctagtgcaggtgcctgtcaggaccagggtttgtacatcgtcagattctttcttcct

SEQ ID NO: 153499 - DNA, 568 bp, Homo sapiens
ctgagcttacaggaatgatttctacagatattttttagccagacggagaattgtcatcctgggagtcaaaatcagactaattttttccagacctagaaacctcctgggacttggctagtgcaggtgcctgtcaggaccagggtttgtacatcgtcagattctttcttcctcctctagccccagaggctgtgctctagagcatactttacctctagagtagttgtcccctgagcatttgttttctttcctgacacaggaaggaagataaatactgttctgtcacagtttgagaaggcagtccatgatcatgatatagctaataaggtgctcaggagggaagagttcactagatggtggacaacgcgtggtgtttggtaataggagatatatgcaaaatttgtgttaacaggttatttaattctgkttactaatttatacctgcatttgggaagtagagaaaagaacacattgaaaatcactgagtatattaaaaataaaatgctgtcaaattaggaaagttaaagaacgggccaaagagaatatagtattacattaattacctgtttga

SEQ ID NO: 153500 - DNA, 528 bp, Homo sapiens
cactatgttcagagggcctgaaagcagacttcattaaatggaggaagagtgagatggataaattcagaagacagtatataagatttggcaagtttaagaactatgaccaaaagtgatatttgggtatagttattttgacatgcatctgattagcagcaaacagacaacaaacctacatttttgaggaggctgtattaccaaagatatcgtaagtctggcctacaaaagtttggattatttgatccctaaagcaacccttgggattctacctgacattagcaggaccagcagtcccccaagatatggtcatcaaggataatggacaaaaacaattccctgtgggcaaaactgggggccatggagtawaattgataaaggaattcttatgagaaagcagacccaagtttagtccaacaagctaaccaagaaacgtcaccatagtacagaatcttcccagttcctgaggaatttgaaaattttagaaaattgctatgagcttgctatgtttcccagtctttctttttccaa

SEQ ID NO: 153501 - DNA, 506 bp, Homo sapiens
gtttagtccaacaagctaaccaagaaacgtcaccatagtacagaatcttcccagttcctgaggaatttgaaaattttmgaaaattgctatgagcttgctatgtttcccagtctttctttttccaaatgggacttttcagtgcggttattcttttcctatgccatcactgggagtgttgggggagggtgtgggggtgaggagctgataacttgtcttccttttatagtttgctggattatgagaagctacaaccaggaagaactgtatcacccagagatcctggtctttgagcttcaggcagtaactgggaattaacaaatggtgaatgggtcctatgtaaggaaaaaagggtcctcatggttacttggatagctagagaggcagatcacggtagaactggctagatgactgagaatccctgtctacttcttccttttttctttttcatattaaagcaggacttaccagtgctggattgttgatttaggagaggagcaacagaattc

SEQ ID NO: 153502 - DNA, 481 bp, Homo sapiens
aacgtcaccatagtacagaatcttcccagttcctgaggaatttgaaaattttagaaaattgctatgagcttgctatgtttcccagtctttctttttccaaatgggacttttcagtgcggttattcttttcctatgccatcactgggagtgttgggggagggtgtgggggtgaggagctgataacttgtcttccttttatagtttgctggattatgagaagctacaaccaggaagaactgtatcacccagagatcctggtctttgagcttcaggcagtaactgggaattaacaaatggtgaatgggtcctatgtaaggaaaaaagggtcctcatggttacttggatagctagagaggcagatcacggtagaactggctagatgactgagaatccctgtctacttcttccttttttctttttcatattaaagcaggactyaccagtgctggattgttgatttaggagaggagcaacagaattc

SEQ ID NO: 153503 - DNA, 466 bp, Homo sapiens
gaattcgcttttttaatggtgtatcacactgtgggctcagctgacattgtggtcaaccaaagccatgaggtctcttttacatgagcagtggccattaacaatacacaattatgtacttgtgcaacttatttttgcctcttcagagcaggaacttacatttacccattagcatttcttttctgagtattccacctagtttagaggttaagtgctttggagttagtctgagactgtaactcagctcattsatcttttggctgtctgcgtttgggcaaattccttttaacattatttgcttaaataacatttaacaaaattaatcatattgattttgccccaacagtcatttttccatctatcaactcatttactcattcattcaacaaatacatgtcttctaagagccaggcactgtgttagatatgcagtaaatgccttctctggggtcttcattaagttcactaat

SEQ ID NO: 153504 - DNA, 583 bp, Homo sapiens
gccttgctgaactgtggtgggctccrcccagttcaagcttccctgccactttgtttatactgtgagcatagaaccacctactcaagcctcagcaatggcggatctccccatccctaccaagctccagcatcccaggtcgatctcagactgctgcactagcagcgagcaaggctctgtgggcataggacccgccaagccaggcacaggagggaatctcctggactgccagttgcaaagaccatgggaaaagcacagtatttgggctggagtgtaccattcctccaggtacagtcactcatggtttcccttagctaggaaagggaaatcccctgaccccttgaacttcccgggtgaggtgatgccctgccctgcttcggctcaccctctgtgggctgcacccactgtccaaccagtcccaatgagatgaaccaggtacctcagctggaaatgcagaaatcacccgtcttctgcgccaatctcgctgggacctgtagaccggagttgttcctatttggccaccttgaaagtgaccctaaatcatcaattttttaattggattgcttggtttctttggtgtggttga

SEQ ID NO: 153505 - DNA, 581 bp, Homo sapiens
cttgctgaactgtggtgggctccacccagttcaagcttccctgccactttgtttatactgtgagcatagaaccacctactcaagcctcagcaatggcggatctccccatccctaccaagctccagcatcccaggtcgatctcagactgctgcactagcagcgagcaaggctctgtgggyataggacccgccaagccaggcacaggagggaatctcctggactgccagttgcaaagaccatgggaaaagcacagtatttgggctggagtgtaccattcctccaggtacagtcactcatggtttcccttagctaggaaagggaaatcccctgaccccttgaacttcccgggtgaggtgatgccctgccctgcttcggctcaccctctgtgggctgcacccactgtccaaccagtcccaatgagatgaaccaggtacctcagctggaaatgcagaaatcacccgtcttctgcgccaatctcgctgggacctgtagaccggagttgttcctatttggccaccttgaaagtgaccctaaatcatcaattttttaattggattgcttggtttctttggtgtggttga

SEQ ID NO: 153506 - DNA, 548 bp, Homo sapiens
tatacattatggaatcagctgaagagaattgtcttgctcaaggtatgcaccctccctgggggcagcctgcatccaatgactggtcayatgagacctagcctcctcctcatcctaaatagggacaactctaaagggctatctcagcttcagagctctctgtggggtgagctgaggctttccttgagattgcatcacagtccaactttctcacagcccagtcctgcttcactccctgccccttcacaactgttgatcccaatgagcactccctaataaaccttctgtatgctaatctctgttctcagagtctacttccctgggggagtgctcctttcaacacatctcccgctggtaggaatataaattgatacgagcacattataaaatagtttggaattacctggtaaagtttaaaatgtaagccaggcaaggtggcatgcaccaaggagctgaggtgggaggaccacttgaacccaggagttgagtccagcttgggcaatgtagcaagaccccatctcttaaaaaaaaaaaaagctgaagatgcatat

SEQ ID NO: 153507 - DNA, 549 bp, Homo sapiens
ctatacattatggaatcagctgaagagaattgtcttgctcaaggtatgcaccctccctgggggcagcctgcatccaatgactggtcacatgagacctagcctcctcctcatcctaaatagggacaactctaaagggctatctcagcttcagagctctctgtggggtgagctgaggctttccttgagattgcatcacagtccaactttctcacagcccagtcctgcttcactccctgccccttcacaactgttgatcccaatgagcactccctaataaaccttctgtatgctaatctctgttctcagagtctacttccctgggggagtgctcctttcaacacatctcccgctggtaggaatataaattgatacragcacattataaaatagtttggaattacctggtaaagtttaaaatgtaagccaggcaaggtggcatgcaccaaggagctgaggtgggaggaccacttgaacccaggagttgagtccagcttgggcaatgtagcaagaccccatctcttaaaaaaaaaaaaagctgaagatgcatat

SEQ ID NO: 153508 - DNA, 560 bp, Homo sapiens
ggatggttatttaaaaatgtcaaaaataaatggaacctgaatggaaaaaaaaaaaaaagaaagactctgcccattctgcccactctgagattgtctatgcttcctgtttggcattcaagaggaagtcctcatatttcccagccatattttgctggtatctttaatatttaatcccacttgtggtcaacaccraaaggaaaattctatttctgcctcacatctcaggtggagttgtagtgactgaaataatcacaggttgatgaagcctgcttgctacaatgtataaggtccatactgtcagggctacatagatctaactattctaacactgagatttatacatctatacattatttttattctcataggaattctttttaaggtttcgtagctttctcctctgccaagatacaaaatagggaaccacaaattatttatttaaaaaagaaatagatgaatgatattagattccaactaccaattggacagctcctgaggtctcacagtcagccacttttttatcttataagtgatatggtttggctgtgtccccacccaaa

SEQ ID NO: 153509 - DNA, 511 bp, Homo sapiens
tgtcctttctcctttgctgtccgttccaatctgtattagrtggccagagtgatcatttccaaatgtaaatctgatcataacttcctccctccagaaaagtaaatgtaatttaattttaagatgttcagatggcttccatttggataaagaccaggaaatctttaacatgcctgaccgagtccctgcccggttgggcccctgtctgcttctccaggcccatctcagctcacacttgcccttgttccgtggcagggttgcgtgctttcatttcctcagactcactcactgccttcttctatagggccctcacatgctccctctgccaggaacactgtttttccataaagtcagctcatcgttgttaaaatcttaactcattgacacttcctcagggaagctttccctcatccacccagactggctttgtagcagggtgtccctactgtcagtgttgtgcttttacatttgttacctcatttgatgaatgactgccttccccctagcacctagc

SEQ ID NO: 153510 - DNA, 469 bp, Homo sapiens
ttagggctgagtcttgaaatatctgaagtagcgaccatgcagatttctgggataagccagttccaggcagaaaaaatagcactgaagtgggaataagcatcacatatcctggaaagagcaagaaggtcagcgtggccagggcacaataccagaggaagcagggggaggaggccagccctgtggaggccgtgggacggtacttggcttttattctaaatacactgggaagattttcgaggactgtaagtagaaatgacatggtatgtgttttcgtgggattactctgattgctgcattgggaatagacaatagcagggaagaagtrgaagcagggagacgagatagaaccctgttgcagtagctaaggcctaagatggcaatggcctggacagaggtggctgcagggattaggttcaggacctattttgaaagcagaactggcaatactcactaataaataggatatgga

SEQ ID NO: 153511 - DNA, 603 bp, Homo sapiens
ctttaaaacagattacacttcaggcgaaaagtctgcctccgggagcactgattggtgggttccagcaatatgctgcaccttctggcattttttatttgtttgtcttttaactaagtaaactcaatattcatcctatggcttaggaagttgacactgacaaggasggagacattttgattggtacatctgcagtctgcctgcaccaaagaaaggtcaaaatgttcctcttagctggccaggcttggaatcagtaagcagcttctgcaggatttgaaggcatcgtgcattaggactactgaagcttgaacgagtggagtcataagagcattcattatgctctcctgtggcagaaatcatcatcacctgcctttctgctggggcaattgttttcatttttatgtattttccccttaggtgggttgttttagcatccgtgctgtaattttccttggctggaaacccaaagccagtgggagacagaccagaaatagatcctaatcttctcacccccagcctaccatgccaaaactgcccagctgcctcataccacgagtgacctttttctgaaaaatgggaggccagagacaacagggaggcttgcca

SEQ ID NO: 153512 - DNA, 523 bp, Homo sapiens
cttaggaaggttttcctataattacatagtttttctttcagtagatataacattcacattccctaatttaaacttctcatccttgtttagccttaaatatatatttaaatagattaattgcttgccattaacatttataaagcaggcttttcactttttagtctattattttgattmttttctagttggctgttttaaacaagatttttaatttttttaattatgttttttggtaggttgcataggtactaaattaccagagttcttgcatgctgtgaatctgccacctttgtacatgaatgacaatttggtggcattaagtttgtttggccacactttttttcttcaaaacttttagacattattccatttctttctgataatgagcattgccatgaagatgttttagacaagacttaggttatttgtgtgtgtttgtgcttgtgtgtgtatgtgagcatgtgtgtgtaagcatctaaaactttcttgttttataccttcttgtacatatttcttggttgtt

SEQ ID NO: 153513 - DNA, 621 bp, Homo sapiens
cacgatatatagatggaggcagagagcaaggtcatgcttctataagccaatgaactccaaagattgctggaaaatcacacacaggacagacaaataatccagactttaccctcacagtcttcggaaggaaccaaacctgttgatactttgatcttggatttccatcctccagaattgtgagacaaaaaatttctgttgtttcagccacctagtttgtgggattttgtttcaacagcgctagaaaactgatacacwcctaaataaagaagacttgacctgtacctttaggggctcatgaaagaatctacgggcactaacgctattcaatatttggcatttagagctattagaacatgacctgcatctctaaatacacattattatgattaacagagctcagatctgagcaaacagatctccatatctcttgcatagatctttgaaagaaagagtaactgggtccaatagttatgaaaccttgtgggttggggataaacgttgcttccataggcaacactattgagaagtagaattacttacataaggaaaatagaaactgaagacctatcaaccctttttctcagatagtatgaatgtaataatttcaacgtgtttattgtt

SEQ ID NO: 153514 - DNA, 487 bp, Homo sapiens
atttgttcaatgtaatagagtagggaatttttggagaaagaacttgcttgttacccaggctggagtacgggrgcacaatcatagctcactgcagcctggaactgctgggctgcagtgatcctcccacctcagcctcccaagtagttgggactacaggtgtacgccagcatgcctgactaattatttttattttgtggagacgggagtctgctttgttgcaggagcttgtctcaaactgttgacctcaagccagccaccgtcctcttgcctcagcctcccagagtgctgggattatagctatgagtcaccacttttggcagagtaggattttttaaagctttttacaagcatatttcccagtgactcctaaagctatggagtcttagtggtgaaaaagccagaacaatcacattatttgcagtaactgtatctttgtttttaggcatccagttttagtaacaattttgcctcagttatttatttgaaa

SEQ ID NO: 153515 - DNA, 552 bp, Homo sapiens
tacttacaaataagccaaacaaataccatccaaaacctccacactgaaaattataaaacattgcaaagaaaaattgaagcaatgctaaataaatatmagcatgtactgcatttatggaatggaagactcaatattattaaatgacctcattttgttttttagatttaacttgatcccaataaattatctaaaaggttttatgtagtaattttcaagatgattttaaaatttgcatggaaattaggaggatctagaatagccaaagcaatttttaaaatgaggttggagaaataaagctgaagggcttaacctaccagatttcaaaacctattgaaaagctatagacctgaagactatgtggcaaaatatagatgtaaagattatctaaaatgaatataatctataaaacaatacataggtgaaagaagatgtttttcttaggcagatgaaagcggatggctttctgttagaaattgcactattttaaacagagtaaaattatttattacagcaaattttaaagttcagggctgtgatatattaatgaagtaa

SEQ ID NO: 153516 - DNA, 552 bp, Homo sapiens
tacttacaaataagccaaacaaataccatccaaaacctccacactgaaaattataaaacattgcaaagaaaaattgaagcaatgctaaataaatatcagcatgtactgcatttatggaatggaagactcaatattattaaatkacctcattttgttttttagatttaacttgatcccaataaattatctaaaaggttttatgtagtaattttcaagatgattttaaaatttgcatggaaattaggaggatctagaatagccaaagcaatttttaaaatgaggttggagaaataaagctgaagggcttaacctaccagatttcaaaacctattgaaaagctatagacctgaagactatgtggcaaaatatagatgtaaagattatctaaaatgaatataatctataaaacaatacataggtgaaagaagatgtttttcttaggcagatgaaagcggatggctttctgttagaaattgcactattttaaacagagtaaaattatttattacagcaaattttaaagttcagggctgtgatatattaatgaagtaa

SEQ ID NO: 153517 - DNA, 572 bp, Homo sapiens
tttacatattttctaattaaactggaatggatcatgggcatgaaattcgattctgaaaatgaaaatcaaatatgtgagattacatataagagaggaagaccaaggcgcataaactcattttctccactcttactgtttctctccttaatacctgtagcaattatcatggggttgaactttgattcttcttcctgtgactctcacattcaaytgatcctcttcataactaataacttaaacacatacaggaacacatgcatcatatgcacacacacacacacacacacatacaatttttagaaggcactggaaaaaagttatttttgttcctttgagtctttctttttgctttgtgtgtaatctaattaatattaacaggtcttttgatttggttttccaaggggaactcgatggatctctatccatactttctttagtctcccttgttcccttaaggcaaatttatacaaactttctagatctgttcactgctgcttgcctctgctaacaacgactatttcaaatggctacttttttatatatagttttcacattaacaaactttgttaagg

SEQ ID NO: 153518 - DNA, 590 bp, Homo sapiens
aagatcaatagattaggctggaaaacgattttcaaaaattgtacatcagaaatatctcatttaatttaaaaggcaagctatgaattagaaaaaagctrttttctacttaagtggctggtatggagttgttattctaaatatatggtgtgctttaaaaaagaacatcaataatgaacagatcaacatcctttatggatgttggagtccttctaacagatgtggaatagtgtatttaatatacatattaaatgatcccagggttcgtgagacttttatctacttcaagactttctatttgattcttctgctttgccagtctattcctgtgtcagtatcactgagcattgcttacgtttgcaatttaatatttggaagggaattacctccttcatttcttcccttttcaaaaatgtttaggggattttttctgtttattttttcacattaacttaggaatatttttgtggattaaaaatctattggaattttaattgatgaaatttaaatggaataaggatgaaaatcaacttaatgtttataaataattgacatatttgcattatttagccattttactcaggagcatacgc

SEQ ID NO: 153519 - DNA, 576 bp, Homo sapiens
atgcagtaaacagtagctataatagcatttttatagactgttattgtagtgagatgttgacagtgktagtttgtagacaagatcagttggtagactaatagaacagctggtagagcagtagaccagtagaaaggcagtgattcatacattggtcaaaatattcttataactctaagatgaaagtactacttaaatattttcaagtccagatggcctttagtgaattaatagggtctctctgagaacttcaccatcaagtattgtatagactactggagcagccagcccatagtggtggaaataaccaagcctgaatttcctgatatagcagatactgctagctgttagctcaaaatccattcccttaaaagagtcccatttttgtttgatagaaaaaaattacccagctgaaaatttcccagcctaccctatggatagggcagatagtgatagtcaatgagacattatggaagatttattcctgtcacattttctcctccttgtcactccatttgttctcctgcctggaacataggctgggggctgaaaggtagtatatatcttgtgactaacaac

SEQ ID NO: 153520 - DNA, 472 bp, Homo sapiens
cttggtatatatccagaggaattgaaatcattctgccataaagatatatgcatgtgaatgttcgttgcaacactatttacaataacaaagacatgaaatcaacctaaatacccatcaatgacagattggataaagaaaatgtggtgcagatacaccatggtatactatgcagccattaaaaagtaacactatcatgtattttgcyggtatatggatggagctgaaggctattatccttagcaaaataacacaagagcagaaaaccaaatacctcatgttctcacttgtaagtcagagctaaatgataagaacttagtaacacaaagaaggaaacaacagatcatttaggctactttagggtgtaggctgggagaagagaaaggagcagaaaaggtaatggggtaccgggcttaaatcctagggcatgaaataatctgtacaacaacccccctgacatgagtttacctatgta

SEQ ID NO: 153521 - DNA, 447 bp, Homo sapiens
ggtatatatccagaggaattgaaatcattctgccataaagatatatgcatgtgaatgttcgttgcaacactatttacaataacaaagacatgaaatcaacctaaatacccatcaatgacagattggataaagaaaatgtggtgcagatacaccatggtatactatgcagccattaaaaagtaacactatcatgtattttgccggtatatggatggagctgaaggctattatccttagcaaaataacacaagarcagaaaaccaaatacctcatgttctcacttgtaagtcagagctaaatgataagaacttagtaacacaaagaaggaaacaacagatcatttaggctactttagggtgtaggctgggagaagagaaaggagcagaaaaggtaatggggtaccgggcttaaatcctagggcatgaaataatctgtacaacaaccccc

SEQ ID NO: 153522 - DNA, 447 bp, Homo sapiens
ggtatatatccagaggaattgaaatcattctgccataaagatatatgcatgtgaatgttcgttgcaacactatttacaataacaaagacatgaaatcaacctaaatacccatcaatgacagattggataaagaaaatgtggtgcagatacaccatggtatactatgcagccattaaaaagtaacactatcatgtattttgccggtatatggatggagctgaaggctattatccttagcaaaataacacaagagcagaaaaccaaatacctcatgttctcacttrtaagtcagagctaaatgataagaacttagtaacacaaagaaggaaacaacagatcatttaggctactttagggtgtaggctgggagaagagaaaggagcagaaaaggtaatggggtaccgggcttaaatcctagggcatgaaataatctgtacaacaaccccc

SEQ ID NO: 153523 - DNA, 447 bp, Homo sapiens
ggtatatatccagaggaattgaaatcattctgccataaagatatatgcatgtgaatgttcgttgcaacactatttacaataacaaagacatgaaatcaacctaaatacccatcaatgacagattggataaagaaaatgtggtgcagatacaccatggtatactatgcagccattaaaaagtaacactatcatgtattttgccggtatatggatggagctgaaggctattatccttagcaaaataacacaagagcagaaaaccaaatacctcatgttctcacttgtaagtcagagctaaatgataagaacttagtaacacaaagaaggaaacaacagatcatttaggctactttagggtgtaggctgggagaagagaaaggagmagaaaaggtaatggggtaccgggcttaaatcctagggcatgaaataatctgtacaacaaccccc

SEQ ID NO: 153524 - DNA, 599 bp, Homo sapiens
aagcttccagagcccacagaggtaggctttccttttacttactgtctctgtctacccaggatttccctgactcaaaaccctgtttattctggttttaatgtattaaatgagggagaggaaatagaaaatatcttctctttaaaagttgcctcattttcaagccagacagtcttcagcaaagtgctccatttaacatcgaaaatctttatttmtctttgaatttcttctgtaatatcccaaacccacttccattccccaggtccccacaaagccatatagatgtgtatctaataggacagttgtatgtatggatgcacaaaatagtaaattatataaatgttatttttgaaaatattagtacaattaagatagtcatccacgattttattttctataaaaagattcttaatacatgatctcattctggtggcaccatgttgcctgccttttttctttcctccacacatataatcctccctattcttcaagtcttatatgtaccacagggatcaccatgagcgatccagccagcagtgtcatggtttcatgggctctatctatgccccataactcttctgtttcattgttgcatatgcggg

SEQ ID NO: 153525 - DNA, 599 bp, Homo sapiens
aagcttccagagcccacagaggtaggctttccttttacttactgtctctgtctacccaggatttccctgactcaaaaccctgtttattctggttttaatgtattaaatgagggagaggaaatagaaaatatcttctctttaaaagttgcctcattttcaagccagacagtcttcagcaaagtgctccatttaacatcgaaaatctttatttctctttgaatttcttctgtaatatcccaaacccacttccattccccakgtccccacaaagccatatagatgtgtatctaataggacagttgtatgtatggatgcacaaaatagtaaattatataaatgttatttttgaaaatattagtacaattaagatagtcatccacgattttattttctataaaaagattcttaatacatgatctcattctggtggcaccatgttgcctgccttttttctttcctccacacatataatcctccctattcttcaagtcttatatgtaccacagggatcaccatgagcgatccagccagcagtgtcatggtttcatgggctctatctatgccccataactcttctgtttcattgttgcatatgcggg

SEQ ID NO: 153526 - DNA, 395 bp, Homo sapiens
tccagataaaacggtctctgttaagtttaaacattcacttaatttaactttgtccagattcatttatgcagcctcatttggatcactcagtctattagctaaattgtctacttgtctgatttttatctccccacctagtaggttgtctagcagggmtcactgggtcctcatgctagccaggaaataaaaagccctggattctataaaaatgcaaacataataacttgatcaactccttcaagctgagaagcaattgtggagaaaagaaaatcagtaatctaatagcaaagtcctcttctggaggagacagataaagacatttgccaatacattcattcacattctaccataactatataactatttggataaacctctttactcttatgaactct

SEQ ID NO: 153527 - DNA, 542 bp, Homo sapiens
aagccactttcagcatgctgggtccagctgcaggctgaacacgaagccacggcggtatgggatccaggccagtagcccaagccaagcgcaacctgctggactgagtgggcagagcaagcccagcaagcctgaattaagccccaggcagagggcacagaggccacggagacttcaggctggcaaagcagcatcaaaggaatactggaacatggttaccctccctcctgttcaccgaccaatgggagaaaaaacgtcgctgggcactattccctcccactcactgaacaacaaaagctgcaacataaccatatcagtggtgatatctttttgcattggcccttttgtcgctatgaattttcygtctttaattctataaatgctttatctgctaaagtctactttatcttatattactgtagttttaccagaattcttttgaataaggtttgcatggcgtctctttgtccttgcttttattttcaacctttaggtagctttatatttaaagcatattccatggaaaaagcatttgctagactgtt

SEQ ID NO: 153528 - DNA, 621 bp, Homo sapiens
ctgtccacttctgacagagggatattgaaacctccaacaatattagattcattcacttctccctcttcttttagtttttgcctcacatagtttgacactctttcattaggcacatacacataagagttgttatgttttctgaagaattgagccctttattattacaccatgtccttctttatcccggataactttccttgctctgaagttmatatagctattgtcacatttttttcattagtgttagcatggtatatctttcaccgtttactttttatatatgcgtgtccttatatttaaagtaggtttcttgtagagaacatataattggttcttgtttcttgatatgctctaacaatttttgtctttcaattactgcatttagaccactgacattttaagtgattattgatataatataattaattgctattaggctgggtatggtggctcataccagtaatcccagcaatttgggaggctgaggcaagcagatcactggaggtcaggagtttgagaccagctggcctacatggtgaaaccacatctctactaaaaatacaaaaattagctgggtatgatggcacatacctgtaatcccagctacttgggaggctgagt

SEQ ID NO: 153529 - DNA, 569 bp, Homo sapiens
actaatgcagcccatgtgtctttcaaagccagtgagatattacggtagcccctggacaggtgaagctgcctaagaagccacaggtcagaggtggatacactctaactcagagcaaaaactccacagtgagtgtgcttgcccccatgtttgcataaactgagaggttgctaggaaaggggtargaaaaagaaagtctggaggatgtgaactttttagcctctagattagtaacttgctaacaaaatgagcatgctcaccaccaataggcttgtggataactctgcagctgaaatgggagttggaggggttagatgcccttttatagattctcagggctaagggattcccattgcctttgatgtcaatgcagcccatcttccaatattttttaaatagttttcagacacaaacacattaaaaaattggctaaaagaaaacatacatacatatatatataattttaagcataaaattgtgtgtgtgtgtgtgtatgtgtatgtgtacactctttgtttacccaacaaagagcagtgtggcagatataagttaactgcaagatggcagtagac

SEQ ID NO: 153530 - DNA, 407 bp, Homo sapiens
caaatatcctaccatgactaagacaatggtctgtgattttctcattaacttgtctcaacaacattgactttaggagggaataccagtgaggtgaggactcttccttgcccatttttcgacacagaagtcataaacatttgtgccaatattctcaaataaatttaaggagctgcagagccttaatgtagagtcagttttgagttctgtttattcaagtgaggttaacaaaacatgaagatactcatgggtttattaaatgagcacttatagtaggcaactgattattttcagtgaactagtccatagctttgagrttagcacatgtcttaaaactttttatcctggtaaaataaaatggactaatgaaatatagttaaggaatagaaatggcatcatctatacaaact

SEQ ID NO: 153531 - DNA, 556 bp, Homo sapiens
aaactgttacagatcagaggagtctaaggagatatgcccactaaatgtgatatgtaatatggtatcttggatgggaaattggaacaggaaaacaaacagaccccctctccataggttacttaatgatactctaccaaacagttaataatattgtaccaaatattcattcttagatttgacataygtaccatgcctttataagatgataacactaggaaaagccagctgagaggcatatggtgaccctctatagtatctttgtagcttttctacaattctaaaattaatctaaaaaaaagtttaaaaaatgagaaaattattttttataagtttctgtttttcccagtcttaatctgaaaccacatagggaaggtgattctgagttgacagttctagttagccaagttgacaaagaatgaagaccacaatcatacaaccaaaggtagagaaatttaaatttaaacttcctttactgtcttatgtagtttagctactcaaagacctcattgtgtcactttggaataataccaagttccaagtaactttatccccaata

SEQ ID NO: 153532 - DNA, 188 bp, Homo sapiens
gggagaggcacagaaggttaagaagaaggctcaggggagcttaactaaagtttggtaaaggagagaatttttgtcagtttctaccataagaaaaatttaagttattacagycaggtgcagtggcttatgcctgtaatcccagcactctgggaggccaaggcaggcggatctcttaagcccaggaattc

SEQ ID NO: 153533 - DNA, 590 bp, Homo sapiens
aatgatttcactgtttttgctttgccttattttaacttctgtgcttgacaactgtagatatatatgacacaatttctagattttggtggtgtatacctatgttcttagctactcaggaggctgcgctggcaactgtggctatattatattaatctacaaatctgtatttctggatagtgacataatatcttcctcaattttargcaaaattttccttttgaggctttacctttaaggagctatttggatttatggacttacttgacactaaatttgtatttttatactttctgagaatctggggtaaatagtgtcctaattaattaaataaagtataaaattgcttttaaaaaagttaagtacaatgtctccccccctttttttttgctagcaggatatattgggtaagattatctgccatattaaaaatagtctgggtagattacattcaaactctaatcactgttacaatatgttgcatgtgtgagtgatggggttttaaggtggtttttctgacttaatttgagtaatgtgaaaatagttttaaaattcttaagtgttctttccagtttctttccttttctatgtgt

SEQ ID NO: 153534 - DNA, 620 bp, Homo sapiens
ggcctgggtttgggttacacccccagagagagactctgcttggacagccctgtagcaaaacctcttccaaatactggcaggacttcagagtagtttaagtggattatgcttaagagtctaaggcctgtagtcagtagatcccacaggtccagcagtccctagccgtgatgatgctcactccatctgtattaaaatcaactgaatttcattgaagccagctgaatttctttgtggtttatctctgatcaagtaatccagaataaactgcttaccctccctaagccttaatggacccatctttgaaataggactaataataaaactaacagcacagatttttgaaataaggagttattgagctaacacatatgaaagcactttatacacagaaacacagtaagcaaatctttatgattatttctcagagaaactcagaatgaatgctgtgcagcattagaaaacataaaagtcaagaatatgtccttgaatagcctctaaatattaagataactgttagtgcccttgaaaatggattttaacaaattgttccttgatacccagaccatgcacactctcccggtgtgttattcgtcgygatgttcagccatcagcaggtcctc

SEQ ID NO: 153535 - DNA, 583 bp, Homo sapiens
ctatctagaaaggaaatgaactgccaggctcatgcaaggtaggggagactagggaggtgtaaggacagaagaaatcagctagatgttgggcataacatagcagaatcttctatggaaattcttactccataatgttggaacaccccttttccccaactttctggccagaggtaagctaggagagttattttaatcttaactctatttagggcattggagtgttccaaacagaakattatttgctgggcattttaaacaattgattccacatggattccctccgcatcatttttggaattgttttctctagacgtgttctaaagatagaatgtacatattcactaaagattgaaggatgctgaaatattaagcagccagaatggcaaatgttgtcacattctggtttcaatcgggcaaatggcttcaattcttgtgtttttcttggtgtttcaatgaggcatctaagacagtaactctggcagagtagggcccacaggaggaataatgaggaaaaatatctatacctttgctcaagtgcatactttgagaatattttgtgatagtaatacatgacttttacttc

SEQ ID NO: 153536 - DNA, 557 bp, Homo sapiens
gaattcatcaactatgaagccctcacacttcttctgggacggtaactctataaatacaagacattattattaattaaaaatcaatagtgaatctatgtggtggggaacacacattcgcactaatcccaaaacaattacagcccgagacaggttcattctgggcaagtcagtgatggagggtgcagsggcacagcttcaccagaggaaactactgactttgcaagatcctattcttttcttattgatttcctttgcaaggccagaaatcagatcacttactagagcttaaagtcactttctgggaatatattcctggtagctcttttctaaatacataaatctaaccaatatgcacaaacaaatcccacaggtctttatagtacattttgaaccaaatttaaagagagagaactacttgaagttttcatgaagacacagtccctttgaatttccagctccctaggctgctttttaattgccgtaggttatgaacgatgtttagattttgttttattccccaagagcattcagaattagtccttggcctctgcaagctc

SEQ ID NO: 153537 - DNA, 544 bp, Homo sapiens
catatttctgcttttgtgaaacagaaagacttcaacctgcctcacagggttgtggtgaggatagatgagatgacctacgtaaggtgtctaggacagtgcttggcatagagtagttgtctagtaatttatttcctgagtggttcttcgtgcactcctgtcccttatgcctgtagtaaacatacacatttccaaaaactgtcttgctcctcaaagcccaggtgtcttggaaacactcttatggtcattttttttcagtctggaagcataatacattaattacatgaatagatagatgataatagatagggaaagrgagagagataaatagatacagatggacagacagatagatgttagatacatgcatacatacatatgtggctggagattagatagacagacagacagaaagataggtagaaggccaaatagacagatacatagaaagagagaactgaagtatcattcttgacccacccagacctctatgagacagtagcatttaatcttgctgaagccaaagcctgagtaattgcaaatgaca

SEQ ID NO: 153538 - DNA, 621 bp, Homo sapiens
ttataaacaataaaatattgagtcaggacatggatagaaaggaatgaaaagagaagatgaggtggcaaatttttaacactaattaggtcagatggaataaattttagggttagcaagcgtttcgtctgatgtcatcacattggtacttgtagaagttttattttccatttattttcagtttatttttcactttgagccttggttgcatgtttcccccccatcttttgttaattgcttttcctgccatgtcttagtctttgccctcctaaccccactgtgctaagtcagcagtttgggttctttatttgtttagttcatgtgattcagagatttctttttgtaaacttggtaaacttttccatatttccagttatactgttagtgggtttggaacattttttccatttatagaacccttattgaagttgttgagtcttggaactgttaactattcagttatttgtcataaaaatatggcgtgtgtrtgtgtgtgtgtgtgtgtgtgtgtgtgtgtgtgtgtgtttaatgggagtcagtttaaataattacaaagaaattgaggctaaataaaactgcaatttgttgttttgtcagtaggccagtatgcactacttacacatt

SEQ ID NO: 153539 - DNA, 532 bp, Homo sapiens
cttaatatctaaaaattgtggttctaaaagatagaaagaatacgataaaaattgaggatgaatggaaacagtaactagatttgttaacttcaatcaagtggagaagccacctgggtgggaggtagagactaaactgacatgcaaattagtcaatgctgtgactttgatcttagctacaaaaaggactacaaaatgcgatttggcttggcagtcagagtgggaagaagaattgcccttggatgtgtgtagctgcagctagtatcacacccagagatgaagtctgattattaagcagtttcagcatgccaagaaactctaaatattcccttggaaaagcatgctcaaagttgtttgaggcattataatttttcgctttgtgtaagcccctttaactccagggagattttagaattcagtatagatataaagaaaataaaaacataatagttttgacrtaatttgtgtacatttgttatgctaattacctgtagagtataagaataccttacatattattgtgtcaataagttaa

SEQ ID NO: 153540 - DNA, 647 bp, Homo sapiens
accctgtgacaaagcaaaccaaagtcatctttgtctcaagtccagtggagactcagtaaattccacaggagtctaatagaaacaaaacttgatgactatgcaattttctttggatgagcttcaaattgaggctatagatcattgtgaatgtgtaggagagttctgtgttgctgaagccagacccaaagcttgagaagaggttaggaggctgctctgggatcytcttgcaaatgtgtcccttattccataaatctgcttgtccttatctccagtgtgggctctttggcaggactcttttcatttctgcaaggtgagcttgatgtctggtgacacatcatttgtggcctttttctctgacagcctcctgataaattcttccccaaatggacagccacttgagcaactgtgtttaatggattatctctttagaacagtataacctttggattattcagggctgaatgaagtgcaaatgtttgtcttccacttggcaaacccgcagaattaatccctggctcatttatcaggtcaaccggcaaaatggcttcctactgtgtaaagatgcagtggtgtgcatagaaaagctcatacttggactggaacctatgaacctaaattgtcataggctgccttagtatgccttagtg

SEQ ID NO: 153541 - DNA, 586 bp, Homo sapiens
ccaccatgcctggctaatttttgtatttttagtagagacggggtttcgccatgctggccaggcttatctcaaactcctgaccttgtgatccgcacccccttggcctcccaaagtgttaggattacaggcgagagccaccacatctggcactrtgcgtatattttaaaacaatattgtaacctttccctactttttatcgtaggcaatttttcttgattttaaatattcatctaaaatttgatgaattgggagctacgctgtaaggatataaagacataagaatgatacaaaggactttgggggctctgggggaagggtgggaggcgggtgagggataaaagactacacattgggtacagtgtacactgcttaggtgacaggtgcaccaaaccatgtaagcaaaaaccacctgtactccaaaaattattgaaataaaaattaaaattagaaaaaagtgaaataaaatgtgatgattaatgctcctagcttccatcacatggctattccatcatttatttaacccattatctgtagttaatgttcaaactattttattcctattgtaaataatgctactgcaacatat

SEQ ID NO: 153542 - DNA, 586 bp, Homo sapiens
ccaccatgcctggctaatttttgtatttttagtagagacggggtttcgccatgctggccaggcttatctcaaactcctgaccttgtgatccgcacccccttggcctcccaaagtgttaggattacaggcgagagccaccacatctggcactgtgcgtatattttaaaacaatattgtaacctttccctactttttatcgtaggcaatttttcttgattttaaatattcatctaaaatttgatgaattgggagctacgctgtaaggatataaagacataagaatgatacaaaggactttgggggctctgggggaagggtgggaggcgggtgagggataaaagactacacattgggtacagtgtacactgcttaggtgacaggtgcaccaaaccatgtaagcaaaaaccacctgtactccaaaaattattgaaataaaaattaaaattagaaaaaagtgaaataaaatgtgatgattaatgctcctagcttccatcacatggctattccatcatttatttaaccmattatctgtagttaatgttcaaactattttattcctattgtaaataatgctactgcaacatat

SEQ ID NO: 153543 - DNA, 547 bp, Homo sapiens
  misc_feature (1)...(547): n = A,T,C or G
ggatacctattctctgctggcatcatgaacccaggacagcttgagtgggccgggatggtaaggtaaaaggaagatactgtgcattcttccagttgcacgtgaaagacatttttgggggacgggcnatagaaagttgtgccagtaactgatataatcttaaagtatattagtgtccagttgtctgctgctagggacacacgtaaggcagtttaaaatgtttttgaactaatttacactccaggtgacaaaataatctgtaccacaaacccccacaacacaagcttacctatataacaaaccagcacatgtacccctgaacttaaaagttaaatttttaaaaattaatgtttttgcatcraaaataactcatttctgtatggttagagaaaggcttgttctgattgtcactatcagtagctgcttggactttaaaatttctgttctctgccctgtaatttgttgtgacctaatcatgtgctatgcaccaggctaatttccaggggccttgctgcttccatatcatgtttccttttccttaattagccct

SEQ ID NO: 153544 - DNA, 609 bp, Homo sapiens
aagcttgaacagggatggcagccttgagactggagaaaaagggctaggtgaggtgagaacacttcagagaaggagttatcagcagctgttgataggttggagatgaatgcggagcccatataatttctcatccaaactcggacacctctgagaaagaaagtgaagcactattaataaccatgctagaaggtgggcatcaaccagcactgtcttgggcaaacttgatatacagctggttactgcagatgagagaatgaaggagagatcagaatcaaaactgctccaatatttcttgtttgggggactttgggttactgtagttcacagagctgttgcaaatgccacctcttgtacaaagagtctctgtgattttcccccawcctccccaaaagaagctgtgaggaatcaaacagccgtcatggtatgggtgaaggaacagactttattgggggaaacttacaagccaaggttggaaagagaaggcatccgatactcctcctaaccacacagaaaggtgtgggccacagccaggatgttcttggagaccctcggatggacatgccagggaaggaggccctcccctccaactctctgccacctctcttcttt

SEQ ID NO: 153545 - DNA, 608 bp, Homo sapiens
taaacaatgtctggccttgggcaactgagtttgtctctacgggcttcagcttcctccctgcaccaaaggtttcttccaacgtgcacagacagcagtatgtacagtggctatcttaagtctgactgctgctttgaaatctcactttacgtcccctgctatgtttggttacgtgatttttctgtgcttcccttttcctaccctaaaatggggatgataatggtgtatgtctacgttgtcatgagggtatcttgagggtggaacatagagaacagcactgtggctggcaatggcaagtccgcaccccrtgctctctgttactactgttaatttcttaaggctccaatggcccccttgctatgggctgaagtgtgtccccctaaaatccatgttgaagttcaaatccccagtatctcagaatgtgactgtatttggaaacaaggtcttttaaggaggtgattaaattaaacatgaggctcttagggtgggtgctgatccaacctgactggtgttcttacagaaaaggaaatagggagatagacagctatacggagaatcagcaagagggtggccatctgcaagccaaggacagaggccccagaggaagccga

SEQ ID NO: 153546 - DNA, 608 bp, Homo sapiens
taaacaatgtctggccttgggcaactgagtttgtctctacgggcttcagcttcctccctgcaccaaaggtttcttccaacgtgcacagacagcagtatgtacagtggctatcttaagtctgactgctgctttgaaatctcactttacgtcccctgctatgtttggttacgtgatttttctgtgcttcccttttcctaccctaaaatggggatgataatggtgtatgtctacgttgtcatgagggtatcttgagggtggaacatagagaacagcactgtggctggcaatggcaagtccgcaccccgtgctctctgttactactgttaatttcttaaggctccaatggcccccttgctatgggctgaagtgtgtccccctaaaatccatgttgaagttcaaatccccagtatctcagaatgtgactgtatttggaaacaaggtcttttaaggaggtgattaaattaaacatgaggctcttagggtgggtgctgatccaacctgactggtgttcttacagaaaaggaaatagggagatagacagctatayggagaatcagcaagagggtggccatctgcaagccaaggacagaggccccagaggaagccga

SEQ ID NO: 153547 - DNA, 598 bp, Homo sapiens
ttctcttgaaatacccagtagtgctgcccaaatggccagcagtgagcaccagcggctgcaagtccatttacgcaaggctgttgtaggaaagtaagacagagaaatatgtctgctgacatgtgaggtcactaaagtatagattctttgtgtactgtttagagagatccacttgatagagctgctsatttatggagaaatgagcgctagttgccttccacccgtgtggctgtaaccttctgttgccgtggttgttaacagtccccatgttgagcaggagcatgcagagtttgccctacgctttcagagcctcacttagttaaggcacttttggttgctggagcaaaaaaggaaatttattttcagaataaagaatcctctgagctaacccgagggaaggtggtataaccccacctcaccccaagaggaactgctgcgagtgggaacaggcaagccccagcaaagctgctccaagtttgtttctgtttcctgtttctccctaggggtcggctttatgcccgcctgcctctctatctacccagtcaacttcctctcaccttcctagttcaagacaggattgatgagcaaccctgaaaagttt

SEQ ID NO: 153548 - DNA, 598 bp, Homo sapiens
ttctcttgaaatacccagtagtgctgcccaaatggccagcagtgagcaccagcggctgcaagtccatttacgcaaggctgttgtaggaaagtaagacagagaaatatgtctgctgacatgtgaggtcactaaagtatagattctttgtgtactgtttagagagatccacttgatagagctgctcatttatggagaaatgagcgctagttgccttccacccgtgtggctgtaaccttctgttgcygtggttgttaacagtccccatgttgagcaggagcatgcagagtttgccctacgctttcagagcctcacttagttaaggcacttttggttgctggagcaaaaaaggaaatttattttcagaataaagaatcctctgagctaacccgagggaaggtggtataaccccacctcaccccaagaggaactgctgcgagtgggaacaggcaagccccagcaaagctgctccaagtttgtttctgtttcctgtttctccctaggggtcggctttatgcccgcctgcctctctatctacccagtcaacttcctctcaccttcctagttcaagacaggattgatgagcaaccctgaaaagttt

SEQ ID NO: 153549 - DNA, 468 bp, Homo sapiens
agggcactatataatgataaagggatcaatgaaacaaggtgacttaagtgtcctaaagacatatgtacccaatattgaagcacccagatttatgaaacaagtacttctagaccttcaaaaagactagagagcaacacgataacagcgggaaacttcaacaccctcttgacaatgatagatcactgaggcagaaaattaacaaagaattcctggacttaaatttgacacttgacctattggacataatagtcatctgcacccatcaaccacaaaatacacattcttttcgtgtatatcacagaatawactctaagattaactatatgcttggccgtaaagcaggtctcaaattcacaaaaagtaaaatcatgccaaccatgtttttggaacacagtggaataaatatgcaaatcaataccaagaagatccctcaaaaccacacgatgtggaaattaaataacttgattt

SEQ ID NO: 153550 - DNA, 611 bp, Homo sapiens
ttcgggctaagcggaagtgaactcaaggtgaatatgttctgatttttgtttcaattatattttgtaatttaaagaaaagtgttattttaactgaagacattcttttatccaaatgaagtcttctaggatcctatcaaaatggtacaatatacatacagctttatgtatatttcagtttgctatagatatatatctatgtagaaawttaccttgtgacagttttaatttttaaaaatgagaaactgaaatatacttgttataactggttgttacattaccttctttagaaaatattttttaaatattgatttttccatttattttgaaaatatttccagggacgttagcttcaaatgcaacttatttacttgtgtatacaactccaatattgtgcagtttttctttctgaaattgtcataaataaggatgcgctttggttttagctgttatgtgactgaaaaggttatttgttgcagagtctaagtgaagagatgttaattgaccctcagcagaaaggcctatttattatgtctgtgtctaattaaatataatccactttaagagactttgctcctgtgatgtgtaatggctttttcacactctccttgaac

SEQ ID NO: 153551 - DNA, 611 bp, Homo sapiens
ttcgggctaagcggaagtgaactcaaggtgaatatgttctgatttttgtttcaattatattttgtaatttaaagaaaagtgttattttaactgaagacattcttttatccaaatgaagtcttctaggatcctatcaaaatggtacaatatacatacagctttatgtatatttcagtttgctatagatatatatctatgtagaaatttaccttgtgacagttttaatttttaaaaatgagaaactgaaatatacttgttataactggttgttacattaccttctttagaaaatattttttaaatattgatttttccatttattttgaaaatatttccagggacgttagcttcaaatgcaayttatttacttgtgtatacaactccaatattgtgcagtttttctttctgaaattgtcataaataaggatgcgctttggttttagctgttatgtgactgaaaaggttatttgttgcagagtctaagtgaagagatgttaattgaccctcagcagaaaggcctatttattatgtctgtgtctaattaaatataatccactttaagagactttgctcctgtgatgtgtaatggctttttcacactctccttgaac

SEQ ID NO: 153552 - DNA, 611 bp, Homo sapiens
ttcgggctaagcggaagtgaactcaaggtgaatatgttctgatttttgtttcaattatattttgtaatttaaagaaaagtgttattttaactgaagacattcttttatccaaatgaagtcttctaggatcctatcaaaatggtacaatatacatacagctttatgtatatttcagtttgctatagatatatatctatgtagaaatttaccttgtgacagttttaatttttaaaaatgagaaactgaaatatacttgttataactggttgttacattaccttctttagaaaatattttttaaatattgatttttccatttattttgaaaatatttccagggacgttagcttcaaatgcaacttatttacttgtgtatacaactccaatattgtgcagtttttctttctgaaattgtcataaataaggatgcgctttggttttagctgttatgtgactgaaaaggttatttgttgcagagtctaagtgragagatgttaattgaccctcagcagaaaggcctatttattatgtctgtgtctaattaaatataatccactttaagagactttgctcctgtgatgtgtaatggctttttcacactctccttgaac

SEQ ID NO: 153553 - DNA, 601 bp, Homo sapiens
tcctgtggttttccagcttgcagatggcaagtcatgggacttctcaccctcaataatcatttgagcatcatttgagccaattcccataatccgtcccctcttatacagctgtatatttatatctatacctatctatatgtcctattggtkctccttttgtagagaatcctaataccattttctttctcatttctaaagtttgtttgtgatttctcaccttttctttctttataaatattacaagaaatttattaatttattatttgacagaattttcttttaattttgctgttattgtcttttagattatacttttaatttcattactttatgatttactttgatcattttgtttggtttatcccattgtccattctctaatttcttaaaatttattctttgctcatttatattttgcttttcttcttttagaaatatgcattaaaggtattaattttcttctaagccctgttctaccagtatccactaaatttcatatgtaatagttttgtattgttcatgtcttttcaatattatgttttttgtagaagacttctatatttttctgtattttacaaatatttttcttcttgatttattg

SEQ ID NO: 153554 - DNA, 432 bp, Homo sapiens
  misc_feature (1)...(432): n = A,T,C or G
atgctgtggtttggccccaccaaagctcatgttgacatttggtctctgatgtggtggtaagaggtgggnnnnnnnnnnnnnnnnnnnnnnnnnnnnnnnnnnnnnnnnnnnnnnnnnnnnnnnnnnnnnnnnnnnnnnnnnnnnnnnnnnnnnnnnnnnnnnnnnnnnctccaagtttgtctctttgaacttgtctgcttttcctctgaccttctctgccatgttgttatacagcactaaagcccttaccagaagccaggaccatgcccttggacttccctacctgcagaaccattaactaaataaatttcyctataaacttattttctttataaactacacaaatgttcagtggattcccaaaacaaacattgcttatgctcaaagctctgcagagaaactacagtttggctcatctgtgatggccagact

SEQ ID NO: 153555 - DNA, 576 bp, Homo sapiens
ttcttggtgcatttaggtaaaatttgaccacataaaccaagacggaagtccagatataaagctgactccaagagttgagaattgtgtcttggatccagtttatgtaaacatgtrgttctcaaatttggcaggatattagtgtcacccaagcaaataataataataaatcccacttaaagtttcgggcaaaatagttgtagtggtagcatatttttcccaaatcttcataaaaccagctagaacaattcagtagcaaatccaaaaacccttggcctatatttatagtaaagctaggtgacaagaattttgggttatttattgctgcataacaaatcacacccaaatttagtggcttaagataacattatattatcactatgatatctgtgggatagaaaatttaaaaaatggcttaggtgggtggtcccagctctagatttttcctaatgctgcagtcagactgtggctggaacaggaacagaagatgctgaaggagctcagggttggccaggtaacttcctctcttaatgtgttatcaggatctctccatatggaatctccagatcatgtctcatg

SEQ ID NO: 153556 - DNA, 513 bp, Homo sapiens
taaaagcaggcaaaggtcatataggtacagggtgaaaaccagggtatttcaatcaaccagagactcataaggaataatttgaaaggcagagagtgatcacctaatgttgacactttttcctcacagttttatgattgtaagatatgaccagctgcataaagcactggctgaaaataaccatcataattttcaccagttgaacttccattcgtttacttatgcattcattccttcattcactcatcaatattttattgagcccctattgtggactggcacctaggaagaactgggaatatactctacttgcttctttgctcttctatcttctcctcactttattcccaactgaatctcatttggatcctaactcagttcaactctgatttcttttatcttggtgtggtctcaaagcttgtatttgttttcctggagtttgacccactgttctccytaatgtgctccatatgggctaacctcctaatctttttcttctgcattgtagaagaagat

SEQ ID NO: 153557 - DNA, 525 bp, Homo sapiens
gttttgtgatctgtccctagggagccaggactgtgtctttgtcaccagaatagagaaataaaatagtatggagaggaaaagtatgtattttggagtctgatgaaccttcagtttcagtcctgcttgaatatttccaaratgtacaacaataggcaggttcctttatttcctgagtcttagatatattagctttattttaaagagatgacttaatgtttgcttctcaaggaatttgtatatatacacgaaatactgtatataaaccacttaatatggttcctggtgcatatttcctgtgattgtaaaacattcatttgccaaataaatgaataacttctaattactaaagtctaagaatcaaagtttgcagagaacttcaattttatttccattgagatgtggcttctgtaataccattttaacatctattaaaataatgttcttaaagtcatcaatggctgactaatgccttctttctaagttttcttcttgtgagtttcattgtatttgattaattctgtcatt

SEQ ID NO: 153558 - DNA, 568 bp, Homo sapiens
tttcctaggtaccagggaggtttttaatcatttcctcgtatagaacataaatccctctgcctattgcattcagttagtcactgaatttatttagattctaagtattaatttttctctaatattcatgttaatttcctaatcattgacatctgtctgtggtgatgaacattttctggaattagacagttgctatggttgctcaactctgaatgtatcaaaaaacgaccagattttacaagctaaaagaatgaattttctaacatatgaattatatcttttaaaaagttatgatgtgtatttaaaaaagaaacatcttatgcatacaagccckgatattctgttgatagtctctcaagaaaatgtgccggatagcatggagtatgtctagggcattatcaaatgctgtgaacatgtgggaatgcccaggacagtgctgaatgacaactctaacatgttaactgttaatgctagctgatcacttttttctctacccctagggtcaaaaacagctaggtattctgtatcatcttaatagtagagtgataatatgatttactagttttgatct

SEQ ID NO: 153559 - DNA, 521 bp, Homo sapiens
atcacacaaaagtccttttttcaattacgtagaattcagcactgtatggatttttagaaatataaccttcttatttcatctttcaaggtaaggcttgggtttgccaaaacatgttaagctttgctacctttccaatatgagacaggagtcaagaggtaaaggataaaatacaaatatgaacaaaggttcattcgctggagcaataggctaagtttatacactcaggagccaaaagttattcctgtgcttctgaytgtgttgtacttatttgggtaactctcttccctccaaaacttgtactgggaacatgaataagatttcattccttggaaaactcatgtacagaaaacaagtgtcttctgcaaaatatgttctgaatcccctttatcattggtgggagaggctacctttatcagtgagtggcagcattcaagttactttttatttctattatattttgtgtgctttgctacatttctaatctttatataaatatatatcttattgtaaaaatacaataa

SEQ ID NO: 153560 - DNA, 596 bp, Homo sapiens
cattttgtattttttattttaaatttcctcctcttctctatcttggccttaattgtagcttcttcagatcagggactttgactctttcaatcagttgtattcctagcacttagagcagtacctagcattgattagaaaatatttgataaaaccatgtaggagaataaggctcttaatttagccaaggatggagagtttctaggagttccctgcatttctcttctatgaccacctaagacaggtgaagcttcctgtgctgtgaagggttgctcctggcaaccttagaagtagcagaaatatatgaattttgtgagagacataaagattctgcacagcttctgggcagtcatccaaggagcattactttagcaacctgcaagtatggtacccatcaggaactggagaaaaatggaagtttctaggaaacctaggaacctctccttgcaatgtggcaaccccacctcccmtcacccaacacacattttatttgtttatttttagtaagttttattttgtaaagcaattttagattaatagtaatattgagcagaaaatacagattttccatatatcttctgccctcctcactttggcat

SEQ ID NO: 153561 - DNA, 543 bp, Homo sapiens
tagaaagagttatcttaacatctgtttcactgtggttagttcsttaatccacctgccttcatcctggctcagaactaaaaaggttaaagtatgcagtaagatttttgtgctgccacttggaagtagtattaattagtagctgctctatcaagcattcttttgcttagcagtaagcaaacttaggagattttattacaatgctgtttttttaggttttattttattataatgcctttttaaaaaaaattaggctaataagaaaaatcttatggcctcaaaaagtattctactttttctgaaaaatatatgagcagtatgtatatttagctataaaaactacatagaatacccatttttttttagagattagcttaagaaacctaagtcttttatagcaagctgttacagatttgtgtgagttctcatttttgttgttgttgttgttgttgttgttgtttgtaacatgagggctaaaagctttccttaggataaaaaggttttctatccttaactcctttagatggtttttgttctttggaattc

SEQ ID NO: 153562 - DNA, 606 bp, Homo sapiens
tgcctacaactgaaataaagtcactaatttagatttagctatatgtaaaataagctaaatcttaagtctctccatcaatcaagagacttaagtctcctgttattaactaaaattgcatgactataactttgtggcatccagtacactgtattttctaccactggatagggtgcttggggtaaactatttcaggaattgttaagagcctcaacttgcaaaaagggaaaaaacagaggggagggagtataacttgatgttgctagtgccaaatattgtttctagccacaagttcccaaatmtgttattggtttatcaaaagtaactatggtaagttttgttaaaacagattcctagtttccaccaccatgtttttatttaatatggttagggcaagggctccctaaatgtgctcactgccatgtgaggcatgacaggtaggagactcaaactataattccatgcttctggctaggggaataaagaaggcccctgggagctgaagaatataggtgaaatcactgatgattaagagacagaaaagtagatccctaagtctgtgggcccagctgcaagctatctatatatatatggaacagatccaaagaa

SEQ ID NO: 153563 - DNA, 625 bp, Homo sapiens
ctcaactggcattggagccagttccagatatgaagtctattctcctccctggtatcctaccaaatgaagtcagcccctaacaacacaaaatattgtgcatacatataaacatgggacagagccagatagcagaaaaggaaagtacacacacaygcacacacatacacatacacacacacacactacattaagaaaagaaatatgatttgaagccatatttctcattggtaactaatatgaggctacaactatggttacaggttaggttctttggaaagtagattctgagataggatttcgcttgcaggatatttattaaggagagctcttgggatcaactcctatagaagggtagtgaagggagcagagtagacaaaggaaaaagtcaagctgaaatgctgacccaacagccctagtcagtgctgtggagaccttgagagctagaatgaccactcagagttgactcaagttgggctgagatgaccaggtctttaaatccccacattgatccatcactaaatgtgggtcaccccatgaaggggcatgaacttgagtgaggcagctctctatagctgagtcaatctctgaaggggttgaaaactaaaagatctctgcagtctctcat

SEQ ID NO: 153564 - DNA, 600 bp, Homo sapiens
ctgggtcttatcagcctcatgtccgtaatgtcttggaccagcaaaatatcctgagatggtcatgatccctgcagtctaaattatagcccagagccaaaaacttgatagaatcctcagatgattctttcacattaaattgtacctggagttttctgctcattgggacacagaggaaagcagtgattaaatcaatagcttctcagctggtatcagaaggtatgctaattttctctgataaggagaccacacaytataaagcaatcacccatgacactatcccccaagtcatccatcttcttcatctgccaaactgcagaaataaatgggagtttgatagtaatcaccaccccatttcattcaagtcattgatggtgacacgaatccctccagatccctttggatgctattaactcttttccatttcagtagaaaggttgaattccagtatcttctatcttaatagtctttattctgtgagccaggaagacattgtggggatttctcacattcttgaagatatttgttctatctattcagtcagaaaattggtataacaaataataaaacacaatagttcaaattcccagtgctcctactctg

SEQ ID NO: 153565 - DNA, 677 bp, Homo sapiens
ccacaaatagtgtaagcacaaagtgactttggcaaataattagggacctttcagggaaatctagaaggaagatacagagtggatgctcttggattgttattacagtcttcttggaaggttttttttccttcccttctacctaggagctgtgggaattcttaccgactccagtgtggaaattaagtgaagagccagactttacaagttcagtcttaaccagttttttggttatccacatyaagtaggaccttggtcatcagacttcatgatcaatcagagcctgtggaaggtgaccgtaccagtcttatatcctatctgagtaacaacagccttactgagtgatactactttgtttctgccatcccaggagtcctccatctgtacagaaattagggagcttatttccatgcatctttatgaaaatgcatgtcagcagtctcatcttaaagagaatgaccacttgagaactattaaagatgttcccacccaccttgctcaaggcattcatgaaatgtcttctgagccctttgggagaccctgattagacaatgggtgactgactcatacataattaattcatttaaacctttgtatccctaaaagtctttggattccatctctacatgaaactgacatttttttcatgtaggtccagatttcagtcaaccaagtcaaaa

SEQ ID NO: 153566 - DNA, 552 bp, Homo sapiens
cccccaggaagccactggtgcaaatcccagactgtaaaggccaaagaaactggagtctgatatccaacggtaggagaagcagaagcaggcattcagcactggaaaaggaaagagagccagaagactccwcaagcaaacttattgcaccttcttccatctcctttgttctagctgcactggcagccaattggatagtgcccactcacattgagggtgagtcttcctctcccagttcaccaactcaaatgtcagtctcctctggcaacaccctcacagacacacccagaagcaatacttgaccagccatctaggcatcttttaatccaatcaagttgacacctaaagttaatcattacattattcccttacagattttagagttgtttcttagagctattcaatattcaaatgccaggaaaaaaggtctgcttctatagagaaggcttatccaaatatttgtgttacactaaggctttcagcttttgcagcagtctaagacactgctatatcaagtggactggatgggcaaaacatcaaattgttgttagtttt

SEQ ID NO: 153567 - DNA, 552 bp, Homo sapiens
cccccaggaagccactggtgcaaatcccagactgtaaaggccaaagaaactggagtctgatatccaacggtaggagaagcagaagcaggcattcagcactggaaaaggaaagagagccagaagactccacaagcaaacttattgcaccttcttccatctcctttgttctagctgcactggcagccaattggatagtgcccactcacattgagggtgagtcttcctctcccagttcaccaactcaaatgtcagtctcctctggcaacaccctcacagacacacccagaagcaatacttgaccagccatctaggcatcttttaatccaatcaagttgacacctaaagttaatcattacattattcccttacagattttagagttgtttcttagagctattcaatattcaaatgccaggaaaaaaggtctgcttctatagagaaggcttatccaaatatttgtgttacamtaaggctttcagcttttgcagcagtctaagacactgctatatcaagtggactggatgggcaaaacatcaaattgttgttagtttt

SEQ ID NO: 153568 - DNA, 609 bp, Homo sapiens
aggttgagagagaagtgtggggggagatggattttggaagacctagccattggcaaagaccctgggaagcataaatacaaagttaatttatattatattgtgttaaataaggtaatattgtgcctttttcctccccatgaaaagcatttacaacaccttgttcttatgcattcatccatgcctctgacgtttatcaagttcttggcagacactgagtgacatataacagaggctgagtcaaatagtttataattcagcctgggaggaaacagcagcaaacaactaactataaaataatgagataaacratgtctcttacttgaatagattggcatgggggcacaaagatggatgggagcaaataattttgactttggaacaaactgttggtgaaggttgcatgaagagttctacattggaattgagtagaccaagatattcagagatcagaggtggagctgggggaagttcagaacatttcgactcaaaatcaaaaggttttcatcactgtactagacctgaggaattattcaacccactcccattttgcactggaaaaaattgaggctcagagtgggcaagatcactctgaaagttagtggcagcata

SEQ ID NO: 153569 - DNA, 405 bp, Homo sapiens
ttcatgatgaattcaaactaaagcacaagtttaaatgtggtcakgaaaaattattgtggaacattggtgagccatttaaacttttactctcagtggacatgagcagtgagagagctgggagaaggataaatcctcaagccggggctctcatcaagtggtttctcttcctcccccatcaccatccagctcacagggatttgtcattccccaggcaccctctctttctggaactatcacacaagaccagaaaatcatgtgtgccataaaatgagtccaaatttaaacatattccaatgctattggataaatgcgaccctgatcactatatcctataattgaattagaaataggcagagcaaagccaggttaatcacttaaggaatttaattcttcagctttagaaat

SEQ ID NO: 153570 - DNA, 405 bp, Homo sapiens
ttcatgatgaattcaaactaaagcacaagtttaaatgtggtcaggaaaaattattgtggaacattggtgagccatttaaacttttactctcagtggacatgagcagtgagagagctgggagaaggataaatcctcaagccggggctctcatcaagtggtttctcttcctcccccatcaccatccagctcacagggatttgtcattccccaggcaccctctctttctggaactatcacacaagaccagaaaatcatgtgtgccataaaatgagtccaaatttaaacatattccaatgctattggataaatgygaccctgatcactatatcctataattgaattagaaataggcagagcaaagccaggttaatcacttaaggaatttaattcttcagctttagaaat

SEQ ID NO: 153571 - DNA, 491 bp, Homo sapiens
tgaacccactttcaatactaatggaaaaatacaaactaacagaatctgtgtcaagctcagaatgctcacccctgaatgccctcrttggatggggtacttgaacaatggtagacggggaattaaaagtgccagctatgaggccagagtgcttgggtttgtatcctgactccaacaaatgctggtgataagacttggcaagttatctaaacttttgatgcctctggaaaacgaggacaatataatagtacctatctcataaagttgtagtaaaggtgaaaagagaatacatttagaatagtgaaaagcatttagaatagtgctgggcacatagaaagggtttagaaaaatgttagcttttattgttatatactaaatgtataggtctgcagagatgatatattcattcacaaaatatttgttaagggcatattgggtttaaggcatttgtgtaaacgtaaataaagatattcctaccaaaaagactattatgg

SEQ ID NO: 153572 - DNA, 570 bp, Homo sapiens
ttgtgtatattccatgcccgtagactaaaatttctaaccctgcagaacctaaagtggtaaggagaggaatcccaacatacataagtggttcactggaagtgatggtgagaggggttgtccatttgggcttggcccaaatcttggtccatttgggctgttataacaaaatacyacacactgggtggcttacagaccacagaaatgcatttctcacagttctgggggctggaaatctgagatcatgttaccagcataattgagttctggcaaaggccttcttctggttgcagactgcaacttctactgtaaacttgcatgttggaagcaatgatctaggtctcttgggccttttttttaataagggcactaatccaattcataaaggtgccactctcatgacctaatcactttccaaagtcccccacctcctaataccatcaacttagggtttaagatttcaacgtaagagtttttgggggacaaaaacattcagaccatatcaggggttattcctactcataccccttcatttctagtcctatgtattttaactactcaggacactaacca

SEQ ID NO: 153573 - DNA, 570 bp, Homo sapiens
ttgtgtatattccatgcccgtagactaaaatttctaaccctgcagaacctaaagtggtaaggagaggaatcccaacatacataagtggttcactggaagtgatggtgagaggggttgtccatttgggcttggcccaaatcttggtccatttgggctgttataacaaaataccacacactgggtggcttacagaccacagaaatgcatttctcacagttctgggggctggaaatctgagatcatgttaccagcataattgagttctggcaaaggccttcttctggttgcagactgcaacttctactgtaaacttgcatgttggaagmaatgatctaggtctcttgggccttttttttaataagggcactaatccaattcataaaggtgccactctcatgacctaatcactttccaaagtcccccacctcctaataccatcaacttagggtttaagatttcaacgtaagagtttttgggggacaaaaacattcagaccatatcaggggttattcctactcataccccttcatttctagtcctatgtattttaactactcaggacactaacca

SEQ ID NO: 153574 - DNA, 527 bp, Homo sapiens
tgaaaccatccctctttgaggtatttttgaatgaacacatactartttacattgtatatttgtatcacacaaagttttgttcaccaagatattaccactatttttatcgcattttttctttctttctttcttttttttttttttttttagagagacagggtcttgttctgtcacccaggctgaaattcagtggcaagattatagctcactgaaccttgaattcctggcctcaagcaatcctcctgtttcagcctcccaagtagctaggactacaggcatgcaccactacagctaatttttaaattttttatagagacagagtttcactattttgcccaggttggtctcgaactcttgggctcaagtgatcctcctgccttggcctcccaaaatgctaggaataaaccacttttgaaacaggatttgtttttttgaatttggactcaaacaccacacagcaataacaaaagatggtagatttaacagatgtgattagtaacaagcagatgatgtaaatacacattaac

SEQ ID NO: 153575 - DNA, 607 bp, Homo sapiens
gcccacagtacaccaacttttaagtaaatgaaagttgaatatatctggttgaagcagggttttagaagggcctgcgctgggttcgccctygtgggctgagagagcctgaggattctgaggatcacagggtgaaaaactcagtgatccaagtcatcatgcttttttttatagacaggactgagacccagaaaggaaaggaaacccacagttaactatttactaggtagctagataggtaagtgcgtcccaggtagctagataggtaagtaggtcgatagatacatagcataatgtatgtgtttatagaaacacacacatatatgcagaatcacttaattcttataacattctagaaggtagatggttttatagatgaatagatgaggaaagcttgtaagttgatagggttggactcacctatgctccttctggtggcaaatctacattctttccaccctagctccattctgctgcttggttgccttgtccaaagccacacacaggcaaggacaggactgaaacccagaccatctgcctcttggtccagggttgttctctcagcagatctgttctcttcagtcagtggtaaaataatacatgctaaaaa

SEQ ID NO: 153576 - DNA, 607 bp, Homo sapiens
gcccacagtacaccaacttttaagtaaatgaaagttgaatatatctggttgaagcagggttttagaagggcctgcgctgggttcgccctcgtgggctgagagagcctgaggattctgaggatcacagggtgaaaaactcagtgatccaagtcatcatgcttttttttatagacaggactgagacccagaaaggaaaggaaacccacagttaactatttactaggtagctagataggtaagtgcgtcccaggtagctagataggtaagtaggtcratagatacatagcataatgtatgtgtttatagaaacacacacatatatgcagaatcacttaattcttataacattctagaaggtagatggttttatagatgaatagatgaggaaagcttgtaagttgatagggttggactcacctatgctccttctggtggcaaatctacattctttccaccctagctccattctgctgcttggttgccttgtccaaagccacacacaggcaaggacaggactgaaacccagaccatctgcctcttggtccagggttgttctctcagcagatctgttctcttcagtcagtggtaaaataatacatgctaaaaa

SEQ ID NO: 153577 - DNA, 550 bp, Homo sapiens
gcatcatttcatgcctcattcatacactgtgcagtggcacttaatgttcactcttcaaagagctagaccatccagacccaatttctccatcataagccagtgcactttgaacaagtattgctgtcaaagaaaaaaaaaaaaaactttccaagtctcagttttcaacattcactggtgaagttggcaagtagatattttaaattccagactgattacacagctctcctgtgctgctttgtagagttttattttcacacactgccatgacaatccatcatactctgtcccctagggaagagaaagagtccatctttttataaatagctgcaggagattcctggagcagctcatgcccctcctgtgcttaaacccatggagcttaagacctaagaggctcactttccactgcaaaataccattcaccatcagtcccacaaatgtgaatggggctgcctccaggtacctcgactagaaagagaaaagcagcttataaaatatkctcctgcttatggaaggagagagataaaaggaagagcaacagcagtgcaca

SEQ ID NO: 153578 - DNA, 550 bp, Homo sapiens
gcatcatttcatgcctcattcatacactgtgcagtggcacttaatgttcactcttcaaagagctagaccatccagacccaatttctccatcataagccagtgcactttgaacaagtattgctgtcaaagaaaaaaaaaaaaaactttccaagtctcagttttcaacattcactggtgaagttggcaagtagatattttaaattccagactgattacacagctctcctgtgctgctttgtagagttttattttcacacactgccatgacaatccatcatactctgtcccctagggaagagaaagagtccatctttttataaatagctgcaggagattcctggagcagctcatgcccctcctgtgcttaaacccatggagcttaagacctaagaggctcactttccactgcaaaataccattcaccatcagtcccacaaatgtgaatggggctgcctccaggtacctcgactagaaagagaaaagcagcttataaaatatgstcctgcttatggaaggagagagataaaaggaagagcaacagcagtgcaca

SEQ ID NO: 153579 - DNA, 607 bp, Homo sapiens
atcattgtaatgatgactcaatccagaagaatttgcttttacaacagaactttatggtaatgagacttttgtaaagtattcctttaatttatatgtttattttagatgtagagaaacatgaaagggtgagctataaaagtgttaaggaagcaaacacatgatattagaagtaaattcaatggaggatgtagaatgaaatgactccaagaaaaaggaatgacgtaaaatttctaaatgttaaagaagaacttgttcatgatttaatattaaaaaaattgacctcacaatactaacgaatgtagattctagatgacatctttagaagaataattataccacttaatttttaagtgccaagatttgtaatttattagaaatgacatcctttattcctattttgcaacttacaattcttaaaagctttgcatgtsaatttacaagtatatgagggaagtatattatttacattattgtttaaaaattcttctaggttatatgcaagagaaaagttggaagaaactaattggaagatctctatgccaactgtctatgccatacgaactctgagactctagcttctagggattaccacaacagagaaatagtc

SEQ ID NO: 153580 - DNA, 582 bp, Homo sapiens
ataggcatgcaaatggacagacacctgtaggagttcacaaaaccctctcagttaaacacaagcagggcttcaacacacatgtggccatccctgctcaacacccaagccacatgtgtggctctcgtagtattgtcactcctaccaggcagaggcatactttccaaaggactggtaaccaagaagcaatggaggaatggattcggtgttgtgaccagcaggatccccctgctgaattctcccctaagcctccgaaagctccccactgcttcagtggtttcacatctccctgccctttctttcctaggtttcaaggataactggaaacccacactggtcattgagcattcatagcatggcagtccagcaytctctaacagaccctggggcagcagatttagtgtttccaggaagaatttcaggaaactcagtcattcactcattcaacaaatgtttatagagctcctactatgtgccaggcactggtctaaggcatctgacacatgtcattgaggaaaagagacaaagatcccctgttcaagcagagaggcaggcaataaacaacaaagataattaaaagacaaa

SEQ ID NO: 153581 - DNA, 618 bp, Homo sapiens
tttcgtccatgcagacctattttcaaatcctggctccactactcgctggctgtgtgaccttgcacaaatcacttagcatctctgaacgttaatctcctcatcattgaagcaggcatattaatccctgcatttcaaaagagtattctgttacattaaacataggcatatgttggttggttaggtacaataactagcacatagtgaaaactcaattccaggccgggcgtggtggctcacgcctgtaatcccagcactttgggaggccgaggtgagcagatcacgaggtcaggagatcgagaccatcctggctaacatggtaaaatgtctctcctaaaaatacaaaaaattagccgggcrtggtggcaggcgcctgtagtcccagctactcgggagactgaggcggagcttgcagtgagcccagatccatgccactgcactccagcctgggtgacagagcaagactctgtctcaaaaaaaaaaagaaaaaaaaaaacaaaaaactcaattccaggcatttagcattattagtatcaatcatgggttatcatgtataacaacagtgcagaatatgtttacatttttaatatctggagaaaatattcttttctaattttatct

SEQ ID NO: 153582 - DNA, 486 bp, Homo sapiens
agtgcacctcctctaagaccccagcagagtgcaccctctctgccaagaggcagccagagtactttgttaagcaggttccagatcccatgtctcctgacagagtgagactcttcaacaggggtcaccagacaccttatacaggagcattccagctgtcatcaggtcagtgcccctctgggatagacatcccagaggaacgagcaggcaaccatctttgctgttstgcagcatacactggtaacacctccaggggtggaagggacccaggtgaataggctctggagtggatccccagcaaaccgcagcaaccctgcagaagaggggcctgactgttaaaagaaaaacaagcagaaagcaacagcatcaacaaaaaaaagtcctcacaaaaatcccatccaaaggtcagcagcctcaaagaccaaagctagaaaaactcacaaagaggagagagaatcaatgataaaccactgaaaactgcaaaagcca

SEQ ID NO: 153583 - DNA, 537 bp, Homo sapiens
ggaccctgacccatcccccctcaccaggtggggcctccctgcaagaacttcagcaactgcagccaggggtttaggggcagaactctcatctccctgggactgagcccctttggggaggggcagctgcagtctccgttgatcagcagatttagtgtttcccctgctggctcggaggaatcccagcagtccggacaagtgcacctcctctaagaccccagcagagtgcaccctctctgccaagaggcagccagagtactttgttaagcaggttccagatcccatgtctcctgacagagtgagactcttcaacaggggtcaccagacaccttatacaggagcattccagctgtcatcaggtcagtgcccctctgggatagacatcccagaggaacgagcaggcaaccatctttgctgttctgcagcatmcactggtaacacctccaggggtggaagggacccaggtgaataggctctggagtggatccccagcaaaccgcagcaaccctgcagaagaggggcctgactgttaaaagaaaa

SEQ ID NO: 153584 - DNA, 618 bp, Homo sapiens
ggaatttaatccatttacctttcaagttattattgctagagaaggagtcactattgtcattttgttacttgttttctgtcttgtaratttctgttactcttttcctttctttctgtcttcctttatgtttcattaatttttttaagagtaacaggcttcattcttttctcattttcctttacttatattctataggtattttctttgtggttatcatggtgcttacataaaccatcttacagttaaaatactcgttttaaactgataacaacttgtcttcaatcacatactaatactctacaattttcctctccccacacactttatgttatttattttacaaattacatgtttttattttgtatatccattaacatgtttttatagttgtagttatttttatactcatcttttaatttctatacctgatattaaaagtgatttgcatatcaccattacagtattatggtattctgtatgtctatagacttagctttaccagctggctttatactttcatatggttttgtgttgctgttaagtgtccttttgtttcaacttgaaggactttctttagcatcagttgtaagatatggtgataatgaatcccacagcttc

SEQ ID NO: 153585 - DNA, 611 bp, Homo sapiens
aaattctaaaaagaaaacaaatagttcaattataaaatggggaaagtacttaaatggacactttgccaaagaagatatacagatggtaaataaacacatgaaaacatttcaacatcattagccattaagaaatttcaaattaaaaccacaatgagatatcaccatatacttgtcagaacagctaaaataaaaaatactgtcagtattaaatgctggccatgatgtagagaaactgtacccctcatatgctgttgatgagaatgtaawatggtatggccactctggagacagtttggcactttcttatcaggttgtgtgcattgactatatggcccagaaaaattaaaacttgggttcacacagaaacctgtacacgaatgttcacagcagctttatctgtaatagagaaaacgtggaaacgaggcaattgtcctttaatgggtgaatgaatgagcaaaccatggtgcacccacacaatgaagcactactccacaataaaaaggaactgactattaatatatgcagcaacatagatgaacctcaaggcagtttatattaaaaaagccaatctcaaagggttatatactcgtataataccatttacataacaa

SEQ ID NO: 153586 - DNA, 532 bp, Homo sapiens
gacagtagtttccgcaggactctctttatctctctttccttgatccctctgttaagctacctgcytttgttagacactgcctaattgtcaggtgattgcttttttttttttttttttggacaatgccctgggacataaattgctccgcagtctgatccaattagatttaaaccccagaaaaatagaggtagtttctaagcccagtttttgaggtttgttgtgactccaagaggattcctcttagttgtctctttccctggttctctctagtaagctaactggtctatggctcagcttcctgctcccatggagttaccagccttctcttaactgcttaccaccaaaatctccattgtatttgagagaatttttagacttgagctttcccatattctactttaaataaagtcagtttctttggggagagtgttagagctctctgttcttaggaacttcctcttctccagggcagaatatctgagccactgccctgaaagtgaggacagggacagtagcctgcttctcttgaact

SEQ ID NO: 153587 - DNA, 532 bp, Homo sapiens
gacagtagtttccgcaggactctctttatctctctttccttgatccctctgttaagctacctgcctttgttagacactgcctaattgtcaggtgattgcttttttttttttttttttggacaatgccctgggacataaattgctccgcagtctgatccaattagatttaaaccccagaaaaatagaggtagtttctaagcccagtttttgaggtttgttgtgactccaagaggattcctcttagttgtctctttccctggttctctctagtaagctaactggtctatggctcagcttcctgctcccatggagttaccagccttctcttaactgyttaccaccaaaatctccattgtatttgagagaatttttagacttgagctttcccatattctactttaaataaagtcagtttctttggggagagtgttagagctctctgttcttaggaacttcctcttctccagggcagaatatctgagccactgccctgaaagtgaggacagggacagtagcctgcttctcttgaact

SEQ ID NO: 153588 - DNA, 359 bp, Homo sapiens
cctctcctggcatgaaacctccaccctaaaagtaagctgsaacaaggactactgtgaccccagtactcttgacctcccatgcctaggacagagcctccatctatgagtgggagttgggtggaggaagggagcccctcatccctcagccacactcaccaggaatttagcttctgcaattcagaggtgggtgatgaaaaatgctagtggcctgcccttcctagagtgctactatatcccttgactaggagcagaggggagaggagccccattttcttggtgatatttgaccagattgcaacttctgtcatcaggttgagatgggaagggaggagggagggggtgggttgtgccaaagattc

SEQ ID NO: 153589 - DNA, 662 bp, Homo sapiens
aaaaaaaaaaaaaaaaaaaaaaaggcccattagccttctaacaaaggcattttctcatgtcacataatagaaatttaatttttttctaaataatgttaaaataataaagaggatctatttttggagttgagacaaggatgtaataatgagccaaatgggctttctcaataggttaatacctgaaggcactggtgctcactctgtattacaygtgccttgacatttacttcctagagaggtgccaacatttacagtgtttttaaatgcaagactgctctcaagccacaacttttaattccaatgtgacattatcctttccttttccctgaagtcatgaatgagttgtggttggcaacacatgaagaaaattgctgatatcaggaaaaggtctggtaatagaatcagaatttaaatgctgggaagtgttgggatcaggttactaaatcttttctctggcaaaatttcaactagaactttcagcagaaagtctcactatggaaggccttacatttccaggaaggtacttgtgttggcagaaagaggggctagaagaataaataagaattcagacctcaacattcattgagggtgtgttacatgtcctgaaggctctcatacttttaccttcacaacagtctcatgagagttcgtttgttcctatt

SEQ ID NO: 153590 - DNA, 662 bp, Homo sapiens
aaaaaaaaaaaaaaaaaaaaaaaggcccattagccttctaacaaaggcattttctcatgtcacataatagaaatttaatttttttctaaataatgttaaaataataaagaggatctatttttggagttgagacaaggatgtaataatgagccaaatgggctttctcaataggttaatacctgaaggcactggtgctcactctgtattacacgtgccttgacatttacttcctagagaggtgccaacatttacagtgtttttaaatgcaagactgctctcaagccacaacttttaattccaatgtgacattatcctttcctttyccctgaagtcatgaatgagttgtggttggcaacacatgaagaaaattgctgatatcaggaaaaggtctggtaatagaatcagaatttaaatgctgggaagtgttgggatcaggttactaaatcttttctctggcaaaatttcaactagaactttcagcagaaagtctcactatggaaggccttacatttccaggaaggtacttgtgttggcagaaagaggggctagaagaataaataagaattcagacctcaacattcattgagggtgtgttacatgtcctgaaggctctcatacttttaccttcacaacagtctcatgagagttcgtttgttcctatt

SEQ ID NO: 153591 - DNA, 563 bp, Homo sapiens
tgtagtgttcagtggagcattgaggagcaggttttgtgccaaagagctggtgattttttttttttttcttatttgagatttttggcatccttcttcattggtgaaatgttactaatcggctggtattttaactctcctttcaggagcatyaccagttttagaatactgttgttcctatatgtgtttttaaacaaaatagggttgcaactccacatcttctccagcctctcttaggggtctcaaaagtattttcttcttttttttgtttttcttcagacggggtttcgcttttgttgcccaggctgctggagtgcagtggtgcgatctcagctcactgcaacctccgcctcctgggttcgagcgattttcctgcctcagcttcccaagtagctgggattataggtatgcaccagctcatctggctaattttgtatttttggtagagacagggttttgccatgttggtcaggctggtctcgaactcctgacctcgggtgatctacccacctcggcctcccaaagtgctggtattacagacatgagccaccgctccctatcagggg

SEQ ID NO: 153592 - DNA, 271 bp, Homo sapiens
tggcaatttatctctctgtgatctttctatcactatataaatayctaacttacaaagcagctctagttgccatttccccctttctccttaaatggatgaatgtttgtgatttagcataaagttcatgaactaagaaaagcagttgggcacagaatcctgtatctttccacgcagtgtatcttaatacctttaactgtctgttaaaataatgcttttagttttacctttccataatgaattgccatcaccaggcttagcaaatgaaacagat

SEQ ID NO: 153593 - DNA, 449 bp, Homo sapiens
gaattcatcttcccctctccacaaactagtccccatctcaactaacatgtctagccattataatacccttcttccatgatgtggcgttcaaaacatctgttctttccttctctttcatcccacatatccagattaagtcaggaaggtctattttattttgactccacaataactcttctctgtttcctgtttacactggtatgagttactgaacagctycctgggtggcctctgccttctatttctcccattcaggtgcagttatgctgtcaaattaatcttccttaaaccactctgaaaactcctccatggctgcccattttcctccccttcaaatatgaatgccttccccaaatgcaacataacatctcttcactccactctggtcaggtctcctttccatactgacaagcagcaagttattgtctgcttccttgcctttgaccaac

SEQ ID NO: 153594 - DNA, 449 bp, Homo sapiens
gaattcatcttcccctctccacaaactagtccccatctcaactaacatgtctagccattataatacccttcttccatgatgtggcgttcaaaacatctgttctttccttctctttcatcccacatatccagattaagtcaggaaggtctattttattttgactccacaataactcttctctgtttcctgtttacactggtatgagttactgaacagcttcctgggyggcctctgccttctatttctcccattcaggtgcagttatgctgtcaaattaatcttccttaaaccactctgaaaactcctccatggctgcccattttcctccccttcaaatatgaatgccttccccaaatgcaacataacatctcttcactccactctggtcaggtctcctttccatactgacaagcagcaagttattgtctgcttccttgcctttgaccaac

SEQ ID NO: 153595 - DNA, 475 bp, Homo sapiens
cttcctttttcatcaacatggctgtccagagtgtctataggctttagctgcaagcctacatcctcaacaggtgcaaaaggaactacttgtgtggattatgggacaaaagaaataaaaatcagttttcctggcctaatattcctcagcagaccctagccttaggcctgattggaattccccctaagtcaggggaatttcctaatgcctttttcatgatcaccttcaagagaaatgcaggaagaggaaagcagatggcactctgtgaagacatttttcactgaatattgcaatgactatttcatactagaagtaacattactctcattaggttagatcttcagttttagatttggtttcaaagatasaaggaatcagagaaaatgtagatgaatcaatgagacccagatagaaataggttttgatttctagtattggttaaatgctttcctaaataagataaattagcaaacacaat

SEQ ID NO: 153596 - DNA, 518 bp, Homo sapiens
tagacctccaatctcttctggcttatagggtttctgctgaaaggtccactgttagcctgatggggttctttttgcaggtgacttgcttcttctctctagctgcctttaacattttttctttcatttgaccttgaacaatctgatgattatgtgtcttgtggactattatcttgtgtaatatctcataaggatgctctgcatttcctgaatttaaatgttgtactctctagcaaggttgaggaaatattagtggatgatatcctcaaataygttttccaagttgcttgctttctttccctgtcttttaggaatgccagtgagtcatagacttggtctctttacataatcccatagttctcagaggttttgtttattcttctctattgttttttctttatttttgcctgactattttggagaaccagtctttgagctctgagattatttcctcagcttggttgattattctgttaatatttgtgattgtattatgaaagtcttgaagtgagtttttcagc

SEQ ID NO: 153597 - DNA, 498 bp, Homo sapiens
ttctcctgggtaaatctgcttattcaactgacctctgaggatcccttggctctcacccttaggcatttttccaatctgagtgtacattttcctatgacccctcctacaaatacattgtgtcatttgagtaaataaatgttctcttttcctagagtatcccttccatcttgcttagctgaaaactcccgttcagtcttccaaactctacttcaaggatgaccttcttggtgaatcatctcaaccatctctacccctcacttgagaatctcactttctgttgcgtgcaaactcagcctatagcttgtgagactgaatagtgaatattagcttgcctgtctctctcccctatgtggtagtgagatccttacatatattctgtgtctgccatgtagaaggtatttggtcaatgttaattgagtttaatttcaccaatttcccttagaacacattttatcttcacaggatgtgtrgccttttccacctggtccccagccgccc

SEQ ID NO: 153598 - DNA, 436 bp, Homo sapiens
atccaatcatactgcagtttaataagcatgtactgactacatttggcggtgctgggttataggctttttcatcgaagagctcatcgtctagtggattagaatgagaacaccacatagccagggctgcagcaaacaggtacacatgctctggcagcccagagtagggagggakgggaagacgatgaatattcatgaaggacctgctaggtgccagtttttgcactaggctttccatatatatcatctcagtggaagcttatgaccctctgaggtagatattttacagccaaggcaaggtaagctcaatggggtcaaggtcaaatgactgcataataaatgctggaatcaggattcaaagttgaatctgttatttttccagagcactacattgccccctatgctgttacaaaagagggtaaacatgtgttaatcattt

SEQ ID NO: 153599 - DNA, 436 bp, Homo sapiens
atccaatcatactgcagtttaataagcatgtactgactacatttggcggtgctgggttataggctttttcatcgaagagctcatcgtctagtggattagaatgagaacaccacatagccagggctgcagcaaacaggtacacatgctctggcagcccagagtagggagggaggggaagacgatgaatattcatgaaggacctgctaggtgccagtttttgcactaggctttccatatatatcatctcagtggaagcttatgaccctctgaggtagatattttacagccaaggcaaggtaagctcaatggggtcaaggtcaaatgactgcataataaatgctggaatcaggattcaaagttgaatctgttatttttccagagcactacattgccccctaygctgttacaaaagagggtaaacatgtgttaatcattt

SEQ ID NO: 153600 - DNA, 579 bp, Homo sapiens
tgtatgcaatatactatcatatgttaaacatgtatacacatatactttagatcatatcttatgccaaagtatctaatacagttactaaagattacattgttttatttgatacagtgtcataaaactaaccatataatctccactttggttggactggatataaagtcatatgcagtagrattactgaatgccttcttgagacgcaaatggactgttgcagctgacaaatgtgccttcacaggataagtccaaatatgactgtttcatgatattgctgatacagacagagaaatttaggtggccttaggcagcctctgatcaccggttagtaagtcttttctaatgcctttgctactggaagaactactgaaccaatttgtaagacacagaaaagctatggcagaatgtttacctccttacaagtgtcagccttgctgaagggtttaacgttcatgaatggaaaatatggagagaagttttatttacaaagtccattttaaggcttttgtaaaaatgaaacatatttctcatgttttatcttggcttacaacaatgccctaaagtatgaagatgtttcta

SEQ ID NO: 153601 - DNA, 438 bp, Homo sapiens
attatccatggcccttctgtggcaaaagtgcccccagaaagttacagacttgagttgtaggcaacctaattaatgagaatggtctctaactgcaacccgaaagcatgaataatgcctatctacttacttcacagtttatggtaatgagattaataagctacttccctggaatactagagagagtcagaagcaacaatatatcctctactgtgagccaccttacatttgtgtcatggactgaggtttaaatgggaagagtggaagtctaaggatttgagaagctcttttcataactagtaaagtccatcaaatcatccaaagatacacagacaaatctgccrttgtaaagagattcagttctgttcaagaatctacactacatttcaaatacgtcctgtaatagaaacagagggtagaaggcagataggaggcagtcct

SEQ ID NO: 153602 - DNA, 503 bp, Homo sapiens
tatctccccttttcaaatagacttgagtttaataaataaaggatagtgaaaattgctcccaccaatccaggatttaggattgtatactctaaatcacttgattcagttcttctaaaagttttttttactatctataaattcagccagtcatctggatagtgaatctttccttartaaaattacaaaatgcatgctatacttctaattaattgcctcttattcttgttagtcactgaactcaatttctgcctcatgaggttttcccagagttggctagattgttattggatcccaggattgtactttcaagggaattaggttgacaagaaggtgcagtttatttttcatgaagtagaaaacagtaatggaaaaccttactaaataagaaggtatatttcaaagaagaagaatgaccttagcctttgcaaaacagttttctaaagtcatgcttgttttcagaaaacttatttagtcaaaaaaatccggaccagcccactgtgctt

SEQ ID NO: 153603 - DNA, 472 bp, Homo sapiens
atgcttctaaatgctttacatatctacgcattcagaactttacaatttaccgaagcacctttgagacattggatcattgcttccttattttaacttyagtgagcagatggatagaaatgatctccatatcacagctaagagaacacatgcagagaggttcatctacttacccacaattacacgggggggcgggggtgtcaaaataaggtttctaaatttagcaaataaataaaaatacagagcaccaagttagatttgaatttcagataaacatcagatgtgtgttagtatatgtataccccaaatatggcatgaaacatactataaaatatttattggttctctgagattcaatttaactgggtgtcctgtagtttatctggcaatcctagttttagatgaatcacttgctcttcacaaggttagattaattgtaagactatataattgaccagattgtgcaaaaaacatg

SEQ ID NO: 153604 - DNA, 532 bp, Homo sapiens
aatattcctgaaatgcaaactcctaactcgatatacttccccaaagggaaatatatttgttgaactgaaagtaatgaatcccatcagcaaagcctctcatttttatagccaccttcacctcctgtcatacacactcatgcacaaagagtaatgattatggagcttggaaaaatcaaaaccagcatctgtgaggttcatgtaaastttgttgacttttgtctcaacctgcttcttagtagggctgatcccagcacccagggaacccagggcacctgacaccctccctagaaaggagaatggagctgtacttggcaaacactaagaatcttccttctcccttttctcattatgtctcacattgccacacttttggcccttggcacttcatgttgtgctaggctcttcttccaccagcctttggtagctctgtcggaccagcttacttctcacttcctggctctggaaaatgttcccagcattcgttccttaattaacatctctcttgacttgccaagacctaaaaccagggctc

SEQ ID NO: 153605 - DNA, 532 bp, Homo sapiens
aatattcctgaaatgcaaactcctaactcgatatacttccccaaagggaaatatatttgttgaactgaaagtaatgaatcccatcagcaaagcctctcatttttatagccaccttcacctcctgtcatacacactcatgcacaaagagtaatgattatggagcttggaaaaatcaaaaccagcatctgtgaggttcatgtaaagtttgttgacttttgtctcaacctgcttcttagtagggctgatcccagcacccagggaacccagggcaccygacaccctccctagaaaggagaatggagctgtacttggcaaacactaagaatcttccttctcccttttctcattatgtctcacattgccacacttttggcccttggcacttcatgttgtgctaggctcttcttccaccagcctttggtagctctgtcggaccagcttacttctcacttcctggctctggaaaatgttcccagcattcgttccttaattaacatctctcttgacttgccaagacctaaaaccagggctc

SEQ ID NO: 153606 - DNA, 582 bp, Homo sapiens
ataactcctggtctgtttggggtcctaccctgggactgaggtgaacacagagggattgttaggtattagagacatgcataactggggagagtttatgacagtggagttaaagggagaatccaagcttactcaagaggggaggcaaggttatgttctgatggaaaagtctcaccagaarcctgtggggttaggggaggtttagactctggttcacggataggttggagtaggtggtttaggatcaaagctgtgaataatgagaggatattagagccctatttttgtataaacttaaagggcctgggcaaggccaacttaaatctctggtctgtgatacttgattatatcatcttggttgattttctgtcagatggaacctgtgtattgaagtgtccagtatgaagaacatttgtagcttctcaacatcttcccacatcttcatcttgttattttgcattgaatctggaactcttacacatatcgaccagcaccgaagtaagcaaagcaaaaacatattagttgatacttgtgaaattcatattttccaggaaaggaaaaaaccactgtgacatattattttaa

SEQ ID NO: 153607 - DNA, 605 bp, Homo sapiens
ttataaaatgcaacaatggacacatctttaaaatcaacggctgcatcaaccttgtccctgaagtagaagggagtgggtttatagaggggaagagctaatactaaagccatggytggggatagtggctcatgactgtaatcccagcactctgggaggccaaggcgggtggatcacttgaggtcgggagattgagaccagcccggccaacatggtgaaactccgtctctaccaaaaatacaaaaattagccaggcatggtaggtgcctgtaatcccagctacttaggaggctgaggcaggagaattgcttgaacccaggaggcagaggttgcagtgagccaagatcgtgccattgcactccagcctgggccacagagtgagactctgtctcaaagaaaataagaagtaaataaataaatagccaatgaactaagcattttctctcctgttgaaaggctgaagatgttcttccaacttttcataggtagtcaaacagtgaacatgattccttcagagaaaggacccaagctgcctacaagctccagtttggcatcccctcccaaagtaagcatttggtaattctcctttaatgtattcagtactacat

SEQ ID NO: 153608 - DNA, 626 bp, Homo sapiens
tttttctctaccttgccattaaatgtagagttccttagtcctgggctttctccgtttttgtttgtttgtttgtcttgttttgttttgttgcctctggttagtttcagagtaaaaaaaaaaaacsattttactcaattaacattttcttgatggtaactcatacatgtcatacatgtgcatctttaaccaagacttgtcctctacctgcagcttattagacaacatattgtgcacattgctgaggtcgctcatactcagcatgtccaaactctaattcataatcttcctccccaggagtggtccctaccaggacttcttttctcattgagtggcatcatcatttatctatctaggaatgtgctgtcaacctagacacctcccacaccccaactctcagcctaatctatcaccaagtcctgtcggttttacctcataaatgtttctgggactcacccagttatctccatcactgatatcactatcaatgtccaagttaacttcccctcttgcctaaatgaacaaatttacccacatctactttgggtcctgtcacatcctttcttcggagttgtattagtctgttttcatgttgttaataaagacatacctaagactggacaatttac

SEQ ID NO: 153609 - DNA, 569 bp, Homo sapiens
tagtgcatagcacatgttatcatgatcaataattatttattggctgaatgaatgaatgagaaggaatggagagtacttagaagtggcaatcactttgtcccttgaccatagaagctccaaaatctattggaaatgaattaaggtgggcccactgggagcactgatttgttcatccgcaatgcctatggggctatgaggtgctgtctcttggctctgcctcatgttccttgagacagtaaatagcagagcagwctgatgcccatgatcagaatattctcctttccagcctcaggactcaggggctctttgactattgtaactaagtctcctttttgccaattggtcctgggactcagtgcttctagggatgacccttttcccatcatctgatgggctaggcctgggctttatccttggtctttttcatgatctgtatctctgagttctgatcagttattctgcctaattctctgtgtttctctaggataagcctgacccaaactccctcctggtggagcctgctctacccatttcagccctcctatctaggtgcctcacctaccacccta

SEQ ID NO: 153610 - DNA, 553 bp, Homo sapiens
tacttcctcttgctaatcctcccagtaacaagtcattagggcataaaattccaccgtcattttggatgaagcctctctctctttctctttctctctctcaaattagtttatctatctttctccaactccccttctatggagagcagattacacaaaatcaaggggaaatgggtggttaactaaaggcacactgggactttggtttcaagcagtgggaaatgaaggtattcaaaaatctgcagaatatgaaataaaggaggctacccaactgtgggcctctgtcctggaagtagggagaagatagcagttcagatctcattatccaagaggaataataaacttggacttgaacaaggcrtgtgcccacatgaatgaggatctgatctatgaggtgagacacaacaatgggaatcttcctgtggtggatcacatggaggcagaaaaaaagcagttgtccacacagcttggaagagaatgccagcccagtgcatacagcacatgtcaccagaggacaaggactaagcagaatgtcagggtccctgcaagtctgggg

SEQ ID NO: 153611 - DNA, 491 bp, Homo sapiens
catttttagtctctgcatttctcagtgtttttaaacrttttgacctctatccacaggaagaaatacattccacattacacagtctccaataagcaattacaaattctcttgaaacaaagggaaaaactagacaatctcagcaaagaaatataacttataaaaaggaattaaatggaaatcatagaattgaaaaaatacggtaactgaaataaaagccttgctgaatgaactgcgtagtagagtggagatgacagaggagaaactccacaaacttgaggaaagataaatagaatttaccaaatataaacaacagagagaaaatagcctgaaaataaagatgaacagtctcagggacacatgggacaaaaccaaaagagtaacatttgtctcatcaaagttccagaaaaagaggagagagacaatggactgaaaagacattcaaaaaaatgttggctgaaaactcctaaaatacggcaaaaacatgtaaacct

SEQ ID NO: 153612 - DNA, 539 bp, Homo sapiens
cagcctggtttctagtgttagggagtttcctggagtgatggtacagggtacatttctgccctgcatcccaagtccagagactgggttctaggtccagcctttcttctaactccctgagagatgacagcctctgggcaaagtccctctgtgctcttcagtctcttcatctgtgagatggtggcatggggagaggctggagtgatgtcacagttcctctcagcctgcatcacaggctctaggactcaggtcctatcagtaacctgctgrgggaggtctgggccttccaggagaaacctgacaagatggtgctgcaaacaccaacggacacacagcactttacattcacaggctgtctcaggggcctccaacaaccctgaccattcttgccccattttgcagatagaaaaccgaggctcagagagattatataacttgcccacgatcttcctccagcaagatggaggccaagtgaaatgagaaagcaggtctcctgccacttcctttgcccagaggtcttctccccacaccagggcttccca

SEQ ID NO: 153613 - DNA, 353 bp, Homo sapiens
aaactaaacttgcaattttgtcttttgacagaaggaagccctgcgttcttggctgcagtagcctggacgggaatttccaccttgctgaccagactttgtttcttaccgaatttgcacagatgttcttgaataatgttccttcattttctgcttactcttaggacgatttccagagactttaaatgactgggttttgttttctttaatagttttcacttgtttcagcaagcaaggcaggtcagcagagctcctcacaccttgrcggcagaagttgatctctctctcacatgaaggcgtaaggaagcactgtgctagagctctatatatgcgatctcatttaatcttcacaacta

SEQ ID NO: 153614 - DNA, 549 bp, Homo sapiens
ttcttttttgtttgcttttggtgttaacttactgcctctcttgcggttttccagattgctaaaccttctctattgaaactcttctgtatgtcttaaggtactcctcaaatagaaggtgactgcgattgtttcaaaagagaaaattgtttctcatgtcagcagtattttatttctttgtaatccaagaaaaaagagatacttgtttaaaaatccaaagttctgacatcttgaatataacaactgacactaaaagttttttaaattgattcasgacaatgcatttaaaacatatttataaagcactttatatagatcatcaagtgactttagatatagcctttcacattacaatgaattatattttgttcagctttcttgtcatggtaatccatttcatgtgttttcttttcacagctgccataatactctgactcaccattgccttttttccataattatcagcatattctccttaatcatatggaaatctattattatttttgtctcacggcattacagaatgtagacctgaacttttccgaccatgtc

SEQ ID NO: 153615 - DNA, 563 bp, Homo sapiens
gttttgtaataaagaatccttctggtagtcactaaaatgtgttatcagtaatgaaaaaggagttgttgatattgttaattaataagtgatgaattagtgtggaacctgacacttcatttaccccagtaacattatctcaggaaattacagagaatattattctgtcactcttaagaatttttcagagagagagagaaagagagagagagagagaataaatgtgtgtaaacttccaaacggaaaaataatctaaattgtagtttagcactcaagcaaaactaattgcttaaagaaaatgcatggtgtatattatggcatgttgtaaaaatatcagaatttacttaatgacatattattttctctcttttttaaaattaataactgatactttaagttatatgtcataatattttccktgttgtgaatttcattaggagatttttttttattcccatcaatgacatcctttgggatgctaaatatcaactttataatggagggaaataatttaggcaattaatgttgggaatttaaagaaagctactctaagtgcatatatattt

SEQ ID NO: 153616 - DNA, 577 bp, Homo sapiens
atgggtgtccctgtctgcctttattatttaagaaactctctcaccattcctgtcatagcctcttttatgcctggcctactgagcagaggttcatccttcagtcggttagcaagcttttgtcaagatagatggaattttagacttagtctgaagtgcggtccctctccatctgctttggaaacagctcacaaattcttcttgttgtttcagatgtgatcatcaatctcctgccasaggaaattaagaactgttatttgtctgttgggcaggagagattccagagttttgacccctaattcattccctactctttgtgctttggctgtaacatctaactaagggtttgcagggtcttcttttatttctccagattcgttgcattaaaaattgttttatcccattagtgtgtcatttcatcatagttattaaaaacaaactcagccactttgtagcccagttttgtctgccgtcttccaaccactgtgctgcttccccggagagtctgtctctcagcagctgctggttggatcattgaggccttaacccaggagaggtgccatctctctcagaggtgctg

SEQ ID NO: 153617 - DNA, 577 bp, Homo sapiens
atgggtgtccctgtctgcctttattatttaagaaactctctcaccattcctgtcatagcctcttttatgcctggcctactgagcagaggttcatccttcagtcggttagcaagcttttgtcaagatagatggaattttagacttagtctgaagtgcggtccctctccatctgctttggaaacagctcacaaattcttcttgttgtttcagatgtgatcatcaatctcctgccagaggaaattaagaactgttatttgtctgttgggcaggagagattccagagttttgacccctaattcattccctactctttgtgctttggctgtaacatctaactaagggtttgcagggtcttcttttatttctccagattcgttgcattaaaaattgttttatcccattagtgtgtcatttcatcatagttattaaaaacaaactcagccactttgtagcccagttttgtctgccgtcttccaaccactgtgctgcttcccyggagagtctgtctctcagcagctgctggttggatcattgaggccttaacccaggagaggtgccatctctctcagaggtgctg

SEQ ID NO: 153618 - DNA, 620 bp, Homo sapiens
agtgctaagacgaaagttcatagcattaaatgcctacatcaaaaagcatgaaagagcacgaataaacaatctaaggtcacacttcgaggagcaagagaaacaagaacaaaccaaacccaaacccagcagaagaaaataaataatcaagatcagagcagaactaaatgaaattgaaacaaacaacacaataaaaaaaatgaaacaaaaatctggttctttgaaaagataaataaaattgatagaccattagtgatattaaccaagaaaagaagagagaagaggacwtatattccaaataagcccaattagaaatataaggggagatattacaactgaccccacagaaatgcaaaagatcattcaaggctactataaacatctttatgtgtgtaaactagaaaacctagagaagatgagtaaattcctggaaatatacaaccctcctagattaaaccaggaagaaacagaagctctgaacagacaaataacaagcagtgagattgaaatggtgattaaaaagttgccaaaaaaaaaagtccaggaccagacagattcacggttgaattctatcaatcagatattcaaagaattggtaccaattctattgagagtataccaaa

SEQ ID NO: 153619 - DNA, 422 bp, Homo sapiens
cacgagcccaaagactggcagaatccaggagaaggctaagaacaggagtgacctctccaagaggcatccactccaaacccagatgacggagttagggggcatgaactgatcaagaagcagaaactggacacacaggcaggggtacttacctttctggagaatcctagaggcctcaaagtgagtgacacacacaccaagtgagtgacacccacackaaggtgccggtgggattcccaccaagaggctgcttcaggtacgcacggccgtcctgcctgcgtctgagcaccagatcctgttgagcggaagtttctgccctgctccttcacggcgtgggcacggtcgttcatcaggcatgtgcagcatcctcaaacacttctaatgctcactggtaaaaccaatccacttaaaaacacactgcattt

SEQ ID NO: 153620 - DNA, 644 bp, Homo sapiens
aaaccaaacagtgcatgttctcactcataggtgggaattgaacaatgagaacacttggacacagggtggggaacatcacacaccagggcctgtagtggggttgggggaggagggagggatagcattaggagatatacctaatgtaaatgacgaattaacaggtgcagcacaccaacatggcacatgtatacatacgtaacaaaactgcacattgtgcacatgtaccctagaacttaaagtataaaaaaaacactaaacagactagtaatagaatataaccacctcaacataataagtcatatatgaaaaactgagatagcattatactaaatagtgaaaggctgaaagctttttccctaagatcacaagacaargatgcctactttcaccacttctattcaacatagtactggaagttctagccatattagctgggactccacacacacacatgcacacagacacacacacataactgttagagctaatacatttagcaaagtagcaggatacaataatcagcatgcaaaaattagtttcattcttatacgctaatgaagaacaatccaaaaaggaagtcaagaaaatagttacatttacaattgcatcaaaaagaataaaataccaatgcattaacttaccaa

SEQ ID NO: 153621 - DNA, 562 bp, Homo sapiens
agtttccatatgttatagagatcatttgtaatatgtagagaaaaargctggggaaataaaagacgtatttattaactgtggtcatctctggggctaggaatgaactgggaaggggtaaagaagggtgtttgtctttcattctgtatacatctgtatttgaatttgttcatattgactcaggcgatactctcatttaaaaaacaaaataaaataaaggccaggcacggtggctcacgcctgtaatcccagcactttaggagaccaaggtgggcagatcacaaggtcaagagatcaagaccatcttggccaacatggtgaaaccccgtctctactaaaaatacaaaaattagctgggcgtggtggtgcatgcctttagtcccagctactcaggaggctgaggcaggggaatcgcttgaacctgggaggtggaggttgcagtgagccaagattgtgccactgcaacccagcctggtgacagagcaagattctgtttaaaaaaaaaagaaaaaaaaaaaactaaagaaaagtacaagtaagcactctcatttgtcgtttaatgttt

SEQ ID NO: 153622 - DNA, 349 bp, Homo sapiens
cccctgcttccagcccttcggtggttccccatcccttcagatgaacatctcagctctctcacaggtcacacaaggtcatatggcccccactggactttccagtctcccacttgctagtctttggctacaaaaaaaaaaatgtaacttytctgcatggtactaagtcttatgcctccacacctttgtatataccatttcttttgcctgaaatgccctgtcctgtgcccctaactgctactcaattacccagaggactcctatttatcctacaaaacccagtatagatttcacttttgggaacaagccttcctggattgtgtgttctctccttcacaatgatgttggccct

SEQ ID NO: 153623 - DNA, 349 bp, Homo sapiens
cccctgcttccagcccttcggtggttccccatcccttcagatgaacatctcagctctctcacaggtcacacaaggtcatatggcccccactggactttccagtctcccacttgctagtctttggctacaaaaaaaaaaatgtaacttctctgcatggtactaagtcttatgcctccacacctttgtatataccatttcttttgcctgaaatgccctgtcctgtgcccctaactgctactcaattacccagaggactcctatttatcctacaaaacccagtatagatttcacttttgggracaagccttcctggattgtgtgttctctccttcacaatgatgttggccct

SEQ ID NO: 153624 - DNA, 582 bp, Homo sapiens
gaattctgttagaacctcttttctgaaagaattatttttcagactaatttgattattattatgaaatttctacagatttggctttctctttagaaatacttttcattattctcaaacatattcccattgtcttttctaggtgatctttaagtactgtatttattagacaaatagttttaaatacctactatatatcaggcattaggtaccaggcatttcaaataacagcattcataaggtagagaaattgctggccgtcttggagtatttcacttagtaggaaagaaaggtatygagtaattgaatagacaatgatagtcattgtgacaaacgctatgaagggtaattgtaagatcctggaatggtcatattcactgcatgaccaaacaataattaggagacgatcaaataaggtaaaaagtgggatgctcaggtatatcaggaagaggacagtgtggctagagaatactaatcaagggataggatgcccagagctgtggacaggtaccagctcataatgatgttttggagacctggttaccctgagcactaggagtgtttcgaaaattttaatcaaatata

SEQ ID NO: 153625 - DNA, 377 bp, Homo sapiens
ccacactttcttactagtaattcttaagaaccactgtagaatgtgcttgggatggaatatcctgagatagggcccacctgcgctccgtttctgtctcccctggaagcaggatgtccttaaagctttgtgcagtgggttgcacagtccctggggtacatccagcgaaggctgtcttccagggtccctcagctggaatgcaagtggcatatgcccaggtgaggctctgtccaccctgagtcctgggggatgagcttgcattgagtcctacctgggcttgagttgtctcttgctgcctgtctgtaaggaatacatctgctttaggtaactccttgyatctgagtgcgttccgtctcaacagactcagacaaattggtaac

SEQ ID NO: 153626 - DNA, 518 bp, Homo sapiens
atacagtttgcaatcattgaataaaagctactacaagcaatggaaaaagagaacatgcattaattctattcccacaaaaaatagtaaaaatattactttaaaactattataactttgacagtttgtgctgtcacaaagagtaagctcttcaaaagggctcagtcctagttctagaaacacgtccatgttaatttatctccatgattattttgtttaagacaaagatatgtcggaaaattgcattgtcttttattgaagtatttgtatgagttactctctytttccacacatggctagccaaaggtgttttcaaactctgcaggaaataaaaacaaagtcctttgctattttaaaacatgtcattaccagcctgcctgacacacagcattttttcactgcaggcgctgagcaataatcccctcacctctaccactgcctccttctttcaacttttgagttggagaaataatctcagatgtcatagcaaaactcaacactacttatttcctttctatcac

SEQ ID NO: 153627 - DNA, 428 bp, Homo sapiens
  misc_feature (1)...(428): n = A,T,C or G
caaggacaaaaatttaagcaatctaataaattgtggatcagtggttggctgtaattattttgattccaaataaattagtctttccatatttttccatattttcccataagctaaaagaaaaaaaaaaaaaggccaggcgtggtggctcaggcctgtaatcccagcactttgggaggccgagrcgggtggatcacctggggtcagagttcgagaccagcctgaccaacacggtgaaaccctgtgtctacaaaaattacaaaaattagctgggcatggtggagggcacctgtaatcccagctacttgggaggctggggcaggagaatcattgcttggccctgggaagcagagattgcagtgaaccaagatcgtgccatttcagcccgggtaacaagagcaaaactccatctaaaaaaaaagaaaannnnn

SEQ ID NO: 153628 - DNA, 601 bp, Homo sapiens
ttttctaaaattaaggctaaagtagattaaataattttagaagaaccaattgccacttatgaaatccttcaaggaatataatgactattcttctaataattggattcagtttgacttatttatttaatattcactctgttctctttttcaggcactgtgctaagttggacttacagagatgaataagatttggccacatcttcaaggagctcagaccttcatggacataccaaatatatacagaactaactctactgcttatcataatgagagctgtgctatggatatttgaaagttagagagatttattttcaacagartaataaagtcaactttcacaaactggtgacagatgatctgggccttgcagacaggggaggactgacagattgagaagagtatttggttaaaaacggatcataaactggtataaatatctaaacaaactcatgagaatgagcagaatcagacacaataaaataattcaaagatatatcagataaacctggacccaaaagtcatgactttttcttttcagttgactctgaacaatttacaataacttcctcaattattgtttgtctcattttaacattttgta

SEQ ID NO: 153629 - DNA, 601 bp, Homo sapiens
ttttctaaaattaaggctaaagtagattaaataattttagaagaaccaattgccacttatgaaatccttcaaggaatataatgactattcttctaataattggattcagtttgacttatttatttaatattcactctgttctctttttcaggcactgtgctaagttggacttacagagatgaataagatttggccacatcttcaaggagctcagaccttcatggacataccaaatatatacagaactaactctactgcttatcataatgagagctgtgctatggatatttgaaagttagagagatttattttcaacagaataataaagtcaactttcacaaactggtgacagatgatctgggccttgcagacagggsaggactgacagattgagaagagtatttggttaaaaacggatcataaactggtataaatatctaaacaaactcatgagaatgagcagaatcagacacaataaaataattcaaagatatatcagataaacctggacccaaaagtcatgactttttcttttcagttgactctgaacaatttacaataacttcctcaattattgtttgtctcattttaacattttgta

SEQ ID NO: 153630 - DNA, 601 bp, Homo sapiens
ttttctaaaattaaggctaaagtagattaaataattttagaagaaccaattgccacttatgaaatccttcaaggaatataatgactattcttctaataattggattcagtttgacttatttatttaatattcactctgttctctttttcaggcactgtgctaagttggacttacagagatgaataagatttggccacatcttcaaggagctcagaccttcatggacataccaaatatatacagaactaactctactgcttatcataatgagagctgtgctatggatatttgaaagttagagagatttattttcaacagaataataaagtcaactttcacaaactggtgacagatgatctgggccttgcagacaggggaggactgacagattgagaagagtatttggttaaaaacggatcataaactggtataaatatctaaacaaactcatgagaatgagcagartcagacacaataaaataattcaaagatatatcagataaacctggacccaaaagtcatgactttttcttttcagttgactctgaacaatttacaataacttcctcaattattgtttgtctcattttaacattttgta

SEQ ID NO: 153631 - DNA, 603 bp, Homo sapiens
  misc_feature (1)...(603): n = A,T,C or G
aatttgacaattgntcagggattctacgggtgtaaacttttcttcagtgagactaggaatagaagtggagaagtaaccaagtaaattttcaatttatgaagtaagaacaagatgagaagacttgtggtgcggtcctgctgaaatcaacctggaaattataaagttaaaaacacaaactttttttattatactgtcaattcaatgagattattcttttttcaatcacctacaaagcttttaaagtattgttaccaaagtatccctcaatgtagacagcagtaaatgttaatttccaagagtctgtaccagcaattagcaaagagtttatttacctcatgatctgcctgccttggcctcccaaagtgctgggatcacaagcatgagcccaaataatgaatttaacaaatgtcttttgaaacctgtggtgtgtcctctgtcctgggattgctaatctcccacagacactcctccaccctttctgcgaggccgacttggaggcacttagtgctcagagaggacattggtggctggagctgatcccactgaagcacacttcatatgtcrcttgtttggcatgtaaaataatggtatcactgactggtg

SEQ ID NO: 153632 - DNA, 603 bp, Homo sapiens
  misc_feature (1)...(603): n = A,T,C or G
tgctaggcattgtccaacatcctatgaatccattgtcttactagctgcctagtgctagtttatattatttgaagtgaataaccctgaataatgcacattattcataagaacccccataatctgaatctcatacactcctttgactacatcttttcccagctccccagtgtgcactaagtttcagccaaggggtctaagtaatctttcttgaaaatgccattgctgtttctgtcatgctatattacatttactatttcaatttttttttttttatttaacagtgactcaaaagcttagtggcttaatataacaatgatttgttatgcttagtcatttagtggttggactgggctggaaggtccaaggtttgaacagtcttcacttacatatctattasttggcactctgccacatttccccatgtggatagcttgggcttcctcacagcatggtggactcaggtagacagataccttatatactggctgaccttgaagaatgaacatggaaggtactgtgctgctgaaaagcaatgccagagcttatccaccactgcatctactatagcgtattggtcagagacagcctgaatntcagtctgcc

SEQ ID NO: 153633 - DNA, 603 bp, Homo sapiens
  misc_feature (1)...(603): n = A,T,C or G
tgctaggcattgtccaacatcctatgaatccattgtcttactagctgcctagtgctagtttatattatttgaagtgaataaccctgaataatgcacattattcataagaacccccataatctgaatctcatacactcctttgactacatcttttcccagctccccagtgtgcactaagtttcagccaaggggtctaagtaatctttcttgaaaatgccattgctgtttctgtcatgctatattacatttactatttcaatttttttttttttatttaacagtgactcaaaagcttagtggcttaatataacaatgatttgttatgcttagtcatttagtggttggactgggctggaaggtccaaggtttgaacagtcttcacttacatatctattagttggcactctgccacatttccccatgtggatagcttgggcttcctcacagcatggtggactcaggtagacagataccttatatactggctgaccttgaagaatgaacatggaaggtacygtgctgctgaaaagcaatgccagagcttatccaccactgcatctactatagcgtattggtcagagacagcctgaatntcagtctgcc

SEQ ID NO: 153634 - DNA, 491 bp, Homo sapiens
tctttctgatcctcccgtgaggttttatcccttgtaatattgaaatgcagtagcatcgcatatgacttctgttatcattatttgttccaaggatgtttctgccatctgagagcaytggcaaatcccaaaacaagttccattttattgttttgttttgttttacagccaatccaagcagcaatttatatatacctttgtactataggagtgtttgtgtgatggacaaaaaagtacttgtgaaaatccctgactctcttacaataaaaaacaaatggtttgaaattacattgcaatgattttataaagatgttgtctaagaaaatttgtaatatagaaactgttcttgaatgtcatggaaactctttctccaaaaagggctagagttcagggttccttcataatttgcttcatagtgccttaaagtaagattcaaaaacttaactctctagatctatcactctagcaccactcagctactgagtgttgaggga

SEQ ID NO: 153635 - DNA, 491 bp, Homo sapiens
tctttctgatcctcccgtgaggttttatcccttgtaatattgaaatgcagtagcatcgcatatgacttctgttatcattatttgttccaaggatgtttctgccatctgagagcactggcaaatcccaaaacaagttccattttattgttttgttttgttttacagccaatccaagcagcaatttatatatacctttgtactataggagtgtttgtgtgatggacaaaaaagtacttgtgaaaatccctgactctcttacaataaaaaacaaatggtttgaaattacattgcaatgattttataaagatgttgtctaagaaaatttgtaatatagaaactgttcttgaatgtcatggaaactctttctccaaaaagggctagagttcagggttccttcataatktgcttcatagtgccttaaagtaagattcaaaaacttaactctctagatctatcactctagcaccactcagctactgagtgttgaggga

SEQ ID NO: 153636 - DNA, 618 bp, Homo sapiens
ttaagtgttagtttaagtctcatgtaatcttacccagttcaccctccttattcatcaaggaytatttacagaaaaataagagttggtgaatatatatcctgttggaattttataataaaacaatctaatttacaaagcccttttctcttataaaggcattgagggagctacataattaaatggctgtcataaaattaaaagaatctatttctaacctcatttgaaaagttagctggaatcttaacatgatagctatattatttttgtactttttttattcgtatttttcttcatgcttgctgtagcctatttcatgacttcccttcactgtttcttttaaagtgcacctcatgccattaaatgcaaagtgtttctgtatgtctgcaagaaggaacatttgaaaatattcatgccatacagtaaccgactgttaatatgtctaggaaggaattaaaatatcctaatacataacttgacaaaccatcaagagatggttctttatttttctccaacaagttgaaagaagaaaataaatacatcaaattagtttaaatgctaatgtaaagtcattcagcaattcctcaacatacctagtattaaccagtcccgttgctgacc

SEQ ID NO: 153637 - DNA, 586 bp, Homo sapiens
  misc_feature (1)...(586): n = A,T,C or G
aacatatatctctttgagattcaraacaatgcaacaattgagcaattgtgctgggctctgattatgtccacactttgtttattggtaaaatatgtaatacattgacctaaataccataatacgtggtgtcccgattcctcacctgtaccttgcttggatccttctgggagaagcacgctcatgtattggtgtgtggaggtttgaacccttgcgagctgagcattttgaaggccagcactggctgataggagagagattaaatatgaacaatgaaagcaacatggtagcaggatgtttgcaaatgcgttgaggagcaaaaacatcagaggaagaatgagggtgaaagaagagattctatcaaggcatgaagttttctcacagtaaggagggtctgggaaaaccanaccagcaaaatctgggaattgccgggcgaggtctttcagcttcagtctagaaacaaggataactgggtattcaagccttcataagaacggcttacaatgaaggccaggcaagacacaattcagaagaaacctaagagggagagaagctgcagtgtgcagccgcttacctaatcaccctgttt

SEQ ID NO: 153638 - DNA, 452 bp, Homo sapiens
tcacaggagtatataccttaattattaaaggctgtaaacagttcaaaataagtttccttgactctgaaaaacaaaacatggatcagcaatattccaaccaaaagtcaaaaaggttgcttcagctttctgagttcagtctatatttagtgaactattgttttgtttgcttgctattcatgagcatttcagctctttatgagtcctgtacattttcttttattccaatgttgcaatctctaaagttatcagaagcctacatttgagagcacctgttaaagttctacacctcattataaaccatyttttgaaaaggattaaaacaagacaattgttggtgaatagcaaatgtccaaggtagttacagttagaaacacaattgacaaagaagtttggttatctctgtagtttacaataacttaacataacaaccttaatcgtgattgatagcatat

SEQ ID NO: 153639 - DNA, 389 bp, Homo sapiens
gagagtaagagatcatattaacatttctgcctcatattggaggcaagtagaggaaaagcaattgccaaaggcacagaaataaaaggaaatttgggtgggagtgctaaagaagctcaggctgtgtcagggaagacgctgcaggatgggtggcaggcaggaaaatgtaaaaccatgagaagacagtaggccctttctgggactctctgaactgttgacagwgctgtcgtcctcattcatttgaatatattattcacctctatatcacagattctgtcctagaagctgagctaaaatggaatgaaacattaaaaatccaattggtaaaactgccacaagggagtctgctaaccacttggctggagatgaggcttggctgtgatagcttcaaa

SEQ ID NO: 153640 - DNA, 578 bp, Homo sapiens
ccagctgaactccaggggaagattatcttcctactccatcccctttccagctccccatcctactgagagccacttccactgctcaataaaatctccacattsattatccttcaagtctgtgtgaactgattcttcctggatgctggacaagaacccaggtaccaagagggcagggtgtaaaagcctgtcaccctgatcctccactgacctggtttaacacttagccatctgtggatggcaaatgctaaaagatcattgtaagacatgccctctggggctctagaggtcactagcaacccctagacactgccatgggccagtaccaggttcgttccttgctcctgcacctgccaacctgcaagcttcccctcctgtaaggagtttgagtgcggtggccgagcaaaggagacacccctgttgcaagtcccatgagggggtcaagggaactctcccgtctcaatattcctcactgataatgagagcaaagaacaccatagaatgagacttcatgaattgccatcaagttttgcacacagttactttcatcccagattaaagtctctctttttagcttttcc

SEQ ID NO: 153641 - DNA, 516 bp, Homo sapiens
tcatacaatgttgattctgttgtggctggcttatttacttagcgtaacaataatgttttcaggcttcatccacgtttgcagcatgtatcagaatttccttccttttttaaggctgaataatattccattacatgtatatactgcattttgtttatccattcatctgttggtggacatttggtttgctcctatcatttggctattataatrgtgctgctatgaacatgggtgtacaagtatcagtttgggttcttgctttcagttcttttggatattgaatctcaagatttgataagaagtgcagcatatgatttttccaataaaacttacattttcctttttcgaccctttcgtgtcttctttccagtcataacccttgtagttcatttcctctgtgtggctattttctgccaagaaatgcagctttatatccatttgcgggcaaaggtaagtcaaaaccagcaaggtgataattattgttcccttcccaccactgtgtacctgtgcaactagtct

SEQ ID NO: 153642 - DNA, 601 bp, Homo sapiens
ctttcagttcttttggatattgaatctcaagatttgataagaagtgcagcatatgatttttccaataaaacttacattttcctttttcgaccctttcgtgtcttctttccagtcataacccttgtagttcatttcctctgtgtggctattttctgccaagaaatgcagctttatatccatttgcgggcaaaggtaagtcaaaaccagcaaggtgataattattgttcccttcccaccactgtgtacctgtgcaactagtctgcaaagaggarcattgccaaattctagatctgtgatcaattacgcaatttaaaccaaactgtatcctgcggggcataaatttcatacctcagactcatactcaaagtatttttctgcttcttacattgctagggaagggagggaaagtaacacaggaagccagatgtgagaggactagattgacacctgggtaattagaaggctttgttccctaaaccccagttaaatagtgttgaactatcactcagtactagcagaaacagtttccttttgcttttttctaaaaccaactactaaataatattagggtatctttgaagcaataatgtgtaatcactta

SEQ ID NO: 153643 - DNA, 513 bp, Homo sapiens
cattcttttttctctatcagaatacctttgttccagtacagtcacagtggatattatctagtataaatacttgcaacattttcctcaaataaaaaatgttttggtaacaatgaggataatctacaaaatccatttgaggttccattcatgcagaaccatgccaacaggaatcccctgccttagtgcatccagcaagtagttccaaatatcactgtctggtctaggtctaagtgtaaatggatgagaaaacataaagaggtacatgagccaagcctgcgtacttgacaactgaggatggctaccctatcaaataactgaagtggtatgctaatttggtgtgttcattgcacagcatgaattagcagtgtgttcactgcaayggtattggactctcacttaactataaatacgcagttatctactatgctcttagaattcctatgttaaaatactatgaaacatgtaaatggaatcagggtataaaaaggtattcaactgatatatgtgtcatgt

SEQ ID NO: 153644 - DNA, 306 bp, Homo sapiens
cccacttgatcaagccaggaattaataaaaggaatttagaatatacagaacaaaaacaactttaaaatgaagattgataaaaacatgattaatatcaacctgagttcttacctttcaacatgttatctctcataacaatttcagraaataacagcctgattcttcttttttttcattccaaagatgcttcaaaacatgctgtgctagattacatggtgaataactttctataggacccacaaggcctgcaagggaagttgggccccagggtggaggtgggagactgaacataaattaaaactaaat

SEQ ID NO: 153645 - DNA, 306 bp, Homo sapiens
cccacttgatcaagccaggaattaataaaaggaatttagaatatacagaacaaaaacaactttaaaatgaagattgataaaaacatgattaatatcaacctgagttcttacctttcaacatgttatctctcataacaatttcaggaaataacagcctgattcttcttttttttcattccaaagatgcttcaaaacatgctgtgctagattacatggtgaataactttcyataggacccacaaggcctgcaagggaagttgggccccagggtggaggtgggagactgaacataaattaaaactaaat

SEQ ID NO: 153646 - DNA, 579 bp, Homo sapiens
aatattttagattttgatagcacctcacatgttgcagtctcaggtaacaacacagtttgtgacaaaaccaaaaaacgtttctcataatatcaatgcttttgcaatattctaccaagatccctaagtaaatggttggtacacatttgggcctgatgaatcagtgagctgtattatccagaaaagaagaaaaatatcactcatggctaattagggctatcgatttcttcatgaaggatgaactgaggcttgagcgatgaataaagttttttgagatagagtcatgaggacaaaaaagcagaagtaaacattctgtaagtgagggggatgcatcaaaggtagcagttgtgaggtaagctgagatgggaaatactgagatgattagagtaggtacggttcaagaactctgaggtagctcaagcagtgatgtttatactgaatctggcagttattaagcaacaattacaytgtaaatatcctgcagtaacatgtctatgtttctaagaagtcaatgcgttctctgtgttggaatctaaagagatttatgaacagcactctacagcgatcattacatacaatact

SEQ ID NO: 153647 - DNA, 564 bp, Homo sapiens
agaatgattttttcaaaagggcatgatgactgaatttataatcactgaaatgattacaaaaagataatgtcctcttttgctttttgtttatttttaattatactctattcctgctctcagaaatagagaataaaacttcaagaattaaagcagatggaataacttttcagaaattcattgtcaaattttcatttactttgtatcgctgatcttgccaattgctatgactttgttattgttattaaacgcttctttatacttcactaaagagattagtcatgtctcttatgatcttactctaaaagattaaaataactcagaataattaatgcaaatacacaactggtaartctgaaattctaccaacaaaaactatttatgacaaatacaaaaatccagttcattctgcatatttaaataagagatgggacaagctataggctaaaaacaagcaaaatttttataatattacaaaagagaaacaaagtaaatcgagtaccatgctacttagaaacaccaatagtttttgactgaatttttctatgatgccaatttatgcaggaa

SEQ ID NO: 153648 - DNA, 541 bp, Homo sapiens
  misc_feature (1)...(541): n = A,T,C or G
tggagcaagatggcaaaaatagaaggccccactgatcatctcttcaccactcataaaaacccacaaatttaacaacaatctacaaagaagaaacacctccatgagaaacaaaaatcaggtgaaccctcatagtatctggttttaacagtgtcactgaaagaggaaatgaaaagattaaaaacactagtctttaattggctactaagcccatgcagtacccattcttttattcctttactttcttaataaacttgctttcacttttaaaaaaatagtgtttaattgccaatgccatcccccagtcacccccatcatggtgtgaagagcatctgtgtgctgggggaaggagaacatagcaattttgagacattgaactcaatgctgtcctgttagcaggaaaaaaataaaaacaaacaaacaaacaaacaaaaaacaaacagaacaaactcacgtgaggctcacccaaagagggagcatttaaamcagctacagccaaagggnnattgctgaaaccagaagtatgaacttgagttcctgcaaa

SEQ ID NO: 153649 - DNA, 487 bp, Homo sapiens
ggtggttatggagtgaggctcctctgcctttgggaaacggaggaaagatggagaaggactccatcttgtgatttaaatgctagttcagctgcagtacaacaaaacatcaggggtaattttaaggatttttactytagtctctagttcctggatggcacttcaggacccatgcaggggtgagggatctcatcaccctgaagtgaaggaaacagcctggctagatttgccagctgctgattctagagcccagggagcttgagtgaacataggcagtagccagggagtggttacagcaggccttgggcaagatccagggctgtgctggcttcaggcctgacccaatgctgtcatagtggtggtggtcacaggagtgcttgtgtcactccacccccagatttaggtgactcataacagagagagagactgttttgaggggataaagtaagacaagagagtaagagtctctactcggtaatccagagaattc

SEQ ID NO: 153650 - DNA, 486 bp, Homo sapiens
ggtggttatggagtgaggctcctctgcctttgggaaacggaggaaagatggagaaggactccatcttgtgatttaaatgctagttcagctgcagtacaacaaaacatcaggggtaattttaaggatttttactctagtctctagttcctggatggcacttcaggacccatgcaggggtgagggatctcatcaccctgaagtgaaggaaacagcctggctagatttgccagctgctgattctagagcccagggagcttgagtgaacataggcagtagccagggagtggttacagcaggscttgggcaagatccagggctgtgctggcttcaggcctgacccaatgctgtcatagtggtggtggtcacaggagtgcttgtgtcactccacccccagatttaggtgactcataacagagagagagactgttttgaggggataaagtaagacaagagagtaagagtctctactcggtaatccagagaatt

SEQ ID NO: 153651 - DNA, 581 bp, Homo sapiens
gatccatgtcttctagattttccagttgtataattgttaataatagtctctcataatcttttgcatttctgaggtatcagttgtaatgtctcatttttcattttggrttttattcggatctcctttgcttgccaagtctagtgaatgctttatcagtttgtttaatctttttgaaaaaccagcttttaattttattaatcttttgtcttgaatttactttatattttatatagttatgctcagatctttactatttcttttgttaattttgcagtaagtttgctcttgcttttctagtctcttgagacattttgttggattgttaatttctaaactttcccctttttgtgtaagcatttattgctataaatgtccctcttagcactgtttttgctttatcctacatgtttctgtatgttgtgttttcattgtcatttgtttcaaataatttttttattttcatctcagttttttcattgacacaatggtcattcaggagcatgttgtataatatatatatatatatagggagacatgggggcacctatatatatataaaccatatatatatggtttccaaa

SEQ ID NO: 153652 - DNA, 486 bp, Homo sapiens
ggtggttatggagtgaggctcctctgcctttgggaaacggaggaaagatggagaaggactccatcttgtgatttaaatgctagttcagctgcagtacaacaaaacatcaggggtaattttaaggatttttactctagtctctagttcctggatggcacttcaggacccatgcaggggtgagggatctcatcaccctgaagtgaaggaaacagcctggctagatttgccagctgctgattctagagcccagggagcttgagtgaacataggcagtagccagggagtggttacagcaggccttgggcaagatccagggctgtgctggcttcaggcctgacccaatgctgtcatagtggtggtggtcacaggagtgcttgtgtcactccacccccagatttaggtgactcataacagagagagagactgttttgaggggataaagtaagacaagagagtaagagtctcyactcggtaatccagagaatt

SEQ ID NO: 153653 - DNA, 581 bp, Homo sapiens
gatccatgtcttctagattttccagttgtataattgttaataatagtctctcataatcttttgcatttctgaggtatcagttgtaatgtctcatttttcattttggattttattcggatctcctttgcttgccaagtctagtgaatgctttatcagtttgtttaatctttttgaaaaaccagcttttwattttattaatcttttgtcttgaatttactttatattttatatagttatgctcagatctttactatttcttttgttaattttgcagtaagtttgctcttgcttttctagtctcttgagacattttgttggattgttaatttctaaactttcccctttttgtgtaagcatttattgctataaatgtccctcttagcactgtttttgctttatcctacatgtttctgtatgttgtgttttcattgtcatttgtttcaaataatttttttattttcatctcagttttttcattgacacaatggtcattcaggagcatgttgtataatatatatatatatatagggagacatgggggcacctatatatatataaaccatatatatatggtttccaaa

SEQ ID NO: 153654 - DNA, 581 bp, Homo sapiens
gatccatgtcttctagattttccagttgtataattgttaataatagtctctcataatcttttgcatttctgaggtatcagttgtaatgtctcatttttcattttggattttattcggatctcctttgcttgccaagtctagtgaatgctttatcagtttgtttaatctttttgaaaaaccagcttttaattttattaatcttttgtcttgaatttactttatattttatatagttatgctcagatctttactatttcttttgttaattttgcartaagtttgctcttgcttttctagtctcttgagacattttgttggattgttaatttctaaactttcccctttttgtgtaagcatttattgctataaatgtccctcttagcactgtttttgctttatcctacatgtttctgtatgttgtgttttcattgtcatttgtttcaaataatttttttattttcatctcagttttttcattgacacaatggtcattcaggagcatgttgtataatatatatatatatatagggagacatgggggcacctatatatatataaaccatatatatatggtttccaaa

SEQ ID NO: 153655 - DNA, 586 bp, Homo sapiens
tttatatggaaccacagaaaacacagaatagtsaaagacatcctaagcaagaagaacagaactagaggaatcacattacctgacttcaaattatacttcagagctacagtaaccaaaacaatatggtactggcataaaaacagatacaatgcaacagaatagagaacctggaaacaaatctacatacctatactaaactcattttcaacaaaggtgccagaaacatatgctgggaaaataagtctcttcaataaattgttctgggaaaatgggatattcatatgcagaagaatgatgaaactaggcccctatctctcaccatatacaaaaatcaaatcaaaatttattagagactttaatctaagacctcaggctgtgaaaccactacaagaaaacattgggaaaaatctccaggacattggtctgggcaaaagtttcttgagcaatactctacaagcacaggcaaccaaagaaaaaatgggcaaatgggattacatcaagttaaaaagcttctgcacagccaaagaaaacaatcaatgaagtgaagaggcaacccacacgatgggaggaaatatgtgcaagctaa

SEQ ID NO: 153656 - DNA, 581 bp, Homo sapiens
gatccatgtcttctagattttccagttgtataattgttaataatagtctctcataatcttttgcatttctgaggtatcagttgtaatgtctcatttttcattttggattttattcggatctcctttgcttgccaagtctagtgaatgctttatcagtttgtttaatctttttgaaaaaccagcttttaattttattaatcttttgtcttgaatttactttatattttatatagttatgctcagatctttactatttcttttgttaattttgcagtaagtttgctcttgcttttctagtctcttgagacattttgttggattgttaatttctaaactttcccctttttgtgtaagcatttattgctataaaygtccctcttagcactgtttttgctttatcctacatgtttctgtatgttgtgttttcattgtcatttgtttcaaataatttttttattttcatctcagttttttcattgacacaatggtcattcaggagcatgttgtataatatatatatatatatagggagacatgggggcacctatatatatataaaccatatatatatggtttccaaa

SEQ ID NO: 153657 - DNA, 586 bp, Homo sapiens
tttatatggaaccacagaaaacacagaatagtgaaagacatcctaagcaagaagaacagaactagaggaatcacattacctgacttcaaattatacttcagagctacagtaaccaaaacaatatggtactggcataaaaacagatacaatgcaacagaatagagaacctggaaacaaatctacatacctatactaaactcattttcaacaaaggtgccagaaacatatgctgggaaaataagtctcttcaataaattgtkctgggaaaatgggatattcatatgcagaagaatgatgaaactaggcccctatctctcaccatatacaaaaatcaaatcaaaatttattagagactttaatctaagacctcaggctgtgaaaccactacaagaaaacattgggaaaaatctccaggacattggtctgggcaaaagtttcttgagcaatactctacaagcacaggcaaccaaagaaaaaatgggcaaatgggattacatcaagttaaaaagcttctgcacagccaaagaaaacaatcaatgaagtgaagaggcaacccacacgatgggaggaaatatgtgcaagctaa

SEQ ID NO: 153658 - DNA, 554 bp, Homo sapiens
cattggtctgggcaaaagtttcttgagcaatactctacaagcacaggcaaccaaagaaaaaatgggcaaatgggattacatcaagttaaaaagcttctgcacagccaaagaaaacaatcaatgaagtgaagaggcaacccacacgatgggaggaaatatgtgcaagctaaacatgtgacaagggattaataaccagaatatataaggatcttaaaccactgtataagaaaaaaattaataatccgattaaaatggactaaagatttgartagacatttctcaaaagaagacatacaaatggcaaaaaggcatatcaaaaggtacccaacatcactgatcatcacataaatcaggcaaatcaaaactataatgagataccaacacatcccagttaaaatggcttatatccaaaagacaagcaaaatagaaccctcatgccctgttggggggaaggttaattagtacaaacactatggagaacagtttggtagtccctctaaaaactaaaaatatagctaccatatgatccagcaattccacagcagggtatatac

SEQ ID NO: 153659 - DNA, 399 bp, Homo sapiens
aaatatgacttctagtaaacagagaaagaagacaaaatctaacaaattatttatataagttagaaaaactctaacaattgttataactactggcaatggtactattaaaaagaaataagaaaaaagasattacgagctttgtttaataatcttcaaaaatttgttccattgggaattgtggactgaagaaaaatatgttctaagtcatatcagcagctatagtcagggtttacctggaattgggaacttcacacatacaaacatcctataaagtaagtgttgtttttctcaatctataaatgagcaaacaaaaacagtaagtgctgtttttctcagtctataaacgaggtcagatgggtttaaagacaaaacaggttacacattcattcagccggcaaa

SEQ ID NO: 153660 - DNA, 589 bp, Homo sapiens
cataatacacaggcaatcctgggaaatagatattgttgtccaacccactagaaaagaaataaattgatgaattatttcctggttacttcctaggttgtattgctatctggagcaattcaaatatgggtccaatattaggacatttttaatgtaaataaattcaaactaggcttaagcatatcaggggagttatttgagaaacaaacaaacaaataaaaacaacaaaaagggagttttgcatgaagtcatagcagaaataaacctcaaaaaagtgaagttagagaatwagtgatgaaaaatatttctttttctctggacattgcatctcacagcaaatcagttttagacctgtttttctcatactcaggctagattgatttactttgctattctggcccacaggacaaatcagctctggagttttcaattcacagggaaaatgacacatcctctcttgggcctaattgcaatcacccagaagagagactgccattggcctaacttgactaaggatacatatctaatccaataagctatagtaaaagagagtttaaggaaaaatatggctataggaggtgatttcaataat

SEQ ID NO: 153661 - DNA, 589 bp, Homo sapiens
cataatacacaggcaatcctgggaaatagatattgttgtccaacccactagaaaagaaataaattgatgaattatttcctggttacttcctaggttgtattgctatctggagcaattcaaatatgggtccaatattaggacatttttaatgtaaataaattcaaactaggcttaagcatatcaggggagttatttgagaaacaaacaaacaaataaaaacaacaaaaagggagttttgcatgaagtcatagcagaaataaacctcaaaaaagtgaagttagagaattagtgatgaaaaatatttctttttctctggacattgcatctcacagcaaatcagttttagacctgtttttctcatactcaggctagattgatttactttgctattctggcccacaggacaaatcagctctggagttttcaattmacagggaaaatgacacatcctctcttgggcctaattgcaatcacccagaagagagactgccattggcctaacttgactaaggatacatatctaatccaataagctatagtaaaagagagtttaaggaaaaatatggctataggaggtgatttcaataat

SEQ ID NO: 153662 - DNA, 576 bp, Homo sapiens
tcctccttcctgggactcccagagagctgagattacaggcatgagtcaccataccccacctatgttttacatacatcagtacattccaattaaaactatgtgtgaaatgtagttgagtatcctaattcttataattagttttcttaagttttattattactttacataagttgtttctatactttacatggatgagcatatttaaagattacaagaatcaaactaaatggcaaattatatactcaaygttcaacaagaaagtctttaaatcaaagaaggaatatattttcaaactcttcatggcaaaaaatgaaaaaaatcactgaattatattattcatataggaggaagtatacaagcaagaagtccaataaaattattcttaactattataatttacatatataaattcaaacaatctaatatttttcatgaaattatcagtagttttactgactcacatcctgttgggataacaggacagaaaatacataataatatatgggaaatataaatcagtgcaaacttattagtagataatttggtaaaatctttcaaaattttgaaaatatgtat

SEQ ID NO: 153663 - DNA, 576 bp, Homo sapiens
tcctccttcctgggactcccagagagctgagattacaggcatgagtcaccataccccacctatgttttacatacatcagtacattccaattaaaactatgtgtgaaatgtagttgagtatcctaattcttataattagttttcttaagttttattattactttacataagttgtttctatactttacatggatgagcatatttaaagattacaagaatcaaactaaatggcaaattatatactcaacgttcaacaagaaagtctttaaatcaaagaaggaatatattttcaaactcttcmtggcaaaaaatgaaaaaaatcactgaattatattattcatataggaggaagtatacaagcaagaagtccaataaaattattcttaactattataatttacatatataaattcaaacaatctaatatttttcatgaaattatcagtagttttactgactcacatcctgttgggataacaggacagaaaatacataataatatatgggaaatataaatcagtgcaaacttattagtagataatttggtaaaatctttcaaaattttgaaaatatgtat

SEQ ID NO: 153664 - DNA, 576 bp, Homo sapiens
tcctccttcctgggactcccagagagctgagattacaggcatgagtcaccataccccacctatgttttacatacatcagtacattccaattaaaactatgtgtgaaatgtagttgagtatcctaattcttataattagttttcttaagttttattattactttacataagttgtttctatactttacatggatgagcatatttaaagattacaagaatcaaactaaatggcaaattatatactcaacgttcaacaagaaagtctttaaatcaaagaaggaatatattttcaaactcttcatggcaaaaaatgaaaaaaatcactgaattatattattcatataggaggaagtayacaagcaagaagtccaataaaattattcttaactattataatttacatatataaattcaaacaatctaatatttttcatgaaattatcagtagttttactgactcacatcctgttgggataacaggacagaaaatacataataatatatgggaaatataaatcagtgcaaacttattagtagataatttggtaaaatctttcaaaattttgaaaatatgtat

SEQ ID NO: 153665 - DNA, 576 bp, Homo sapiens
tcctccttcctgggactcccagagagctgagattacaggcatgagtcaccataccccacctatgttttacatacatcagtacattccaattaaaactatgtgtgaaatgtagttgagtatcctaattcttataattagttttcttaagttttattattactttacataagttgtttctatactttacatggatgagcatatttaaagattacaagaatcaaactaaatggcaaattatatactcaacgttcaacaagaaagtctttaaatcaaagaaggaatatattttcaaactcttcatggcaaaaaatgaaaaaaatcactgaattatattattcatataggaggaagtatacaagcaagaagtccaataaaattattcttaactattataatttacatatataaattcaaacaatctaatatttttcatgaaattatcagtagttttactgactcacatcctgttgggataacaggacagaaaatacataawaatatatgggaaatataaatcagtgcaaacttattagtagataatttggtaaaatctttcaaaattttgaaaatatgtat

SEQ ID NO: 153666 - DNA, 532 bp, Homo sapiens
acaaaaaaatctcctaataataagtgaaaattatagaatacaatgtaaacacagaaaagttaattttatttttgtatatgtaaatggaaatagaatgtttaaaaaaaatttccaatgaaaccaaaataaattgggcaaaaatctaagaaagtttgtataggatttctatgctgaaatatgtaatgtcagtgaaagaaagtaaacagcactgaagtacacagagaaacatactctgttcaatggtaaatctcaatataataaaaatatcaattttctccagattcatttataaatccatagttgtggctaccacagtatccatgagcaaataaattagcttctctccctgttcaaaagcagcagctagatatcctatttccttccaaaacacagagggatacaaacctaacctgactgcatggcaatgtcatgccagaactcactagtacttacaraaatgctataacctggtaaaattagccttctcttagacaaatgtagatttattacaccctctaacattctgatagtc

SEQ ID NO: 153667 - DNA, 712 bp, Homo sapiens
actgtagtttccagacagataatggtaataccaaattctaactttacaatttaccatgtttctaatttttagcaagagtctaatttccctgaaaattcagataatttatatatcaatagaatattgaattcaatttgttgtaaacataaataaaatattgttgtgaagcagagaattttctttgaaacttaaaaagtaattgtatattttgaatcttttcacttcaggtaattttcaaattcaaataatgaaaagatttctggataaaggaacaagaagctccagaattgtgaactggcattatgtatacttaaattaaatatgcttaaatttgtgctttacttcacataaaatgtaataacacagatayacaataaattcaatagggaagtcatcaaatagatagtacaacttgtatgtcacaatgtcttggaagcagtattatacatcaaaatgaattataaatgcagatgtcagggaaaataaataaatatttgtatttcagtcagaaaatttttaggtattgggagcaatgcttcctggaagtaactctgacatgtccttttaaataattcatttattcattcaacaaatattaattgaatagtttctgtatatcacattgttttgaaagtttggtatatgttagtgagcaaaagaaacttagttgcctattttcatggagcttatgcttcaggtaattcaattaatc

SEQ ID NO: 153668 - DNA, 475 bp, Homo sapiens
tgcagtgaacagggaacactactacactgctggcgggaatgtaaactagtacaaccactatggaaaacagtgtggaaattccttaaacaactaaaagtataactatcacttgatccagcaattccattactggctacctatacagaggaaaaaagtcattaaatgaaaaagatagttacacaygcatatttatagaagaacaatttgcaattgcaaactgtggaactaacccaaattctcatcaatcaacaagtggataaagaaactgtgagagatatatgtatatatatgatggaatatatatatatatatatatatacacacacacacacacacacactatatatacacacacatatatatatacacacacacacatatatatgatggaatactactcagccataacaaggaataaattaatggcattcgcgcaacctggatgagaactgagactattattctaagtgaagta

SEQ ID NO: 153669 - DNA, 475 bp, Homo sapiens
tgcagtgaacagggaacactactacactgctggcgggaatgtaaactagtacaaccactatggaaaacagtgtggaaattccttaaacaactaaaagtataactatcacttgatccagcaattccattactggctacctatacagaggaaaaaagtcattaaatgaaaaagatagttacacacgcatatttatagaagaacaatttgcaattgcaaactgtggaactaacccaaattctcatcaatcaacaagtggataaagaaactgtgagagatatatgtatatatatgatggaatatatatatatatatatatatayacacacacacacacacacactatatatacacacacatatatatatacacacacacacatatatatgatggaatactactcagccataacaaggaataaattaatggcattcgcgcaacctggatgagaactgagactattattctaagtgaagta

SEQ ID NO: 153670 - DNA, 475 bp, Homo sapiens
tgcagtgaacagggaacactactacactgctggcgggaatgtaaactagtacaaccactatggaaaacagtgtggaaattccttaaacaactaaaagtataactatcacttgatccagcaattccattactggctacctatacagaggaaaaaagtcattaaatgaaaaagatagttacacacgcatatttatagaagaacaatttgcaattgcaaactgtggaactaacccaaattctcatcaatcaacaagtggataaagaaactgtgagagatatatgtatatatatgatggaatatatatatatatatatatatacacacacacacacacacacactatatatacacacacatatatatatacacacacacacatatatatgatggaatactactcagccataamaaggaataaattaatggcattcgcgcaacctggatgagaactgagactattattctaagtgaagta

SEQ ID NO: 153671 - DNA, 645 bp, Homo sapiens
aaactattttcatgcaaacagcccctatcaccctttccaggaatggttctttcctaaagttgttattatattttctacctttatatcttatttagtccttaccatcatttcaaatcatcttgttgtttttatgtttaatgttcacttttaacaaacttttttgaaggctggtatcctatctgtggcatcatcagtttctaacacaacacacgcttgttatataaaaaattaagcaaascctccagagaatataggttagtgttttgttacaagagaaaatgatgaaatatttatcattttatcttatatattagataagaaattatttcatatattaaaaaatactaccatttacactgtataatatgaaaattttataagaaagtatttctcatatgtgatcttaagatggtggaaaatttaggaggtagatttttttggtgtgtgttagtacttttctcagaaaaaatgcattttgtctggggacaacaagatataccttgcaaagacaactgtgcccctaatatctaaactctacataaatgaaactttacaagatgtttttcatgttaccttaactcttttaaatgaagacaccaagtcctgaactgccagctttggaaagaccatgagagactgtgaggc

SEQ ID NO: 153672 - DNA, 645 bp, Homo sapiens
aaactattttcatgcaaacagcccctatcaccctttccaggaatggttctttcctaaagttgttattatattttctacctttatatcttatttagtccttaccatcatttcaaatcatcttgttgtttttatgtttaatgttcacttttaacaaacttttttgaaggctggtatcctatctgtggcatcatcagtttctaacacaacacacgcttgttatataaaaaattaagcaaaccctccagagaatataggttagtgttttgttacaagagaaaatgatgaaatatttatcattttatcttatatattagataagaaattatttcatatattaaaaaatactaccatttacactgtataatatgaaaattttataagaaagtatttctcatatgtgatcttaagatggtggaaaatttaggaggtagrtttttttggtgtgtgttagtacttttctcagaaaaaatgcattttgtctggggacaacaagatataccttgcaaagacaactgtgcccctaatatctaaactctacataaatgaaactttacaagatgtttttcatgttaccttaactcttttaaatgaagacaccaagtcctgaactgccagctttggaaagaccatgagagactgtgaggc

SEQ ID NO: 153673 - DNA, 645 bp, Homo sapiens
aaactattttcatgcaaacagcccctatcaccctttccaggaatggttctttcctaaagttgttattatattttctacctttatatcttatttagtccttaccatcatttcaaatcatcttgttgtttttatgtttaatgttcacttttaacaaacttttttgaaggctggtatcctatctgtggcatcatcagtttctaacacaacacacgcttgttatataaaaaattaagcaaaccctccagagaatataggttagtgttttgttacaagagaaaatgatgaaatatttatcattttatcttatatattagataagaaattatttcatatattaaaaaatactaccatttacactgtataatatgaaaattttataagaaagtatttctcatatgtgatcttaagatggtggaaaatttaggaggtagatttttttggtgtgtgttagtacttttctcagaaaaaatgcattttgtctggggacaacaagatataccttgcaaagacaactgtgcccctaatatctaaactctacataaatgaaactttacaagatgtttttcatgttacyttaactcttttaaatgaagacaccaagtcctgaactgccagctttggaaagaccatgagagactgtgaggc

SEQ ID NO: 153674 - DNA, 483 bp, Homo sapiens
tctatccccagtaatgggattgctgggtcaaatggtggctatattgtaagttatttgagaaacctccagactcctttccacagcaactggtctaatttacattcccaccaacagkgtataaacattcccttttcttcacagcctcaccaccatcccttgttttttgactttttaataatagccatcctaattggtgtgtgaaataattttgtagttttgatttgcatttctcttatgattaatgatgctgagcatttttttcatatgtttgttggctacttgcatatcttcttttgaaaagtgtatgttcatgtccttttcccatttttaacagggttatttgttttttgcctgttgatttaatttccatatagattctggatattaggcctttgttagatgcctagtttacaaatatcttcttccattctgtaggttgtctgttttgttgatagtttctttttctatgcagaagttctttag

SEQ ID NO: 153675 - DNA, 538 bp, Homo sapiens
aatttcaaatatgttttttttcctgacctaatgtcagtattcactcaggtgttaatcaggagtacattgtttaattttcatgcgttgagagagatattctttgtattgatttctattttattgcactggggtccaggagtgtgcttggtataatttcatttttaaaaaaaaatttcgaggcttgctttattattgaacatgttgtctctcttagaatatgttctgtattcacatgaggatgtatatcctatggttgttgagtggagtattgtgtagatgtctattaggtctaattagacaagcgtcaagttttagactagaatctcttttttagctttctgcctcgatgatctgtctaattctgttaatggagtgttgaagtctctcatgattrttgtgttttgtctacatctttttttaggccaagaagtatttcttttctaaatctgggtgcttcagtgttgggtgtgcatatatttaggatagttaaggcttcttgttggattgtatcctttagcattatgtaatgcacttaatt

SEQ ID NO: 153676 - DNA, 538 bp, Homo sapiens
aatttcaaatatgttttttttcctgacctaatgtcagtattcactcaggtgttaatcaggagtacattgtttaattttcatgcgttgagagagatattctttgtattgatttctattttattgcactggggtccaggagtgtgcttggtataatttcatttttaaaaaaaaatttcgaggcttgctttattattgaacatgttgtctctcttagaatatgttctgtattcacatgaggatgtatatcctatggttgttgagtggagtattgtgtagatgtctattaggtctaattagacaagcgtcaagttttagactagaatctcttttttagctttctgcctcgatgatctgtctaattctgttaatggagtgttgaagtctctcatgattgttgtgttttgtctacatctttttttaggccaagaagtattycttttctaaatctgggtgcttcagtgttgggtgtgcatatatttaggatagttaaggcttcttgttggattgtatcctttagcattatgtaatgcacttaatt

SEQ ID NO: 153677 - DNA, 607 bp, Homo sapiens
ttgggtggatatattttttatgttaagtcaagcagatgatctcctggaaacatataattggttgagaaaccacaaattagtctctattgataatttgaacttaatatgtaaccttgggagttataatgtgatcatgccttgtagctttctttcttttggtcaaggcccagctatgctgtatttctaccttttactcataaattcttatatttaatgtttacatttttccttgacttggtttgtgtttctttgaacaaaaaaactcaatttatacaatacatatgagttaaatctcttgattgtagcaaatgtttcagtattacttgaatgtaaaggtgactacagtgaactgttcaacatttctatcaataatattttagttcttaattatgagcagaagagaataaaatcagatagaaggctgagtagttcatgcaaagcagacmtacctcaaagttgtctcttttataaagacttcttaaatgctcaatatacacagctattcaatgtcctcctttttggctctcaaaacattgggtctcagatatttagatgttcttgtccagttaagagcagagaatctaaatatatcccagaatttcccacc

SEQ ID NO: 153678 - DNA, 579 bp, Homo sapiens
atgcttcctctcccactggttgcctcatcaaatttagaaattgctatagcaatctatccaattaggccatagagacttagcagtggagtctaccatactataagggatcccatttagtttattattttcaggttacttctttgaactaagcaggctgctaagttcaatcaaatataaaaatagtagggtaattcaggaaagcatctgacttgcctattgcttgtagccaattggcctattatgatggagttatgaaatctattatttgcatattggttgactgaacctgggaascaggttgccaatggtttcactgcagattgattctgggtgaaataccccaaattttaccccaaataataagctatgagattaattcagaggtatatttttattatactcttaaagctcaacattgggctgcagggctcttgaaagcctggcatgactttaggaggcaggaggaggaaactcattgtctccctggaagcacacctgtattagacttggaaatccccctaatttgttgctctcctgtgtggagtaccaaattgatagaggagataccttattaggata

SEQ ID NO: 153679 - DNA, 431 bp, Homo sapiens
ggagttatacagctatgaattcatatattaatatcaggagaaatggcatcttaacattctgacttccaatttatgacattatttttcattttatttagtttcttaatttctttcaataattttcaatgtacaggtcttacacatggttctttaaaattattagtcagtattttatggttttgtggttttttaattgctattttaaatggtattatttccccattttattttccgattttgtgttactatacctatatgagaccatttgacattctcctacagggctctgatcaccaatttaaaaatcattatttctttttcctctctgtgcttcagtttagagaatttcaaatgaccttatttgaartcaataaattttagtttctgtgtccagtctacttttaagacaatcagattattcacttctaata

SEQ ID NO: 153680 - DNA, 633 bp, Homo sapiens
actattactggcagtgtacatttgtgcagaaactttagataaattttgtggcagtttccactcaagtggaataaaagcataggtgatgactcattggttccatttccatgcaatacggacttacgtgcaaagaaagatgtgtacaagaatatacataagagcactactaacaatatccctaaactagaaacaatccaaatgtttaattgtgggttgataaagtgttatgtagccatgggacagaatatcatacaatgaaaatgatacaaatatgtttagatccaagaaggattaatgtagcaagcacatacagatgatccctgactgttgatggtgtgatttatgagtttttgattttacaatggtgcaaagtgatacacatcaagattctcctcarcttatgatgatatgtgtgaataaagccattgtaacttgaaaacatttcaagttactacgggtttactcagacatatttatctaaagtttctgtaccagtttagactcccaagacattgttttcaagttacaatttaagaaacacaatttccacctataaaattttcaatttatgagagatttatcaggatgtaacctcatcataaattaagaaggatctgtgtatactactttctt

SEQ ID NO: 153681 - DNA, 564 bp, Homo sapiens
tcttccatggaactggaagttctgtgcatgtggcttgccttgcattaattaagctcttttttgctgcaataccacagtctcagtgagttggttttgtctgtgcagcagacaggaagaacccatcaagtagctacaaatcagggggctcatccaggatctgccctcctgggtgcctatccacagtttgtcaggccccgtgtrtgtgtttatatatgtagagggatccctgagggaattgctaatagaagtccagcaggccttaatttggagaaccctctttttttgtctggtcacatttggtgagccctgaaggaaggtcaacaggtctaactcagggtgaccatttgcccttccatcttacccagatactgactgttgaaattctgggttggaggtcatcccttctgaccttgagtagatcaaagacaacaggggccagtgggtgatgtttgagccttgccaggttgatacttgggtgctgagtgggatgactactgtcagtgttttgtcacatgtgtatcactctggccagaatgggaaatgttaattcaattcccccataca

SEQ ID NO: 153682 - DNA, 440 bp, Homo sapiens
acagtgcagtggcacgaatcttggctcactgcaacctctgccttccaggttcaagtgatcttcctgtctcagcctccgaatagctgagattataggtatacactaccatatctgctaatttttgtatttttagtagaaatggggttttaccacgttggtcaggctggtctcgaactcctgacctcaagtgatctgcccgtcttgcatcccaaactgctgggattacagacatgagctactgtgcccagccccttgcaagttgcttttatacagtattttttatttgtataacctttgtgacacatatccaggcagtcctcatcatctgatattcttcatctgaatctgcattattgtgaattccatagacagccaagcccctcataacatcaaaatattcatgaacaaacatcatttacagracctttgcccagtcaaca

SEQ ID NO: 153683 - DNA, 559 bp, Homo sapiens
agaaaaatcactttagaatcaactatttgttgaggataactggagaaaaaacaacccagaaatgatgccagttgctatgctccagatgtttgtgtacccctgcaaaattcatatatttaaatcctaaccctctaggtgatggtattttgagggagaacatttgggggtaattagaatatgggagctgagctctcatgaatgaaattagtrcctttataaaggaggcctaagggagcttgtttgcgccttccatcctctgaggatgtagctagaaggcactgtctagagatacaggccctcctcaccagacactgaatctagtagcaccttgattttggacttccagcctccagaactataagaaatacatttatgtgttttataagctacttagtctatagcaatttgttatagcatccaggacagactaagacaccaatcttttatgtaaacttgaaaacattttcaatactaaatccaatcatttaaaccatttagtgcatttgatacagaatagtcaaaagagatgctccgggaaagaaagagggaagggcacaca

SEQ ID NO: 153684 - DNA, 568 bp, Homo sapiens
ctgctacagtgtctggcagtataaatgcaatgaaggagaaaattaatgaaagggtaatctgactactctcctaggagaaagaaggaagatggtagctgctcaaatgcaatcaattccaagacaccacttctaaatactggcccccatctcaaggataccactatctaggatactacacaaatgtatttattttttcctttcaatggaatgtgaagtttatgtgtcttcttaatgaattcaggtcatttaaaaatttcaaaaggaatattcatcacactgagattctaccaagttctgagcagccacattcttttttctttgcttagctcctaattactgtaaaattttgacaagtggttacaattcaaatatctgtacttggttcttcacagattctcgaaatcctttaatcatctcagcactgtcagctgcgtcagcacagtaccagagagtggactacagccaatcagatgtggagcggcccygtgcttcctccttttaaactcagactggcagacaggacgcaaagcaaagcatagcccaggagctagagtgtcttttcaaagac

SEQ ID NO: 153685 - DNA, 523 bp, Homo sapiens
taaggcagtctgggctctgtccctggaagatgttgtattatccagcatgtgttcatgctttttacctgtttrgtgagtttccatgttgccttctgtgcttgcaagatgtatgacttttaccagctgtccttcttaacctttctggcttacaataatctcatttttttgaccctacaataagatataaaggctgaaatatatttgactattttgtatagctctctgtttttgctacttgtattttggggttttttcttcactaagattctgagtcttttaaagattagaactatgtaatatatatcttcaaaagtattgagcaatttatgagctcccaaaaatatactatttaacgatttgaattacaatattaaataggtatatagttataaccttcacttgaagtttgtaataatattattttttaaagttttgtgtgattaataaatcattcatgattgatataaacatatatgtgtatatacatttattgattcatgtggaatgtgtacatatatctata

SEQ ID NO: 153686 - DNA, 552 bp, Homo sapiens
gaattcattccccactttactattaatcatctcaactcctgcaggaaaacttttggctgccccaatgggctctggatgcaaaaggatccctttcagactctcctgtgtctttggtgcatcagaaggaatctcactcttcatatccacttttaaggtgtagagctcgttatattcaggagtccattgagacatgggaaactttaaggaaagcctagaagacaaaattagatatttaaaagatttttaatgtgttttattatactatttaattgaagagttctcaaattccaccaagaagatcccttataaaggcagaactgtcttttcctcatcagtacacaaaatgtctgttatgaattattttactattcttataaaacgtttytctctggtcactctactcatgcatccaatttttagaaatacagtagatatagagcataagcctacttaaaaacttctattaaccaaaaactgatcttattgcatatctcactaccttcagcaacaaaacatatttggtcaaatcaaacaattacttcaaaacctatt

SEQ ID NO: 153687 - DNA, 520 bp, Homo sapiens
tgtttaatctgagcttttggtctcattgttgaattataagaattcctggccaggcatgatggctcatgcctgtaatcccagcattttgggaggctgaggtaagtggattgcttgagcctaggagttcaagaccagcctgggcaacatggcaaaacctcgtctcaacaaaagctactccggaggctgaggtggtaggatcacttgaaaccagggggccgagtctgcagtgagccgagactgtgccattgtactccagcctggacaacagagtgagaccctgtgtctcaaaataataataataaaaaataaagagttccttatatatcctgaatacaagtcttttctcagatatactatttgcaaatattttctcccagtctgtgacatgccttttcattttcttaatagtgtcttttgaagcacraaagtctctaattttaatgttcaaattggcaacttcttttatggattgtgattttggtgacatatttaagaaacctttgtctaacccaaggtcact

SEQ ID NO: 153688 - DNA, 466 bp, Homo sapiens
gtacaaacttgacagtggttccaaatagccagaaaacggcactttcgatttttccatcctaccagatctagataattcttgtcgtaaaatgggcaaacggtctgagatgcctgawgtccaggcattcttttacacattgttcactccctactctctgttcccaatgcgacttgtcccaaatcctcctttccctctcgcctgtcctctcagtcccaaccccaagtgttgctgagtctttctaatcttccttttctacagacccatctgacctctcacctcctccccaggctgcccctcgccaggcggagccaggtcccaattcttcctcagcctctgctcccccaccctataatccttttatcacccgccctcctcacaccctgtccggcttacagtttccttccgtgactagccctccccaacctgcccagcaatttcctcttaaaaaggtggcttgagctaaagg

SEQ ID NO: 153689 - DNA, 466 bp, Homo sapiens
gtacaaacttgacagtggttccaaatagccagaaaacggcactttcgatttttccatcctaccagatctagataattcttgtcgtaaaatgggcaaacggtctgagatgcctgaagtccaggcattcttttacacattgttcactccctactctctgttcccaatgcgacttgtcccaaatcctcctttccctctygcctgtcctctcagtcccaaccccaagtgttgctgagtctttctaatcttccttttctacagacccatctgacctctcacctcctccccaggctgcccctcgccaggcggagccaggtcccaattcttcctcagcctctgctcccccaccctataatccttttatcacccgccctcctcacaccctgtccggcttacagtttccttccgtgactagccctccccaacctgcccagcaatttcctcttaaaaaggtggcttgagctaaagg

SEQ ID NO: 153690 - DNA, 503 bp, Homo sapiens
ctttttttctgatgtcctgtcatgactattgtttaaatgtccattcagaaattaatttcatgtagtatttgttttaatgtgtcgtgtttaataatgttcttcttgttatgagagttcaaccattcatagctgtatgttctgctttccaactagactataatttctttgagagcagagtccattttgcatgtctctctacacatccacaacaccaaagaaaaatataataaatgctttaattcagagaggctttactctcagagaatgtatagtaaaatattgaggaagtgtttgatgattccattatttagtaatcaaatatccaaatagttcttactaggtgtcaaccactgatgtgttaatatatttgaaaaatagactaatataatctttgtatgaatcyaattagataagttctattactaacattcttattttacagaagaagaaactgaggcatgaggaagtattattgtcaacagataacaaataacagatccagg

SEQ ID NO: 153691 - DNA, 422 bp, Homo sapiens
gggtggatccagatgaaattttttaggtatcattttgctgtggtaaaatttgtcctttgctgtcatgaacaaatagcctttggctatttagaacgaagggtttggcatttggaagagactgtgttagcacagmaggaagacttattaggatattagtgctttttcagcattttgtgaaatgctcaatgctccaagatatgtgggatgtgtgtacccttaagttgcacaaaatgatgcacctggttgctgcagtaaaacttccgagcttctatctttctttatcttttatatcatccttttacaattcagtttggtattataatttttatgcttttaagtatttattatagttgttcttattgcaattgtgaaaattattaactatgaagaaaactactgaaatatgagtgcagaaaacaggt

SEQ ID NO: 153692 - DNA, 552 bp, Homo sapiens
ctgagtctacatggtcccatcagatctcccaagtcacaaggttaggcagtcccccagcaatctgttgtttggtagaagtggcacctgtgcaaattggaccctggcagatctggaggacacaagtaagttgaagagcagtgatccttctcttatgttgcttctctgtgtcgtattactgcctccctctcacctcacacctctggcctcatagaggttcacggcacccaactaacaggaggaaagcagtgtgsgtctgcaacagaaaagggtcaattttcgtctaggtgctagctagaaatagctggtagctgccctacagccccactcgagaatggccctaaaaggtggtgaaggtaaatcctccctagggaaactcagttcctaatgaggggtatggatttgggtggacagctagcagtctttatcaattcccctctctgcctcccatccccaagttatttgatactgactatgggaaaggcattattctaagtaatttttatagtcatctctgcaaattaggtatcattctgatatgaattttttaaaagt

SEQ ID NO: 153693 - DNA, 581 bp, Homo sapiens
aaaataattgtacggtgctatttttataaataaatgcttgatgaaggacttaaaatgatgcttaaggaatatccagagatttttctaaactctgtgtagagcaggaaatttgaatttttacagaaaagaatgactatgattcattaagaaaaacaactaatttaagacccacaacttarattacattcagtgaaaatggctccaaatttaatgtgaaattaatttttttaaagaataacttctataacattcaggagaagcctgaatttaagacatccccctttctctcagctaggccatgacattcagtctctccattttcattgcatggtatatattttacatccatatcttaattgaacctttgtcaaggacagtcttctacccagaggagatggccatgctcaacatcatggcttagacttgaaatctgaaattgcatgtattcttaggatgctaaaccatttcggggttttattttagctcgtagtcttctaaggcataaccactaagatgtggtttaaagaaacattgcacaaagttaaaagaaaaacaaatttaaagataaaatttcaacagag

SEQ ID NO: 153694 - DNA, 590 bp, Homo sapiens
agaaatataataggccaggcacggtggctcatgcctgtaatcccagcgctttgggaggctgaggcaggcagatcacgaggtcaggagtttgagaccagcctggacaacatggtgaaatcccacctctactaaaattacaaaaaaattagttgggcgtggtggtgtgcacctgtaatcccagctacttgggaggctgaggcaagagaattgcttgaacccaggggggggrggttgcagtgagccaagatcatgccattgcactccgggcctgggcaacagggcaagactctttctccagaaaaaaaaaaaaaaaaaaaagagaaaagtatatatatatatatatatatatacacacacacacacacatatacacacacacatatattattacaatgttaagcataaagtattaaaatatagtaagtatcagatatagtaagtatagtatagtatagtataatgttaaataaagggattttatttaactatcaatagaaaaaaatgattttggtgggaatcacatatactagtttgaaaacaaagacaagtagacgtgggatttgttcatgtctggggcaatgagaagaaag

SEQ ID NO: 153695 - DNA, 538 bp, Homo sapiens
acacactaggctttcttgtatctaagtgaggccaaataactaatttctgaccaatgggaagtaatcacaaatgttatgcaagctttgaaggggaggaatatagataaaatggctggaacaaaaatatctccatatggggaagggcaggagaaccttataaaaacactcaaaaccttattcaaatctttgtgatttgaatactaatgactcatacatttaatgttatttacatcagatggtgcaattaaaatttatttaggaccaaatttgagcatgcaacaaaggtggacattccttactctktcaagaagggaaaaaggaaagagagcaagtagcatttatcaaataccaggagctctgctgtggcttttttcatgttatgaagcttggttcttacaacatctcttcttggcaggattattatccatgttttatgcagagatatgatcaaggctttggaggttcacttaaaatggtgttgaaatggcagggctcgtttgacctcagtgaatgagtgtgaatttgttgatttaaataa

SEQ ID NO: 153696 - DNA, 538 bp, Homo sapiens
acacactaggctttcttgtatctaagtgaggccaaataactaatttctgaccaatgggaagtaatcacaaatgttatgcaagctttgaaggggaggaatatagataaaatggctggaacaaaaatatctccatatggggaagggcaggagaaccttataaaaacactcaaaaccttattcaaatctttgtgatttgaatactaatgactcatacatttaatgttatttacatcagatggtgcaattaaaatttatttaggaccaaatttgagcatgcaacaaaggtggacattccttactctgtcaagaagggaaaaaggaaagagagcaagtagcatttatcaaataccaggagctctgctgtggcttttttcatgttatsaagcttggttcttacaacatctcttcttggcaggattattatccatgttttatgcagagatatgatcaaggctttggaggttcacttaaaatggtgttgaaatggcagggctcgtttgacctcagtgaatgagtgtgaatttgttgatttaaataa

SEQ ID NO: 153697 - DNA, 574 bp, Homo sapiens
tgggacatctctgtaacttcctttcagttttgctgtgaacctaaaactgttctaagaaaataacgtctttttttaaaaagcaggcattttatagcataggctaaaactgcatatgcagccatgatataattytatggatacacgcacatcatatggaaatgttccttgactgggtcttaaaaagtaacataaaatgaaataaagaaaaatcaaataatttctaatcaatcagtttacaatcctgggaatttttcatttagctaaacttaccatagagataacataagatgcaagaaacaaaccaaaaaaaaaaaaaagaaaaaaagaaagaaagaaagaaaggaaataagaaagaaaggaagtccattaagcagaattcaagttgtcacatatttatagctccatcagaggggtccatttgttaacagccgatgaacctatgttgacacatcataatcactcaaagtccacagtttacattagagtttgctattgctgttgtacatcctatgagctttgacaaatgtataatgacacgtatccatttttatagtgtcatatagactagtttcac

SEQ ID NO: 153698 - DNA, 617 bp, Homo sapiens
tgtgtgaatgtgacctagaagtgtcatgaaatatttgaatctttgttgaatttagtcagtagctttcttctggtcatcacaagaatgttttttrtgagaaataaagcacttcatttttatttcaaaggccatttattttcctgtttaaacaaggataaacactacgccctcaaaaatatctatcttctggaaatgtttgatgattgagatgtaaatttggtatttgtatttatatgcttatgtttttatgcttatgtttatatgcttttgtttttattcttggaggtagaagatagaatgactttattcaagtcaataactagtttggttttccactttaccttgttggtatctgactaatatacttattttcctagaaactttttagtaattatcccaatttttcagaacaaagatacatgtaaaacagatatctatttataactataaatctcttgctggcttggctatcatttgttttaaaatattaatatcaccatttaaatgctttttaggcttacttaatttcaataatctcttatttatcaaattactgcattgttctccttagacatagtctcataattgtatcatagtctcataattctatcaccact

SEQ ID NO: 153699 - DNA, 554 bp, Homo sapiens
cgaaaaaaaaaaaaagctcatctgagggacggggacatcgtctcatttcttgggcagcggcagagagtaagggtccagcccggccacagtgaatttgatttccgagagcactcactcctcctgccaccgccggaagggtcaggggaaggttaggaggaaagatggacctccagagccgagcagaagtgccattgcaccagcttggcgcagaagtgccattgcaccagcttggcatgggcaccgggcactgcacattaggcctcagggatggtcctggcgatgtctggtatcgtaccacggtttggctaaagattaagggactaaaacctgatcctgaccttagatagtggcctaggagcgctcgtggttccaggacgcggaccgtaaagargtgccagggagctctgctcggtcccagggctccccaaccccgccgcgccggggaatggctgcgaggtctctcccctgaggaccttgaagggaccccgcgccttctgggggcagccggacgattctggcccaggtctctgaggggaatgggggccgggagggag

SEQ ID NO: 153700 - DNA, 553 bp, Homo sapiens
gaaaaaaaaaaaaagctcatctgagggacggggacatcgtctcatttcttgggcagcggcagagagtaagggtccagcccggccacagtgaatttgatttccgagagcactcactcctcctgccaccgccggaagggtcaggggaaggttaggaggaaagatggacctccagagccgagcagaagtgccattgcaccagcttggcgcagaagtgccattgcaccagcttggcatgggcaccgggcactgcacattaggcctcagggatggtcctggcgatgtctggtatcgtaccacggtttggctaaagattaagggactaaaacctgatcctgaccttagatagtggcctaggagcgctcgtggttccaggacgcggaccgtaaagaggtgccagggagctctgctcggtcccagggctcsccaaccccgccgcgccggggaatggctgcgaggtctctcccctgaggaccttgaagggaccccgcgccttctgggggcagccggacgattctggcccaggtctctgaggggaatgggggccgggagggag

SEQ ID NO: 153701 - DNA, 594 bp, Homo sapiens
cttcatttcattgatggaggcagatgttctgagacattaaggaacatccccacagtcctccaaggtcttcttatatggcacctacctttatttactttcttattagaaaagatcgcatcattcttagatggccattcctgggataggcagagagggaactctgtgtgcacccttcctgcagtgtgttggtgggggatacagtcccattgcacattttcatcctgtgactttcacccacagctctgtggaaatgctgcctggaagaaaagcatatcagggtatcgttggagaggttgtcatgggtggatccttggggtctagaggtctcagcagagagacgagggaaagaaggagtgttcaggggtagtcatgtattgggaaatccaagcctttgtgtgggtatctcctgtgttcatgtggaacccaagaattctcaactattctygaggactctgcttggaccttataaggatctgtgccttcctggatagctgaaaattggtgtcagtcacattttcaacagcttttattgggtgcctgcctctgcatcttgtattgtcatagcagtttacacacagcaagccagaccaggag

SEQ ID NO: 153702 - DNA, 594 bp, Homo sapiens
cttcatttcattgatggaggcagatgttctgagacattaaggaacatccccacagtcctccaaggtcttcttatatggcacctacctttatttactttcttattagaaaagatcgcatcattcttagatggccattcctgggataggcagagagggaactctgtgtgcacccttcctgcagtgtgttggtgggggatacagtcccattgcacattttcatcctgtgactttcacccacagctctgtggaaatgctgcctggaagaaaagcatatcagggtatcgttggagaggttgtcatgggtggatccttggggtctagaggtctcagcagagagacgagggaaagaaggagtgttcaggggtagtcatgtattgggaaatccaagcctttgtgtgggtatctcctgtgttcatgtggaacccaagaattctcaactattcttgaggactctgcttggaccttataaggatctgtgccttcctggatagctgaaaattggtgtcagtcacattttcaacagcttttattgggtgcctgcctctgcrtcttgtattgtcatagcagtttacacacagcaagccagaccaggag

SEQ ID NO: 153703 - DNA, 528 bp, Homo sapiens
gaaacgtctgtgcgtttgtaaattgactaaattttgtcccactaaattgtgaccctttgaggtacagacaaagctattttgagatcttcctcaatgaagcaccggggacacaatgttctcacttcctacgaacaccagtggttgagccagttggcagcaatttgggatgacagagagagccccttatcgtggcaatcctgggacaaacaaagactcttgctcaatagtagaggtgacaggccaaagtaacagaagccagcatcaaatggtagctcggactgcacagcctctagcaactaccccatgggtagtccaagaatgtttgggaggagggaactcagtaagacactgtgaagcaggtgggagctcaaaggtagcaaggctcaaagctatgattcacatgtcattatcygaacctacagactggtgagatgcaagactgagaatacattgttttgttatttttgttttacctttttatgtttgtttaaatacagagagtaatcattcaggccagaggagataata

SEQ ID NO: 153704 - DNA, 609 bp, Homo sapiens
caacattgtgagacccccatctcgaaaaaaaaattgataagtaaataacttgtcaacatattataaggaggctctgctttgagaaaacgtgttatacaaatgtataaatgcatcaaactttgttctggaggaaagaattcttcaggttacctgtaggttggagttgcccaaattcaacttagacatgagttttctagaatgcatctattgtgtaaagtgatgatgatttgcaggtatacaaccctagaaagcattgcaggcagccacactgtgatcacctgcccatgctactggaagtttattttcaacttggtatagcagtcagcagtcattcttgctgttgtgatatcactaaccagaarcactccagaaacatacgtttgcaagttaaacaaggacatgactggttattatgtacatatttaattaacacttctatttgtgtaagtcataatatggtgttatatgcctattctcaatgcttgattagcaatacataatattgttaatgttttaatgaaggataataccatggtctttcccaagcactcgcactgaactaagtccctaatatgtgagaaacgttaactaggagccacaggcttccca

SEQ ID NO: 153705 - DNA, 656 bp, Homo sapiens
ggacgcaggaatcctctcagaccagtgccagggccctggagtggctgccttcctgacagctgttcttggggaagtgccaaggaaaaaacccaggcccagggcttttcatcagattcagggttggcttttgttctttatggccttggaatgccagcagttcctgctgtgggcacaaaccacggaatagggcctatcctccccagctcctggcagtgcccaggggcctggtgaagggaccagagactctgcaggtttgagtggggcaagggaacgaggttgaggcatagagaagattcaagagatctaactggccttttgcttaccccaggagggcttctggcacattctgagtgcagtaaacttgggtgcttcgcccactccttcatggggctaggctcactacagggctgtgtcctcttgtgtcatgttgtggaccacacagtgcctgccttccctgcatctgaaggagcagacttgagggcttaggggtctggagccccgttttcctttctatgcttcagtggctatccttgctactcatggcccccacaccagggtggacataycattaccccaagagaatgctaagcatggtatttccttctaataacaacagttactactactgttatttactaagtattacttaatgccag

SEQ ID NO: 153706 - DNA, 537 bp, Homo sapiens
aaccagattttaagactggattgatcatgtccttggccttgaacacagtactgagctccttgacaatgagaactggagaactttttttttttttttttactgattgagccctggcaggcatatgcatgcagcactgcctacacagtcctgagtcagaaacttctcatggggtctctgagtctggaatgtctgagttctcagraggggtagcatttgctgctaaccctctgcctccctagcttgagctgtctctcgtggttttttcccctgatggatgttaacatcttcccaacagagctatcaacccagtgagggaggagtctgtgtagatcacctcccatcattctccatagagtctctatggcccaggttagaagaaaaagacttcttggctcagactccaaagactagagtcagtgacagtttccttagtggtgtaaaatggcaagagtagcactaatctcacagaagactcctgcagaacacactgccacattcaaccataaagctgctctcaacagtgtgagcctggcaagc

SEQ ID NO: 153707 - DNA, 541 bp, Homo sapiens
ttaagactggattgatcatgtccttggccttgaacacagtactgagctccttgacaatgagaactggagaactttttttttttttttttactgattgagccctggcaggcatatgcatgcagcactgcctacacagtcctgagtcagaaacttctcatggggtctctgagtctggaatgtctgagttctcagaaggggtagcatttgctgctaaccctctgcctccctagcttgagctgtctctcgtggttttttcccctgatggatgttaacatcttcccaacagagctatcaacccagtgagggaggagtctgtgtagatcacctcccatcattctccatagagtctctatggcccaggttaraagaaaaagacttcttggctcagactccaaagactagagtcagtgacagtttccttagtggtgtaaaatggcaagagtagcactaatctcacagaagactcctgcagaacacactgccacattcaaccataaagctgctctcaacagtgtgagcctggcaagcactcacgcattta

SEQ ID NO: 153708 - DNA, 541 bp, Homo sapiens
ttaagactggattgatcatgtccttggccttgaacacagtactgagctccttgacaatgagaactggagaactttttttttttttttttactgattgagccctggcaggcatatgcatgcagcactgcctacacagtcctgagtcagaaacttctcatggggtctctgagtctggaatgtctgagttctcagaaggggtagcatttgctgctaaccctctgcctccctagcttgagctgtctctcgtggttttttcccctgatggatgttaacatcttcccaacagagctatcaacccagtgagggaggagtctgtgtagatcacctcccatcattctccatagagtctctatggcccaggttagaaraaaaagacttcttggctcagactccaaagactagagtcagtgacagtttccttagtggtgtaaaatggcaagagtagcactaatctcacagaagactcctgcagaacacactgccacattcaaccataaagctgctctcaacagtgtgagcctggcaagcactcacgcattta

SEQ ID NO: 153709 - DNA, 509 bp, Homo sapiens
agaattctccacatcttaacatagattattccaagctgattgtaaaaaatttctgytttagaactgtgatctgaggactctccttgttgtaaagttccccattccatgtctgtctttgctggaacatggagtggtttagtaaactagcatgagtttgagagtctttgaatcttggttatatgattatctctgttgtggaatcctgagaagccatttacaaatttttatcttcgtatttatagtataaaattgtcccttttttggtgcacagttctatgaatgtaaacacatgcttggatttgcgtaacctccataatcagtatgtagaacattttatcactgcgtaagctccctcatgcgattcctttgtggtcacacactcccacccctgacctctggaaacccctgatctgttctctatccctattttacgaatatcacacaacaggaatcatatatagtatataaccttttgagactgacttttctattcaacctgatgcttttgc

SEQ ID NO: 153710 - DNA, 509 bp, Homo sapiens
agaattctccacatcttaacatagattattccaagctgattgtaaaaaatttctgttttagaactgtgatctgaggactctccttgttgtaaagttccccattccatgtctgtctttgctggaacatggagtggtttagtaaactagcatgagtttgrgagtctttgaatcttggttatatgattatctctgttgtggaatcctgagaagccatttacaaatttttatcttcgtatttatagtataaaattgtcccttttttggtgcacagttctatgaatgtaaacacatgcttggatttgcgtaacctccataatcagtatgtagaacattttatcactgcgtaagctccctcatgcgattcctttgtggtcacacactcccacccctgacctctggaaacccctgatctgttctctatccctattttacgaatatcacacaacaggaatcatatatagtatataaccttttgagactgacttttctattcaacctgatgcttttgc

SEQ ID NO: 153711 - DNA, 493 bp, Homo sapiens
ttattccaagctgattgtaaaaaatttctgttttagaactgtgatctgaggactctccttgttgtaaagttccccattccatgtctgtctttgctggaacatggagtggtttagtaaactagcatgagtttgagagtctttgaatcttggttatatgattatctctgttgtggaatcctgagaagccatttacaaatttttatcttcgtatttatagtataaaattgtcccttttttggtgcacagttctatgaatgtaaacacatgcttggatttgcgtaacctccataatcagtatgtagaacattttatcactgcgtaagctccctcatgcgattcctttgtggtcacacactcccacccctgacctctggaaacccctgatctgttctctatccctattttacgaatatcacacaacaggaatcatatatagtatrtaaccttttgagactgacttttctattcaacctgatgcttttgctccatgtta

SEQ ID NO: 153712 - DNA, 534 bp, Homo sapiens
tagacctttgctagtgacaggcaaagcattgggtgcctttctttaaaggaccaggcacagaattattcacgcactccaagggtctttctctcttaacaatgtctccccagtcatgctaaagaaggtcacctgagcttttatcaagtctgtatcttaggagccctaattatatcataaggtagaaggtagaagcaggtggaaaaacacctttgcctactcctattctccccattcttcctacatatcttggcttcacaacacgcacacaattttttgcatttagctgtttacttccttttgctccctatgagcctgcctattctccctgagagcaagarccatggtcgtattcctggtacctgcacaatacctgacagcacatggtgattcctcaataaatgttcaaagagtcaatgaatgatccagagtttcataaagtaagagatgtgttacaaatagggagagacttaatatgctattaattgatatagcatagagctaatgaacgtatgaataaatcaccacaaggatgca

SEQ ID NO: 153713 - DNA, 576 bp, Homo sapiens
tgccacaatatatactccatggtaagttacaataacaaatgtccttggggatttccttccagggtttaagaatatttaaataaacattctgcctttgataacgatggaaggcaataagcagtgttttcttattaatatatgaatttaaataaaataatattagtaattacagactatgagaaagtagagacacagaaatttttacgtcttttaagtaacttcatttctaagaaaaataatttaatcacacagtaagtatgcagctgctactactgaatgggattcagaaataatttgattaagatttttatgcatataaaatccttaagaagcaataaagaacatgtmtacaactgatcataaaatcaatgaaaacaaaattgagctaaggaaactgtggcatacaatctactagttaaaatgttactcttagctcttagacttgatagtagtcaaatagcaaccagagacaagaaacattatctccaatttcatccaacccaagagagaacacatttgtattgaatattggcatctaatgtggtgagagagattaggaatatgagtgtgtggcaa

SEQ ID NO: 153714 - DNA, 596 bp, Homo sapiens
atcaattaattcttatactttaaaaattaaatatatattttctcctcactacacacccataaacaaacaagtaaatatttacattctttcatttaaaaaattcttttaaaattttgcaagcaatgaaattctagraaaatcaaaatgcccctctttcagacactagaaaaccttaccatacttgattcatgagactcatttgtcccatttcaaggacatacagaacaattcatcacacgtggctctttaagtaaccgataatccgcattgtctgttggggaaagcatgcttaattgtaacctccattctggcaaaccgaatcctgtacccaaaatacattggaaatctttttgtctttgaagcttagcttataaattttgagtatttttcactatgcctgctattctattctcaagtcctccttcttccaagaacctttccaatccacttctattttgaagggtttctcttctttttcttatttcatatcactctttgcagagccagtttcatatgaaactactacctctgcacaatatcatttctacctcaaacctctgaaaatggacttctattcctacaatcccaacaatgac

SEQ ID NO: 153715 - DNA, 596 bp, Homo sapiens
atcaattaattcttatactttaaaaattaaatatatattttctcctcactacacacccataaacaaacaagtaaatatttacattctttcatttaaaaaattcttttaaaattttgcaagcaatgaaattctagaaaaatcaaaatgcccctctttcagacactagaaaaccttaccatacttgattcatgagactcatttgtcccatttcaaggacatacagaacaattcatcacacgtggctctttaagtaaccgataatccgcattgtctgttggggaaagcatgcttaattgtaacctccattctggcaaaccgaatcctgtacccaaaatacaytggaaatctttttgtctttgaagcttagcttataaattttgagtatttttcactatgcctgctattctattctcaagtcctccttcttccaagaacctttccaatccacttctattttgaagggtttctcttctttttcttatttcatatcactctttgcagagccagtttcatatgaaactactacctctgcacaatatcatttctacctcaaacctctgaaaatggacttctattcctacaatcccaacaatgac

SEQ ID NO: 153716 - DNA, 596 bp, Homo sapiens
atcaattaattcttatactttaaaaattaaatatatattttctcctcactacacacccataaacaaacaagtaaatatttacattctttcatttaaaaaattcttttaaaattttgcaagcaatgaaattctagaaaaatcaaaatgcccctctttcagacactagaaaaccttaccatacttgattcatgagactcatttgtcccatttcaaggacatacagaacaattcatcacacgtggctctttaagtaaccgataatccgcattgtctgttggggaaagcatgcttaattgtaacctccattctggcaaaccgaatcctgtacccaaaatacattggaaatytttttgtctttgaagcttagcttataaattttgagtatttttcactatgcctgctattctattctcaagtcctccttcttccaagaacctttccaatccacttctattttgaagggtttctcttctttttcttatttcatatcactctttgcagagccagtttcatatgaaactactacctctgcacaatatcatttctacctcaaacctctgaaaatggacttctattcctacaatcccaacaatgac

SEQ ID NO: 153717 - DNA, 595 bp, Homo sapiens
tacaggttcttctttgagtattcagcttaatactgatcagctcatgtgtgtgaggcaactacccaaggttgcagaaaagaaaactccaagaggattagagaggaaactcttggagctcaccaaaggcrccactaatggctattctcactagccaaagtagaaccttcataattcattaacattgggtaaaatattcagaagggtatagcttggtagtagagaaaaattagaactagactaaaagctgctctggtcccacctaaaaatgcttaaaagcaaaactccaagacattagaatattttcaaataactccatggtgttccagaacaaagctcaaaaatatttagataaacacaatacccaaactccaagaaagtgaaattcaaaatgcctgacgactaaaaaatatttcaaggccttataaaagctgaaatatcaattcataagaagaaaacaaaagatatgtatattaagcagttattaaaaatacatttccatgttaaaaattagagaaaaggtggtacatgttaaatataggtatggaaaatacgtataaggtcccaaatcacacttttgatcatagaatttataatg

SEQ ID NO: 153718 - DNA, 573 bp, Homo sapiens
cagcttaatactgatcagctcatgtgtgtgaggcaactacccaaggttgcagaaaagaaaactccaagaggattagagaggaaactcttggagctcaccaaaggcaccactaatggctattctcactagccaaagtagaaccttcataattcattaacattgggtaaaatattcagaagggtatagcttggtagtagagaaaaattagaactagactaaaagctgctctggtcccacctaaaaatgcttaaaagcaaaactccaagacattagaatattttcaaataactccatggtgttccagaacaaagctcaaaaatatttagataaacacaatacccaaactccaagaaagtgaaattcaaaatgcctgacgactaaaaaatatttcaaggccttataaaagctgaaatatcaattcataagaagaaaacaaaagatatgtatattaagcagttattaaaaatacatttccatgttaaaaattagagaaaaggtggtacatgttaaatataggtatggaaaataygtataaggtcccaaatcacacttttgatcatagaatttataatg

SEQ ID NO: 153719 - DNA, 573 bp, Homo sapiens
cagcttaatactgatcagctcatgtgtgtgaggcaactacccaaggttgcagaaaagaaaactccaagaggattagagaggaaactcttggagctcaccaaaggcaccactaatggctattctcactagccaaagtagaaccttcataattcattaacattgggtaaaatattcagaagggtatagcttggtagtagagaaaaattagaactagactaaaagctgctctggtcccacctaaaaatgcttaaaagcaaaactccaagacattagaatattttcaaataactccatggtgttccagaacaaagctcaaaaatatttagataaacacaatacccaaactccaagaaagtgaaattcaaaatgcctgacgactaaaaaatatttcaaggccttataaaagctgaaatatcaattcataagaagaaaacaaaagatatgtatattaagcagttattaaaaatacatttccatgttaaaaattagagaaaaggtggtacatgttaaatataggtatggaaaatacgtataaggtccmaaatcacacttttgatcatagaatttataatg

SEQ ID NO: 153720 - DNA, 489 bp, Homo sapiens
ttccagcttggttttgtataaattgacctggtgattcttaaattcatatgtatctatttgcgtgtgcgtgtgtgtaagcaccttgaattccgaaattaactttctatyataagaacaagggtgtgtaaacaccttgatttccaaaattaactttgtaaaagaacaaggttggggaatttacactagttgattcatgtcattattataatgctaccataatcaagttaatttggctttggtatcaagaggcacctatatcaatagaaagaaatgtcaagttcagaagtagacctccatccactcatgttaattaatttttgacacggtataaagaaaagtcactggagaatttcttctttcaaaaaagggctagaaaaaaatggtatatccatacagaaaaaaataatatatactgaaatccataccttgagccaaatttaaaaagtggaaatcaaaatagactgcaagcataaatttaaagacaaaagt

SEQ ID NO: 153721 - DNA, 489 bp, Homo sapiens
ttccagcttggttttgtataaattgacctggtgattcttaaattcatatgtatctatttgcgtgtgcgtgtgtgtaagcaccttgaattccgaaattaactttctatcataagaacaagggtgtgtaaacaccttgatttccaaaattaactttgtaaaagaacaaggttggggaatttacactagttgattcatgtcattattataatgctaccataatcaagttaatttggctttggtatcaagaggcacctatatcaatagaaagaaatgtcaagttcagaagtagacctccatccactcwtgttaattaatttttgacacggtataaagaaaagtcactggagaatttcttctttcaaaaaagggctagaaaaaaatggtatatccatacagaaaaaaataatatatactgaaatccataccttgagccaaatttaaaaagtggaaatcaaaatagactgcaagcataaatttaaagacaaaagt

SEQ ID NO: 153722 - DNA, 382 bp, Homo sapiens
attggccaagcttctctttgctgcacatgattcctgaatcacaggaaataactaagatgaggaggggagaaatcattggctttatgtgatattctgctttgtattagactggactgcacttttactaagtaaacagatttttctaattataraaattagctaatatatgctcaggaaagggataaaaaatgagagagaatacatttaagggcagtgaatattaaaatatataccatatttatttttaacctttctaatccagcccattaaaaaaaaaactggacaagttagcaagtctttctctttttcaacttttagattctaagtccaaagaaagcaggatttttttctagtcatctgacatctgataaagctgggcctc

SEQ ID NO: 153723 - DNA, 539 bp, Homo sapiens
cctatctttaatctcaggaatgaatggtgaaataaarcaggaaatacacatgcctcacatgaggtgaccgattttggagataaattacctaatttggccaagtcatttaattttatggaagagataagttaccgtgaaaagtgccttgccctatttccggaaaaaagaacactttgttcttgtagccataacctgatgctcacatctgacaacaactaaaagaaatggcacaacttagcctcttgaactgcagcaaccacaagagagcaaagaattggagaaataactgtgaaatgattgagtacaaatgaaccattgtatgaagcaattcagataagtattttgagtccagtataagaaataatgttttcagggaacattactttgactagtaattatgtaacttgtaacttatggtgctactgactctgacttttcagattttgtgagtaattttaacttagaaatatattgttgggaaaacacacagtttttagtaagtcaattagaaataatgaggaggttctcctaatagaatt

SEQ ID NO: 153724 - DNA, 539 bp, Homo sapiens
cctatctttaatctcaggaatgaatggtgaaataaagcaggaaatacacatgcctcacatgaggtgaccgattttggagataaattacctaatttggccaagtcatttaattttatggaagagataagttaccgtgaaaagtgccttgccctatttccggaaaaaagaacactttgttcttgtagccataacctgatgctcacatctgacaacaactaaaagaaatggcacaacttagcctcttgaactgcagcaaccacaagagarcaaagaattggagaaataactgtgaaatgattgagtacaaatgaaccattgtatgaagcaattcagataagtattttgagtccagtataagaaataatgttttcagggaacattactttgactagtaattatgtaacttgtaacttatggtgctactgactctgacttttcagattttgtgagtaattttaacttagaaatatattgttgggaaaacacacagtttttagtaagtcaattagaaataatgaggaggttctcctaatagaatt

SEQ ID NO: 153725 - DNA, 537 bp, Homo sapiens
acatgagtgttgggagtctgtcactgaagagatgaggccatgctgtagctaagcaatcttagagctttcagctgttaccctgaagaggtgaagccaacagactcatacatgttcagaaaccagggggctgtgaaaaaatacctcatgacaatctcctaggagaataggaaggcaggtagaaaacttctattgtaatttctatgcacaagtttcccatgatctcatgttccagaagaatcatggggcattctgtctaagacctacatcagccacagttaagacttggctgtgtagcgcatgcagcgatgtgcaaggttacaagggtgccatcgtggagtcaattctcccaggtccccaaacctcaatttccacagacaatacagtgaaacccagacgaatcctgcacagacattaggttgcactacagaaaaggactgagttaaggaaacctttttatggtgtgctccagcaaagatgtccacccttcatatggtttmgatgtttgccccctccaaatctcatgttgaaatgtgattc

SEQ ID NO: 153726 - DNA, 348 bp, Homo sapiens
tcctactcatcctcccctcagagattggatattcttctttaatcttaagaaggctgcagaagagcagaggtccatcttctgtgactgtgtctttctgagtttatgagcataggccctgcctagcaacagagaagtaaaaatctctagacacctaatccaggaggccccgaggtaggacattttttatcctctggatcagaaggcaggatgrgttggaagccttgtgccaacattgtctttacctggaactgctgtaatctagaagacacagacttttaagaggttaaacaagtaaaggcaaaaaattagtaacaagagagctatcagaggtcctagaagaggtaaaaa

SEQ ID NO: 153727 - DNA, 404 bp, Homo sapiens
atatactgccaaaagcagtctacaaattcaatgcaatstccatcaaaagaccaccatcattcttcacagaactagaaaaaagatcctaaaaatcatatggaaacaaaaaagagcctgcatagccaaagcaagactaagcaaaaagaacaaatctggaggcatcacattatccaacatcaaactatgctataaagccatagtcaccaaaacaccatggtactgacataaaaataggtatatagaccaatggaacagaatagagaacccagaataaagccaaatacttacagccaactgatgttggacaaagaaaacaaaaacataaagtgaagaaaggatatcctgttcaacaaaaggtgctgggaaaatcggcaagccacatgtagaagaatgaaactgggtcc

SEQ ID NO: 153728 - DNA, 617 bp, Homo sapiens
cctattattcccaaatgttccaacaacaaatctaaaaaacaaacaaacaaaacttttgaatactcttttgctcatgggtatgtatgagttctttaaatttgagaaatttactttgttctctcttatgtagatttcatattttctctttcttagccacttctcctgttccagtggttcgtattctcctatacctgtttcagaagaaaaatgtatgggacattaaattttagactttcaatcactgaaaagctcttcattttactctaaaayttgtctgacatttttctgggtctagaagtctagaatgacaagaagtttttgtcaaaaaatttaaagtgtatattttttatgttcagctaaatataaatatttcaaattatattttggcatgacattattgtgttaatattttcaaaatgtataataaaacatacacacactcacacatacacatatatagagagaaagagaaagtgagtgtcaaaaaagaaaagaacattactaaaatgagcaataataagcagtacaaataatagcaaatatgtatttgctaataacacatgcaaagatgtatgtgcacacactcaaaatctctaatttatatatatttgctagta

SEQ ID NO: 153729 - DNA, 617 bp, Homo sapiens
cctattattcccaaatgttccaacaacaaatctaaaaaacaaacaaacaaaacttttgaatactcttttgctcatgggtatgtatgagttctttaaatttgagaaatttactttgttctctcttatgtagatttcatattttctctttcttagccacttctcctgttccagtggttcgtattctcctatacctgtttcagaagaaaaatgtatgggacattaaattttagactttcaatcactgaaaagctcttcattttactctaaaacttgtctgacatttttctgggtctagaagtctagaatgacaagaagtttttgtcaaaaaatttaaagtgtataytttttatgttcagctaaatataaatatttcaaattatattttggcatgacattattgtgttaatattttcaaaatgtataataaaacatacacacactcacacatacacatatatagagagaaagagaaagtgagtgtcaaaaaagaaaagaacattactaaaatgagcaataataagcagtacaaataatagcaaatatgtatttgctaataacacatgcaaagatgtatgtgcacacactcaaaatctctaatttatatatatttgctagta

SEQ ID NO: 153730 - DNA, 626 bp, Homo sapiens
ctaactacctggagtgagtattggaccccacagattatgaactcactcttgcaagattgcccccattttagagaccaatcaccagtctcaggctttgcttacttctgactgaccaaatatacattgggacttcccatgaccccttctttgggtttgaaaatttgctaaaagagttcacagaactcagggaaaaccatttgctattaccattttattataaaggatactgctyaggaactgccaaacggaagacatgcatagggcaaggtatgggggaagagcaagggagtttacatgccctctctgggagcaccaccttcactaaacaaacttttatttactgattgcttgaaactgagctaggtaatatagccaatagagagaagaataaaatatgctccatgccttagagaagttcacagagtggtagagtgtactaggatacattatttttggaagctttcatcccccaggtgtacatggctacttgtataatttattttctgcgccagtgttttacaattaatcataaaaatatcatgtaggggacaacattcgtgaggccatagtataatcagtcatggcttagaatctcctgggctgagtaaatacatgtgagagtgaca

SEQ ID NO: 153731 - DNA, 626 bp, Homo sapiens
ctaactacctggagtgagtattggaccccacagattatgaactcactcttgcaagattgcccccattttagagaccaatcaccagtctcaggctttgcttacttctgactgaccaaatatacattgggacttcccatgaccccttctttgggtttgaaaatttgctaaaagagttcacagaactcagggaaaaccatttgctattaccattttattataaaggatactgcttaggaactgccaaayggaagacatgcatagggcaaggtatgggggaagagcaagggagtttacatgccctctctgggagcaccaccttcactaaacaaacttttatttactgattgcttgaaactgagctaggtaatatagccaatagagagaagaataaaatatgctccatgccttagagaagttcacagagtggtagagtgtactaggatacattatttttggaagctttcatcccccaggtgtacatggctacttgtataatttattttctgcgccagtgttttacaattaatcataaaaatatcatgtaggggacaacattcgtgaggccatagtataatcagtcatggcttagaatctcctgggctgagtaaatacatgtgagagtgaca

SEQ ID NO: 153732 - DNA, 579 bp, Homo sapiens
caccccggcattgctgttcaaagtaatattattgatatttatgaattgctaaatgatgaaagagcacaataatacgttatccttaatttcactccttcattctaccttaatgacataaaccataacttgtataaaagtaggtaaaaataagagaacctcaaagttsatttgagagagagagagagaaagaaagagaatatcatgctgtcccctgcagctaggacataaattcaaaacatatgcttcctctgttgcacctaatggatttcattataattcccttcaacaaatatttattgtctggtttctcaaattcaatcaattgatacttaacacagagtttaattgtattttccaccaccatgtaccttagagagaggtattattagactgaaatattaactttaataacataagaagcatattatgaaacagaaatctgtgccatggagttagtggcatttctttaaacatttattcagccaattggaaagaaagttctaagaacctcttgactaagtatcatgaatatataacagcaatacctagtgataggaacagttattaatgggaatacaa

SEQ ID NO: 153733 - DNA, 579 bp, Homo sapiens
caccccggcattgctgttcaaagtaatattattgatatttatgaattgctaaatgatgaaagagcacaataatacgttatccttaatttcactccttcattctaccttaatgacataaaccataacttgtataaaagtaggtaaaaataagagaacctcaaagttcatttgagagagagagagagaaagaaagagaatatcatgctgtcccctgcagctrggacataaattcaaaacatatgcttcctctgttgcacctaatggatttcattataattcccttcaacaaatatttattgtctggtttctcaaattcaatcaattgatacttaacacagagtttaattgtattttccaccaccatgtaccttagagagaggtattattagactgaaatattaactttaataacataagaagcatattatgaaacagaaatctgtgccatggagttagtggcatttctttaaacatttattcagccaattggaaagaaagttctaagaacctcttgactaagtatcatgaatatataacagcaatacctagtgataggaacagttattaatgggaatacaa

SEQ ID NO: 153734 - DNA, 579 bp, Homo sapiens
caccccggcattgctgttcaaagtaatattattgatatttatgaattgctaaatgatgaaagagcacaataatacgttatccttaatttcactccttcattctaccttaatgacataaaccataacttgtataaaagtaggtaaaaataagagaacctcaaagttcatttgagagagagagagagaaagaaagagaatatcatgctgtcccctgcagctaggacataaattcaaaacatatgcttcctctgttgcacctaatggatttcattataattccyttcaacaaatatttattgtctggtttctcaaattcaatcaattgatacttaacacagagtttaattgtattttccaccaccatgtaccttagagagaggtattattagactgaaatattaactttaataacataagaagcatattatgaaacagaaatctgtgccatggagttagtggcatttctttaaacatttattcagccaattggaaagaaagttctaagaacctcttgactaagtatcatgaatatataacagcaatacctagtgataggaacagttattaatgggaatacaa

SEQ ID NO: 153735 - DNA, 318 bp, Homo sapiens
aatactgtattgtatcttgaaattggtgaagaaagtagatctcaaatgttttaacacaaaaaatataaccatataaagagaatgatatgttacttaggttgattttaataattatttcacaatatatatgtatatcaaaacatcccattatataccttatatatatattcaatgtttgttaatcatatattaataaagctggaaatrtaaaatctctatttcaattcgaatttgcttcaaacatcagcattttttaaaacactagaaagaaagagaatatcataaagcttattgtataccctcgaaattcaagtcagg

SEQ ID NO: 153736 - DNA, 565 bp, Homo sapiens
gcagcaacccacaccaacggtatggcagaaaatgcatcttcagagagtaaaagggagagagtttgactccgtgatgtatattcccactggggagccaggcaacccaggccatgggagagatccttgaccttacccagtgcacactccactacaaaatttgttgactcaagtgcacagcccttgggactaagataagcttcttgagacttccacctccccatctctacaggaggccaagagcctactcacatccctggtacactgctactacaacaaacatttgagataataaccacattaaagctatctataaccaaggaattcatacagagccttggccctgtgagagcacccagaaacaaagtgaaatgactccactaaatatatataacaatcacaacttcaaagggggtggaaatagtatcatccaaatgagagaaaaataaaaaataaaaggtgatgtttgctcctaatgcaaaggaatcagtgcaataagtctggcagtatggaaaaaatagggtgtcayacttgctctctagcaatgaatcctaaacaaaatgaaaat

SEQ ID NO: 153737 - DNA, 629 bp, Homo sapiens
gcctaattttttgtattttttagtagagatggggtttcaccgtgttagccaggaaggtcttgatctcctgacctcatgatccgcccgccttggcctcccaaagtgttgggattacaggcatgagccaccgcgccyggcctgtgttgaccattttttaaaagccattaattttaatatatgaataaatttgtcctatgattttaagatatttgataagatttttagaggatatattgatattaatggctactaactagttaatagtaactgttaatatcaataatttttcagaaaattacgtgagatttattagcagatctacctcatgccaaaattaacctgcttttgagactgcgctttggggtgcttcatgatctctgttgatagtagtaataataataaatattgctaacttgtatgttttttaaaacttcttaatccagctttgtgatatatttcaccattgttctatggagaaaatagagatggcattaatcacattagtctcaaagtaagatttagaaagcttagagacatctaggatttactgaattactgcttgtgccaggtgttacggtaaatgtcacctatatggtccctcatttaaatccttcccagaaacctgtgag

SEQ ID NO: 153738 - DNA, 477 bp, Homo sapiens
agcttcagtagcagaatactacacatagaaaaatcccaaaactatttataagacctagacatgacatttttactctttttacctcagtttcatcttctccaaaataaaaggcttcatctagatgattatctaaaacatctgcttatctaaaacatctgcttatctaaaatagaaaataattcaagtaaatttccctgtacaaaaagaattaaaataataatctactctaaatttgaaactattcttattgtatacacacattcacttatcttccattccattttgcaggtatkacaacaattaataataaccaaaatgtattgcatgtttgccttgtttcaactattgttctgaacacattacatgtttgattttgtaattctcacaatagccctatgaggcaaatatgatgatgatgatgatggaattttacaaatgaggaagagaaagttctgtttgctcaaggtcaaacaacta

SEQ ID NO: 153739 - DNA, 556 bp, Homo sapiens
gtgaggatttctacagggttagggtgctgtgggttctgccttccactctctcatgacagagggcaggggctaggcttgcatctcatctaaagctatgtgagggcagcatcaaaaagtctattcatattttggcatgtgtccctttgagttcggacaaataaaatgttaccggattcctccccagggaattttaagtgagagtttgtgagtggagctccccctgctggtggcagagtgaaaaaagaggtctmctttgaggaaatggtttgtacttcagattttggtggggcaaaaatgagtcttctgtgggacaaatgtggacctgtggaaagggagtcattttaagagagattttgcctaagagtgcccctacatcatagggatgggaaataaagtaaccgcaaagaagggtggatttctggaaacttagggctgaagaaagggtcatacatttattattgtatcttcccactatctggggcacctgtattgctggagagaaaaagaaaccaagagaaaaagaaaacaaatgtaaaaatgcaactacaagaaaaag

SEQ ID NO: 153740 - DNA, 508 bp, Homo sapiens
gaattccttgaatgcccagatttgcacatacatgaatgtgtattaaaattacttagttaaaatatctggtttctaaatattctacatattccgctataatatttttaacttctaatttgattcttgtgttaataaaaacattatctgtcagtggaacatcaggcatgagaaatatagctagcaaggctgatatatatgaaaatgtgtgaattgatgaaaayagctctaatgattatgtaagaatactatttctaatgattagagtatgataaaaggggatactaaactctcaaagaatgtattacttttagaaagtccatacatcaaggcttgatgttattttcagaccacaaaagtattataatagtcactcagaaatctgagattagcccatctttaagcagtaaatctgaaaaaagcttgaaacaaaatcatctttgacttccatactccaataacatcagtaaactaactttcaaaactacagcaattaaatttacactgcaat

SEQ ID NO: 153741 - DNA, 534 bp, Homo sapiens
taacacactgttaacatggcttagatgaaagtttcgaaggcatctaacatccaaatgaaaaataaaaacttcagttgattcaaacattttaaaatactttggtaccaccaattatcattcctaaaagaaacttccactaaccctggctcccctctcatkttaggacttccttatttaacaacctccactgggaaaaacctgcagtgtcctctcacaggcttcacttcctgacttctatcccatgtaccaacctactgcagaaaccactaaaacttctctttccaaggagggcaaaggtttcctggtttcccttttgatctctttggaacagggtttctcaacttcagtgctattgattttttggacagagaattatttgttgtagggagaattctacattgtaggatgtttagcaacatctctggcctctgcaactaacatatgttaacatgtaatttcacagcatctaagcccttaattaacactaaacagcacaaacacaggtacattcttctagagatttaaaaaatgctt

SEQ ID NO: 153742 - DNA, 611 bp, Homo sapiens
aaaaaccacacacacacaaaaccctgtccttcttcttcagtgccccgccagggcttattttctttgcracagagtgtaggggagtttaggtcatcatacagacctgcccttggctctgcagaggtcagcacctttctcattttctttgcccacgtccctacatcagtctagcttgagttcatctctcatctctctaatgaagcctcctctgaccacattatttaatacttagcctgcccccacaagctccctcgacatgcctaccttgctctactttttctgttccctacgctcccaacacataaaacatttatttcctgttaatataacataaaataacctttacattttgatgatgatttactgtctgtctccgtccccactccagttcccaggatataaactctacaggggtggacatttttatgttccttggaaagtggaatatccaatcatcttgctggattttctacacaatatccaaccactggtttgcattatattttaaattctgatggtatgatcactgcccaaataatctactcacaaaaagaaattagttaagccagctgtttattgtcctactgacctgtgctgtacaatgtagtagc

SEQ ID NO: 153743 - DNA, 586 bp, Homo sapiens
cagtgtaatcaacccaccttctattccgattccaaaaggcttttactgggtgcctgccatgtggcaggttttattctagatgctgtgaatagaggttgatgatgagtggttggtttggccctagcgtagctcagcaactataaaagagtgcaaaccatgccttaaaaagctgaggctttagctccaggcgcagctggctccgaggcgggggttgcaggcagcggtaaccgggcctgaaccgtgcaggagacagttcggagtttcccagaaaacagcttgctcaatacggggtatcagttttcctcccggcactttccgccttgtaccgagataactgaatcagtaacgcagaactcagctcattctattgttggggaatcccaaaaacaccccaagggagagaaagacaaagtgctgcacaaagagactcgcagtcggcgtccgccctcgcttgamcgcgtcccccttgcgcccggggggcgctgcgctccctccaggagaggacgctgcgtctaagtctaagagcctccagtggaaagtcccggaagccctcccctgggcttgagatttttgctggctgaaatgg

SEQ ID NO: 153744 - DNA, 468 bp, Homo sapiens
tcattctctcttgcctgccaccaggtaagacgtgccttttgccttccaccttctgccgtgattgtgaggacccgccagccacgtggaactgtgagtccattaaacttctttttctttataaattatctagtgktgggtatgtctttatcagcagcatgaaaacggactaatacactatctcttgtgcctgatctgctaggcttccccacctcctgccccaccctcccctccactctccctgctccctagtcctcctctccctctttctccactctctccttgtcacatcatatctgagggtagaaattactttcagtttttttttttttttaaaggaaacttaggaacacgtgaaatgtttttcttcttcttgagttgtttaatttggtttaacaaatgttaattgagcacaggctgccaggcaggagatacaaaggtaaataatatgaggtccttgtcctcacgtta

SEQ ID NO: 153745 - DNA, 468 bp, Homo sapiens
tcattctctcttgcctgccaccaggtaagacgtgccttttgccttccaccttctgccgtgattgtgaggacccgccagccacgtggaactgtgagtccattaaacttctttttctttataaattatctagtggygggtatgtctttatcagcagcatgaaaacggactaatacactatctcttgtgcctgatctgctaggcttccccacctcctgccccaccctcccctccactctccctgctccctagtcctcctctccctctttctccactctctccttgtcacatcatatctgagggtagaaattactttcagtttttttttttttttaaaggaaacttaggaacacgtgaaatgtttttcttcttcttgagttgtttaatttggtttaacaaatgttaattgagcacaggctgccaggcaggagatacaaaggtaaataatatgaggtccttgtcctcacgtta

SEQ ID NO: 153746 - DNA, 468 bp, Homo sapiens
tcattctctcttgcctgccaccaggtaagacgtgccttttgccttccaccttctgccgtgattgtgaggacccgccagccacgtggaactgtgagtccattaaacttctttttctttataaattatctagtggtgggtatgtctttatcagcagcatgaaaacggactaatacactatctcttgtgcctgatctgctaggcttccccacytcctgccccaccctcccctccactctccctgctccctagtcctcctctccctctttctccactctctccttgtcacatcatatctgagggtagaaattactttcagtttttttttttttttaaaggaaacttaggaacacgtgaaatgtttttcttcttcttgagttgtttaatttggtttaacaaatgttaattgagcacaggctgccaggcaggagatacaaaggtaaataatatgaggtccttgtcctcacgtta

SEQ ID NO: 153747 - DNA, 468 bp, Homo sapiens
tcattctctcttgcctgccaccaggtaagacgtgccttttgccttccaccttctgccgtgattgtgaggacccgccagccacgtggaactgtgagtccattaaacttctttttctttataaattatctagtggtgggtatgtctttatcagcagcatgaaaacggactaatacactatctcttgtgcctgatctgctaggcttccccacctcctgccccaccctcccctccactctccctgctccctagtcctcctctccctctttctccactctctccttgtcacatcatatctgagggtagaaattactttcagtttttttttttttttaaaggaaacttaggaacacgtgaaatgtttttcttcttcttgagttgtttaatttggtttaacaaatgttaattgagcacaggctgccaggcaggagatacaaaggtaaataataygaggtccttgtcctcacgtta

SEQ ID NO: 153748 - DNA, 577 bp, Homo sapiens
ggtattggtgttgagatcaataaatagatcaatggaacaaaatagaaagtccagaaacagacccatgcatatatggaaagctgattttgagaaaggtacaaaggcaagtctatggagaaacaacagtcttttcagcagatttggaggcaaaacttcattagatatgttatagagtattagatagattgcaagtttgtaaatgtaaatgctgaaataattagatatccaaataacttataacaaataaagttcaagccatactccaaactatatacaaaaaccaaaaygtctcaatttaaataatgggcaaaatatttgaatagatacttcaccataaaagatatacagatgacaaataaatgcaccaaaaaatgctcaacatcatttgtcattagaaaaatacaaattaaaccccctatcagatatactacatgcctagtgcagtagctaaaatgaaaaagactgaccctaccaagtgttgtcaagaaagtaaagcaagcggaactctcagacgctgttggtgagaatgtgaaatggtaaaaccactttggaaaacagtttgaccgttttttataat

SEQ ID NO: 153749 - DNA, 577 bp, Homo sapiens
ggtattggtgttgagatcaataaatagatcaatggaacaaaatagaaagtccagaaacagacccatgcatatatggaaagctgattttgagaaaggtacaaaggcaagtctatggagaaacaacagtcttttcagcagatttggaggcaaaacttcattagatatgttatagagtattagatagattgcaagtttgtaaatgtaaatgctgaaataattagatatccaaataacttataacaaataaagttcaagccatactccaaactatatacaaaaaccaaaacgtctcaatttaaataatgggcaaaatatttgaatagatacttcaccataaaagatatacagatgacaaataaatgcaccaaaaaatgctcaacatcatttgtcattagaaaaatacaaattaaaccccctatcagatatactacatgcctagtgcartagctaaaatgaaaaagactgaccctaccaagtgttgtcaagaaagtaaagcaagcggaactctcagacgctgttggtgagaatgtgaaatggtaaaaccactttggaaaacagtttgaccgttttttataat

SEQ ID NO: 153750 - DNA, 538 bp, Homo sapiens
tgcatttagccattaaaataaaattgattaccatggtcataaagcttacaaagcaatgagatactttatggttttcagatttctttacataatcattttcctcagtcttctttctctatccttttcttttcaagaacaaaaacaactggtgatattcctaggacaagtcctatatatttgtctgtctgtctgtctgtctgcctatctatctatctatctatctatctatctatctatctatctatctatctatctatcaggtcttgctttgttgcccaggctggagtgcagtggcgcgatctcagctcactgcaacctccgcctcccaggttcaggcaattctcctgccttggcctccagagtagctgggattacaggtacctgccaccatgcctggctaatttttgtrtttttaatagagatgggatttcaccatattgtccaggcttgtctcaaactcctgacctcaggtgatccaccctcctcgacctcccaaagtgctgggattacaggcatgagccaccactcccagcctcac

SEQ ID NO: 153751 - DNA, 580 bp, Homo sapiens
ctacagtggcatccatggattctggttcttctgcttcttctctcttaatcaatggattctggttttcctgcttcttctctcttatccatggattctggttctcctgtttctctcttgtctaatcatttccatttcaagtcttctagtttggtaagtgcatttcttgagccattctaataagagggacttaagactgaactttattcaattataccttcttctatgcctggtagttgcctcagctctgtccgaatcccatattggggataacttgccccagtgtatgcatgtaaacagcttatttctttaatgctggcattctaattctggatatatagcttaacacccatgtttagttaactaaagtgattataaatcagaacatctcttyttgttctcatggtttaaaaatctgaagcccaacagaacacagacaggcaactaacaacactgaattcctaaggtaaaacagattctgacctttcacaaaaggacttggatgaattacaaggagggtagcattagctaatgtttcaatgtaatgttccaatgatgaggcagtttctagaaaggcccttag

SEQ ID NO: 153752 - DNA, 594 bp, Homo sapiens
tgttgtcaaacacactaaacaaacttaaacacactgttttcactacaaacagtaaaagaaaaaaaagaaatgcttgctaagtaatttttgaattgaaattgctatctcagtaatccattctgtcactgtgttttaattttgagtattcaatcacagtccaacacagacatatcattatttggctctgggaaaagaaaatccrtggcactgataaatgaagttacctgcaagagacttggtattacaatgaatttggttaacttgagataatttgatttagaagtacacttaaacaataacacattttactcttttaggggtttgtaatgcttcatttcccagcgaaaactattaacataagaaaggttatgattgctctacaagagtcagaaatagtaaacctatttctacagcaagagtataaggtccataagtccattggtttactttttagtaatttactgctttataatacactttttatatttaattttgaaatctgtattagggaaaatgacacaagaaattatctactgaaattgtaaattacctaacttcagtttgcataaatatcagacaattacatcactatta

SEQ ID NO: 153753 - DNA, 594 bp, Homo sapiens
tgttgtcaaacacactaaacaaacttaaacacactgttttcactacaaacagtaaaagaaaaaaaagaaatgcttgctaagtaatttttgaattgaaattgctatctcagtaatccattctgtcactgtgttttaattttgagtattcaatcacagtccaacacagacatatcattatttggctctgggaaaagaaaatccatggcactgataaatgaagttacctgcaagagacttggtattacaatgaatttggttaacttgagataatttgatttagaagtacacttaaacaataacacattttactcttttaggggtttgtaatgcttcatttcccagcgaaaactattaacataagaaaggttatgattgctctacaagagtcagaaatagtaaacctatttctacagcaagagtataaggtccrtaagtccattggtttactttttagtaatttactgctttataatacactttttatatttaattttgaaatctgtattagggaaaatgacacaagaaattatctactgaaattgtaaattacctaacttcagtttgcataaatatcagacaattacatcactatta

SEQ ID NO: 153754 - DNA, 582 bp, Homo sapiens
gaccttcaccacagccccttccatcacaggtcgggtggcctaggagggaaaagtggttttgtgggctgggcccagggcccccctgttctatgcaacctcaggacattataaaggaattataaagacctcaggaattataaagacctcaggtattataaagacatgagatttgggagggggtacagtgatatggttgggccgtgccctggatcccagctgcttcagctccagctgtaactaaaagaatccagtgtacagcttgggctattgcttcagaaggtgcaagccccaagccttggcagctttcacattgtgttgggcctgtgggtrtgcagaagacaagaattgatgtttgggaatctctgcctagatttcagatgatatatggaaacacctggatgtccaggcagaagtctgctgtagggacagggccttcatggagaacctctgctatggcagtgtggaagggaaatgtggggttggagtccccatacaaagtccccactgggcattgcctagtggagctgtgagaagagggccactgttctccagaccctagaatggtaaattcagtgacagctt

SEQ ID NO: 153755 - DNA, 582 bp, Homo sapiens
gaccttcaccacagccccttccatcacaggtcgggtggcctaggagggaaaagtggttttgtgggctgggcccagggcccccctgttctatgcaacctcaggacattataaaggaattataaagacctcaggaattataaagacctcaggtattataaagacatgagatttgggagggggtacagtgatatggttgggccgtgccctggatcccagctgcttcagctccagctgtaactaaaagaatccagtgtacagcttgggctattgcttcagaaggtgcaagccccaagccttggcagctttcacattgtgttgggcctgtgggtgtgcagaagacargaattgatgtttgggaatctctgcctagatttcagatgatatatggaaacacctggatgtccaggcagaagtctgctgtagggacagggccttcatggagaacctctgctatggcagtgtggaagggaaatgtggggttggagtccccatacaaagtccccactgggcattgcctagtggagctgtgagaagagggccactgttctccagaccctagaatggtaaattcagtgacagctt

SEQ ID NO: 153756 - DNA, 248 bp, Homo sapiens
cagggtcttgctctgtcacccacactctggagtgcagaggcgcaatcacggctcactgcagccttgacctcctggactaaaatgattctcccacctcagcctcgtgagtagctrggactacaggcacaagccactatacccggccaaattttattttttgtagagatggggtttcaccacgtgtctcagactggtctcaaactcctaggctcaagcaattctcctgccttgccttcccaaaatgctgg

SEQ ID NO: 153757 - DNA, 579 bp, Homo sapiens
aagcttcaatttatagtttggctatgattttcttatttctatgttaagtaacttatagaaagagctaaaataaattgaatgagatggaaattttataattaatcatatcagctaccagatggccccactaaatggaagagttgattttaggtaatgacctggaaatggccttttttttccctctacatacagacaactgataacatgaccaagatgaattttgtttttgttttaaagaggaaaggagaacggctgactcacggtgttcttccattcttggataactaactggaattcctttagagaccagcagagagtagaaagtgattgtcttctgtctcgcactcgcactgttatgattcaaactgtctttcgggatccaagcctttttttcccctttctttctaatacattttttattagaaatagctgttagaaggtgattcaatttcagaaaggctttcyattttcttgacttttcagtattctatcccacttgtctgtttgcttttacagtgtcagttttttaaatatatctctgtaaagtaggggaatgcagggccagagacagaaggataa

SEQ ID NO: 153758 - DNA, 475 bp, Homo sapiens
aatgacatttctgggagtaaaactactaaaaattatatcttaaaagtttctagtagtatraagttcccaggccaggcgcagtggctcacgcctgtaatcccaacactttaggagggcgaggtgggcagatcacctgaggtcaggagtttgagaccagcctggccaacatggtgaaactccatctctactaaaaatacaaaaattagccgggcatgatggcaggcacctgtaatctaagctactcgggaggctgaggcaagagaatctcttgaacccaggaggcaaaggttgcagtgagccaagatcacgccatcgcactccagcctgggagattgagcaacttcgtctcaaaaaaaagtttccaggaaagatctttgggtcctactaagcgtctcaattttgagttatgaatactttggttcagggaagtaacctgacatttggttttgctggaattagggttttcgctagattt

SEQ ID NO: 153759 - DNA, 470 bp, Homo sapiens
catttctgggagtaaaactactaaaaattatatcttaaaagtttctagtagtatgaagttcccaggccaggcgcagtggctcaygcctgtaatcccaacactttaggagggcgaggtgggcagatcacctgaggtcaggagtttgagaccagcctggccaacatggtgaaactccatctctactaaaaatacaaaaattagccgggcatgatggcaggcacctgtaatctaagctactcgggaggctgaggcaagagaatctcttgaacccaggaggcaaaggttgcagtgagccaagatcacgccatcgcactccagcctgggagattgagcaacttcgtctcaaaaaaaagtttccaggaaagatctttgggtcctactaagcgtctcaattttgagttatgaatactttggttcagggaagtaacctgacatttggttttgctggaattagggttttcgctagattt

SEQ ID NO: 153760 - DNA, 257 bp, Homo sapiens
gagctgaggaggtggccttggtgggtgaaccagggagaaggggctacttcctctcccctaactgaaaactaacagccaaggtgtgatgacacagaagccagatgaggaaatgtcatgaaggagaaagacaataactatttcaaatgctgctgagaggtaacggaaaatgargacttacatacatgcccattggacttggcaacatgagctcatctgtgaccttagcatgaactatttggttcagtggtggggatgga

SEQ ID NO: 153761 - DNA, 405 bp, Homo sapiens
gcttagaacaacacctggcacataagaagtgctatattcatggttacccgtgttattattattattattattaattattattttgagacgaagtctcatgcccaggctggagtgcaatggcacaatcttggctcactacaaactccgcctcccaggttcaagcaattctcctgcctcggcctcctgagtagctgggattacaggcatgcaccaccttgcccagctaattttgtatttttagtagagacggagtttctccatgttggtcaggctagtctcgaactcccagcctcaggtgatccacccacctcrgcctcccagaatgctgggattacagacatgagccaccacacctggctagttgcctgtgttattatcgggaaacaatagcaacttccccatgga

SEQ ID NO: 153762 - DNA, 428 bp, Homo sapiens
tactattatactcatttctttctgcagctagtgaaataaactagaaataaaacacttctgtgggtgcttaaaaatgttgtggaccctaggcaccgtgtgtgctgcagctggtagataagctgggcctgggtgcggactgtggttttcaggtgctggaagctctctccaccctcaggtttattcattgccatctcttgagtcttctgaaatcttcacagactagaatctggccctccccacacagttattgcctgacacattagccagtacccttaggagaaaatgagcccccagcccaaataggccggcaattwgaaaagcttgtaatataagaaccaagtagaagtattagttaggagcttgtactctgattaaagaacacaatagatggataaatagcaggatgattacaacctagaaatgaattc

SEQ ID NO: 153763 - DNA, 474 bp, Homo sapiens
cccgaagagcttgtatttattgagctgtgtctatcaacatagcggcattgttttatatttttataaatctctttaatgtgcagctgagtagaaggcagctggattcttatatctgcttttgcattaaatactttaagatatgctttggtcaaagcatatgacgraaagccagcatcacagagatatgcagttggaaaagcgaggacctcatggatcctgtgttaggcagcctctaagatgtctcccggtgatcctgccccccaacattcatatccttgtgtaaacccctcccctcctatgtgggctggacctagtgatttggttctaaggaatacatatggcaaaagtggtgagatatcactttgacgattacattacaataagactggctttttggaactgaaggagacctctggcccatatccagcgaggaactgaatcctgccaacaaccacggcaatgcgtttggaagga

SEQ ID NO: 153764 - DNA, 474 bp, Homo sapiens
cccgaagagcttgtatttattgagctgtgtctatcaacatagcggcattgttttatatttttataaatctctttaatgtgcagctgagtagaaggcagctggattcttatatctgcttttgcattaaatactttaagatatgctttggtcaaagcatatgacggaaagccagcatcacagagatatgcagttggaaaagcgaggacctcatggatcctgtgttaggcagcctctaagatgtctcccrgtgatcctgccccccaacattcatatccttgtgtaaacccctcccctcctatgtgggctggacctagtgatttggttctaaggaatacatatggcaaaagtggtgagatatcactttgacgattacattacaataagactggctttttggaactgaaggagacctctggcccatatccagcgaggaactgaatcctgccaacaaccacggcaatgcgtttggaagga

SEQ ID NO: 153765 - DNA, 490 bp, Homo sapiens
acccatcccatctcctcccttccccaacagagccctccttaggtatggtccatcccacattcctgagtcactcacttattcactcaacaaacacaaactgagctcctatttaacaccagatccagggcagagcctcttcatatctgtcaaaagtgacagagacagataaggcccattcttgctcctgtgggagttctgtggcttgagtgtccaggccgcatctgtgtatgttttggtgccagagtcttcaagaaaagccattcctgagagctttaagaactccaggatagggtaagggaaagtttgaagtaaagcgagatgaaacaaaacaaaacaaacagacaraaaacaaacaaacaaaaaaaccaaacaagcaaaacaaaacaaaacaaacaaacaaaaaaaatagatgaccttgaagtagagaagatatctctgggaggaaaaataacagtacggtccccaaatagtacattaatatcatttcagt

SEQ ID NO: 153766 - DNA, 537 bp, Homo sapiens
ctgcaagatgtcagagtacctggaaaccgaagaactttctataagaagtgtggtacacatcagcctcacagagccacccggtataagaagggcaaggattccctgagtgcccagagaargagtgctgtgatgggaaacagagtggcaatggtgggcaaacaaagccagttttccagaggaaggctaacatcaccaagagctttgtgccaaggctggaacatgtcgcacccaactgcagatcaagaggatgctggctattcagagatacgagcactttgagctgggaggagataagaggagaaagagccaagtgatccagttctaaacttcaggacttttttgttcttttaattttgaggaagtgacgtgtggggaaatacaaagataatcttactaaaggtcacatggtgctacatgcagagaagaaggataaagtgtcagaaagggagagagagtgagaggaggtgccatgtttcacggagtgtaagggaggacttctctgaagctaaacttcaaagtgagatctgaagacagcaa

SEQ ID NO: 153767 - DNA, 537 bp, Homo sapiens
ctgcaagatgtcagagtacctggaaaccgaagaactttctataagaagtgtggtacacatcagcctcacagagccacccggtataagaagggcaaggattccctgagtgcccagagaaggagtgctgtgatgggaracagagtggcaatggtgggcaaacaaagccagttttccagaggaaggctaacatcaccaagagctttgtgccaaggctggaacatgtcgcacccaactgcagatcaagaggatgctggctattcagagatacgagcactttgagctgggaggagataagaggagaaagagccaagtgatccagttctaaacttcaggacttttttgttcttttaattttgaggaagtgacgtgtggggaaatacaaagataatcttactaaaggtcacatggtgctacatgcagagaagaaggataaagtgtcagaaagggagagagagtgagaggaggtgccatgtttcacggagtgtaagggaggacttctctgaagctaaacttcaaagtgagatctgaagacagcaa

SEQ ID NO: 153768 - DNA, 583 bp, Homo sapiens
aatcccaactaccttgaaggctagtgaggcaccatgaccttgggcaagtgcttgaacatttctgggccttggtttccttgcctgtaaaactaggacaataataataatacccatttcatgacatcgttgtgaggattgagattgtgtgtataacaggcatgtgtacagcaatatgtgcaatmcatgtttgcacacacgcctgggtgcagtgagtgtttatagaagggggctgctgctgctatttataggagaggtggccctcagtcttgacggatggaagagcatgccccaagggtaacagcctgagcaaaggtgcagaggcaagactgggcaaaacttatttagcaaaaaacaaagaagtttatcctgttccacatgggtaggaggtcagcagaggttagggaactagccagggtctcccagagactccgaggcagaaggaacctaggccctctgtgttatggctatgtccttttccctgttccacactgccccacgtggggttcagtcttttcttagaaagaatgaagaagtggaaacaggttgcaggaggacgggacccagctttggtctggctgtacca

SEQ ID NO: 153769 - DNA, 405 bp, Homo sapiens
tttgcacagatgcccaatgggctagtgatggccctgcatctgccctgttcacactgaattcctagcagttagcaccatgtctggtaggtgttcaagaaatatttgctgaatgaattgaaggtatatctagagggtagacccaaatgcatacacagagatacccacgatacacacacgcgcrcacacacacacacacacacacacacacacggaaaccctcatgaaatcatgaggacagaggggacctggggaagggtgtggggtgaggagaagtgcaggcagaggggagctgagtgccaaagctgggcagatcctgagtattcagagaaacaggggagggtgctcaagcagggaggacacaggagcaacaggaggaaaggcatagaggacccaaagtccaggagg

SEQ ID NO: 153770 - DNA, 597 bp, Homo sapiens
aagttttctctatgtctttccatagcttgatagctcatttctaagtgatgaataatatcccaytggctggatacactatagtttatctactcacctactgaaggacatcttgattgcttctaagttttatcagttacgagcaaggctgttataacatctgagtataggtttttttgtgggtgtaattttcaattcatatggataaataccaaggagcatgattgctgagtcctatggtaagattatgtttaattttgtgaggcactgctagacttttttccaaagtggttttaccattttgcattcctaccagcaatgaatgagagttcctgttgtttcacatcctcatcacatttggtgttgtcagttttggattttggcagttttaatgggtgtgtagtattatctcatgtgattgacttttgtatattaatcttgtatcctgccaccttgctataatcacttactaatttcaggagttcgttagttcttttggattttctatataaacagtcttgtcatcgaacaaagttttgtttcttccttcccaatcagtgtactttttatttccttttcctgtcttatttcattagctaa

SEQ ID NO: 153771 - DNA, 513 bp, Homo sapiens
gaattcaatcagttcctaaagcagttgctatgataaggttacatttctaattaatcagatataagggacagagaagacagtttgcctctgaaatctgaataaatcctaagyctcatgtagtccagtctattcagagattcaatttaaaaatgcatggtacaacagccaaactaaataaaaataaaatttaaattgtcacttgtttcctgatgcaaacccaatcataagtcagtatatcagttctcaaagttcccttccccgttttctaccttacagccttccagcatatctaacatctctcattcaacaaaactctaaaatatcccagaatcccagacacccaccctgtaccacttttctgattctctccccgctcagcttttattctgttgatcagagaagtctctctgacttcttaaattttctcttcactttgcacattacagctgagagcccagagctggaagaacaaagagccctcctccctttctcctttctttccaaccctgtcca

SEQ ID NO: 153772 - DNA, 436 bp, Homo sapiens
aaatatcacagggcctttggtgttcagcctgtgacatcctttctgacaacaaatgaagggacaatggagacctccccctgaaacccagactaaaaccaattggcaccattcagacctgatgggtgggtgagtctccctttgtccaatttcaacttgmtacttttttttcccctttgattttggctcctctgtcctttcctatgttcgttattttagacaggtggggaagtggctgtgagacctctggcttggtagcctgattgcagtcttctgttgtgtgggtgccccagacatgcagcatgcctggcaagtcatgtcctttgtaacccaccttgtcatcccttctcttgaacccaaaagtcaaagagatcagataatgcaatgcaaaacagagcaaagccttagattttgagaggaatctatctacttagaattc

SEQ ID NO: 153773 - DNA, 514 bp, Homo sapiens
ccactatgttgtccaggctggcctcaaacttctgggctcaagtgatgcaaccaccttggcctyccaaagtactgggattacaggtgtgagccactgtgcctggctcaaattttctatttctttgtgacccccaaataagaagtattaaaatgttttatacatatcatgcattcgctaaacatgatctgacatggaaaatttttttatgtcctgaatgtaataagaactctgaacacattgcatactgtaaaggagaaaaagaaatactatattttcctcatccatagcaaggctgatggccgagacctctctaacaatgacatattaacaacaaaaaaaagcaaacaaatttatttaatataagttttatgtgacatgggagttttgataaatgaagacccaaagaaatggaaaaaatctgtgtatttttatggatagttgtgcagaagtatgatttgaggacaaaagggtatgatctaatggtaaaaaactgggggtactttaggaaagcctg

SEQ ID NO: 153774 - DNA, 549 bp, Homo sapiens
  misc_feature (1)...(549): n = A,T,C or G
tggaaatgatccctattgttttgtggagtttcatgagcatcgtcatgcagctgcagcattagctgctatgaatggacggaagataatgggtaaggtaagctgtcgtaattaaagaaggtgacttgcactgaaaaaatttaagttatatatgattttgtttcctttttagaaacattaaacactttttttttttttttgagatgaaattttgcccttgttgcccaatctggagtgcaatggcrcagtcttggctcactgcaacctctgcctcctgggttcaagtgattctcctgcctcagcctccctagtagctgggattacaggaacgcaccaccacacccagctaatttttcgtatttttagtagaaatgaggtttcaccatgttagccagactggtctcaaactcctgacctcaggtgatctgcctgcctcggcttcgcaaagtgttgggattatagatgtgagccaccgcgcctggctgaaacattaaacactttatagcaaaaggtcagttattgacatataatattaaaaaggtaggatcannn

SEQ ID NO: 153775 - DNA, 583 bp, Homo sapiens
gctgctgcctcatcccctggtcctgatgttggcatgaggcgatgtttaagatgcctgccctggagcttccctgcctgggttcagatccaaggtcccactgcctgccccagtcatggtaagccagatgatttctctaaagctcagcttcctcatctgcaaagtggtcatgatggtatcctacctccactcatccaagcagtagggcagtgggggtacaggaaaccagctgggaggctactgcaatagtccaagcgagttctggcggtggccagcctgacacacaggtgtgaggatcaggcatgcactggacttccagggatgagttcacacccwctcactgccacacccttactcctgccgcttctgattgtctaagcttctggggcccagaccccattttctgccccaggagccggaagaaaggatacatttcattcaccagaccccgctggagtcttgacctctcagaacctgactggcttccatgtggtttgggaccttggggtgtacaggcatgagatgcattgtgccctgagcccactgccggctggcaccaaggacctttggaggctttggggtgatc

SEQ ID NO: 153776 - DNA, 583 bp, Homo sapiens
gctgctgcctcatcccctggtcctgatgttggcatgaggcgatgtttaagatgcctgccctggagcttccctgcctgggttcagatccaaggtcccactgcctgccccagtcatggtaagccagatgatttctctaaagctcagcttcctcatctgcaaagtggtcatgatggtatcctacctccactcatccaagcagtagggcagtgggggtacaggaaaccagctgggaggctactgcaatagtccaagcgagttctggcggtggccagcctgacacacaggtgtgaggatcaggcatgcactggacttccagggatgagttcacaccctctcactgccacacccttactcctgccgcttctgattgtctaakcttctggggcccagaccccattttctgccccaggagccggaagaaaggatacatttcattcaccagaccccgctggagtcttgacctctcagaacctgactggcttccatgtggtttgggaccttggggtgtacaggcatgagatgcattgtgccctgagcccactgccggctggcaccaaggacctttggaggctttggggtgatc

SEQ ID NO: 153777 - DNA, 583 bp, Homo sapiens
gctgctgcctcatcccctggtcctgatgttggcatgaggcgatgtttaagatgcctgccctggagcttccctgcctgggttcagatccaaggtcccactgcctgccccagtcatggtaagccagatgatttctctaaagctcagcttcctcatctgcaaagtggtcatgatggtatcctacctccactcatccaagcagtagggcagtgggggtacaggaaaccagctgggaggctactgcaatagtccaagcgagttctggcggtggccagcctgacacacaggtgtgaggatcaggcatgcactggacttccagggatgagttcacaccctctcactgccacacccttactcctgccgcttctgattgtctaagyttctggggcccagaccccattttctgccccaggagccggaagaaaggatacatttcattcaccagaccccgctggagtcttgacctctcagaacctgactggcttccatgtggtttgggaccttggggtgtacaggcatgagatgcattgtgccctgagcccactgccggctggcaccaaggacctttggaggctttggggtgatc

SEQ ID NO: 153778 - DNA, 613 bp, Homo sapiens
aagctttctggatgaaaagccaggatgtctgtcctctgagcagcctcagccaccaatgtgacttataagtcatttccctcattggtcctcattttctcattgtaaaatgaggcagctgcaacttgaatctctgttccagcactcacgccctccatttctgggattccaagaccagggctgaaatagaagaagtgacaggtcaggggttgggaggttgtggaaggccatggagaggagaggggatctgaaaactccgaggagatctgattgcctgtcttgggcaaaggacgatggctccgacccttggtggtaaatcacagggtccgaggtgcagaggaacctkggtttgagtccctgcctatcagaagagaaaccagcaatatgatggagggcttcatgcgccaggcacagtgtgacgctcactcactgcaccatcccattctgtcctctcatctgtcatgtcatcttgccactatgatcacctccacattacagaagagaaaaccaggcctcagagaagttaagtgacttgtctaaggtcacatagcactgagtaatgtcatcgagatttgaagccactgcctgaactgccatacaattcttgtgtcttttg

SEQ ID NO: 153779 - DNA, 547 bp, Homo sapiens
tctggaatggagactttattctctggaaaccctcctgcctccagagagagcctggggctggggtgtgaggtggccatggccttttctgcttacccagaggtttgtggtggggaatggaatgtagggaaagagatgctgtgagccctgctggagcctatgcgtggggtgtgtcagggactctgagatgtccacctcagccctgaaatcatcttcaaggagaggggtttacatggggaccaggaggaccttgcaggactggccttatcctcttgggcccacttcctaagggggtgcccccaggaccaagggtgggagaaacaggccatctgtattaatccgttctcacactgctataaagaaatacmtgaaactgggtaactaaaagactcacagttaggcatggctagggaggcctcaggcaacttacaatcatggcggaaggcacctcttcactgggtggcaggagagagaggcgagtgtgagcacaggaaaaactaccatttataaaaccattagatcccgtgagaattcactcactatcatgaga

SEQ ID NO: 153780 - DNA, 452 bp, Homo sapiens
tttttccacagacagggagcaaggatagtttcaggatgattcaaatgcattacatttattgtgaattttatttctattattattacattgtaatatataatgagacaattatacaactcactataaggtagaatcagtgggagccctgagcttgtttttctgcaactaggcggtcccatctgggggtgatgggagacagtgacagatcatcaggcattagattctcataagaagcatgcaacctagatccttcacatgcgcggttcgcaatagggttcatactcstatgagaattgaatgctgccactgatctgacaggaggtggagctcaggtggtaatgcaagcaatgaggagcagctgtgaatacagatgaagcttcactcacatgcctcctactgtgcagcccagttcctcacaggcagctagtaagatctgtgtcctgggggttggg

SEQ ID NO: 153781 - DNA, 531 bp, Homo sapiens
tgggaatatgtgtgtaggttacatgcaaatactatgtcattttgcatcagagatcaatggattttggtatttgagggaggccatggaaccaaacccgtggataccaagggacaactgtatcaggaaagagaaattgattgattagggtagaagagaaaaatatatgctgtttgtgagattagacaccattccaattttctctcttaacagaacttgaaattttttgtgtgccctgtattactcaatctaatgattcagcrtagttcactacttgccagtgctttaatacacagatgatatgctgacacttttaaagggtgaatgctaggctggaataatgtctattcttactttcccagaacctacatcttgttgtcaattggctcatgctaacatgcctgtccaagatgcaatgtggtttggaggaaaagtatgtaacagcatcacactggggctctaaatggctatttaattactaagaaatgttgaacattcagtttatacattttttaattcaatgagaatgtcatc

SEQ ID NO: 153782 - DNA, 643 bp, Homo sapiens
tggttcccttcaaactccactgcatatatttccaggagtttttcctgagcctctgcacccctaggcacttcaggtagtaataaatctctgctagcccctttgcggatttcaaaagcatttaatatgaaatcaaaacatggttttaagtgagatatcaatacttgaacattgataacacaatatatgtattttaatgaaatgtaagtctttctctyaagtctactgtggtcttcactatttttaaaccatctcagctaaatcttttatgttattgtatttttaattctggtttgatccctggaggtgaaggctacagtgaaccacgattacaccactgcatctcagcctgggtgacagagcaagaccctgtctttttataaagagagaaagagagagaaaaagagaaagagaaagagagaaagaaaaaggaaagaaagaaagaaagagagaaaagaaagcaagaaagagagagaaagaaagaaaagaaagctgtgaagatgatacttgttaaccagaatgaaagctcatttggtcagtagattaaatacaaataataattctatcattatgtctcaggcagtgtgctataagtgattattacgtgtcatcttatttcatccttacagtaatctgttttgggtaa

SEQ ID NO: 153783 - DNA, 643 bp, Homo sapiens
tggttcccttcaaactccactgcatatatttccaggagtttttcctgagcctctgcacccctaggcacttcaggtagtaataaatctctgctagcccctttgcggatttcaaaagcatttaatatgaaatcaaaacatggttttaagtgagatatcaatacttgaacattgataacacaatatatgtattttaatgaaatgtaagtctttctcttaagtctactgtggtcttcactatttttaaaccatctcagctaaatcttttatgttattgtatttttaattctggtttgatccctggaggtgaaggctacagtgaaccaygattacaccactgcatctcagcctgggtgacagagcaagaccctgtctttttataaagagagaaagagagagaaaaagagaaagagaaagagagaaagaaaaaggaaagaaagaaagaaagagagaaaagaaagcaagaaagagagagaaagaaagaaaagaaagctgtgaagatgatacttgttaaccagaatgaaagctcatttggtcagtagattaaatacaaataataattctatcattatgtctcaggcagtgtgctataagtgattattacgtgtcatcttatttcatccttacagtaatctgttttgggtaa

SEQ ID NO: 153784 - DNA, 465 bp, Homo sapiens
ctctttatgtcagacttgttagttcatttggtttctgttcaacttccaactgcctttggacagtcaacatgcatcttggtcattcatttytttcccctacctttcatatcctcagccactgtgaagaggtctctgcagtcattgagaactggcctcttcccttttatacaggaaggtccctcaggtatctgaagacagttttatccctccttctgcctcaaggactctccaggccaacaagttgtgtctcactagcaggtcctcctcagtgaacccttcaccatcccatggttctttctcgtatttttgaatgtggagaatcagagctttgaaccctcctgtgtactcttccaccagcaacccatgccttgcactttctccttcagggtctgtcttactgcacagggctcctgattccctagactcaggtcttggtaggccagagtctaggttttggctgagact

SEQ ID NO: 153785 - DNA, 388 bp, Homo sapiens
tatggcctaagtgaaggtacacaaggtcacagggtgccatggcaaaacagttctcctacaattagaagctgtatttcagacagtgtgaggtcyggtatgtttccaattttccctctctactactttcaaagattggagttgaaagcctgcctgtccttagtaaaatgcagtactgcctgtccttagcagaatggagcttttatatttgtctccttagcttttggagactgttaaaggctctgttgagcttctcagcctctgggctgttgctgaagactcaaagggaaaatatgagctatataaaaggctcgcttttctgagtttccctgccttcaggcttttaagcttttaatccctcaagtcctcattgctttaatggttatctcat

SEQ ID NO: 153786 - DNA, 388 bp, Homo sapiens
tatggcctaagtgaaggtacacaaggtcacagggtgccatggcaaaacagttctcctacaattagaagctgtatttcagacagtgtgaggtctggtatgtttccaattttccctctctactactttcaaagattggagttgaaagcctgcctgtccttastaaaatgcagtactgcctgtccttagcagaatggagcttttatatttgtctccttagcttttggagactgttaaaggctctgttgagcttctcagcctctgggctgttgctgaagactcaaagggaaaatatgagctatataaaaggctcgcttttctgagtttccctgccttcaggcttttaagcttttaatccctcaagtcctcattgctttaatggttatctcat

SEQ ID NO: 153787 - DNA, 612 bp, Homo sapiens
tgtaacattttttaaaaagtttttgcttccctaaggagccttttcaggcatttcttttccaataattgccactcctcccctgataattttataccacagaaatactgtacacatgtatatgtaccatagccctttatagggtcacaaacaactgtaatatccaagattatttttrtcccccattgaataaccaatttttgcctccattgaaaatgtacatcctattatcagattgactattgactggaaaggaagaaacacagctgtcattaaccacaaatacataatattctatataaagaagtatcatcaaattgtagcccaaggagctcctctttctgtaaacgctcaatggaacacagccatgcccatttttttacatattgtctgtgtctgatttcacaccacaaaagcagttgagcagttttaacaaaaaacaatgtggcccacaaacctaacatatttcttgtctgggttgttaagaaaaagcatgacgactcctgatatcaaacacccaaaactaacttctagaatgaatgagagtttaacacagttgctaaatataagataaatgtacaaaattaagttgcctgtctataatggcaataagga

SEQ ID NO: 153788 - DNA, 612 bp, Homo sapiens
tgtaacattttttaaaaagtttttgcttccctaaggagccttttcaggcatttcttttccaataattgccactcctcccctgataattttataccacagaaatactgtacacatgtatatgtaccatagccctttatagggtcacaaacaactgtaatatccaagattatttttatcccccattgaataaccaatttttgcctccattgaaaatgtacatcctattatcagattgactattgactggaaaggaagaaacacagctgtcattaaccacaaatacataatattctatataaagaartatcatcaaattgtagcccaaggagctcctctttctgtaaacgctcaatggaacacagccatgcccatttttttacatattgtctgtgtctgatttcacaccacaaaagcagttgagcagttttaacaaaaaacaatgtggcccacaaacctaacatatttcttgtctgggttgttaagaaaaagcatgacgactcctgatatcaaacacccaaaactaacttctagaatgaatgagagtttaacacagttgctaaatataagataaatgtacaaaattaagttgcctgtctataatggcaataagga

SEQ ID NO: 153789 - DNA, 474 bp, Homo sapiens
gactattgactggaaaggaagaaacacagctgtcattaaccacaaatacataatattctatataaagaagtatcatcaaattgtagcccaaggagctcctctttctgtaaasgctcaatggaacacagccatgcccatttttttacatattgtctgtgtctgatttcacaccacaaaagcagttgagcagttttaacaaaaaacaatgtggcccacaaacctaacatatttcttgtctgggttgttaagaaaaagcatgacgactcctgatatcaaacacccaaaactaacttctagaatgaatgagagtttaacacagttgctaaatataagataaatgtacaaaattaagttgcctgtctataatggcaataaggaatgtcctgattattgttactatgtcaaaattatccaaacttagtgatataaaagaacaaaaatttgataatgttgacagaatctgtgggccagaag

SEQ ID NO: 153790 - DNA, 475 bp, Homo sapiens
gaattcttgtgcagggcccttagaacacacatgaaaagataatttattaaaacattaaattcatataaaatcttcctatattttcttcctatcccacctcatttttgggctcagatcacaagctgcctaagtgcatggctttcagggtgtctgttgtaaaaacctcagctcactgacattacacgaagtgaacgagaggctgaraggggcatagggagttgagaaagggaaggagagagttctagacattaggaaggagtgggccctgtttctgggaggtgccctggagtaggtggcagcatctggagggaaacagaagtgcctaggggagcccggccttatcatgggactcctgggtctgccacagtgcttgtgctcaagcaggatatggaagctgccaaccaatgtttctagagacaccacacatgatggggggaaggctttgttgagattcttctccaatgcctgggttttt

SEQ ID NO: 153791 - DNA, 563 bp, Homo sapiens
cctatgaatgccttctctataaagaggttgaagcaaggtgagcaattctcctgtttgaatgctaacactaaatgtgctaagaaaatcactttcatagacacatctcagagaactacatattatgtatgttaaggagaaattagattgtttccaagtcccagagaagcaaattaatttggcattaaacaaatgttgcaatacaggaaagaaattatcttkaagatcctccattacaaaccagaaaagtcccagtatgtatgataatgttttcagtgtagctcgttataaggcactgctaccacttgtaccactgtgtgcaggaactctgtctcccatagtggttcccccaaatgtttgcaggccaatgatagacatctggaaagatgaaagatgtcatgggatttcaaaacaagagggagaacaatagggatggagaagtccccaggatccctgagaccagatagggatccctgggctcacagacaaggacgcagggccagcgagttcatgtgcactacctccattctcagaggcctccaccccagggcacagggccacgcagc

SEQ ID NO: 153792 - DNA, 564 bp, Homo sapiens
aaataaataaattttttttaaaaagtgactcaatttaaagtctagaggtctacaaacaaacaaaaagccaaacatgaacaactactttaggacaaaactatcttcctctaaaaacagaagcgcatacactgaygtaattctctctctctggcagacaggtttctaagacagccaccgatgggtcctacctcctcgtattcacatcctatgtaatctcctccccagtgtgggctggacctggtgacttgcttccagtgaatagaatatagcaaaagtgattgatgtcacctccaagattcagctatagaagactatgactatgactttcctcttggctagcattctcgctaacccttcctgcttgcttgtactgagctgccctatgaagaggcccatgtagggtggcctgggtgggggtgatctgtggccaacagccagcaaggaactaaatcctgtttacaaccacatgagcttggaaggagatccttccccagtaaagccaggagatgaatacagccccagcctccagcttcattgcagcatcgtgagacacccacaagcagg

SEQ ID NO: 153793 - DNA, 415 bp, Homo sapiens
gaattcagcacagaatcagagttcaaaaatataaaagagtggctgggagacaragaggtgagacctcctccttcttatgtaagttagagtttcaggtagagatggtagggagaacagggaagttaggtgtattaagattcaaagagaagaggctgatactttttcagaatcgatgaaagtcattgagcctcagattcaggagcaacaacaaattccaagcgagataaataaagagatattcaaaccttaactagatgtagggaaaatagaaaataacaaagagaaaaacttagaagcagtaacaaacagcagacatatcacctatacaggagcagcaattagattgatgaatgacttctaaacagtgatcatgcatgccagacgacaatacaatattttaatatgctagttgaaa

SEQ ID NO: 153794 - DNA, 415 bp, Homo sapiens
gaattcagcacagaatcagagttcaaaaatataaaagagtggctgggagacagaraggtgagacctcctccttcttatgtaagttagagtttcaggtagagatggtagggagaacagggaagttaggtgtattaagattcaaagagaagaggctgatactttttcagaatcgatgaaagtcattgagcctcagattcaggagcaacaacaaattccaagcgagataaataaagagatattcaaaccttaactagatgtagggaaaatagaaaataacaaagagaaaaacttagaagcagtaacaaacagcagacatatcacctatacaggagcagcaattagattgatgaatgacttctaaacagtgatcatgcatgccagacgacaatacaatattttaatatgctagttgaaa

SEQ ID NO: 153795 - DNA, 415 bp, Homo sapiens
gaattcagcacagaatcagagttcaaaaatataaaagagtggctgggagacagagaggtgagacctcctccttcttatgtaagttagagtttcaggtagagatggtagggagaacagggaagttaggtgtattaagattcaaagagaagaggctgatactttttcagaatcgatgaaagtcattgagcctcagattcaggagcaacaacaaattccaagcgagataaataaagagatattcaaaccttaactagatgtagggaaartagaaaataacaaagagaaaaacttagaagcagtaacaaacagcagacatatcacctatacaggagcagcaattagattgatgaatgacttctaaacagtgatcatgcatgccagacgacaatacaatattttaatatgctagttgaaa

SEQ ID NO: 153796 - DNA, 576 bp, Homo sapiens
actgaattttgtttccttaaaacttatatgttgaagtcctatcccccagtttcttataatgtgactgtatttagagacagggtcctaaaaaagaaggaattaaggtcaaatgatattattagagtaggccctaattccatatgattkgtatccttgtaaaaagaggttgggacacagaaacacaaagggtaaagaccatgtgaagacacggggaaaatggtcatctacaagccagggaaagaggcctcagaacaaacccacactgccaacacattgatcagggagttacaacctctagaattgtgaagcatgaatttctgttgtttaagccatccaatctgtggtacattgttattgaatccccaaagtactaatatataagtgagaactggctaaattctgacttcatatatgggaaaattatatgtggatatttttcgtggaccaatatgggccccatagaagagagcagacttggtgacattttaaatcctgtcaatgaataatcactgaagggtcactgcaacccagcaaaggaggtacgctgagaaatatccaggggctgaaggatgaaat

SEQ ID NO: 153797 - DNA, 576 bp, Homo sapiens
actgaattttgtttccttaaaacttatatgttgaagtcctatcccccagtttcttataatgtgactgtatttagagacagggtcctaaaaaagaaggaattaaggtcaaatgatattattagagtaggccctaattccatatgattggtatccttgtaaaaagagrttgggacacagaaacacaaagggtaaagaccatgtgaagacacggggaaaatggtcatctacaagccagggaaagaggcctcagaacaaacccacactgccaacacattgatcagggagttacaacctctagaattgtgaagcatgaatttctgttgtttaagccatccaatctgtggtacattgttattgaatccccaaagtactaatatataagtgagaactggctaaattctgacttcatatatgggaaaattatatgtggatatttttcgtggaccaatatgggccccatagaagagagcagacttggtgacattttaaatcctgtcaatgaataatcactgaagggtcactgcaacccagcaaaggaggtacgctgagaaatatccaggggctgaaggatgaaat

SEQ ID NO: 153798 - DNA, 377 bp, Homo sapiens
ggtacaaatgcaggtatgttacataggtaaacttgtgtcatggggggttgttgtacagattatttcatcacccatgtattaagtctactacccattagtggtttttcctaatcatctcyctaccctcaacctccaccctcccaaaggtcctagtatgtgttgttcccctctatatgtccatgtgttctcatcatttagctcctacttataagtgaagatatgtggtatttggttttctgttcctgtgttagtttgctaaggataattaccaccagcatcattatgtccctgcaaaggacatgatcacatgaaagaatttctttgaatatgttttgcaaggcaggtctgctgggaacaaatttcctccatttttcctt

SEQ ID NO: 153799 - DNA, 599 bp, Homo sapiens
ttatccaccgtttatctgaaatgcaaatttgactgagcatcctgtatttttgtttgctatatctgtcatttctacagagaactatttattaagaattttttacctcaattcaatcattttacataattttctttcattcttttccaaattctattgtatccaatcctgtgtacttctattagatttagtttgtataaattttcatgattccgtttatgtgtttactattgcataaatacctccaagggctttggctctagtaaatataacctgactattgatctgacataatttctttgactaaattctctcctatttgtttatggcctggcatagaatttgttatttaagctctagttattgctctgtgtttcattcctgtatcatgtaaggtttcaacagaaaaacaaaatcaagtcattaaatgaagtkaattttcatgaaaacacttttacagaagtgtggacagggttacgagacccagggactagcaataactaacagctggtatgcctgaagaggacagagtagcctgaatgcaggcagagctgtagctctggaagagaagccacccaaaggaagcaatgctaatggatgaa

SEQ ID NO: 153800 - DNA, 371 bp, Homo sapiens
ttcttctttcctaaacttgtactwtaacaatcctcactatcttattgccatctgctttgcttccattttctatttcaaattattttgttcttttgttaatcagtcctcacagaaatgatacaaaattctcaaagactgaaaatggatttgtacactaggatgctacatggatgaaatttggagttacatattattctgctttcttatgacttaccagggtgcatttcaatttcaaaggagaaagatgtagataaattgtgtaagactgatttattttattctcattattttattcatttgaggattttgttttcctctctatactgttgtcacaaaattaattgttgatttgtttatcttatatttcataa

SEQ ID NO: 153801 - DNA, 403 bp, Homo sapiens
agccttttgttaataatacttcaatgagcatttgtgtacatgtctgtatgtggacattatattttgtttctcttggtttgatacctaggagtggattgtggctaatggggtaactttatgtttaactttttaggaaaccactcaacatacagtttaaattttgataaattccaatttatcaacrtatatatttatacattgtgtgtgtgtgtgtgtgtgtaatgtttgtgatgctatggtatactttgcccaaccaaaggccaacaagcttttctcttttgtaatctcctttgtgatccttttagctcttgcatttagggctatgatctctttttagttaatatttgtatatggtagatttttttttcactaggatgtccaattgtcttagcaccattttttt

SEQ ID NO: 153802 - DNA, 643 bp, Homo sapiens
atttttgttgaattctacagattcaggaagaattgctgaactttaggtaaatacagtgagaatctgtagaattcctactgcagttgctcttattcgccccgctcggttagcaaggtagatctacctggatgaggcaggagatgaagaccaacagctttgccaatacaaagactggatggctttgaagtgaaaagagaaaaaaagaaggtcctyagcagctttctccggaaaagtagtattcttgatggttagtaaatggggaagtttatggctgttagagtgatcaacagaccagaaattaacaagcagagaatgggaatagaacagaagtagagacacttgatatgaaggccacatatctattcctggcagtcttctaggcatgtgcataggaaagaacaaaaggggctcaagcaatctacatgtgcctggtcttattagcagctcactagctatacagcacagaagcagcccctaggaggacaggcttaatttttttaagcaattaaataaacaaacctaagcagaaatacaagcacaaatacaccacaagaatgatagggactgcagatgccacagctttagtccagagaggtaagataccaaaagaaaaaaataaagaaaaaaagtaaaagaggaaaac

SEQ ID NO: 153803 - DNA, 587 bp, Homo sapiens
tttgactttctgtttaccgatttggataataaaaaggcttccagcaaagaaaagcccagaacctgatggcttcactgctgaattctaccaaacgtttaaggaagaacttataccaatcctactcaaactagtctgaaaaacagaggaggagtgaatacttgcaaatttattctacaaggccagtgtttctctgataccaaaaccaaagacacataaaaaaagaaaactacagaccaatatcaactaaggaatagtgatgcaagaatctttagcaaaatactatctaacagaattcaacaacacattaaaaagataactcatgacaaccaagagggattgatccctgggatgcaatgatggttcaacgtatgcaaatcaatcaatgtgatacatcatgtcaacagattgaaggataaaggccatatgagcatttctactgatgctgaaaagcatttgataaaattcaacatcctttcataataaaaaccctcaaaaaactgtgtatagaaggaacacacctcaacataataaaagccatatatgacagacccacagctagtatcmtactgaatggagaaaaactgaaa

SEQ ID NO: 153804 - DNA, 578 bp, Homo sapiens
aacctaatctggcttacacctagatttcagacctaagcagagaaccctgtcacgcagtgctggacttctgacctacacaactgtgagttaaaaaatgggtcatgttttaagccactaagttggtagaaatttgttttacagcaaatagaaaactaaaataacccttaaactgctgtaggacttagccaaaatrtatcgacaggagttggggagtacatatggaactggattgtgagagtgctggattaaagggacaaaacataaagttgtttattgatttgacaggtctctccaatatacgggatttaatacttggaaaagactctagagtatggtagtttttcctagaagcatggaaaagtgatgacccacagtaaatgaagtattaaataccagaattgccatagtaggcaatggaagaaaagatttaagaggctcagagaattggacatgctctgaaactgctcccctccccaggcaatatagtaaatcaaaagcaatcttgcatcccaaagagatggcacagactagtgtaaccctttaagacctaaagaatgcaagagtgatgttccccttca

SEQ ID NO: 153805 - DNA, 547 bp, Homo sapiens
atgatttttttttttggatggcatataatgtggccattatatgttgttgttgttttgtttattcatttttgcacttggtggtttaagacctagaacattggttcttcaactcagatttctattttttgattgtcatatgtatagcatatgtgggtgaggagattgtgtagttggtatatgagcataataatttagagaatgaattaggaagtatcaagaatagyggatgagtttcttttaaaataccctgagattgtctgctgtaaatgtatactgtgacatgtgtcactttgttttaaattataaagctgaaatgcaatccgctgtattatatcttggctggagaaagactgttgccagaggaaggttgttggacttggacataaagaagagtcagaatacaaacttgtcagtgtttacccaggactgtccaaagaagaaagcaattggacctgatagtcacgaattgcagtcattagagaaacatttgctgtggttcatttcttattctaatacattagctttcttttcccactctgccatcaaa

SEQ ID NO: 153806 - DNA, 518 bp, Homo sapiens
ttgagattatctcagtggcatccttaatatctttaaaacatggatgtaattttaaatgtgcttgaaaaattaaatttgatagtggattgcttgttgacagaggaaaataaagcaataaaatttcatttaaaattaagcactctgagatagagcatacaatattaatgaaagttcaggattagattattgaaataaagtgacaggaaacagcaggaattttcttcttagggaagagattatgacttctcttgtacatgataggtgtttaacacagtttgagcattcctaatctgaaaatccaaaatgctgtaaaatactaaactatttgagtgccagcacaacacacacgacctaacatgatggctcacagtctaaacgcagacacaactttatgcacaaaattattaaagatagtatataaaattatcttcatatatgctttatctgtataaagygtatatgaaacataaatgaatttcttttttagacttgggtcttgttgccaagatatacctaat

SEQ ID NO: 153807 - DNA, 404 bp, Homo sapiens
tattctctcatcatttttgtataactgtggattcaggaacacccctcctttttttaatttccttgcatttgtgttatctttttttattataggaaawgtaagcttaatataaaaccatgaccatcatcagtggtccatgcagctaaaacagaaatatacatctactgatgtatatgcttttatgaggtaggaggagagagtggttattagcaatttagaataaaaaaataccttctgtacagtacaagtttctttatagaaaagtgttgtagccctggaattcataagcgtcattattatgcaaaaattccaggctttgctaaggtagacagagctaccttaatgactttgggttaatcagtactttagaaatggggctgcttacctatatgtaaaaaattaat

SEQ ID NO: 153808 - DNA, 489 bp, Homo sapiens
agtctactattcactacagcttctcctagatttacactttcatagtgattgttgcataatgacagggctattaccatatcttatccaaaaaaaatctttcccagggataacatttatataaatttaagtaaacctttattcatctgtatagcagtaagcaagaagaagttttcatatgtgactatatataattccatgcttttttcagctaaataatagaagtttacatttctttcttcttcttctccatactataaagaaaaaaaatattgagactacayttatttattaaaatgttcaacaaattgataaaataacttgtgatgtttctcattaaaatttatgtcatttaagttactgttgtatcattgatgtagctctggacaatcacttcttattttggaagaaattttcagaggcattagtactttgttttctaggtaaaattatataaatataaaactgaaaatttcttcaggcccaaggaat

SEQ ID NO: 153809 - DNA, 461 bp, Homo sapiens
ggattttattctgagacagaattgttgataagatttgagtggagatacactggattccatatgcaaaagtgagactgtagaaaggcaagaatgcttgtgaagagggcagataaaawgatataatccagaggagagatgcttcctggaactaaaagtgattgcagtaagtatacagtaagaaatggtctatatctttatctatagatgattgatagatagatggatagatagatagatagatagatacatagatacatagcgagagagagaaagagagagagagacaaacatacatacatacatatatgtatgtatagctaccccagcctctcaaagttctgagattacatgtgtgagccaccatgcccagcctgacaacttggttttgagtagagaaattaagcaaccctaaagagtatatgaggatatgaggatataagaaattttgttgctgacagagt

SEQ ID NO: 153810 - DNA, 461 bp, Homo sapiens
ggattttattctgagacagaattgttgataagatttgagtggagatacactggattccatatgcaaaagtgagactgtagaaaggcaagaatgcttgtgaagagggcagataaaaagatataatccagaggagagatgcttcctggaactaaaagtgaytgcagtaagtatacagtaagaaatggtctatatctttatctatagatgattgatagatagatggatagatagatagatagatagatacatagatacatagcgagagagagaaagagagagagagacaaacatacatacatacatatatgtatgtatagctaccccagcctctcaaagttctgagattacatgtgtgagccaccatgcccagcctgacaacttggttttgagtagagaaattaagcaaccctaaagagtatatgaggatatgaggatataagaaattttgttgctgacagagt

SEQ ID NO: 153811 - DNA, 469 bp, Homo sapiens
ggcctctttgttttgttgcagttaccaaagaaaattattccagcttttgctcattcagtataatgttggctgtgggtttgttatagatggatcttaacattatgaggtatattcctttgctacctagtctgttgagagttttttttattatgaagagatgttgagtattattaaaagtttttttctgcatctattgagataatcatacagtttcwgcattaattctgtttatgtggtgaatcacacttattgatttgtgtatgttaaaccaatcttgtatccaagaaataaagaggaataaagcctacttgattgtgatgaattaacttttttatgtgctaatggatttgttttctatgtgtctcatgtatttcctcctctttttcttcattactgccttattttttgttagatatttatactgcgtcctttccattcgcttgttgcttatttattaaactttttgaaa

SEQ ID NO: 153812 - DNA, 217 bp, Homo sapiens
taaattctcaaaacaccatgtatttgccctacgtgaaatataatctttcctattataggaggaacaaatgtataatatttctattgatactcattgtgaaaaayttaatatgtctgtggcaaataacttacctatactatcatacccttcaatctcagcgaaaaattagagctaaaaagcatgtagtccaatttcatttcctatgcatacattttct

SEQ ID NO: 153813 - DNA, 685 bp, Homo sapiens
tgcagtcaggtgggaaggggcaaggcctgagagccctgcttgctttctcagtgcagaggcttgtagcctggggcaatatctcagctctgctcaccagctgcctggatataaattcggtgytgttggcagggcatggcaggagtgagactggccttgatggttgcatgggagctgggtaaggccgttactgccagcattcccccacttccctggtgacctgtatgatgcagaagaggcagccataatccccctgcaaacataatcccattggccggagaaccaacccccatgccccacagtggctgcagcaagccctgctcaaggagagtctgagctcagacacacctaatcctacccctacttaatgacatttctctactcacgctggtagctgaagacagaagacaaattcttaggaactctacggccctgtccatcacctgcaaaactcgactacttcttcaacaaactcacctaacacataaggattcacataaacttaagataaaggaatgaaaaaatatatcctatgcaaatggaagccagaagtgagcaggagtacctatacctatttttaataagacaaaacagaacttaaagcaacaacagttaaaaaagacaaagagggatattatataatgataaaagaattagtccaaaaggaaaatatcgcaatcctaaatat

SEQ ID NO: 153814 - DNA, 685 bp, Homo sapiens
tgcagtcaggtgggaaggggcaaggcctgagagccctgcttgctttctcagtgcagaggcttgtagcctggggcaatatctcagctctgctcaccagctgcctggatataaattcggtgttgttggcagggcatggcaggagtgagactggccttgatggttgcatgggagctgggtaaggccrttactgccagcattcccccacttccctggtgacctgtatgatgcagaagaggcagccataatccccctgcaaacataatcccattggccggagaaccaacccccatgccccacagtggctgcagcaagccctgctcaaggagagtctgagctcagacacacctaatcctacccctacttaatgacatttctctactcacgctggtagctgaagacagaagacaaattcttaggaactctacggccctgtccatcacctgcaaaactcgactacttcttcaacaaactcacctaacacataaggattcacataaacttaagataaaggaatgaaaaaatatatcctatgcaaatggaagccagaagtgagcaggagtacctatacctatttttaataagacaaaacagaacttaaagcaacaacagttaaaaaagacaaagagggatattatataatgataaaagaattagtccaaaaggaaaatatcgcaatcctaaatat

SEQ ID NO: 153815 - DNA, 615 bp, Homo sapiens
agaattctaattgcaaatcattttcttttaaggctaaatttatttcaccattttttctttaccactctttctgaatctactcagacaacttttttatatgatcatttatttctccctgaaataatttaaaatatttttattaaaattgaggtcttaactttataacatgttcaggacatggttttctttatctctcatttgtaacttcatacataaataaggacattcctctattttgactcttcatttaattttaaattmtttgttctgccattgaaaaactattaataactgcttgagactttcaatatcctgatattagaatctttcctttttctcgctctttacttaatacttataaaaatatattttctgtgaatcccttaataatttaatttaataatttattcacagaatatatatatatatatattttcttattctgcctgactcaactttattctgccttactcaacattattattcatggtgttattattacatctaattatttcttagttttatgtagtatttttcacaattagtatctactttgtatttttaatgactttagattcttggataacattattaagttaattttcttaaatatag

SEQ ID NO: 153816 - DNA, 659 bp, Homo sapiens
aataatgatgtcataattacacctaacttaatacggctatccttcatacaaccagaagtgaattattaaccgaaatgctrttacataaagttaataacacttaactgctgatatgaagttaataatgtcacttgataagggaaaagcaaaggaaataaataaaggtattttcttagtagaagtgtatacatgcacaaacatgtaaggaggaaatccacatgacaattacaggtctcatttctgcaactggtcttgtggtcatagctggtattgatgactacctttttctactaaccattctgtattccctttgccttcagctagcacctcagcaggctgttatttttttacctggtgaagtcacccaacccttcattcctgaagagtctgggccatttgtagtcctgcctagattggattgttgtagttttccactgaccttaatcacagggcatggtagtactaaaagacggcctaagggatctcctgtattccacacatattcttccttacctccactgtggagtagtaacctgatttcatcttgatagtccaggtcaatcacccaagtcaacactgtaactcctttcttgacctgttgacttagaggtgggaggagcccaaagtggccaggtggcaattttaactttcagtttaat

SEQ ID NO: 153817 - DNA, 659 bp, Homo sapiens
aataatgatgtcataattacacctaacttaatacggctatccttcatacaaccagaagtgaattattaaccgaaatgctattacataaagttaataacacttaactgctgatatgaagttaataatgtcacttgataagggaaaagcaaaggaaataaataaaggtattttcttagtagaagtgtatacatgcacaaacatgtaaggaggaaatccacatgacaattacaggtctcatttctgcaactggtcttgtggtcatagctggtattgatgactacctttttctactaaccattctgtattccctttgccttcagctagcacctcagcaggctgttatttttttacctggtgaagtcacccaacccttcattcctgaagagtctgggccatttgtagtcctgcctagattggattgttgtagttttccaytgaccttaatcacagggcatggtagtactaaaagacggcctaagggatctcctgtattccacacatattcttccttacctccactgtggagtagtaacctgatttcatcttgatagtccaggtcaatcacccaagtcaacactgtaactcctttcttgacctgttgacttagaggtgggaggagcccaaagtggccaggtggcaattttaactttcagtttaat

SEQ ID NO: 153818 - DNA, 659 bp, Homo sapiens
aataatgatgtcataattacacctaacttaatacggctatccttcatacaaccagaagtgaattattaaccgaaatgctattacataaagttaataacacttaactgctgatatgaagttaataatgtcacttgataagggaaaagcaaaggaaataaataaaggtattttcttagtagaagtgtatacatgcacaaacatgtaaggaggaaatccacatgacaattacaggtctcatttctgcaactggtcttgtggtcatagctggtattgatgactacctttttctactaaccattctgtattccctttgccttcagctagcacctcagcaggctgttatttttttacctggtgaagtcacccaacccttcattcctgaagagtctgggccatttgtagtcctgcctagattggattgttgtagttttccactgaccttaatcacagggcatggtagtamtaaaagacggcctaagggatctcctgtattccacacatattcttccttacctccactgtggagtagtaacctgatttcatcttgatagtccaggtcaatcacccaagtcaacactgtaactcctttcttgacctgttgacttagaggtgggaggagcccaaagtggccaggtggcaattttaactttcagtttaat

SEQ ID NO: 153819 - DNA, 659 bp, Homo sapiens
aataatgatgtcataattacacctaacttaatacggctatccttcatacaaccagaagtgaattattaaccgaaatgctattacataaagttaataacacttaactgctgatatgaagttaataatgtcacttgataagggaaaagcaaaggaaataaataaaggtattttcttagtagaagtgtatacatgcacaaacatgtaaggaggaaatccacatgacaattacaggtctcatttctgcaactggtcttgtggtcatagctggtattgatgactacctttttctactaaccattctgtattccctttgccttcagctagcacctcagcaggctgttatttttttacctggtgaagtcacccaacccttcattcctgaagagtctgggccatttgtagtcctgcctagattggattgttgtagttttccactgaccttaatcacagggcatggtagtactaaaagacggcctaagggatctcctgtattccacacatattcttccttacctccactgtggagtagtaacctgatttcatcttgatagtccaggtcaatcacccaagtcaacactgtaactcctttcttgrcctgttgacttagaggtgggaggagcccaaagtggccaggtggcaattttaactttcagtttaat

SEQ ID NO: 153820 - DNA, 300 bp, Homo sapiens
aatgttgggggaactggaagtaaaatttttgctagtgggtcactaggagtgatggtgagtggtgccacttctacttctaccccttgattcttaggcctgtgaatgctggctatgagggaaacagtaccatatattggatgctgattcaggacatacwcagccttcaagagaactttgccgagccctgcaaagtattgtcacctagttggtggtgtaattgtgatttcaaatggcctttccactgttctatcaatccagctgctttaagataatgggcaacaagatacaatcagtgaattc

SEQ ID NO: 153821 - DNA, 300 bp, Homo sapiens
aatgttgggggaactggaagtaaaatttttgctagtgggtcactaggagtgatggtgagtggtgccacttctacttctaccccttgattcttaggcctgtgaatgctggctatgagggaaacagtaccatatattggatgctgattcaggacatactcagccttcaagagaactttgccgagccctgcaaagtattgycacctagttggtggtgtaattgtgatttcaaatggcctttccactgttctatcaatccagctgctttaagataatgggcaacaagatacaatcagtgaattc

SEQ ID NO: 153822 - DNA, 509 bp, Homo sapiens
ggccacagtcatgatgcccaggagcagtaagattgctccacacctctttgccagacaaggcttggcaccagcttccagcacagtagcctcgcttctgcttgaactctgatggagatagctccatgttcccatgggaagcaccacgtttgcagagcaggcaactccacacatctctgctgctcatagccaggtggtcatgcctgcttgccttcagcacaacaaactggcttctgcctgaatgctgcaggtaggttcagctttaggtttccccgaatctctgcagaggagtgtagttctgtgttccctttggaggcacccaaagggtacactgggtgactccatccacccctgctcctcattaccagscagtacatatcagttgggtatgccaacacagcatgcccacctatgtctgaactctgtgggttggtagagttctgtgttcccctgggaagacccatacggttgatagggtgactccacccacccatactgctcctagatggatg

SEQ ID NO: 153823 - DNA, 509 bp, Homo sapiens
ggccacagtcatgatgcccaggagcagtaagattgctccacacctctttgccagacaaggcttggcaccagcttccagcacagtagcctcgcttctgcttgaactctgatggagatagctccatgttcccatgggaagcaccacgtttgcagagcaggcaactccacacatctctgctgctcatagccaggtggtcatgcctgcttgccttcagcacaacaaactggcttctgcctgaatgctgcaggtaggttcagctttaggtttccccgaatctctgcagaggagtgtagttctgtgttccctttggaggcacccaaagggtacactgggtgactccatccacccctgctcctcattaccaggcagtacatatcagttgggtatgccaacacagcatgcccacctatgtctgaactctgtgggttggtasagttctgtgttcccctgggaagacccatacggttgatagggtgactccacccacccatactgctcctagatggatg

SEQ ID NO: 153824 - DNA, 511 bp, Homo sapiens
acacattaaaaaatcattcatcatgacaagtagaattatcccagagatgtaaggaagcttcaacataagcaaattaaataatgtgaggcattatagtaacaaaattaaggaaaaaatatatgatcatttcaattggcactgaaaatatatttgataaaattcaatattccctgttagttaaaaaacccttataaaactgagtatagtggaaacatacctcaacayaatataagcaatatatgaaagacccacagctagcatcatactgaatggggaaaaacagaaaattttccccctaatatctggaatacaacaatgatgtccactgtcaccactgttattcaatgtagtactggaagttctacccagagcaatcagtccaaagaaacaaataaaagacatatgaattgaaaacgaaaaattccaattgccctctttggagatgatatattatattttgaaaaaaacttaaaacttcaccaaataaactattaaaactgatacatttagt

SEQ ID NO: 153825 - DNA, 666 bp, Homo sapiens
gtcacaggtaagtgacaaaattttatactgacctggctgtggcagacattgtggctgtctcccaacatcaccttcaccactttcctgttatgctatcctcatggaaggtagatgagattgactcactgcagtatctgagtaggtgaggtcagacttgttaaagccacaaggccatagttattgctttaggaaatctggttctaagctcatcagctatggaaatcctctggccacagaaattatgtaaaaatgaacatttcactgaatttagtaaatatgtagcattttgtagggaaaatacttttytaacaggtttacgaaaaaggaagatctgtccttgccttggacaaggaaatatgtaaatcagattgcaactggccatcttggtactataagggagcaagtttttatatgaaactttttgttatggaaatcagattacagaaatcaaaagaatgtgaatattaatgacattataggctgcataagtgaaacaaatctaatgctcttttaatatttgtactttttatctatataaatccataaattatctctgttatttaagtcatttgtagtaatttgttttttcatttgtacaaaaaacaatttcaacttgataccctggcattagtatgcacacatgcacacacacacacacacacacac

SEQ ID NO: 153826 - DNA, 564 bp, Homo sapiens
aattacaaattaattgagagtagaatccagaacatctccttcttagtctcaatctgttcataaaaatggaaagaagacatactattccgttttcacactgctataaagaaatacccaagactgggtaatttataaaggaaagaggtttaattgactcacagttctttatggctggggagggctcaagaaacttacaattatggcagaaggtgaagcagggacatcttacgtggcagcaggagagagagaagagtgagtgaaggaggaacttgccaaacacttataaaaccaccagatctagtgagaactcattattatgagaacagcatggaggaaaccacccacatgatccaatcacctcccaccaggttctcctctcaacatctgggagattacaattcaagatgaaatttgtgtggggacacaaagcctaaccatatcaggaggtattaaaaagaaaaaaagttaagtgcctcagtcaggttttttacatggtatcattttgggrccattaacctactggaagaagggtaaaattttgtctttcttcattttaggagaaat

SEQ ID NO: 153827 - DNA, 532 bp, Homo sapiens
acgagcccatatttatttataaagatgttcatttcagtcttatttctgacagtaaacttgtgaaaataatctaaatgaatatcagttgaggactagttaaattaagatgtgtttatgttatcaaatactgtatagtcattaaaatcatggtctcaaaaattaaataattatttccacattgtaacctcaattttatgatgtatgttcacagatatatataaaatttaatggaagtttatacccaaacagtgcttattcytaagtgataactatgaatttcctgcatagtatgtctcatgaatttgagctttgtcagacaaaaaacaggatttgaggaacgagtatcaaggaaacattaaatctgaactgaccctcaaaacttttgtattatcccaaagtgcaaatctttaaggctaagttagtctatgtaactcacaagagtttgaaactgtgctctgagtaattcaccatttaaatgacctttagtttgacagagtaaagattatttatatggcagcaaatgagactggct

SEQ ID NO: 153828 - DNA, 537 bp, Homo sapiens
ttaatttcttcttttttaaaatgtaggggtgataaaagtacttcttccatgaaattgctgggggttaagtgagataacagtaagtttctttgtaaagagattattgtaagcatttataacgagaagtactatgttgctgttcctcttatctgtatcctggtcatcattgttagaaaagggcaaacaytttttttcccatttcttaacttccagaaagagaagttgtcccagagtacattatatgtctctcttgtctttttactcttttcacctttagggaattgaaataatttatttttaagtcagtaactgtgacagaagaacacaaaatcactggatgagagaaatagataatttttaaagcaaaaagatcaggcagagcagcatcttgcatcagttcctagcaccccagttcccacagggcaatatgatgaaggccaagtgttacctgtgtgtgtagagggttacatcacaggacaggaaccgtgacaataggagactgactttctgtggggctggtggcacatctacctttct

SEQ ID NO: 153829 - DNA, 537 bp, Homo sapiens
ttaatttcttcttttttaaaatgtaggggtgataaaagtacttcttccatgaaattgctgggggttaagtgagataacagtaagtttctttgtaaagagattattgtaagcatttataacgagaagtactatgttgctgttcctcttatctgtatcctggtcatcattgttagaaaagggcaaacactttttttcccatttcttaacttccagaaagagaagttgtcccagagtacattatatgtctctcttgtctttttactcttttcacctttagggaattgaaataatttatttttaagtcagtaactgtgacagaagaacacaaartcactggatgagagaaatagataatttttaaagcaaaaagatcaggcagagcagcatcttgcatcagttcctagcaccccagttcccacagggcaatatgatgaaggccaagtgttacctgtgtgtgtagagggttacatcacaggacaggaaccgtgacaataggagactgactttctgtggggctggtggcacatctacctttct

SEQ ID NO: 153830 - DNA, 431 bp, Homo sapiens
aagcaaggatgagggtagtagtggtggcatgtattgaaaaggagtgcaaaaatatgtatatggtgatgagatgttctatgtcttttttaaaaaggttttattgttgttgtgtagagtagttttaggttcacagcaaaattgagaggaaggtacagggwttcctcatatacttcctgcccctacacattcctagcctctcccattatgaccatcccgcacaaaagtgatacattagttacaactgataaacctacattgacacatcattatcacgcaaagtccatagtttatatgaaggttcactcttgctgttgtttgttctatgagtttggacaaatgtataacgatacaaatccataattatagtattattgtggtagtttcacagccctaataatcttccatactctgcctattcatccctccctcct

SEQ ID NO: 153831 - DNA, 481 bp, Homo sapiens
ttctgttgatattgtacagatgaaagtagagtagcttgttctgaagacacaaaaccatcttctattagtccgttcttatgctgctataaagaactgcctgagactgagtaatttataaagaaaagaggcttaatttactcacagttccgcatggctggggaggcctcaggaaacaatcatggcagaaggggaagcaaatatggccttcttcacatggtggcaggaaggagaagtgckaagcaaaagggtgaaaagccccttataaaacaatcagatctcatgagaactatcaggagaatagcatggaggtaactgctcccatgattcaattacctcccactgggtccctcccatgactcgtggggaatacgggaactacaattcaagatgagatttgggtggggacacagccaaaccatgtcacatcttatcccaaagttgagcttgagctttccatgttgttggatttttttctgttctg

SEQ ID NO: 153832 - DNA, 415 bp, Homo sapiens
tccttactgtttttgtccccagctctccaaattcaatatctttcctagcctagatgaaatagttacttgagtgcagttaatgcccattctatatttaaaagctccaggctatgattttactaactttttgtacaaccagaagaaaataaaaaagatatttgctcttgaaacagtagagaaatgtagaataactgttgaaataataatttgaagaaaactaaatagaacyataaaagttggaggcagcatacaggaatgaaaggcattcatccacacaccatgttgagttattttctcaagcttggaaaagaaaacagcaataagcatggaaaatgcagcaaatcgggtattctaacctatttgccaaggctttcaagggaacaacacagagggagtgtttaaaacacagcaacca

SEQ ID NO: 153833 - DNA, 548 bp, Homo sapiens
gtgagtatgactttcaaaccacaaactcaagttcaaacaaaccattgcttatctttctgttttatttatttatttttgagccttaatctcccaaatgggaggaaatataaatctccmtcattccagaggtatctcttgtctagattatgccaaaagtcaaagtcttacaccatattagtgaggtagttcaacatgtctctgagatgtccctcatccctatcccaatgactgttcaggatcaatagtactctgatatgtgagtgaaataaatcttatgaagtagactgtaaccctgtctgcctaggtgtaccagggagaaatcatgttccacagtttctcacagctttggggatcccactagaaagcagccctcgagacatgtaactcaaggaaacataggtctctctatatttctcctcccacgcagaatttatttcagtgttgggaagaagctttactcactttttcaccctcttgtttcttcacagactcagtctctacccaggaatcttcttccttttttctgccatttgggcaaacctacattt

SEQ ID NO: 153834 - DNA, 628 bp, Homo sapiens
tagatacgttcaacaacttgaatggaccttcaaataaatatgttgagtgaaaaaaaaaggcatccccaaatggtatcatattgtttgattctatttatgtgacattttgaaatgatgaaatgttagaaatgaacagactggggttagggacagcaggggttgaggggaagattgcaaagggacacttgtggaaatggagctctccagtatctttacaatgatggtagacacctgaacctacacacatgataaaattrtatggagctaaatgtacatacacacacctacgcacatacaatattagtaaaactgggagagttgaataagattggtggatggtatcaatgtcaatatcctggttatgatattgtaaaataattttgcaaaatgttaccattaggggaaatgaattaaaggatagatgggatctctgttttacttcttacaattgcatgtgaatccataatcttaatacaatttcaataaaaataaaattcttaaaaagtaattgctattattgcaagagtaaaatgaaataaaaaatgacttaaaagctattaattttatgtacaaaacaattcatactctaaaatagctatggaggaatagctactcactctaaaatagc

SEQ ID NO: 153835 - DNA, 628 bp, Homo sapiens
tagatacgttcaacaacttgaatggaccttcaaataaatatgttgagtgaaaaaaaaaggcatccccaaatggtatcatattgtttgattctatttatgtgacattttgaaatgatgaaatgttagaaatgaacagactggggttagggacagcaggggttgaggggaagattgcaaagggacacttgtggaaatggagctctccagtatctttacaatgatggtagacacctgaacctacacacatgataaaattgtatggagctaaatgtacatacacacacctaygcacatacaatattagtaaaactgggagagttgaataagattggtggatggtatcaatgtcaatatcctggttatgatattgtaaaataattttgcaaaatgttaccattaggggaaatgaattaaaggatagatgggatctctgttttacttcttacaattgcatgtgaatccataatcttaatacaatttcaataaaaataaaattcttaaaaagtaattgctattattgcaagagtaaaatgaaataaaaaatgacttaaaagctattaattttatgtacaaaacaattcatactctaaaatagctatggaggaatagctactcactctaaaatagc

SEQ ID NO: 153836 - DNA, 452 bp, Homo sapiens
gctctcagtagccaaaggtcaaaaaatagtctgatgtcagtgtctttattatactcatatatcgtagaatttcaatggtgaaaaaatgtacttttcttgactgtagaacttctgagcccttagcattaaaatgattattgtgaatttgccagaaagagaatatagaatctttcaaatggacttgttcataggaccttatttttagataatctttaggggatattgccacataaaacatcstatgggggaacatgtatgtaatttttaaacgcagatgttaatcacctttaaagttttttgtttttttaacttcttttctagttaagacatagaaggctaaattgtggcttacttcaattaagaaagcaaggaattcttgttgaattgattttagatgacagtgtgggagatgactgaggctttaaaaggatggaatgtggtcagttcaaaag

SEQ ID NO: 153837 - DNA, 398 bp, Homo sapiens
aattaacttgttttaaatattatcaacccaaattatagttttatgatgtgagaatgcttcttgcctttatttttgtatcttcttagccctttcatcccaggaaaatatacttatcagttacacattgtacaatttagcaattgtgtactcgatatcagaagtagatttaatttmatgtaatccacagatatggagcatgtgctatggacaagatgccaggctgaaactcttaagcgtagaaagaaaagtacaattgatctcttagtcccaaagatactgcaatgtgaaatggtctctgtccctattccttctgcagatatgaaaagggtaagcaagtaatatttatgttgagtcagtttgcatgttatcacataatcatcataataatgtaaagtgta

SEQ ID NO: 153838 - DNA, 455 bp, Homo sapiens
aatcaccacaatgaattgtagaatattttcatcaccttgagaaagtctgtttaatatatccactatccatctcccaatgctccatcactttattcataagcaacaataatcaacatgttagctctctgtatttgcctattctggacatacctcatgatgaataggcaaaaaatacataaagaaaattaagttktcatctcaatataacatttgccttgttgatgattctagaaatagtgaaccataatagatttcttggaaatcttaaattagagcatatagtggcccatttttcttcctcagaaatttttatttcaatgtggagggagcagtaccaggaacttggaagactgcccagtgtgctctacatagcattcaattgaccttttgacctatgtcccaaatacagccgataatgtgacaattagttccttcgtttgtttaagggcaagctt

SEQ ID NO: 153839 - DNA, 528 bp, Homo sapiens
ttattgtggaggaaaggctcctcctactcccagatggatatggcccccagtttgaaaagtgtggtactaagaaatcttattagaaaggcacttgcccatgccctccaaaatattcatttcctcataaatggattgagttctcattccctggtttctctcagttagtccctaggtacctggaacccatattcagacacctctggtgcattctactatgatctccccatctccctttcctcttgttggatagatactatgatttcactttttatgcctattaaactttagttataattggtggccaggcatggtggctcatgcctgtaatcccagaacttkgggaggccgaattgggtggatcacttgaggtcaggagttggagaccagcctggccaaaatggtgaaaccccatctctactaaaaatacaaaaaaattagctgggtgtggtggtacacacctgtaatcccagctatctgggaggctgaagcacaagaattgcttgaacctgggaggtggaggtggcagtg

SEQ ID NO: 153840 - DNA, 363 bp, Homo sapiens
aaggctgcctttgtccatctgggctgctgtcataaaataccataaactgggtaccttttaaataacagaaatttctttctcacggttctggaggttgagaagtccaagaccaaagtggagcagattcagtgtctggtgagggcctactttcaggctcggggtggcaccttctagctgtgtcctcacatggtgaaacgttaagggagcccactgaggcctcttttataaggaccctaatctcattaatgaggactctgccttcatgccctaatcacttcccraaggccccaccacctaatactgtcaccctgggaattaggtttcaacataggaattttgcggggaccacaaatactcagaccc

SEQ ID NO: 153841 - DNA, 407 bp, Homo sapiens
agttagaccagcaatgtccaaaagaactctttatgataatggaaatgttttatatctgtgctgtccaatatggcagccaccagccatatatggttattgagcacatgaaatacagctagcgcaactgargaattaaatgtgtaattccatttaattttatttttttttaacatttttttaagggtctcgctatgttgcccaagttggtctcaaactgggttcaagtgatcctcccgcctcgttctcctaagtagctgggactacagttgcatgccactacacactaattttaattcttttaaatttaaataattaacacctatagctagtggctaccatattagacaatgcaggcctagacatttctgcaggtgggggaaccctagatgacctacatccaaacagct

SEQ ID NO: 153842 - DNA, 407 bp, Homo sapiens
agttagaccagcaatgtccaaaagaactctttatgataatggaaatgttttatatctgtgctgtccaatatggcagccaccagccatatatggttattgagcacatgaaatacagctagcgcaactgaagaattaaatgtgtaattccatttaattttatttttttttaacatttttttaagggtctcgctaygttgcccaagttggtctcaaactgggttcaagtgatcctcccgcctcgttctcctaagtagctgggactacagttgcatgccactacacactaattttaattcttttaaatttaaataattaacacctatagctagtggctaccatattagacaatgcaggcctagacatttctgcaggtgggggaaccctagatgacctacatccaaacagct

SEQ ID NO: 153843 - DNA, 407 bp, Homo sapiens
agttagaccagcaatgtccaaaagaactctttatgataatggaaatgttttatatctgtgctgtccaatatggcagccaccagccatatatggttattgagcacatgaaatacagctagcgcaactgaagaattaaatgtgtaattccatttaattttatttttttttaacatttttttaagggtctcgctatgttgcccaagttggtctcaaactgggttcaagtgatcctcccgcctcgttctcctaagtagctgggactacagttgcatgccactacacactaattttaattcttttaaatttaaataattaacacctatagctagtggctaccatattagacaatgcaggcctagacatttctgcaggtgggggaacmctagatgacctacatccaaacagct

SEQ ID NO: 153844 - DNA, 587 bp, Homo sapiens
cacccttcatcgctgtgtccaccatagcagcattgctggagaagagcaggtgcagcttgcaggaattacactattctggggccagactccccagattcaaataactggtctcaccacccccgggtgagtccattaaayttctcaagcctcagttctcttgcctacaaaagagtcctttggagaattgtggagaggatttaaaaatgcccgtaagtgaattaatacaaagtataaacatgaattatcattattatattatggatatctgtctgatagttccttcagaagaaagaatctgcagctgaaaccaagcagaagcttcaggaaagtttggttctcctcttggggactcttcaagacccaggagattgaatggtattctttgtacactctgtgcccagcaaaacgagtcacatagagcaggaatttaaatatttgttgaatgatctctaaatggtaaaaggaaggaaggtaaagaagagctcttccagggacccctcagctcacagcatttgatccatggccagttatagattcattcaagagaagagaaaggggtgatgtctaatctcaatcctacacacggg

SEQ ID NO: 153845 - DNA, 460 bp, Homo sapiens
cacacagttggaaaaggtccaagttatttaccaagatacgggtgggaatagtcagacctcttggggtaccttagcccatctttccctgctgcccagagcccactcagcatccgtggaagccatgaaagaactcctgggctctaagtagggtgaccaaccatcgcggatggactgagggatttccaaggatgtgggactttcagtactaagaccaggaacaccctgggtaaactgggatgagttgatcactccctctccaagacatttggcattcaccccaccagaaacagatgggaagtccagctgaagtcaaccacagctcttttaatttgggagaacttcttgttaaaygctaatctcccacacacacctttttagggactaacttggctgtgctgaatttagactctgaatattactcaagccatctttgaaccaccttgggccaagacacacaggt

SEQ ID NO: 153846 - DNA, 411 bp, Homo sapiens
ttaaaacaacgttaggctccacccctaagtttcccatacctgggatctggggtgaagtctgaaattttgcatttgcaacaagttctcaggggttgctgttgctgctggtccagtgatctcactttgcaatttgtctagacttggagattaagaacgttcagggtttgaaaaacytgaagttgctaaacttcgtacatctcactgcaaattagtctccaagcacctataattctgaccttttcttctcactccgtaaaatggtaggtggatgccttctgtaaggcaaaagagaaatctgatccttaatgaagtagatacagtctgcaaagccctctcctgtcagtaattgtgaccagagaagacccaggtggcgttattaggggaggctgcatggagccagccttgctcaga

SEQ ID NO: 153847 - DNA, 528 bp, Homo sapiens
tgcctggctaattttgtatttttagtagagacagggttttgccatgttggtcaggctggtctcgaactcctgacttcaggtgatctgcctgcctyggcctcccaaagtgctgggattacaggcactgtgcccagacctattcatataaatctaacaaaatccagcaatcaggtataaggagattttatataatgtgtgctcccaattgcaacgttggttaattaaacatcttcaaaaaatttaaactgcatttataaatttgatatacagttttttttcttttttgtttttgagacaaggtctcgctctggcgcccaggctggagtgcagtggcacaatcatggctcactgcagcctccacctcctgggctcaagcaatcctctgacctcagcctcctgaatagctgggactacaggtgtgtgccaccacacctggctaattattttttattttttgtagagagtaggttttgccacgttgcccaggcagatatacaggattttaaaaaactactctttaattgttga

SEQ ID NO: 153848 - DNA, 407 bp, Homo sapiens
ttaggatacatttttgaataacagtaaaattaaaatatctgaagaaaatacctagccaaggctactgtcatcaagttacagaatcatgtttctatactaacaagtaaygagaaaccaaatagtaaatcctgagtggttttcaagaggaaatgatgataatcattgtttaaatatttaaaacatttccctgaaaagtagtttaacaaaaaaatcaattctgatttaccagttaaagaatattctgtggatatataaatggatattatggcctaatataataaagccatgggtattaactattaatgatgcaaataactgacagacttgcaaagttgatacttccatatttattattttaacaatattttgtttttctaagtgaaaagtagaaaaaaaaacacatgaag

SEQ ID NO: 153849 - DNA, 403 bp, Homo sapiens
ttaggatacatttttgaataacagtaaaattaaaatatctgaagaaaatacctagccaaggctactgtcatcaagttacagaatcatgtttctatactaacaagtaacgagaaaccaaatagtaaatcctgagtggttttcaagrggaaatgatgataatcattgtttaaatatttaaaacatttccctgaaaagtagtttaacaaaaaaatcaattctgatttaccagttaaagaatattctgtggatatataaatggatattatggcctaatataataaagccatgggtattaactattaatgatgcaaataactgacagacttgcaaagttgatacttccatatttattattttaacaatattttgtttttctaagtgaaaagtagaaaaaaaaacacat

SEQ ID NO: 153850 - DNA, 425 bp, Homo sapiens
aggttgttgagtgttgttaatttaggatacatttttgaataacagtaaaattaaaatatctgaagaaaatacctagccaaggctactgtcatcaagttacagaatcatgtttctatactaacaagtaacgagaaaccaaatagtaaatcctgagtggttttcaagaggaaatgatgataatcattgtttaaatatttaaaacatttccctgaaaagtagtttaacaaaaaaatcaattctgatttaccagttaaagaatattctgyggatatataaatggatattatggcctaatataataaagccatgggtattaactattaatgatgcaaataactgacagacttgcaaagttgatacttccatatttattattttaacaatattttgtttttctaagtgaaaagtagaaaaaaaaacacatg

SEQ ID NO: 153851 - DNA, 397 bp, Homo sapiens
gttgttgagtgttgttaatttaggatacatttttgaataacagtaaaattaaaatatctgaagaaaatacctagccaaggctactgtcatcaagttacagaatcatgtttctatactaacaagtaacgagaaaccaaatagtaaatcctgagtggttttcaagaggaaatgatgataatcattgtttaaatatttaaaacatttccctgaaaagtagtttaacaaaaaaatcaattctgatttaccagttaaagaatattctgtrgatatataaatggatattatggcctaatataataaagccatgggtattaactattaatgatgcaaataactgacagacttgcaaagttgatacttccatatttattattttaacaatattttgtttttctaa

SEQ ID NO: 153852 - DNA, 499 bp, Homo sapiens
tgttatttgcaggtagactaagtggtaatcctaaasgtgcccatgataaaacttaacagcagtggtattccagtagaaagcctttagtctaaaattgaggattctaaagagcttgtttacatgggttctatctgttagtatttatcatattataaactaatttttaaataagtttttaagtgttaatatattcttagtttgtttgggataccataacaaaatactgtaaactgagtagcttataagcaatataaatttatttttcacagctctggaagctgggaagtctaaaaccaaggcattggtagattcagtgtctgatgatgaactgctttcttgttcatagacagcgccttctagctgtgtccttagaaggcagaaaggctgaggggtttcctttgggactcttttaaaagggcactaagcctattcatgagggctctgctctcatgacctatcacccccaaagggccccaactcctaataccatcagttttag

SEQ ID NO: 153853 - DNA, 499 bp, Homo sapiens
tgttatttgcaggtagactaagtggtaatcctaaaggtgcccatgataaaacttaacagcagtggtattccagtagaaagcctttagtctaaaattgaggattctaaagagcttgtttacatgggttctatctgttagtatttatcatattataaactaatwtttaaataagtttttaagtgttaatatattcttagtttgtttgggataccataacaaaatactgtaaactgagtagcttataagcaatataaatttatttttcacagctctggaagctgggaagtctaaaaccaaggcattggtagattcagtgtctgatgatgaactgctttcttgttcatagacagcgccttctagctgtgtccttagaaggcagaaaggctgaggggtttcctttgggactcttttaaaagggcactaagcctattcatgagggctctgctctcatgacctatcacccccaaagggccccaactcctaataccatcagttttag

SEQ ID NO: 153854 - DNA, 414 bp, Homo sapiens
attttttcatgttttagtatgtctctagaagctaatcactttttaaaaagacagtaacactcttacctacaaaattaacagcaattcactagtttgctcttcttttctataaaactccaactaaataagaacaagtatgaattctttaatagttcgttttcttcctaactcwttattcaggtccacccatagtttataaacctttgaaagagctgcagactattctttattagtggtttactctcagtaattttaacactttaacaaacaatttatctgtagatgaccccaaagaatagcgtatcctgaatttaacaaagcatgtaagaaagttaagcaataatggtaatcattagagagatttcagcacaatggcaatttgagttgtattaaggttctgtgaaaaaaaatgca

SEQ ID NO: 153855 - DNA, 414 bp, Homo sapiens
attttttcatgttttagtatgtctctagaagctaatcactttttaaaaagacagtaacactcttacctacaaaattaacagcaattcactagtttgctcttcttttctataaaactccaactaaataagaacaagtatgaattctttaatagttcgttttcttcctaactcattattcaggtccacccatagtttataaacctttgaaagagctgcagactattctttattagtggtttactctcagtaattttaacastttaacaaacaatttatctgtagatgaccccaaagaatagcgtatcctgaatttaacaaagcatgtaagaaagttaagcaataatggtaatcattagagagatttcagcacaatggcaatttgagttgtattaaggttctgtgaaaaaaaatgca

SEQ ID NO: 153856 - DNA, 345 bp, Homo sapiens
gtgctcaatttaaggctaattgtttccatgaactaggcaagacccttctgtgtactgtacccaatgtccgctgaatcatgaggctttctagtttggcaggtgggagtagactgttcttgattctgtgagtgtaggcactgttctgtcatctctagygcgttctagtgtttttttctccaacctctttggcttccttatacctatgagcatgacttaactgaattcttttctttttctttttctttttttttttttttttttgagacaatctcaccctgttgcctgggctggagtgcagtgccgcgatctctgcccactgcaacctccgcctgctgggttcaagcg

SEQ ID NO: 153857 - DNA, 383 bp, Homo sapiens
aaatttcttctttctttctttctttttttttttttttttttttagcatccctttcttgtttgatggatgatgcagtatcttctgtcacccctctgaggttattgacattttctgctccctgcacagggaaacctcggtgtcctccaagtggctttctttatgtttgttttgatctgtgtttcatgtttgagtttttcctcagatatctggtgattgtggcttgcctgcttctgtttaagagtgagtccccaagggagctgatttgagagcttcaagcactcaagtgggtcttttaaactgagggcttcatggayagagctggtcctgtaaggaagcccactctcactacagtagcagcatcctgaggttttcctgttagactg

SEQ ID NO: 153858 - DNA, 604 bp, Homo sapiens
aaggcagagccattcaggacatgcacactcaaccactgggtgggggagccagagacagatgggcctatgaaccatgacctttattggggtgtgaggtattattatccaggcaggtttcctgcaggaagttctaaatggtgagtttagagcaagcaggcacatgttcaatggagtcacaatgactgtggcatatctatacagtccatacagggtatagaaactacrtaggttatgtatggttgtcccacagagagatggtcaccaggagacaattttataaaagtcggttgattatactgaggaactgggaggaggtggaggaatgaaaactgtcgagggtaaataagccctgcttctggtacaggaaagttaaaaccatattcaaaatggatgccaaggcaacataaaattataggaatttacttattgaacttattaacttgctttcctactgaaggtcattcacttttcttttcttttttgtcatgataataatactctagatacctgtgttcctatgttctggtgcttttagctgtaaaataaagtctcaagataaaattacttgtccaaaggaatatgtatttttaattcacattattag

SEQ ID NO: 153859 - DNA, 596 bp, Homo sapiens
ttccctttgctctccaatttccaactctgatattttgctctaagccttatgaaggaactgccttatagtccctgagtgctcagaactccttagagatgtttccccagttctcctgtgccatgttcctgctyttggtaggtgaaagctagaatgtctcaaattgctttctctcaactctcttttcctgccatagtgtcataactgaatgtgggttctgttgctcgccatttgcagaatccaattgacaagagtgaggtatggtagaaagaaggtgaccttatttccaaagctagcaaaggggaccgcctcaattcccatccaaagcacaagagtgaggtatagtagaaagaaagtgaccttatttccaaagctagcaaaggagaagtggctgaattcccatccaaagcaaccacttcaaaatttttgggggaaggcaagagtttagaaacagaaaacttgatatgcaagggatgcaagaattatgccaaatacaatacctatgtgttttgttctggtggctatcttgggtgtcagatcacctggaacatgggctggcatcatctcaacaatggctgggttgttggctagctgccttg

SEQ ID NO: 153860 - DNA, 596 bp, Homo sapiens
ttccctttgctctccaatttccaactctgatattttgctctaagccttatgaaggaactgccttatagtccctgagtgctcagaactccttagagatgtttccccagttctcctgtgccatgttcctgcttttggtaggtgaaagctagaatgtctcaaattgctttctctcaactctcttttcctgccatagtgtcataactgaatgygggttctgttgctcgccatttgcagaatccaattgacaagagtgaggtatggtagaaagaaggtgaccttatttccaaagctagcaaaggggaccgcctcaattcccatccaaagcacaagagtgaggtatagtagaaagaaagtgaccttatttccaaagctagcaaaggagaagtggctgaattcccatccaaagcaaccacttcaaaatttttgggggaaggcaagagtttagaaacagaaaacttgatatgcaagggatgcaagaattatgccaaatacaatacctatgtgttttgttctggtggctatcttgggtgtcagatcacctggaacatgggctggcatcatctcaacaatggctgggttgttggctagctgccttg

SEQ ID NO: 153861 - DNA, 436 bp, Homo sapiens
ggaataggactagaaggacatgttcatgaaaaaaatatatattgaccatgccaaataacttttatttaatatttcaatgccaaaagaggattgacattgataagaatcactctttaagagaatgaaaatactttttagatcaaacgatgctttcagcatgcatgaagctatgtttgctgagagtctgsgggggagagctgctgttcctgctgaggtacagtacacattgttattaaataaagcaaacaggtgttaagcacccagtcattcctgctgcctcaagaattatcacacccaccattgaaaatgtcatactcagttttgagcctataattcatatttacaaagttattatttgaacttctttggctttctgttagcactgcttcagaaaaataattactaggtgcctgaataaatacagagatattaatga

SEQ ID NO: 153862 - DNA, 577 bp, Homo sapiens
ttaggtgcccatgtaattgcccaacaggttcttcctgcccactgcacagaccatggtattaaaataaagaaagaatttaattgaggctaggttagctaggccatgaaggagacggagattttactcacatcaatttcccgtaaggctcgcaggttaggggttttcaaggatagttttgtaggcaggggactaggaaatgggaaatgttgattggttggggatgaaatcataggggtatggtaaacagttcttaaaattctttcagaatttctgttagtaactgataggttagaaaataataaatataaagaaaatttgaacaaaaaacataataatctttacctactagagacatatacacacacatagatgagcatgtacctatagaatatatttacatatatgtaggtacatatatgatacacatatatatcatatatacaacataaatatgatacatatrtatgtgtgtatacatagtgagctgcactagaaaattagaaaatacatattctcaaagagcatggcacatttataaaaatcatcttctatacttcaaatcttggaagtcttaaat

SEQ ID NO: 153863 - DNA, 452 bp, Homo sapiens
ccttggcctcccaaagtgctgggattacaggcatgtgtcaacgcacccagccctaaccctgggaatttctataggacctaagtcaatgccaaaaagccattaaaacggacacaactcatcaaaaattgtatatgaaatcaaaagggtctgaatgtggaaaaatcagacaataatttgaccctttggcctgaaagggtgaaagctaagtgtacctaatgaccaacatcagtaaaaccatgagcactgtgtataaagtraacatggacttgttttcacattctttaatacagaaacaatgtacctttagactcttaatagaacatggcaagcctgtaaagctattacttcaataagtgatctaggtcaaaactacaagaacaagcttaaaagctgagttcaattcttcataacacaatatcaacaaatgtcagccatcctcattactgtcaact

SEQ ID NO: 153864 - DNA, 608 bp, Homo sapiens
ggcataatttcattatacttcccaaactgctggtctacactgtacataagtataataatctctacatcttttaacagttacatttttactaattttctttatatttttctttatttaaaaatctaactcatgaacattttctgaataagtcaaaatttgattttttcatartaatgatgatgattatgatgacttttgtggggggaaaagttgctttcatcctagtggtttatcaaactagaccagacaatagagctttttcatttaccaataggttcttactaagtatttatcagtatcatattgttctgcaaactcttattttaatactttttatctctctagctcattctgatttcctctctctcatcctattcaccttgctattgtttagttttaaaatgcaatttaaaaagctatggaaaacaaaatagccagaaaaatggccttctggacaattactatctattaaaacagtgcaggccagcaaaggcctagttcattgagcctgttatcaaccagtgatatgcacatccaccaatttcttagctgcctctgcattgcctgactagcatgcaactatagcttaagggctacatcttaaaaaa

SEQ ID NO: 153865 - DNA, 524 bp, Homo sapiens
cacttatctgacaaagatggcagggccttgttccaaaaccctagaggccaccactgtgatacacctatgggggcctgccacaagcttcaaacagcatccttatctgccactgacatctcaatcaccattggatctgctgggtcrtataccccaagtggcagagaagcttgcacagtagcctggacctgttgcagagccttctcctgttctagaccacactcaaactggcagccttttgggtcactcagtaaataggtgtgagtaacaaacccagtgagaaatgtgttgcctccaaaatccataggcccactaggcgttgtgctctttcttggctgtaggtggggccaagagcagcaacttatccttcaccttagaaggaatatctcaacaggctccacaccattggatccctagaaattttacagaggtataaggtccttgaattttaatcggatttatttcccatactctggcacacaaatgtctcaccaataagtccagtgtgtttgctacttcttggtcac

SEQ ID NO: 153866 - DNA, 605 bp, Homo sapiens
acctttttgaatctctctattaaaggaaatatcgagctacatccttatcgatgctaccagcaaacccagatggaagagagagatgttaactgtaggggattgtgattataaagaaaaaagcccttttttgtggttcatwtgtagatggttcagtctcaaaagcaagtgttcaggttatccaacctaacttcctctaagcctgagaggagtaaaacatgttatttcattagagaattttatcacatctcttcctttattacagtcatctttcttttaagttactcttaggaacaagcttgaaaacaaagcagccacactaggtgagggctgccttgtcttttcaaaagcaaacgaatgtgacatattttttctccacgtcacctcttgaacttgaaaagaccttaggaaaactaaattttaaggttctaccattgacggagaagacacttttgcaaactattttgttttgattttatctagaagcatttatgccctagctgactgaaactacctggggaattgtttgcaattgtttttttctttgccacatggtagattctccttttctccgcctctatcctgacagctgatagaattttgaatgg

SEQ ID NO: 153867 - DNA, 526 bp, Homo sapiens
ggcccattttgaaactggccccattgactgcgcccctgcgatggggggggcagcattagcctgtccctatcctgaggccctgccgttgttcagccacattctgcagacccacgtccctggctgcctggagcatataaccatcagaacgtgggattccggtatttgaacccccgtggtgcttctcatccccagggagcaagtggacctgtacaaggggaaagctgccaaacagccagccggaagccctgcccacacctggctcaacaactaaactggcaggaaccccactccccgaaagcccaccgcacagcccatgggtccaccatgcccactcacacgccgcctgacagcaacckgctttgtgcccaccccccagcaaaccgcgctatcttggttgcatagttccctagcccaggccgctaggcaattgcacacatcactgacgggtattacagctgaagagactgtccagtgaccaagctgctgtccattcagaaccaaagtcagtaccgtgcccaaccaacag

SEQ ID NO: 153868 - DNA, 585 bp, Homo sapiens
ctcaacattctcaacttatatttattttattttgccagtataggtcattcaatcttagaaagctaaatgatattcaatatctggtacataaaagattaatgctattttcgttttcatttttccatttttttgaaatccatctaagtttagattagcttatcaaaatatgaagatgttcatcttttaaatactttcattggcttaagcaattgttgaggggtcgtttcacacccaaaccataatgtaaaactttttatatatcctgtgacagaagactcttgttctcattgacgtattttaatgaccaactcataaatccctcactgagaccccttatktagctacctctataccatttgaaaaaaaatggaaggtatggaatgcttctgggtttacttttagctccagaataaattgtatcaatgaatacattttagacaccgtattttgaggacttttgaggcttaccttaaagcctaaaataaacacatcatcaaccaaagttaatttaaatacagttaatatgtaaaactgaggtttctgttgtcaattgagccctagaatttaggattggcttatatgtga

SEQ ID NO: 153869 - DNA, 585 bp, Homo sapiens
ctcaacattctcaacttatatttattttattttgccagtataggtcattcaatcttagaaagctaaatgatattcaatatctggtacataaaagattaatgctattttcgttttcatttttccatttttttgaaatccatctaagtttagattagcttatcaaaatatgaagatgttcatcttttaaatactttcattggcttaagcaattgttgaggggtcgtttcacacccaaaccataatgtaaaactttttatatatcctgtgacagaagactcttgttctcattgacgtattttaatgaccaactcataaatccctcactgagaccccttatttagctacctctataccatttgaaaaaaaatggaaggtatggaatgcttctgggtttacttttagctccaraataaattgtatcaatgaatacattttagacaccgtattttgaggacttttgaggcttaccttaaagcctaaaataaacacatcatcaaccaaagttaatttaaatacagttaatatgtaaaactgaggtttctgttgtcaattgagccctagaatttaggattggcttatatgtga

SEQ ID NO: 153870 - DNA, 576 bp, Homo sapiens
gtcctgttttaatacctgggtgatgaaataccctgtacaacaaacccccatgacacaagtttacctatgtgacaaacctatacttgtacccttgaacttaaaataaaagtttaaaaaaatctgaaaacaattttttttaaataagtgagataagaatcacatcctctagttaagacatttcggttttcttactttaacattagtcttctgcacattatgtatatctatcagcagatagagagtcgtattaatttatcatgactatcttactgtgcaattctcctgtagatatggatctgtaaataaatttacttataatatggattctttctaatctatatgctatgacatctctttatgaacctatccattattaaatgtgttgtgataattaggaagcctacacatttaaagtgatccttacctaacctaagtataaataacaagtgcaattgccttgtctttccacatatttccccctaatggtagagagattaaaactgaaaaacccaaataattttyttccttctcttttttgaacatggcatgaaagaggcccatttttagtcaattcag

SEQ ID NO: 153871 - DNA, 638 bp, Homo sapiens
ttacagtatatcatttactggctagaagccatgcaatatgtgtctttacaaaaaaaaattaccttgtaatataagcccctccaaggcataattatgtaataaagttcttattgggaaaactggaagtaggccaagccttgtccaaatatagtgaatgtcagagccaaatttattatccttagctattaacaggagaaggcaggttttgtttaccaagcctaattctctcctaattacagccactataaaataattactatccatgggataacaacacaagacagagtgactaacagaagaaactgcaggggttagaaaacagagtgcaattctgtgtcattttgaacagcttgtgtactgccatgaacaaattaacggacttcattaaggaattatgttttaagagtggctttgcagtgaagcagtaaagcaattaatgcatcttatttggtcctagatctgagttgtagtgyagtttgagacagcaactaaatttttttttaatttttgatgtatcaggtttaataggattacaaccacattactgggcgagatagttaatgagtgtagagaaaagactctattttggacaaatgatatccagcccctatgaacttgttctgtctttatgagcagat

SEQ ID NO: 153872 - DNA, 638 bp, Homo sapiens
ttacagtatatcatttactggctagaagccatgcaatatgtgtctttacaaaaaaaaattaccttgtaatataagcccctccaaggcataattatgtaataaagttcttattgggaaaactggaagtaggccaagccttgtccaaatatagtgaatgtcagagccaaatttattatccttagctattaacaggagaaggcaggttttgtttaccaagcctaattctctcctaattacagccactataaaataattactatccatgggataacaacacaagacagagtgactaacagaagaaactgcaggggttagaaaacagagtgcaattctgtgtcattttgaacagcttgtgtactgccatgaacaaattaacggacttcattaaggaattatgttttaagagtggctttgcagtgaagcagtaaagcaattaatgcatcttatttggtcctagatctgagttgtagtgcagtttgagacagcaactaaayttttttttaatttttgatgtatcaggtttaataggattacaaccacattactgggcgagatagttaatgagtgtagagaaaagactctattttggacaaatgatatccagcccctatgaacttgttctgtctttatgagcagat

SEQ ID NO: 153873 - DNA, 622 bp, Homo sapiens
actaatttgtctgtatctgcagttgtatgttacttataatagatgttttgttaatgtttcctaaatatgtgaatgaaggaatgaatgaatgaatgaatcaataaaaatgagttgaaatagcagagagtcatgtgtatgcgttagaacttaaaattctatcacaaaaaacaaaaagctttactgcggtaggcagcctaagggcccctctcaaagatgtctgtgtcctcctccctgggacctgtgaatgtgtacatggcaaaggagactgcagatgtggttgtgggtaggatccttggaatcgagagagtatcctggattatccaggtgggtccactctaattgaatgagttgttaaaagcgagaacatttccatgctgtgatcagagggggatgtaacgagctgaagcatgaaagagctgtgacactgctggctttgaagatggagggaaagtgacacaagccaagaatgcaagccctctagaaataagaaaggacgaaacacggatgctgtcccagaagctccagaaaggaaggcagccctgacaacaccttcattttagccctgtgtgacccatgtcagacttctgacytacaaaaatgtgagataataaaagcgtgttgt

SEQ ID NO: 153874 - DNA, 460 bp, Homo sapiens
attaaatttatcatttacgttttcaaaatgcaaatctgatcatattgttaacctgcttaagaatattttagcaaaatacaagattatctagcaccaaatgagatgcgattcacaatacctaggtacctatacyaattaaaagggatacagaaacacaggatgaggacacctggattgtagttcaggtatttaataaggtagaaaaagcatgagcatgttatatatttctaaaaataaaaactgcagaatctgaaatacatgaaaattatatgatctaagatgaaaaatatactgggtgatattaataaaatattaggcactgaagaacaaaagagtaatgaccttgaaaatacagtaatagagaaatagcaaaaatgaaacatcaaaaaatttgataaaacatgaagtggacatcagtaacttgctggaattttgaggtacgtgcactgtattaaattta

SEQ ID NO: 153875 - DNA, 628 bp, Homo sapiens
tgagaatttttaaaaagagattttagtgaaggctttcactttagagaaaaggataaagacattattagggaatttggttcatggagaagctagtcaatagaatggccttagtttcttgccaagtctcttgaaatggtttcaaattcttataaactgagggttagagatctaagataaagaaattgtttccattgataaaaccttggttgtgtgtgtgtgtgtgtaaggaggagtaactattaaggattaaatgataaaatgtgaccagatacctcacacttatttgtggaaatgttttggcaacttttaggtaatagggaggaagcacacttggtcattatcctctggaaagcaccaatggcagtgagaacagtgaggcatcctctagtgactccctgagtcaagagcatcaacgagaaggaaactagractaaaaagaaaaaaagaaaaaaaaaggaattttttgggttctgtacctgattgatatttgttaaaataaccttaaggatttcaagcaatattaaatcgagagattacaaagtttagattctattgtagaagcttgtggaaagatcatgaaatttagattgttagtactaatttaagtttatatccactaagtgtttgg

SEQ ID NO: 153876 - DNA, 452 bp, Homo sapiens
ttttctacaaggcacaccgtcaaaaatcaaagacagaattctaaaaatagtaatagggtcaagttacatataaggtagttcccagcatactaacagtgaatttctcagcagaactttataggccaggagagcacaggatatattcaaagtgctgaaagaataaaagctgccagccaagaataccatacctaccaaagccaaccttcagaaatgaaggagaaataaagtctttctaagacaagcaaaacctgagggaattcataaccaccagaatgacttctaaagaaatgcttaaagaagttctatatgtggggtaaaaggatgatacctaatattaaaaaaaaagaaaakaaaactcactggtaaaacagctaatcagatgacaaagagaaaggaatcaaacactatcagtacaaaaaaaaaaaaaggtaaataatagaagaggcaataat

SEQ ID NO: 153877 - DNA, 566 bp, Homo sapiens
gaactttcctttttatgctgcagtcttaaattagcttgcaatttagtgagggataaggaaagaagccctcatatcctatcccttaaaagatagtgcagattcttaagtaatgagtgctatggtttcaatatttgtgtcctctgaaactcatgttgaaacgtattccccaatgtaactgtattaagaagtggggcctttaaggagtgattgggacatgagggctgtttcctcatgaatgaagtcattcattcatagattaattggttagtggattaatgggttatcatgggaatgggttagctatcacgagagtaaatttcttataagtgccagtttggctctcagtrcacctgtctcactctgtgatgccgttcatcatgtgatggaacacaaggcaatcaccagaagctgaccagatgccaagccttagatattagactttatagcctgcagaaatgtaataaataaatttcttttatttataagttactcaatctcaggtgttgagacatagcaacagaaaatggagtaagacaatgatctaaaagaaatttgagtttaatgac

SEQ ID NO: 153878 - DNA, 504 bp, Homo sapiens
atgccagaggcaatttggactaagaaataattgtcaaaaaatggcagggctttactacaaatgtccttgaaattgagagtggaaygggcaactacatatagaccaaccacttttggtataaaagtgggctatggagccctttttactgaaattttaaaaagtagattcattatgaaatattttttgaaggtggggtgggcacaagagaatagcgcactcaattaattaggtgagcattaaaaatgactcagtgggctaggcgcagtggctcatgcctgtaatcccagaactttggaaggccaaggcagtcggatcacccgaggtcaggagttcaagaccagcctcgctaacatggagaaaccccgtctctactaaaaatacaaaaattaactgggtgtggtggcgtgtgcctgtaatcccagctactcgggaggttgaggcaggagaatcacttgaacccaggaggcagtggttgcagtgagcccagatcctgtcactgcactc

SEQ ID NO: 153879 - DNA, 563 bp, Homo sapiens
ctgatattttttagtaactgctgactcatttagctgtaacatttgtactgaaatatccactcatatgttagacttattaattagattcagtgttaaaacaaggatcctaacgctgtgccatccagcagactacctggtacatagtaggcataaatgatctttgtgttatttcatgattgaagtcaaccctgatgttaaaatttttcctttatctgagcaagggaatttacaatttgttcttaccaagggcttgaaatgcaattacactctacagatcattaaaagtcacacatgatgtcctaaggcatagagagttggagtgtaatgagaattacacctattacaagtgcatatgaattgggaggctgcgttacctgtgtttccttgtcaggtcttttcttttccaattggtwtgtgccttacacaatccatcaatcaggaggattaatggcgtgcccagaaatgtaggccatacggagataatcaaggcatcataaattgtgttagagcagatacagcctaccaaatgggactgctagcacagcaatcacatttccaaactg

SEQ ID NO: 153880 - DNA, 563 bp, Homo sapiens
ctgatattttttagtaactgctgactcatttagctgtaacatttgtactgaaatatccactcatatgttagacttattaattagattcagtgttaaaacaaggatcctaacgctgtgccatccagcagactacctggtacatagtaggcataaatgatctttgtgttatttcatgattgaagtcaaccctgatgttaaaatttttcctttatctgagcaagggaatttacaatttgttcttaccaagggcttgaaatgcaattacactctacagatcattaaaagtcacacatgatgtcctaaggcatagagagttggagtgtaatgagaattacacctattacaagtgcatatgaattgggaggctgcgttacctgtgtttccttgtcaggtcttttcttttccaattggtttgtgccttacacaatccatcaatcaggaggattaatggcgtgcccagmaatgtaggccatacggagataatcaaggcatcataaattgtgttagagcagatacagcctaccaaatgggactgctagcacagcaatcacatttccaaactg

SEQ ID NO: 153881 - DNA, 637 bp, Homo sapiens
acatactatcaatatggtttatgagtatagatgttgacctggatcacctggctgaactagtatttgccagatttctctactataaagttactcttttatttcttttctatactgtactctgaaatgcacaggccacacctaaaagacgaggagttatgcttcctatcttctaggctatggtatgtacataattaatttaaaatatttctgcatcagagatttcttccttcaccatttataattcattgattgacaccaatatcctttgtctatattcagtaacaattactgtatacttttaaattgattgaagtttaatataacaagaataaataaatatatagctgaactcaaaaaagagagagagagagtgacaaagcccagtttccagaaacaaaaagatgaaagaaaaaaatgtcctttaacatataaaggaagttcccttctatttctagttttctggatgtttttatcatggaaaggtgttgaattctggcagatgcctattgtcaattgagatgatcatattttgttcatttatgttttccttcattctattaatgtagagttattacaytgatgttcttatattgactaacccttgaatcttggaataaatcccactaggtcatggtgt

SEQ ID NO: 153882 - DNA, 572 bp, Homo sapiens
aaatgttccttcctcttctgtaattttaagcttttcagaaggattggtgttcattttttattaaatgtttggaatggttgataaaatgtacccrtgaagctatctgaatttttttgttgttgagacgtttttaattactgattcaatctacttgcttattatagatctgttgtgattttctaattcctcttgagcgaaattaagtaatttatatgtctagaaaggtgcccatttcattttggttatataatttgttagcatacaacttttatagtagtgtaataatttttattactttaaggtcaataatatttccactttcatttctggtttatttgtgtcttctctctttgttctttattaccctagctaaaggtttcttaattttattaatcttttaaaataatcaaattttggttttgttgattctccctattatttttctatattctacttaatttatctttgttgtattctttattatttcctttcttctgctatctatcttttggcttgtttatgcctcttttctaattcctcagaatgtagagctaggctattgcttttagatc

SEQ ID NO: 153883 - DNA, 329 bp, Homo sapiens
gaattcgaagtgtcacaagcagttggtacattcgtgtttaccagagagatgctgtttaaatgaaaggaaaatcaatattttctatttctttgcagagtaaaagtgagcaaattaccgtgcggcatctgacatcaggaaactgggaagtgataaagatcttggcatacgatgaaactactcaaaaaatgtgagtgttttcagttctctagtcaggctgcaagttagcgttgtcaratgccatcttttctaatagaattatgttttgcttaccatagtcctagtcaaaacaagccagccatggaaagaataacctttctttaaagacctct

SEQ ID NO: 153884 - DNA, 617 bp, Homo sapiens
atcactggttgacttaatatatggcactaggcacccctgcaggagtaggactgctaccgtagtcattgttactttctttgtctcaaaatttgygtctctttatttcagcaatctcataatctaaataatgagaaaataccacataaatctccagggagcttggatctaaaagctttatggaagagtagagagaaaaaggttttaaatcttagtatgtcactgaatagctgtatgcaactgggatactttctaagcttttctgtggtgaaaattgtacaatgttgtgaatgtaattaatgaaactgaattgtacacttagaaatgcttaaaatgacaaatgttatgttatacaggtttaacccaaattttataaaatgaaaaaaaatggctatggatattttataagttatcatgagtgaaactaatatgatttgtgcttggtatatattgttttgagtattataaggaaatttttggattgtaatcatctcacagtgtttcaaatatggaattgtgattttgtgaactgtttcttgtagctgccttaacacccctgttccaatccccatacctacagcgtattgcacatcaaaatcaacgtgaatattgttcatttg

SEQ ID NO: 153885 - DNA, 567 bp, Homo sapiens
ttcattgagcctcaatattcccttcagttctgtataaatacrgtccattattcatcttcttctggttcctgtggtagcacagatatttcttccttcaaacaatcactgaagaatttgaggattgtgctgtagagatgatacttgctcttctcagatacgttatgaccttcatctgggtagacctaagatattgaggagaaagaagatttcaaattatccaagaagctattgtctctcgcattcattttctgagccctaacgtcatggaaactttgagtaataatatctgaccaaaatcaaacctaattctactctaagttattcatgctaaacttttaaaacaattgtaatcatgtcaattaatatttggtatttaaattagaatatgttggccataaaaggtagactttttcatgtttatgttgactgagatggactaaccttgccctcagcttgactaaactttggacagtttctttttgactaaaggcccttggcctctcctcccctttttaggagtatttagtttagaaaactttccagctctttatttaaagagcattgagt

SEQ ID NO: 153886 - DNA, 567 bp, Homo sapiens
ttcattgagcctcaatattcccttcagttctgtataaatacagtccattattcatcttcttctggttcctgtggtagcacagatatttcttccttcaaacaatcactgaagaatttgaggattgtgctgtagagatgatacttgctcttctcagatacgttatgaccttcatctgggtagacctaagatattgaggagaaagaagatttcaaattatccaagaagctattgtctctcgcattcattttctgagccctaacgtcatggaaactttgagtaataatatctgaccaaaatcaaacctaattcwactctaagttattcatgctaaacttttaaaacaattgtaatcatgtcaattaatatttggtatttaaattagaatatgttggccataaaaggtagactttttcatgtttatgttgactgagatggactaaccttgccctcagcttgactaaactttggacagtttctttttgactaaaggcccttggcctctcctcccctttttaggagtatttagtttagaaaactttccagctctttatttaaagagcattgagt

SEQ ID NO: 153887 - DNA, 487 bp, Homo sapiens
cattcatcatttcagcaccaatcaacaattaaacctgattcaatggagccctgacagctaatttaaaccgagcctcacaatcggcctgacactggctatttaaaactctgtcctggcctctggggcctttcggaaccaggactgtttgtcctgccaagagcaaagccccacccgctgtggcctggatccccatgtatgtagtgtgcagsgtctgttccagccatcactgtctctgcctggctccctgtaggctgtgggagggttctgggagaggtcgggaatgccaggaggaggaattggtgaagcaaagaaaaggcaaaagcccactgagaggtctaatgagccccaggtgcacacacttgtgttgtgtgtggctttcttcaggccctgggcaaatgtggcagcctggggtgtattgggagcatcagaacccaggtcaagtcctgactctgcaatccataaaccagttccgtgaccttgcccaggt

SEQ ID NO: 153888 - DNA, 487 bp, Homo sapiens
cattcatcatttcagcaccaatcaacaattaaacctgattcaatggagccctgacagctaatttaaaccgagcctcacaatcggcctgacactggctatttaaaactctgtcctggcctctggggcctttcggaaccaggactgtttgtcctgccaagagcaaagccccacccgctgtggcctggatccccatgtatgtagtgtgcagggtctgttccagccatcactgtctctgccyggctccctgtaggctgtgggagggttctgggagaggtcgggaatgccaggaggaggaattggtgaagcaaagaaaaggcaaaagcccactgagaggtctaatgagccccaggtgcacacacttgtgttgtgtgtggctttcttcaggccctgggcaaatgtggcagcctggggtgtattgggagcatcagaacccaggtcaagtcctgactctgcaatccataaaccagttccgtgaccttgcccaggt

SEQ ID NO: 153889 - DNA, 438 bp, Homo sapiens
agaacagacattaagggaacaagacaggtaataaattgcgtatatagttttgccacagctrtataacaaatgcaaaagtgcatgtttttttaaaaaaaagactggaaggaaaaacaaaatgttttattggttatctccacatgaagattctatgtgattttaccttcctctgtacacttttctccctagggagcgtgttacctttctaaatagaaaagcgtaagtgtgtttttgaaagagaaaagtctgtcatcctctgtcaccccagccagcagaagtcaactttcacattctggagttaggcagaaattgctggggtttttgttttcttcttccctctgagggcaggaaataactctttcccactgggtttcctgctggagttggaggcccagaaaaattctggctgaagactggaggcaggtataaacatgccag

SEQ ID NO: 153890 - DNA, 344 bp, Homo sapiens
agtgactccttactgccgtccaggcagcctgggggctacgaggggcttcagaggtcctcatccccagcctgtaggcctggccatactggacccatgagatcagccaccctgtcagctggtacctcggggtcctacagtcctcctcgctcaagcccyggtcctctaactcggaggtgatgaggtgttgggctggaagagacaggcagccaggtaagagtgtggggagacacggatgcccagtgggcagctctgccctgggtgctgctgtttctgcctctcttgggatgggttgggttgaggaagggacctctgagatggaggaggcctccatgccctttgcctcc

SEQ ID NO: 153891 - DNA, 506 bp, Homo sapiens
acaaggggagctgcaggtacagaatgttgtcttgtatgttgattgtaatgatgattacacaggtatatacatttaccaaaactcattgaactgtacacttcaaatgtgtgcattttcttatatatgtaaattaaaactaaatatagttgatttaataagtgagataatatgctgaagcccccagcaccattcatggtacacaataaatgcttagcaaatgttatttctcatctcaccagcaccacctctttaatttctctctgtgttcctgctcttttcacacactctcagcgtaatgtgcttctcatacctctctgcctctccraattcctcccatccttcaatgtgcagcttaaatccttctagcctgaatgttttccaggttactccaggtcacagtgcagaacccttaaagcatccaccacttgcttctccaaaattaagcatggttgtgtagtaacatgtgtcattcacaacttgtttgatgcatctatgtcttgctttac

SEQ ID NO: 153892 - DNA, 506 bp, Homo sapiens
acaaggggagctgcaggtacagaatgttgtcttgtatgttgattgtaatgatgattacacaggtatatacatttaccaaaactcattgaactgtacacttcaaatgtgtgcattttcttatatatgtaaattaaaactaaatatagttgatttaataagtgagataatatgctgaagcccccagcaccattcatggtacacaataaatgcttagcaaatgttatttctcatctcaccagcaccacctctttaatttctctctgtgttcctgctcttttcacacactctcagcgtaatgtgcttctcatacctctctgcctctccgaattcctcccatccttcaatgtgcagcttaaatccttctagcctgaatgttttccaggttactccaggtcacagtgcrgaacccttaaagcatccaccacttgcttctccaaaattaagcatggttgtgtagtaacatgtgtcattcacaacttgtttgatgcatctatgtcttgctttac

SEQ ID NO: 153893 - DNA, 490 bp, Homo sapiens
aactactaatcactagagcctagcactgggctagatgctttctcatacttgaagactcatttattccacagctctgtgaggttagaaatataataatcccctttcagatggaaagaaacaggcttgaagtgaktttcagtgatatcttcgaggttacccaactgaagaaaagtcacagttctgtgctggtaaagtgactctgaagaaagagagaaaaaaaagcttgcccattactgtggtgtaaatgctcccactgtggctgatttcatgcccaccggtatgagctagcctctgcacactactggaggagctgcatttgaatgcaagctcaggtttcctaatttcgggtaaagatcatttcctgagcccagggcagtgacactcctccccaagcaaagaatcccctcacaccaggaaggacccagagctggttggatcacttaggcctccaccctcagaccaacctaaccagatcctctgaggcaggggc

SEQ ID NO: 153894 - DNA, 565 bp, Homo sapiens
aactaatttagggggagatggaagatggggaaagagccacacctgttttcagattatgttgaccaatgtttctctgcttttgccattgtaaaaattatctatcataaatttcaatccactttccatcaaattmtctttcagttacagtacaaaaaaaggtagggggaggtgtttcccagaggcagacaccaacccatattttctcatatatcagcttagttttttgtggcctgttttgcttttcttacattttccttattattatactcagttggttctgattcccattccagaaacagtacattcttttgcatgaaattttgcagatgtcctacagattagatcccagaggttatacatgttcggatttccaagggcataataataagcgaaatccctaatttaagtgaagaaggagattgttggagacctttctctctacaacattagagggctgttacaaactaaagcaatctcactttagagtctagctttaaacttagtattaaagtcaaaataatgagattcacattaggtttctgataaactataaaatcaatttcaa

SEQ ID NO: 153895 - DNA, 565 bp, Homo sapiens
aactaatttagggggagatggaagatggggaaagagccacacctgttttcagattatgttgaccaatgtttctctgcttttgccattgtaaaaattatctatcataaatttcaatccactttccatcaaattatctttcagttacagtacaaaaaaaggtagggggaggtgtttcccagaggcagacaccaacccatattttctcatatatcagcttagttttttgtggcctgttttgcttttcttacattttccttattattatactcagttggttctgattcccattccagaaacagtacattcttttgcatgaaattttgcagatgtcctacagattagatcccagaggttatacatgttcggatttccaagggcataataataagcgaaatccctaatttaagtgaagaaggagattgttggagacctttctctctacaacattagagggctgttacaaactaaagcaatctcactttagagtctagctttaaacttagyattaaagtcaaaataatgagattcacattaggtttctgataaactataaaatcaatttcaa

SEQ ID NO: 153896 - DNA, 415 bp, Homo sapiens
cttctaccttacccatagctagagttcctcatgaggccctctctttttattgttaggattggttttgattagttagtagcctgcttgctcatctttctaatcccactttcccttctccaatccctcatccacacagcagccagagaggcctttttaaaacaaaaaccagaccacatcatccccccacttaaaacatttcactgattttccaatgtaaaatcaaatacaaaatccctaatatggtcttgcatcatgggatctctgatgacatctgggacctcatctcatcccaccacaccctcctcatgttccagccacactgacccacttccacttscaggaacttgcccagccttctccttcctcagcccctactctgctctcctcgcatggtcttctccctcacggttctact

SEQ ID NO: 153897 - DNA, 634 bp, Homo sapiens
atttatctttgtttttatctttatcttttgggttcttggtcatgaaatccttgcctaagccaatgtctagaagggtttttccaatgttatcttctagaatttttatagtttcaggtcttaaagtccttcatccatcttgagttgatttttgtataatgtgagagatgaggatccagtttcattctcctacatgtggcttgccaattatcccagcaccatttgttgaaaagagtgtcttttccccactttatgtttttgtttgctttgctgaagatcagttggctgtaagtatttgggtttctttctggkttctctattctgttccattggtctatgtgcctatttttataccagtaccatgctgttttggtgactatggtcttatagtatagtttgtaatcaggtaatgtggtgcctccagaattgttctttttgctttgtcttgctttgactgtgcagactcttttttgggtccatatgaatttctaggggtttttttttctaattctgtgaagaatgatggtagtattttgacgggaatagtgttgaatttgtagattgcttttgtcagtatggtcattttcgcaatattgattctacccatccatgatcatgggatgtgtttccatttgtt

SEQ ID NO: 153898 - DNA, 634 bp, Homo sapiens
atttatctttgtttttatctttatcttttgggttcttggtcatgaaatccttgcctaagccaatgtctagaagggtttttccaatgttatcttctagaatttttatagtttcaggtcttaaagtccttcatccatcttgagttgatttttgtataatgtgagagatgaggatccagtttcattctcctacatgtggcttgccaattatcccagcaccatttgttgaaaagagtgtcttttccccactttatgtttttgtttgctttgctgaagatcagttggctgtaagtatttgggtttctttctgggttctctattctgttccattggtctatgtgcctatttttataccagtaccaygctgttttggtgactatggtcttatagtatagtttgtaatcaggtaatgtggtgcctccagaattgttctttttgctttgtcttgctttgactgtgcagactcttttttgggtccatatgaatttctaggggtttttttttctaattctgtgaagaatgatggtagtattttgacgggaatagtgttgaatttgtagattgcttttgtcagtatggtcattttcgcaatattgattctacccatccatgatcatgggatgtgtttccatttgtt

SEQ ID NO: 153899 - DNA, 634 bp, Homo sapiens
atttatctttgtttttatctttatcttttgggttcttggtcatgaaatccttgcctaagccaatgtctagaagggtttttccaatgttatcttctagaatttttatagtttcaggtcttaaagtccttcatccatcttgagttgatttttgtataatgtgagagatgaggatccagtttcattctcctacatgtggcttgccaattatcccagcaccatttgttgaaaagagtgtcttttccccactttatgtttttgtttgctttgctgaagatcagttggctgtaagtatttgggtttctttctgggttctctattctgttccattggtctatgtgcctatttttataccagtaccatgctgttttggtgactatggtcttatagtatagtttgtaatcaggtaatgtggtgcctccagaattgttctttttgctttgtcttgctttgactgtgcagactcttttttgggtccatatgaatttctaggggtttttttttctaattctgtgaagaatgatggtrgtattttgacgggaatagtgttgaatttgtagattgcttttgtcagtatggtcattttcgcaatattgattctacccatccatgatcatgggatgtgtttccatttgtt

SEQ ID NO: 153900 - DNA, 406 bp, Homo sapiens
gaggagaatcctgatgccttcactcatttctgtgctaagataggttgcccccacatcctctaccaacaggagtccatgctggttggttwtctcatttttcacaggaaactgactgtcctaccactggttgatttaaattctaaagcttatagatccatcaccaatcagcattatagaaaactagctctccaaggtttcctccagaaaatgaactttgaatggtcagcaatgcagatatttatagcgccagataaaagagtgatttaagagaaaatggagggtaattgattgattcatgtattcatatcctgggcagtgcattcatatcataatcatctggtttctcctggaactgccttcactaaattgtgctttaatgtttgttcatggctttcagttggtttaa

SEQ ID NO: 153901 - DNA, 387 bp, Homo sapiens
ggaattagagatgatgctggagcaggagggaagaccaagccatacaaagccctgtaagtcaaattagtaatttttagatataagtttagatcaacggttcttaaaacttagtatgagtaagaactaaargaagagagtcttggaaaatgaagattctgatgaaaatattctaatctatcaatctgcatttttaataagaattctgtttgagaatctccatttttaatagaaatctcaactgggtacagaccacacttgaaaagcctctaaagggttttgagtagggggaaaacataacttgagttttaaccacatggaaggctgtgttgaaaatggactcaagtgaagcaaatataaagcacttgaggtttttttggaggggttgag

SEQ ID NO: 153902 - DNA, 530 bp, Homo sapiens
gtctttagcctgtgtaaaaaagagtcaaaagtctttatccttttcttgtttttgacaattcaagaaatatcagtcaaaacatgtttgacataaagattactactaacagaatttaaaagtatatgtatacatcacaagtaatcaaagaaaaatgatgtctctctacctgaaatccttagaggaggaagaaaaggtaacagcattgagaaaaatatgaaagaaaatgaaaataataagacagatgacaaaagaaattcaaacatgaaagaagagaagaacacrgtaccctcaataaagccaaagaacccatggagtcaagagaaaagggttaggtcaaaagaaatcttatctgaataaataaaaattacccaaacagaaaaaaataattacaaataggttaaggaagctcaaaactgcccatgctatcaggccataagaaaaaaaaaaaaaaaggcaagtgctatatttgagataggagactgagaaccatgtacttgatgcaagggaactaggaatggggattagcacct

SEQ ID NO: 153903 - DNA, 581 bp, Homo sapiens
gtttcagactggattaaccatgttttcccatgtccctttctcaccagagtgaaggcaagtcgtcgtgggttctgtcctttaagtttaagggatgagaaggaaggaaaagtaggttggccttggatttctgcatccagcytcctctctctagattgggatatcagcatagtccaggttggcccctggatatgagactcactctggtcatcttgggagttcaaggatatagtcggtgtctgctgtgagggatgagacaggcacagagcactggaacctgctcttgcttgacccctcactaagacaattataagacaaaaagatccccagggtgtcccagtcacaaaactcagggaacacccaaagagggaaaaaccaaatactccaggaagtggccactatcccacccctgcaaccaccctcaccgtggcacagttccctggcttaaagtactgattaactttgtgtttagttaagtcaaggagaactgataaaatagagtttacaatattacagtcttaggctcacactgatttctcatctgaagaggcctagaaataaatatactagccattatgtattaa

SEQ ID NO: 153904 - DNA, 541 bp, Homo sapiens
atgcggttttgtggctctcacagagagaaggaggagcgtggggacttacaggctttcttcacacaccatgggtgaacacagagacacacaatttgtaccctggggccctgttattctacctcaggagtggaattattattttcctaatttgccccacaatacacaaaaaaaggacaaaactgggaatataaattagctatgtaaaaatactactactgacagctggtttccattcatggctaagcactgtagggagtgctctgcggatggtctcctgcacctggagatgaacgatagtaggtactcaatgaataagattgttgaattaataagcaggcactggtgtgggtggaaatgcccttatcttaacggagcttaaaatgtagtaggaaaaaaatcttaaataascacacaaacacatagcatggcagaaggtaatcttttttttttttttttttggcagagtgtcgctcttcttgcccaggccggatgcaatagcgccatctcggctcaccaaaacctctgcctcccaggttcaagc

SEQ ID NO: 153905 - DNA, 577 bp, Homo sapiens
agatctgagaatctgcattttaactccagaagtatgctgatgttgctgatgcatgaaccacacttggagcaataaggctctaaagcagattcctttgagcactgactcttctaggactaataataataataagaatatgccactcaccacagaaggctattgcaaagattaartaactttgcaataactcagcattgcctattatttgcatttagtggtgggaaaaccaaggctctgaggtgttaactagcttgcttatgagcacccagtgcaagcaggagagtcagagtgtgactgcagagtcccagagttcacccatgtgactgttttgctgccttgcctgtttctaacctgtagcttgctgcttgacctagtttgcatgaagagtcttagccttgggttttaccttagagcctcacaaatgttagctgctattgttgtcattaagctttgatgagttttctgccttgaacctcctccttttaccaggattaaaaatatatcaacgacacatgccctgccctgccagctacttccattttatatacaagaaagagaaaactcagagatgttggat

SEQ ID NO: 153906 - DNA, 538 bp, Homo sapiens
tttggcatctagataaaactggtctttctctataaagtctactatgttctggtctagtttcaaaacgtataaacacactgaaattaaaacatgaagtattaagaatacaagataacgtgggggccaaaagtcatgaatgagggagtcaacagtgtggctaatatgacaccccctcccacccgagccacctcacacttcccagggcacactcaggaagccactggcagccactgcacaaggctgctccaagattacatgtcacctggacctacraattatttgaaacagcaacctaacccaacagcaagttgggctgttttctccaaaggaattcccaactgtcttctacaatgaaatgtctatgcaaatcagccccagaccctgtggggccatagtttctccaagcagcagtgatgtttagggattaatactgaaagctgtgctttgtctggatatcatcaagaacctgctgcagctcctcatcttcaaaccacccctccaagtttgggattagagccttggactcctcagcagtctc

SEQ ID NO: 153907 - DNA, 427 bp, Homo sapiens
aacagtgtggctaatatgacaccccctcccacccgagccacctcacacttcccagggcacactcaggaagccactggcagccactgcacaaggctgctccaagattacatgtcacctggacctacgaattatttgaaacagcaacctaacccaacagcaagttgggctgttttctccaaaggaattcccaactgtcttstacaatgaaatgtctatgcaaatcagccccagaccctgtggggccatagtttctccaagcagcagtgatgtttagggattaatactgaaagctgtgctttgtctggatatcatcaagaacctgctgcagctcctcatcttcaaaccacccctccaagtttgggattagagccttggactcctcagcagtctctgggcaaaggttggccaaacagaccaactcaaattt

SEQ ID NO: 153908 - DNA, 519 bp, Homo sapiens
atgttctggtctagtttcaaaacgtataaacacactgaaattaaaacatgaagtattaagaatacaagataacgtgggggccaaaagtcatgaatgagggagtcaacagtgtggctaatatgacaccccctcccacccgagccacctcacacttcccagggcacactcaggaagccactggcagccactgcacaaggctgctccaagattacatgtcacctggacctacgaattatttgaaacagcaacctaacccaacagcaagttgggctgttttctccaaaggaattcccaactgtcttctacaatgaaatrtctatgcaaatcagccccagaccctgtggggccatagtttctccaagcagcagtgatgtttagggattaatactgaaagctgtgctttgtctggatatcatcaagaacctgctgcagctcctcatcttcaaaccacccctccaagtttgggattagagccttggactcctcagcagtctctgggcaaaggttggccaaacagac

SEQ ID NO: 153909 - DNA, 501 bp, Homo sapiens
aggtacatagtcaaactctgaatactctattaacataatggtggtatgtaaatcacttatatctttagtataaaaggttaaaagacaaaactattataaataataactataacaagttcttaaagaatatgcaacataaaaagatataagctgtgacatcaaaaattcaaaatgttgagagaggagttaaattaaaaagtagaaatttttgcaatcaaatttaagttgtcatcagttttaaataacctgttacaaccataaaaagtctttgtaagtctcatggtaaccacaaagcaaaaacctatgcactaaaaataataattaggaatcaaaacatacractaaagaaaattagccacaaaggaagatagtaagagagacagaaagcaaaaaaggatccacaaaacaactagaaaacatgtaacaaaatggcaggagtaagttcttacaatcaataattaccttgaatataaatgaactacattatccaatgaaaagtca

SEQ ID NO: 153910 - DNA, 501 bp, Homo sapiens
aggtacatagtcaaactctgaatactctattaacataatggtggtatgtaaatcacttatatctttagtataaaaggttaaaagacaaaactattataaataataactataacaagttcttaaagaatatgcaacataaaaagatataagctgtgacatcaaaaattcaaaatgttgagagaggagttaaattaaaaagtagaaatttttgcaatcaaatttaagttgtcatcagttttaaataacctgttacaaccataaaaagtctttgtaagtctcatggtaaccacaaagcaaaaacctatgcactaaaaataataattaggaatcaaaacatacgactaaagaaaattagccacaaaggaagatagtaagagagamagaaagcaaaaaaggatccacaaaacaactagaaaacatgtaacaaaatggcaggagtaagttcttacaatcaataattaccttgaatataaatgaactacattatccaatgaaaagtca

SEQ ID NO: 153911 - DNA, 516 bp, Homo sapiens
tctaagcaaaggcaaataaaatactacacctctcagcaaagtgaagacacaggctctggggccacctgaagcttctatgcagaagtgrgaatgttttccaagaggcttgtcttgtcattcccttacaggtagatttaggtcaagcattgcattccctgggagccagtaagtaccaaggagagaactaacgtagattctctataccttttttcccatatgggagtgggtttctgcctctccaccctgggtcccctctgctctctgaagatcctcagtcacttagagtggagggacccagagaacaggtggcattgttggacctcctgcttgctcactctgccccatgcactgcaacacgtccctctctaaaatagtttgcacctgcccacctggggcacccttgctgagcacagatgccaggtagatccttcagctaggccatatgtgtatgtgtgtgcttactggtgtatgtatgtgtgcatgcaggcatatatgtgtgagcatgtgtgcatgcat

SEQ ID NO: 153912 - DNA, 516 bp, Homo sapiens
tctaagcaaaggcaaataaaatactacacctctcagcaaagtgaagacacaggctctggggccacctgaagcttctatgcagaagtgggaatgttttccaagaggcttgtcttgtcattcccttacaggtagatttaggtcaagcattgcattccctgggagccagtaagtaccaaggagagaactaacgtagattctctataccttttttcccatatgggagtgggtttctgcctctccaccctgggtcccctctgctctctgaagatcctcagtcacttagagtggagggacccagagaacaggtggcattgttggacctcctgcttgctcactctgccccatgcactgcaacasgtccctctctaaaatagtttgcacctgcccacctggggcacccttgctgagcacagatgccaggtagatccttcagctaggccatatgtgtatgtgtgtgcttactggtgtatgtatgtgtgcatgcaggcatatatgtgtgagcatgtgtgcatgcat

SEQ ID NO: 153913 - DNA, 498 bp, Homo sapiens
gaattcctaacatactcggtgaagattgatttccrgttcctttctttgctcattttaggaggaagacctgtttacttatttttattttactatttatttatccagtgaatgctagtagagatgttactgtgtgctaggaaattcaaactgcataagtctgcacactcgactttcccttttgtgtgtctcaaaggcattaataatcaatatttccccaaactaaactcataatcctgtctttccaacctggtcttctctctgtgcctcttgtagtaaaatggcactacttccagttatgcaagtccgaaacttaggggtcatctttggtatctgtaatccttatctcccgtatctaacccatcaccaaagcctttctgttgacccttattatctctggagtctattacgtatgtttctccaccagcaacactaccaccatcttggcccaagctatttcacttaagctcccctgcaagctgttgtcatcctgcagcctgc

SEQ ID NO: 153914 - DNA, 498 bp, Homo sapiens
gaattcctaacatactcggtgaagattgatttccggttcctttctttgctcattttaggaggaagacctgtttacttatttttattttactatttatttatccagtgaatgctagtagagatgttactgtgtgctaggaaattcaaactgcataagtctgcacactcgactttcccttttgtrtgtctcaaaggcattaataatcaatatttccccaaactaaactcataatcctgtctttccaacctggtcttctctctgtgcctcttgtagtaaaatggcactacttccagttatgcaagtccgaaacttaggggtcatctttggtatctgtaatccttatctcccgtatctaacccatcaccaaagcctttctgttgacccttattatctctggagtctattacgtatgtttctccaccagcaacactaccaccatcttggcccaagctatttcacttaagctcccctgcaagctgttgtcatcctgcagcctgc

SEQ ID NO: 153915 - DNA, 605 bp, Homo sapiens
gcaccactaattgaactgtgtatttttgttaggcctacattatgaaaaagtttcaaatttacaaagaaaaataaaaaacccagtatttacatacatcacatttagtatccagcagtggctctagaggatgaagacaagcatgtgctactttgataacatgttcaagttttcgagcctgttcttccacttttgcagccaaaaataatgcagtagacgatattatctgcagaaaagataaaactctggtcatttaaraacaaatacatttcaaaaaaccctctattttcttttcttttctgttttttttttgaggtggagtttcgctcctgttgcccaggctggagtgcagtggtgtgatctcggctcactgaaagctccacctcccaggttcaagcgattctcctgcctcagcctccctgagaaggtgggattacaggcatgcaccaccacactggctaatttttgtatttttagtaaagacagggtttcaccatgttggccaggctggtctcgaactcttgagctcaggtgatccatctgcctcggcctcccaaagtgctgggattacaggcataagcccctgtacccagcccaaaccttctatt

SEQ ID NO: 153916 - DNA, 605 bp, Homo sapiens
gcaccactaattgaactgtgtatttttgttaggcctacattatgaaaaagtttcaaatttacaaagaaaaataaaaaacccagtatttacatacatcacatttagtatccagcagtggctctagaggatgaagacaagcatgtgctactttgataacatgttcaagttttcgagcctgttcttccacttttgcagccaaaaataatgcagtagacgatattatctgcagaaaagataaaactctggtcatttaagaacaaatacatttcaaaaaaccctstattttcttttcttttctgttttttttttgaggtggagtttcgctcctgttgcccaggctggagtgcagtggtgtgatctcggctcactgaaagctccacctcccaggttcaagcgattctcctgcctcagcctccctgagaaggtgggattacaggcatgcaccaccacactggctaatttttgtatttttagtaaagacagggtttcaccatgttggccaggctggtctcgaactcttgagctcaggtgatccatctgcctcggcctcccaaagtgctgggattacaggcataagcccctgtacccagcccaaaccttctatt

SEQ ID NO: 153917 - DNA, 486 bp, Homo sapiens
cctgaaccttgtgactatttcctctttcaggaatgccagcagagaccaccatagccatttgctccatgatcatgggtggagtatttgagaagtttcccaaactgaaagtgtgtttcgcacatggtggtaagaccctatctttattagtcagctcaggctgtcacaacaaaatcccacagatggggtgactgtaagaaaacagaaatttattttctcacagtcctggaggctagaagtccaagatcaaggtgctggcagggttggtttmtagtgagggctctcttcctagcttgcacatggccaccttcctcacatggcctttggtttctcctccttttcttacaaggacatcagtacaccagtcctgttggattaaggccccaccttatgacctcatgtaaccttaattatctccttaaaggtcctttctccaagcacagtcacatttggcattagggcttcagcatatgagttttgaaggaattc

SEQ ID NO: 153918 - DNA, 526 bp, Homo sapiens
cactaattatagaatgtttaaaaaaatttttttcatcttatataaccacagatttttgtcacctccaaaataaaccctgtacccattagcagtgactccccattcttttctccctccagcccttggaaaacactagtttaccctctgtgtctccagaattgcctggttggtacatttcacataaatggaatcacataatatgtagccttctttcatttagtttaatgttttcaaggttcacccatgttattgcttgaatcaatacgtacctaagagtggaagtgctggcgcrtatggtgagtccatgtttaacattttgagaaactattttctaccatggctgcagctttctacattcccaccagcatgtatgagggttccagtttctccagatcctcgccaacattggttattcatctttttgattatggccatctcagtaggtatgaggtggtatctcactgtagtttttatttgtatttctctaataagtaattatgttgaacatcttttcatgtgcttattg

SEQ ID NO: 153919 - DNA, 526 bp, Homo sapiens
cactaattatagaatgtttaaaaaaatttttttcatcttatataaccacagatttttgtcacctccaaaataaaccctgtacccattagcagtgactccccattcttttctccctccagcccttggaaaacactagtttaccctctgtgtctccagaattgcctggttggtacatttcacataaatggaatcacataatatgtagccttctttcatttagtttaatgttttcaaggttcacccatgttattgcttgaatcaatacgtacctaagagtggaagtgctggcgcatatggtgagtccatgtttaacattttgagaaactattttctaccatggctgcagctttctacattcccaccagcatgtatgagggttccagtttctccagatcctcgccaacattggttattcatctttttgattatggccatctcagtaggtatgaggtggtatctcaytgtagtttttatttgtatttctctaataagtaattatgttgaacatcttttcatgtgcttattg

SEQ ID NO: 153920 - DNA, 557 bp, Homo sapiens
ctccctggaagtacgaagtgttatgactataatgatggaaatgatgtagatggtgatgatgaagtgtatcagctgtctgcttgcgcatatgagactactacataagaagaaacctggtttggaatgaaaaaccaaacatcatatgttctcactcataagtggtagctaagttatgaggatgcaaaggcataagaatgacacgatggactttggggactcggggaaagggtgggaagcagatgagggataaaagactaaaattgggtgcagtgtatactgcttgggtgatgggtgcacaaaatctcacaaatcaccactaaagaacttactcatgtaaccaaacaccacctgttccccaatagcctatggaaataaaaataaatacataaaaataaaaaaagaagaagaaacctggtttatatgggacaaaattcctctccctctttaaagcaatagctgstgatagaaaggagagggagtttggaagctgggaagtccaagatctggtgagaacccgcttcctggttctaagatggtgccttcttgctgtgccctca

SEQ ID NO: 153921 - DNA, 569 bp, Homo sapiens
gatgttttctattttacccaaacttcctcatgcatggacctaagaacttgctcccagtcagggccagcttcatggtgtgggaactgtgcggttgcacagagctctgctttgagaagggcctcatgtttgttgcatgctctgttgtcaccatcttgaaaattttaatactttttgaacaaggagctctacattttcatttttactctgagtccctcaaattatgtagcctgttcttctcctgggttatagatggcttgggctctctgctttcttctcactcttctctcccagtcatgcmcctgagccaggctcaggaccatgctcagtgctggactcgccattgtcatgtcctctggagaaggaagcttatagggagtcaactttcagtaatccttctgtggattttgtggattatttgtcatctcagttgcttttttttttgtttttgtttgtttttgttttttgtttttttggccatcccatggacctctagttggtttggactttcaagaaaagtcaggtaatttcaacagtcatgcaagctgaacatgaggagggaggtaaatatg

SEQ ID NO: 153922 - DNA, 560 bp, Homo sapiens
catagtgtgtaccaatcttaagtttacagttcagatatttttatttacataaacagatgtgtggcacttcaccaatcaagatacttagcattccataaagttccttttgctccaactgtgattctcgtttctactgtcatccgttagtttcacctattcttgaacttcaaaaagatgggatcatgcagtaggtaactttttgtgtctggttactttcacttagtatctgtgtggttcattcatgttgctrtttgtgctactatttcattctttttttattgctatgcgcctcttttttctcgtttttcttgagtctacctttttctcttagatgggttgttaggctcagtctaggatatctggcagtgagcggcaggggaaacaggtacataggtaaacagatcccagctgtcccagagctctgatctacatttccagtctgaagctatgggttccacataatgaggaggggacaaaatgactaacagaaaacaatgcaactgttgaataatccaaacccagacataaccgagtcagagagcatttcttctgagtcctct

SEQ ID NO: 153923 - DNA, 612 bp, Homo sapiens
agatctgtgctctggagaaaaggacgtggtctccaagagggtgaaaccaggcatgttaacagcctttggagtcacagcaggcttctctgagggcaccgtaggcatcccttcctcatgtggggttctttattaagaatgttttcttcactgcaaaccagtttagagttcaccatatgaagggagggtggactaactctaagctcaaagatagacttccatcatgtgtgcttgtggtacagtgtttagcaccataactcactttagaacagtcctgatcaccatcaygccttaaatatgcattccccactggtctctaaggaactcatctgtggcttgaccaatcacagagccattcacttttaaattatctatggagagccatgaagcagaatcactccaacctgacaatttcctgtttgtttcccagaattctgggattctaagaattccaggattgttttttgtttttatttttttaaaaaaagcatatacactagagagaatctaatgatgtctaaagaaaattgtcaaatctttgtgcaccctgagagtcagatcctctttcaactttaacattacttgatcgcctgctgtgaagtaaacactgctctg

SEQ ID NO: 153924 - DNA, 582 bp, Homo sapiens
atgaagcttctagaaaaaaatatatatatttgaaacattggattakacaaacatttcttagataggacacaaaactcaccaaccataaaacgaattaaattgggcttcatcaaaattaaacagttgccttcatataaggacatcatttttaaatgattatgcaagccacagactaggaaaaatattacaatacatatacctggcatctaatctataaactaacacccagaataaaaaagaacttctacaaatcaaaaacaaaaaaaaaagacgagcaaatccagttatttaaataggtgaaaacttgaagagatactacacaacagaagatatacaaatcctcagtaaattcatgacaaagttgcttaacatcattggtaatttttaaaaattccatttgaaatcacagcgagatagcatttcacactgactagaagagctaacatgaaagagattcatgacactaagtgatggttaaggatatggtgtagctggaactctcagtgaaagtgtaaaaggatacaaccactttaaagaaattcaggaaatttcacattaagttaagcatgtactagccatata

SEQ ID NO: 153925 - DNA, 572 bp, Homo sapiens
aatatgaagcttctagaaaaaaatatatatatttgaaacattggattagacaaacatttcttagataggacacaaaactcaccaaccataaaacgaattaaattgggcttcatcaaaattaaacagttgccttcatrtaaggacatcatttttaaatgattatgcaagccacagactaggaaaaatattacaatacatatacctggcatctaatctataaactaacacccagaataaaaaagaacttctacaaatcaaaaacaaaaaaaaaagacgagcaaatccagttatttaaataggtgaaaacttgaagagatactacacaacagaagatatacaaatcctcagtaaattcatgacaaagttgcttaacatcattggtaatttttaaaaattccatttgaaatcacagcgagatagcatttcacactgactagaagagctaacatgaaagagattcatgacactaagtgatggttaaggatatggtgtagctggaactctcagtgaaagtgtaaaaggatacaaccactttaaagaaattcaggaaatttcacattaagttaagcatg

SEQ ID NO: 153926 - DNA, 572 bp, Homo sapiens
aatatgaagcttctagaaaaaaatatatatatttgaaacattggattagacaaacatttcttagataggacacaaaactcaccaaccataaaacgaattaaattgggcttcatcaaaattaaacagttgccttcatataaggacatcatttttaaatgrttatgcaagccacagactaggaaaaatattacaatacatatacctggcatctaatctataaactaacacccagaataaaaaagaacttctacaaatcaaaaacaaaaaaaaaagacgagcaaatccagttatttaaataggtgaaaacttgaagagatactacacaacagaagatatacaaatcctcagtaaattcatgacaaagttgcttaacatcattggtaatttttaaaaattccatttgaaatcacagcgagatagcatttcacactgactagaagagctaacatgaaagagattcatgacactaagtgatggttaaggatatggtgtagctggaactctcagtgaaagtgtaaaaggatacaaccactttaaagaaattcaggaaatttcacattaagttaagcatg

SEQ ID NO: 153927 - DNA, 541 bp, Homo sapiens
caaacatttcttagataggacacaaaactcaccaaccataaaacgaattaaattgggcttcatcaaaattaaacagttgccttcatataaggacatcatttttaaatgattatgcaagccacagactaggaaaaatattacaatacatatacctggcatckaatctataaactaacacccagaataaaaaagaacttctacaaatcaaaaacaaaaaaaaaagacgagcaaatccagttatttaaataggtgaaaacttgaagagatactacacaacagaagatatacaaatcctcagtaaattcatgacaaagttgcttaacatcattggtaatttttaaaaattccatttgaaatcacagcgagatagcatttcacactgactagaagagctaacatgaaagagattcatgacactaagtgatggttaaggatatggtgtagctggaactctcagtgaaagtgtaaaaggatacaaccactttaaagaaattcaggaaatttcacattaagttaagcatgtactagccatataaccata

SEQ ID NO: 153928 - DNA, 572 bp, Homo sapiens
aatatgaagcttctagaaaaaaatatatatatttgaaacattggattagacaaacatttcttagataggacacaaaactcaccaaccataaaacgaattaaattgggcttcatcaaaattaaacagttgccttcatataaggacatcatttttaaatgattatgcaagccacagactaggaaaaatattacaatacatatacctggcatctaatctataaactaacacccagaataaaaaagaacttctacaaatcaaaaacaaaaaaaaaagacgagcaaatccagttatttaaataggtgaaaayttgaagagatactacacaacagaagatatacaaatcctcagtaaattcatgacaaagttgcttaacatcattggtaatttttaaaaattccatttgaaatcacagcgagatagcatttcacactgactagaagagctaacatgaaagagattcatgacactaagtgatggttaaggatatggtgtagctggaactctcagtgaaagtgtaaaaggatacaaccactttaaagaaattcaggaaatttcacattaagttaagcatg

SEQ ID NO: 153929 - DNA, 581 bp, Homo sapiens
gctttgcttgaatgagctcaattatactgcgaacgctgaggcctgtgttggttgtatggccaccacgatcactgcgtcctggcaacatggtcacttccttgactacctatcctgcctcaaatgcacataacccattgatagacccatagcaatgcaataaacacctgtcgactaactttcagattatgatctgattataaaaataagagktacagtctctgtcctcgtgcatcttacaatctagcaaagaaaatatatattaaactaataattattacaaacagttgttctctatgtttctgtgcagtgagatgtctccttcacatttcaagattagatcaatttttttcttttttctttctttcttgctttctttcgttctttcattctttcttttttcagggtctctacctctatacagcatgcagagctgttgccaagtctagcctcaaactactgggctcaagcaatgctgagtagctggaactacagacatgcaccaccacacccagctaatttttaaaattgtttcactcttctgactccaacttagtggttctcagccctgaataattttgccc

SEQ ID NO: 153930 - DNA, 501 bp, Homo sapiens
attatacagcagtgtatctcttcctttagatctattaatatctgctttatatacktggaagctctgatgttaggtgcatagatatttataatttttatatcctcttgccaaattgactcctttatcattatatagtgaacttcttcgtgattttttataaccttagctttttactctagtttatctgttataagtgtagctacttttgctttttattggtttccagttgcatggaatattttttccaccccttcactttcagcttatgtgtgcctttataggtgaagtgagtttcttgaaggcagcatatagttgggtcttgtttctttatcaattcagtcactttatgacttttaattggagaattgagaccatttatagtcagtgttattgataagtaaggacttactactgccattttattgcctattttctggttgttttgagactactgtcttcctttctcagtctttttttttttccatgtttaagtgattttcc

SEQ ID NO: 153931 - DNA, 520 bp, Homo sapiens
ttatgtttttaaggattttatattagagaattatggcaccagaaaaaaatctgttacataaaatgtcatcctcaatatattatgtagtaagtataaataagtaggataactcccagaatgcaccaggaagattcagagcagaagaattgctatgagtgtgcaggggttggggaatgaccctctgtgtaatcaggcatgtataaggtgaaaaagaaatttctaggacgaagtctcatgtttggatctgtaagatttgctaaagggccaaaattgtacatgctttgactaattattaaattccacagccagacacactgcccccccmcacacacacacacatgattgttcaattaatatctgtcaaacagcttgatactcataaatgcagatgcacatattaactcctttcttccttcttcttgtctaaatggtgaaagaacgagaaacaccaagttctgtccatgaagcaacaagacagtagtctaaggatactggagcagaaagatgcaaaagaggtggg

SEQ ID NO: 153932 - DNA, 504 bp, Homo sapiens
ctactcccctgaagaggtagctccgttctgatctgagttaggtattgacgttttcaaaggttaggtaaaccaccagatttcaacctttcaggttttcatagtagggaaactgaactgcataaaggttaggcagcttaactgctagttaatgacaatagcaggattatgtctttacttctgagatagtagtttttactttgaataggtggtgtacatttatgtcccgagttaaaatatgtgtgtgtgtgtgtgtgtgtgtgtgtatgtatatatatatatcaaacagtacaaaaaggtaggcctcacttgccctgcatacctactttccagaggtaaccagtatcascagtttcatgtgtacgccacaggtattttaagcttattcaagaactcgtaaatatatagagaaagagcattcttttttaaaactccaacttttttgcacttaacctggagattttccatgttagtacaaatgttgtattcttgtttaaagttgtactg

SEQ ID NO: 153933 - DNA, 504 bp, Homo sapiens
ctactcccctgaagaggtagctccgttctgatctgagttaggtattgacgttttcaaaggttaggtaaaccaccagatttcaacctttcaggttttcatagtagggaaactgaactgcataaaggttaggcagcttaactgctagttaatgacaatagcaggattatgtctttacttctgagatagtagtttttactttgaataggtggtgtacatttatgtcccgagttaaaatatgtgtgtgtgtgtgtgtgtgtgtgtgtatgtatatatatatatcaaacagtacaaaaaggtaggcctcacttgccctgcatacctactttccagaggtaaccagtatcaccagtttcatgtgtacgccacaggtattttaagcttattcaagaactcgtaaatatatagagaaagagcattcttttttaaaactccaacttttttgcacttaacctggagattttccatgttagkacaaatgttgtattcttgtttaaagttgtactg

SEQ ID NO: 153934 - DNA, 428 bp, Homo sapiens
gttgttacatctgtcactctgaggtccttctggtgatgttgccatatcttataacatcaacaaatgttttcttaaaaatgaaattttcaggtgcattggctcacacctgtaatcccaacattttgggaggctgaagtgggagaattgcttgaggccaagagttcgacaccagcctgrgcaacacagtgagacaccatctctaccaaaaaaattaaaaaattagctagtcatggtggtgtgtgcctttagtcctagctattcccaggagtttgaggttgcagggagtatgattgtgccactgcactccagcctgggtggcagagcaagactcggtctctatttttaaaaaaagaaagaaagaaaaatttgccttcactgccagttctacattgtggaggatactttgttttggcccctagagggagcgc

SEQ ID NO: 153935 - DNA, 470 bp, Homo sapiens
aaattgagagagctcctattgcatgcccttgctcttcccagggtaatagcaaggtgaagccctctacagatgatggtgaggaaaatyctgctttaaaaaaatgttgtcagataaaatgatggtttgctaggactgaaacagggaacaggggactgaacttcacctcatttaagacataaatttcttataggcaataagcaacagtgacaggaaatcaagaccaggctgcaattaatgtgaaattgctctctgtgaaactgttagtaaaaggagattgtggatgatgaaggggcactggcttaagctgttttcatggactccactcgtgtagaaacagagcaattgcttcatgtcttagtgttcccacaggatcaaccaaagattcatgccagtggacaaaacagatagctttcctcccaaagtgatgtggtcactggatttctcagtctgaggggacaccagtgattcct

SEQ ID NO: 153936 - DNA, 615 bp, Homo sapiens
taacttttcagacaaacagtaatatctcctttgtaactcatgagaaaaaaagattaactgtcaaaatttacgttttcaaaagtttgtcttctttcccgagagaaaaaaaaaagaaaaggtgtctcctctacatgatatgaaccaggaaactttagtcctatgaaagagaataatgccaagtgtttccaggtaagataaggaaaggtgacattgttaataagaaacacaagtggaattgcttgttgtggtaaataattgtaaaaaaattggcctcaaaawttgtcagaaattgactccccaaatgttaccaacacaatctgttgaaaagtcaaagttgcatgtattatagacctaggtcatggggaacgttacctcataaagtttggcagtatatcagatggagatattggaagtttgatataaggttggtgtttcatctggcagtagatcagatggagatattggaagtttgatttaaggtggattcaaatcaagacacaatagtacacaattgttgggaacactaaggtaaggattttgacacaaaggattcagtgaatcttatagcacagcaaactaatgaagtttttcattgcaaagttgattgatcttctg

SEQ ID NO: 153937 - DNA, 545 bp, Homo sapiens
gatataaataaaaagttattcaaatttgtataacaaatttttgaaacttttatgttaaaaatgataaccttataccttagctgataatctatttgctttcttttcttgttgacagttgattgacagctttatttataaatytaattcttcagcatgcttgtattgtatgactatgtatttggttagcgaaatgtttttgtgcactaatctcattgttccagagttttttcttgaataattatttttccaatgacttatagtaacactctactttgcttatgtataatgaaaattcaagtaatcaaaggtagaatagggtttatgagcttaagatctacgatcagttgaatttaggttttcttttttttttctttttattattattattatactttaaattttagggtacatgtgcacaatctgcaggtttgttacatatgtatacatgtgccatgttggtatgctgcacccattaactcgtcatttagcattagatatacctcctaatgctatccctccccgctccccccaccccacgacggtcc

SEQ ID NO: 153938 - DNA, 545 bp, Homo sapiens
gatataaataaaaagttattcaaatttgtataacaaatttttgaaacttttatgttaaaaatgataaccttataccttagctgataatctatttgctttcttttcttgttgacagttgattgacagctttatttataaatctaattcttcagcatgcttgtattgtatgactatgtatttggttagcraaatgtttttgtgcactaatctcattgttccagagttttttcttgaataattatttttccaatgacttatagtaacactctactttgcttatgtataatgaaaattcaagtaatcaaaggtagaatagggtttatgagcttaagatctacgatcagttgaatttaggttttcttttttttttctttttattattattattatactttaaattttagggtacatgtgcacaatctgcaggtttgttacatatgtatacatgtgccatgttggtatgctgcacccattaactcgtcatttagcattagatatacctcctaatgctatccctccccgctccccccaccccacgacggtcc

SEQ ID NO: 153939 - DNA, 545 bp, Homo sapiens
gatataaataaaaagttattcaaatttgtataacaaatttttgaaacttttatgttaaaaatgataaccttataccttagctgataatctatttgctttcttttcttgttgacagttgattgacagctttatttataaatctaattcttcagcatgcttgtattgtatgactatgtatttggttagcgaaatgtttttgtgcactaatctcattgttmcagagttttttcttgaataattatttttccaatgacttatagtaacactctactttgcttatgtataatgaaaattcaagtaatcaaaggtagaatagggtttatgagcttaagatctacgatcagttgaatttaggttttcttttttttttctttttattattattattatactttaaattttagggtacatgtgcacaatctgcaggtttgttacatatgtatacatgtgccatgttggtatgctgcacccattaactcgtcatttagcattagatatacctcctaatgctatccctccccgctccccccaccccacgacggtcc

SEQ ID NO: 153940 - DNA, 545 bp, Homo sapiens
gatataaataaaaagttattcaaatttgtataacaaatttttgaaacttttatgttaaaaatgataaccttataccttagctgataatctatttgctttcttttcttgttgacagttgattgacagctttatttataaatctaattcttcagcatgcttgtattgtatgactatgtatttggttagcgaaatgtttttgtgcactaatctcattgttccagagttttttcttgaataattatttttccaatgacttatagtaacactctactttgcttatgtataatgaaaattcaagtaatcaaaggtagaatagggtttatgagcttaagatctacgatcagttgaatttaggttttcttttttttttctttttattattattattatactttaaattttagggtacatgtgcacaatctgcaggtttgttacatatgtatacatgtgccatgttggtatgctgcacccattaactcgtcatttagcattagatatacctcctaatgctatccctcccygctccccccaccccacgacggtcc

SEQ ID NO: 153941 - DNA, 624 bp, Homo sapiens
aattaagaatgttcaattatgattgtacagatccctcttattcaatactaaattaatattgtttgatatggctcttatcttagaaatggtgaaggcgttcgttatgtgggatatgctgttaccactgaacttgaagttatcaaagaagttctattcttaacccttaatctgctcaggtaactaaactcaacatctccaatttgagcatgaacyctggaaaaagcttaaaaagtaaacccttatgcaaatagtagatgtgctttccgagttttgtgctatttgacaatatatggctgaaatacacaggtctattgaaaatggtaaataacagtgcagtttaaaaagctattcaatgcagcaaagtgctatctgtaaataaactagtactccatattagagaccactcctgaagctaagggcaatggcttgtcttattccgttggtaaatgtggcatttacccacccaatatattaagtgctaataaattgataaaattgtgattgactcaaagcaatcagctcaaaattctgaaaaaatatatatccactatcagaggacttctccgtctttaatgatggatactggtgattttatcctggcttcctagaaacattacatttcca

SEQ ID NO: 153942 - DNA, 610 bp, Homo sapiens
cctgtatgtgcttttaaagtccttgtaacatttagttagagggctttaactcctgggtctaaaatgaatacaaagccctgctaaatcttaaacacttacagcaattaaatcatcatattcaggccccatagagatgccagacaaataaactgcattcctgagacacagggcaagaaattaaagctattcagctcttcaaggccctaggaatcttgtggaagaggtgaatgcaaaagattgtaaggcccaattttgaaagataaaataaattcggtttccctataaattaatcattagtgtcaaaggcacactgatgcaaaaccagtatataaacccctgtgtcagattaacaaagctttcttgcatcattaaccaattccttaataaaggctataaaggttataaaaggcttatggaagttataytttataatcaagatgaaattgtatagattgtttacaaaattctgaaaaacaaatgtaactgggttcatgctgtttttattagggcttcttgtttagaaaattaattaagtctcctctctcaaagaacaaagatttttgctttttattcaaatccttgaattatcactctggttaaataaatgact

SEQ ID NO: 153943 - DNA, 545 bp, Homo sapiens
acatgcctaagaaaatgttggcaagaagaaaagagacattattataccattaaaacagagtatagggaagaaagataaaattacctatatgcttgtcctaaaacattagctgttaatattttggtttattctcttcactatgttttcaatgtttcaaagatatatattattttacacaattaaaattaacttgtaaaaatataagatcaattttttaaaaatcatataatttttcatattaaatgtgacattacagtatcagagtttacctagctgctaaagattttattattattattattattatwatactttaagttttagggtacatgtgcacaatgtgcaggttagttacatatgtatacatgtgccatgctggtgtgctgcacccattaactcctcatttagcattaggtatatctcctaatgtcatccctcccccttccccccaccccacaacagtccccagagtgtgatgttccccttcctgtgtccatgtgttcccattgttcaattcccacctatgagtgagaacatgcagtgtt

SEQ ID NO: 153944 - DNA, 571 bp, Homo sapiens
atataattatttaaaatttcatgtaggtagaatttgtgaatacaaatttaatataaaccagtaacaattctgataattttgcaaaaggaatttggaatggcagaagacagaaaataatagcggttagtagtaagagtacctaaaaatggttgggctggggtcaagcaccacccaaggaagcctagacagatagaagcagaaaagttctttaaaatctaatagttacatgtatataattatatatgtatgtgattttatgtatttatatataatttctgctatagtatacaatgtggccatttattttaatgtaaaggtaatattgtatattgcctactttgaagwaaaattgaaactctaagaagaaatgacatattttcccttgagcattctatgcaccagatatacaactgtggaccccaggagtacatgcaccaagtttgagaagaattattaaatgttttaccatgtatttgacgtttattgtaagaaatgattatatatacatgatttttaaggactttaagtataagattttatttaatcctcaccaaaatcactgagacataat

SEQ ID NO: 153945 - DNA, 589 bp, Homo sapiens
gaagcagaggcagcaaggtagttgagaagtgaaaatctgggtttgagtttgtttttcatattttgttttcaatttagacttttctgatcatttgtcaacatgaaatctgggataatggtggaagcacttaaaggtaaggggaaaagctgagcgaggttccacatttcctagtaaattaaagaggaatctctaggagataactagatgatggaaataagaaatgaaccaagtgtgatatatccaaatagcatgagtacaaaagagtagagattttagaagtggctctgagaagcatgcagatcccaatatgaactcctgactctaaggatgcttaaaaaatgagtaacagatgaaaatgtatatatctgtatatatggacaaggaaacttcagttaaggtataaaattggaagaatttggggtaartgatcaatgataacagcaaacacttcttgaatgatcactatgagtgaactttgtgctaggcaccttatataataatttaactttattctttcagaaattctttgaaataaatactatttgtatatccattttacaaatgagaatagtaaaacactgagagatca

SEQ ID NO: 153946 - DNA, 589 bp, Homo sapiens
gaagcagaggcagcaaggtagttgagaagtgaaaatctgggtttgagtttgtttttcatattttgttttcaatttagacttttctgatcatttgtcaacatgaaatctgggataatggtggaagcacttaaaggtaaggggaaaagctgagcgaggttccacatttcctagtaaattaaagaggaatctctaggagataactagatgatggaaataagaaatgaaccaagtgtgatatatccaaatagcatgagtacaaaagagtagagattttagaagtggctctgagaagcatgcagatcccaatatgaactcctgactctaaggatgcttaaaaaatgagtaacagatgaaaatgtatatatctgtatatatggacaaggaaacttcagttaaggtataaaattggaagaatttggggtaagtgatcaaygataacagcaaacacttcttgaatgatcactatgagtgaactttgtgctaggcaccttatataataatttaactttattctttcagaaattctttgaaataaatactatttgtatatccattttacaaatgagaatagtaaaacactgagagatca

SEQ ID NO: 153947 - DNA, 594 bp, Homo sapiens
caacataattccaatcaaatccctagcaagtgattttacggatacatgacaagctgattataaactttatatgcagaggtaaaagacccagaatagccaactcagtattaaaggaaaagaataaaattggaagactgacacyacttgacttcaagatttactataaagctacagtaatcaagacggtgtggcattggtgaaattaattcaaatatggatcatcataggcctaaatgtaaaatgcaaaactatcaaactctagaagataacataggagaaaacctagatgactttggctatggcaatgactttttagacacaccaccaaaggcacaatttatgaaagaaataatggataaactagatttcataaaaattaaatacttctgctttgtgaaagacaatgtcaagagaatgagaagccaagtcacagaccgagagaaactatttacaaaagacacatctgacaaagggctgttattcaaaatatacaaactcttaaaattcaacaaggaaagagacaatccaattaacaaatggacaaaagacctgaacagacactttaccaaaggagatatacaaacggcaaataag

SEQ ID NO: 153948 - DNA, 422 bp, Homo sapiens
tgtatacaggaggatgtatttaggttatatacaaatactacgccattttatataaacaacttgagcacctgtggatttttggtatccagggagggaggtcctgaatattttggtatctgggaacaatctccaccagataccaaggagtgactctacagactcattttaatctttatgaaaactctctaatataggtgctatttttcacatasaaataacttaccagaggatactcagctactaaatggcagaggccccatttgaacccaggcagtctggctctgaagcttgtactcataaccactatactacccagcaagtgtttgaaccatcaaggtctcctaagagccatatgttcttctcctctaattcccaggctctgctgctgactctgaaatttctggccagccatcagtttccct

SEQ ID NO: 153949 - DNA, 447 bp, Homo sapiens
tccttggctcatggccccttccatcttcaaaggcagcaattacatcgctccaacctctgctcctgttgtcacgtttccttctctgactctgacactgctgcctccttcttacaaggatccttgtgattaccatgtgcccacccaaatcatccaggataatcttctcatctcaagatgcctaacttaatcacacccacaaagtccattctgtcatataaggtagcatattcacagacttgggggatttgcctgtggtcagctttagggagacattattctgcatcccttaccagttcatgggatttttagayttgacatcaggaaagttggtcacgctattgccacaaaatctttggcaatatctgaaaacattttagattgtcacaattgtcatctagtgcaggggtccccaaccctggggccactggagcatgagtcctattgtga

SEQ ID NO: 153950 - DNA, 409 bp, Homo sapiens
gaattcagtttctaagctgagtgttgtgtgactaaaacatttggatggaggttatagattaattggatgttgtaatgttgcactttcatatttagataaaaataytcgatcatgctatcatggaagaactagaatgggaatttttaaatttgataattgatgttcacatcatgcatttgtggattttttttcatgtttttaatagaaacagacatcacagtttgagaagtcaagagggcattttccctcatatatcaacaaccaccgcacctttaacccaagcagtactgaagggcatttgagcatctagcaatttcattaaattgagaaaatacagtttagggaagtttgagataattaaatcattacatttggttaggcacatgtttgtctcaatatcatttttaga

SEQ ID NO: 153951 - DNA, 630 bp, Homo sapiens
agaagtttgatgtgtcaagaaaggtagactttccctacacaggaaggcagatccctgcatagcctttaccaagatacttgatactataaacagaaattttatggtttggtggtgtcacttcctacgtgtgaatccaaatctttaggaattgtggtttaagtcaacaactgattttgggcagacatctgcacaacatgtggtggtrttgccatagtgattgttactctgaggaattcagggtaggatatttacactgaaacttctgtgtttcaaaatgaagacataattttagatactaaggacctttacatatatccctcctgaatgttaatgttatttaaatgagtaatagaacacttcagacattttttcattccttgaaaatgaaatgcttttcatttcctgaaaatgaaatatgtcctctgcctggagatactcttctgaaatgcaagagctcaaatagagcaaattcaaatagtttttgagctctactgctagcaggaaggagttaggatttagaaggctgatttcactgcctgctgtgtgttttcatttcactttgctagggtcagttgctgtatttcagaaacagagaagctctgaaagcagagatgtgtgactgagaacatg

SEQ ID NO: 153952 - DNA, 342 bp, Homo sapiens
caatgagtgctaattcaagtctaatactaaattgtgatgattaacaaaagccttttaaagggttttggtgagtggaatggcaacagataggtggccactatacggcagaacaggacacaaagtgagatgtcagatgtctctgttcctagagcccactggctaccctcctttgcaggagtccctggctgtccctggccatctctccctggctggggtcatctctaactctctcctgcatcccctctcccaccactccccaagcctcaaaactgcagsttcagtgttcccagaaaaatggagaagacaacaaaaaagattctctccataaaccaattgttttac

SEQ ID NO: 153953 - DNA, 450 bp, Homo sapiens
tttcaggtctcttttggaaaagaaatatttaaaagtatacaactatcaagttgcatgagatatttcactttttataagaagccatttctttcagcagttactagagtttgtttttcagaggagtgggtagcaatctgtcatcaaagtgttgacaagtgaaatctgacaaggtagaggtggtatagctgcgggccactccaaaattttccactatcttttctatttgtagataaaggatttctgttttttttttttttcatttgagctcacttcatagcagtctttgatttctaaccttttcaaaacaataaccctgaattgacaaattattttggtatttaagcattggtttagataaragcatttcagtgttctcttgcctttattttagctatttaggagttattcctgaaattcaatttattttctcttcaaagttacgttttttca

SEQ ID NO: 153954 - DNA, 566 bp, Homo sapiens
cttgtcacaccatgaactaaaaaatttcaaactgaatgaaaatagacaatgaatagatgccaatactgagatgacagaaacgttatgatttaaatctgacaaggatttaaaggcagctattataaatgcttcaatgagaaattatgaacatgcttggaacaaatgaaaaatcagaaaagctaagcataagtgatgtgcaatatctacagcaaccatgaaaaaattataacaaaaagatacactcaaaaaactgtatctaaataaatagaattcacaaacgtattcaagtaacccacaagaattaaggaaaaataaaatggaaacaaaacccggaggaaacaaatagaaagcaaaaatgaagtggcaratttaaactctaatatatcaataattactttaaaggaaaatggtctaaaggcatcagttaaaagacagattgaaagaagggatttaaaaagatgacctaactacatacagtctacaagaaacttacttcaaatataatgatagagacagggttgaaagtaaaagaatgaaaaaagatatcatgcaaacattaatcaaaa

SEQ ID NO: 153955 - DNA, 589 bp, Homo sapiens
gcattccagtctaggcaacagagtgagactccatctcaaaataaattttaaaaaaattgtgaaacacagctgaagcagtgctgagaaaataatttatagcactaaatgcatacattagaaaagaagagtttcaaattaatgatctaagtttccacctaaggaagctagaaaaagaagagagaaaaaagcaagcagaagggaaaaataaacataaaagtggaaccaataaaattgaaaatagaaaaacaatagggagaggaatgatgtcagcaagatggagragtaagagataacagcctccctcctctaacaaaaaataataattaaacagctatccaaggataaaaatagccctgagagggctcaaatgtccgtttaaaaactacagcaatacagtggagcaaaaaaagataataaccatacagaaaagattgctaaggagattagctaattagagacatctggagatggctgggagtaaaggcaaggcataggggctatctttatcagccatgctgcaggtgccattgtaaccccaagtggcctgctcaatggaggactccagcaacctttgctgctcaggaactca

SEQ ID NO: 153956 - DNA, 623 bp, Homo sapiens
actatggaggtaaaagctctgtacactgaaaactacaaaacgttgacgatgacattgaagacataaacaaatggaaagatatcccatgttcatggattggaagaatattgttaaaatgtccatactatccaaagtgatcaatagattcaatacaatctttgtcaaaattttatcatcatttttcatagaaatagtaaaaacaatattaaaatttggatggaaccacaaaggacccaaaacacccaaagcaatcttgagaaaaaacaaagctggtggcatcacacttcctttatttttttgacacagattctcactctgtcgcccagactggagggcaatgtgaaatgktgcaatcatggctcactgcaggctcaatctctgtgctcaagacatcctcctatctcagcctcccatgtatctgggactacaggtacataccacatgcctggctaatcttttttcactttttgtagagacagggtctcaatatgttgtccaggctggcatcacacttcttaatttcaaactacattacaaatagtaataaaacagtacaatactggcctaaaaacagacacaccaagcaattgaacagaatacagagcccagaaataaacccacac

SEQ ID NO: 153957 - DNA, 541 bp, Homo sapiens
agatctattctactttgcaaaggtactccaaagggaatgctaaaaatggtgcaagggtaatgcaaaggtaatggaaacatatgagggaggataaaccctagaaaatccgaagctggttcccagacagcagcgttgactggaggggagatcaacagagacaaacttaatccctgtcctcagagagacctgcccactgggctttaacgaaagcctcggckctttttctcttttcctggagaattttgacaaaatagccctgagccccatgaggcaggggaacaaaaggtcctcccccagctagattgggggcctttgtgagtctcatgagcactgcatctggaggggctgagtagggagggcaattgggaacagaccaagtttcgggagggagacagagtgtttccagagcctgagcgaaccctagagatcatctaattcgactcctttgctgcacagtgattgacactgaggaccagagagagagagagcaagaccttctcatgtcccctaggacccaccacatttcaaatgcaccacccct

SEQ ID NO: 153958 - DNA, 498 bp, Homo sapiens
ccaacacggagaaatcctgtccctactaaaaatacaaaaattagctgggcttggtggctcatgcttgtaatcccagctactcgggaggccgaagctgcagaatcgcttgagcccagagggcagaggttgcagtgagctgagactgtgccaccgccctccagcctgggtgacagagtaagactctgtctcaaaaaaaaaaagaaaaaaaagaaaaatgaaaaagaaaatatgcctaatgaactaatggtttgggctaaaacaatttttaagcagactgttgaaaatgctagttggattagaaaatgctagttggattattttagctgtatatgataaagacagagaaagatgagttaaaaggaagctttaactttcaagcaaaatttataaaacatatacaagagccaggggmttgctggatttgaaaataaatctgcttttcattctcagcctcccagatggcaaaagattctcaaagtatgaaagggcttcaggaca

SEQ ID NO: 153959 - DNA, 498 bp, Homo sapiens
ccaacacggagaaatcctgtccctactaaaaatacaaaaattagctgggcttggtggctcatgcttgtaatcccagctactcgggaggccgaagctgcagaatcgcttgagcccagagggcagaggttgcagtgagctgagactgtgccaccgccctccagcctgggtgacagagtaagactctgtctcaaaaaaaaaaagaaaaaaaagaaaaatgaaaaagaaaatatgcctaatgaactaatggtttgggctaaaacaatttttaagcagactgttgaaaatgctagttggattagaaaatgctagttggattattttagctgtatatgataaagacagagaaagatgagttaaaaggaagctttaactttcaagcaaaatttataaaacatatacaagagccaggggcttgctggrtttgaaaataaatctgcttttcattctcagcctcccagatggcaaaagattctcaaagtatgaaagggcttcaggaca

SEQ ID NO: 153960 - DNA, 555 bp, Homo sapiens
tttgatattcacagaaaaaataatttagattgcttgagagatagagggatgatggataggtggattaatatatgataatgcagcccggtgcagtgactcatgcttgtaatcccagcactttgggaggccgaggcaggaggattgcctgaggcccaggatttgagaccaaccygggcaaaatagcaaaaccccatctctacaaaatgttaaaaaaaaaaaaaaaaaagcaattcgtgtaaaatgctgtgagaaaatctatgtagtggacacatgggtgtttgctggaaaattctttcaacttattttcataataaaatggagagaaataacaaatggaaagtcctttaaagtttggtgtggctaaaagaatggtctgcgtcctggcccaggccaggtggtcttatcactccatcatgtggcttctgcagatcccaggtcccagttctgtcctgcagtctgtcccgtgactgtctccactggaaatggtgtcatctgctcacagccccaaacaccatttctagatgactcatggcctctgcccacgcaagatctaca

SEQ ID NO: 153961 - DNA, 555 bp, Homo sapiens
tttgatattcacagaaaaaataatttagattgcttgagagatagagggatgatggataggtggattaatatatgataatgcagcccggtgcagtgactcatgcttgtaatcccagcactttgggaggccgaggcaggaggattgcctgaggcccaggatttgagaccaacccgggcaaaatagcaaaaccccatctctacaaaatgttaaaaaaaaaaaaaaaaaagcaattcgtgtaaaatgctgtgagaaaatctatgtagtggacacatgggtgtttgctggaaaattctttcaacttattttcataataaaatggagagaaataacaaatggaaagtcctttaaagtttggtgtggctaaaagaatggtctgcgtcctggcccaggccaggtggtcttatcrctccatcatgtggcttctgcagatcccaggtcccagttctgtcctgcagtctgtcccgtgactgtctccactggaaatggtgtcatctgctcacagccccaaacaccatttctagatgactcatggcctctgcccacgcaagatctaca

SEQ ID NO: 153962 - DNA, 627 bp, Homo sapiens
ggtgggaggtgaaggtctagcatgcacagagggcatctgtgtggtgttctggggctttctatacggtgccaggtcacccagaccacaggccccgtgagtccccttcgctactggtgccaaatccacgtgccatctgtaaattatttactctgcatttatcttcaagctaatttaaaatcaatccactttttgtctgatcttaacttaggccaaatgttatctgtgaaattatgattttggtatgcaagcagacacttgttactctaatatacattaaaatacacacataactagtaaaatttatacacacacacacacacacacatatacatgtatatgtatatatatatttagagacagggtcttgctctgttacccaggytggagtgcagtagtgcagtggcacaatcttggctcactgcaaccttgacctcttgggctcaagtgatcctcccatctcagcctcccaagtagctgggacaacaagcacatgctgccacagcctggctaatttttttgtattttttgtagaacagggtctcactatgttgcccagggtggtcttgaacccctgggctcaagcagtccacccacttaggcctcccaaagtgttgggattacaggcga

SEQ ID NO: 153963 - DNA, 430 bp, Homo sapiens
gtgatctgcctgccttggcctcccaaagtgctgggattacaggtgcccacagcttctttttatcacatggacactaggactcagatctgtttctcaagcccatccatctgtcctgaactctaggtcatggtcttcaaagactagacatctccaaaagggtatcccacagatccctccaactcttcatgtgaatagcagaatgcatcagctggactccaaatccactcttcctccccattcctatctttgtttatgatatctgttacttgtgttagaaacccaggagtcataagctcctcttcttcttacatcccccrcatcgggtcagccatcaagtttgatctaggtagtccgttatctcctctttgcttccacaaactactttggtttagttcatccctcatctggaccatgcagtcagtagtaacat

SEQ ID NO: 153964 - DNA, 549 bp, Homo sapiens
cgtgaaacaattcctattgacatatattttcagtggaaccatgttagatgagaaataaaatattttgggaaaaacatttactctatatacttttccctacgagcagtacgcatgcaacctgtggcaaaactttcagctgcttctgaaagacttattctttcttaaagaaatgtttattttaacataatttggtgtttacggtcttatacaaagtgccactggcttaatggaatattctgacatgagaaaaggaaggatcgggaaatgtgtgagtagaatcatacccaccaaaatttgtagttggcttcatagcttatagttttacaaaaagaattttacaaaaagaatttttgtaaataaaatacaagagttaatttaatttcaytaaagaaattctataattaaagaactcccacaagcaacctgtttgcaaaggaggtagcatggaatatggttatagaacactggggccagacaagggggatacgggccatgccatggaactttctaaagtctcagttttctcacctataaatggaggtaataata

SEQ ID NO: 153965 - DNA, 549 bp, Homo sapiens
cgtgaaacaattcctattgacatatattttcagtggaaccatgttagatgagaaataaaatattttgggaaaaacatttactctatatacttttccctacgagcagtacgcatgcaacctgtggcaaaactttcagctgcttctgaaagacttattctttcttaaagaaatgtttattttaacataatttggtgtttacggtcttatacaaagtgccactggcttaatggaatattctgacatgagaaaaggaaggatcgggaaatgtgtgagtagaatcatacccaccaaaatttgtagttggcttcatagcttatagttttacaaaaagaattttacaaaaagaatttttgtaaataaaatacaagagttaatttaatttcattaaagaaattctataattaaagaactcccacaagcaacctgtttgcaaaggaggtagyatggaatatggttatagaacactggggccagacaagggggatacgggccatgccatggaactttctaaagtctcagttttctcacctataaatggaggtaataata

SEQ ID NO: 153966 - DNA, 610 bp, Homo sapiens
gaggaaactgggtgttgggtatttaggaactgtatgtaatgttcttgcaatttttctgtaaatcttcaactattctgaaatttaaagtttatttaaaaaaaataagctgactcacaccaaaccagactttctccataacagaatcactgatatggttaggctttgtgtccccacccaaatcttatcttgaattgtaatcccaggtgttgagggagggacctggtgggaagtgattggatcatgggggyggtttcctccatgctgttctcgtgatagtgagggacttctcatgatatctgttggttttataaatggcagtccccctgggctttttctgtctctcctgtcaccttgtgaagaagatgcctgcttctccttcctccatgattgtaagtttcctgaggcctccccagccatgtgaaactgtaagtcaattaaacctcttttctttatcaactacgcagtcttgggtagtatctttatagtagtgtgaaattgaactaatacaatcactttctcattcagtgactccattcttaatgcccccacctcatccccacaaaatgattccatgggcatcccctgaccccaaggtaggctcccaggcttt

SEQ ID NO: 153967 - DNA, 606 bp, Homo sapiens
gggatgacaggcgtgcaccaccacacctgactaatttttgtatgttgcccaggctggtctcaaattcttgagctcaagtgatccacctgcctaggcctcccagagtgctgggattacaggtgtgcgccaccacgcctggcctgactggtagaatcttaaacagaaatacttgtgccacaaatgcagacaggataagtaactgcccttgtctgagtaccgtattccctgggaacagcaaactccctctgttctttttctactcccaccaacccaccttctaatctgcaactcagtttcctgagtgggcttgctttagagcatcctgtatctataaacraccacagttttcaagcaaagcctttgtcttattgcattgtttttaaagttggattcttaaataatattttcagaggtccatgaattctttagaagaatttttaaatgtggcgttttcattttaaagataatataaaatttttaacacaagtgtcaccacctttttacagagtactgccacataacatcaatgcccatgctggatttgcattcatgactgttatggtcaagtgatctaaactaaagtctcctaatggaagtttgaatgca

SEQ ID NO: 153968 - DNA, 606 bp, Homo sapiens
gggatgacaggcgtgcaccaccacacctgactaatttttgtatgttgcccaggctggtctcaaattcttgagctcaagtgatccacctgcctaggcctcccagagtgctgggattacaggtgtgcgccaccacgcctggcctgactggtagaatcttaaacagaaatacttgtgccacaaatgcagacaggataagtaactgcccttgtctgagtaccgtattccctgggaacagcaaactccctctgttctttttctactcccaccaacccaccttctaatctgcaactcagtttcctgagtgggcttgctttagagcatcctgtatctataaacaaccacagttttcaagcaaagcctttgtcttattgcattgtttttaaarttggattcttaaataatattttcagaggtccatgaattctttagaagaatttttaaatgtggcgttttcattttaaagataatataaaatttttaacacaagtgtcaccacctttttacagagtactgccacataacatcaatgcccatgctggatttgcattcatgactgttatggtcaagtgatctaaactaaagtctcctaatggaagtttgaatgca

SEQ ID NO: 153969 - DNA, 539 bp, Homo sapiens
ctactattatagaactcttcccctcccccatacctgaccaccacaccaacaggctccagtataatgacagtaacgacagctggaagtatggcaagactcagactctatttgagaaagagttctttttttgttgttttaaatttttttatgtttttagttttctgtagagatggggatctctctatgttgcccaggctagtctcgaactcctaggctcagacaattctcccaccttgacatctcatagtgctgagatcacaggcgtgagccacagtgctcagccaaggagttcttaaagaagcccaaagacaaatggagagaccataacaaggacacctgagraatctgaacactctgtcacctacaactacagtgaagatgaaacacagcccaagtctgagccagaataacacaaaactcatacttcaggactattttctcagttcctattacccaaaatattatgtctggcttttgacaaaaaaaaaaaaaaaaaaaaaaaaaaaaaactataatgcacgctacaacaaagtctgaag

SEQ ID NO: 153970 - DNA, 539 bp, Homo sapiens
ctactattatagaactcttcccctcccccatacctgaccaccacaccaacaggctccagtataatgacagtaacgacagctggaagtatggcaagactcagactctatttgagaaagagttctttttttgttgttttaaatttttttatgtttttagttttctgtagagatggggatctctctatgttgcccaggctagtctcgaactcctaggctcagacaattctcccaccttgacatctcatagtgctgagatcacaggcgtgagccacagtgctcagccaaggagttcttaaagaagcccaaagacaaatggagagaccataacaaggacacctgaggwatctgaacactctgtcacctacaactacagtgaagatgaaacacagcccaagtctgagccagaataacacaaaactcatacttcaggactattttctcagttcctattacccaaaatattatgtctggcttttgacaaaaaaaaaaaaaaaaaaaaaaaaaaaaaactataatgcacgctacaacaaagtctgaag

SEQ ID NO: 153971 - DNA, 521 bp, Homo sapiens
tcttccaaactcctattaatgttggtattttgacctccttccaagaatcacaaatgtgcctcaggcatctaaaatggcaaatcctgactatgacctgcggcagcagctgagacacctgcgaagggatgcatcttttcttctgtaggcttgagtcaagaactctcggtcttcttggtaataccgggttggatgtcaaaagttgcagaaaaaagaccagaacrttcaggaaaaaacttaactgtatccagcaattcagatatagcgaaagtgaagtcaatgttccaggaagttcttccaaaacaaaggtagttgtctctggaagatggaaccacagtggtggtatgtaaacccaaacttttacccttaaaatctctgactctggtaaaattagagaaaatgcaccaagcagcacaggatacaattcgccaacaagaaatggcagaaaaggaacaatggcaaataacccactggatgataccttagcactttagggaacaatctgccttatctactatttaaca

SEQ ID NO: 153972 - DNA, 521 bp, Homo sapiens
tcttccaaactcctattaatgttggtattttgacctccttccaagaatcacaaatgtgcctcaggcatctaaaatggcaaatcctgactatgacctgcggcagcagctgagacacctgcgaagggatgcatcttttcttctgtaggcttgagtcaagaactctcggtcttcttggtaataccgggttggatgtcaaaagttgcagaaaaaagaccagaacgttcaggaaaaaacttaactgtatccagcaattcagatatagcgaaagtgaagtcaatgttccaggaagttcttccaaaacaaaggtarttgtctctggaagatggaaccacagtggtggtatgtaaacccaaacttttacccttaaaatctctgactctggtaaaattagagaaaatgcaccaagcagcacaggatacaattcgccaacaagaaatggcagaaaaggaacaatggcaaataacccactggatgataccttagcactttagggaacaatctgccttatctactatttaaca

SEQ ID NO: 153973 - DNA, 405 bp, Homo sapiens
tataaaacatttaaaaatagttaatccagtttcacaaagcatttttaagaagggggttcatttctggttcctttaaagagttagtgttttagtacgtgcaaaatattttcacttacctttttctcaggaatagaacaattgtgtgagtaataaaactttttggatgtatttatayggcaccctctcatgccatccaaaactgatcctagtcatagaactgggaagagccatccccattctacatgggaggagtaggagcagagagccatagcaatgcagcagggaaaggaactttgctctcttgggccaatgcttttggaaggggcattgccgttgcagtggttctcaaccacagtactccagggtaccctccttcagcccatgaagcctcatgatggggtggct

SEQ ID NO: 153974 - DNA, 574 bp, Homo sapiens
accttttatttactcttataacatctcccaaaatatctctcttccttatcttgagcctttcataattctgtattacaaatgataatactaacacagaaaagataaccaacttgctgtaatcacacccggtgtaaatggccaaagtcagatgttcagcactcttctctatactacaccattccacacagggctcaaggaggttcaaaagagagtaggtggcttcaagcattccctgaaagacacatgatatttwaaaaaaaaaaaaaagcattgaagctttctgacatctgctaaaagacctctttagtggtttgataccaagaacacattactgcatgaatcctccagcaagtaccgctcttgaaggagagggctctgaatagcaatttgatctgacctagtcctaaacattagcttggattcaatatctaggaagcagtaggatgtggttgtttttaatttctctaagacatttctcactggacacccaggatctaagtattcatcagcatggtgtgagtgcgggtgtgtttttcctaggttttagctttatatagaacactcacttggacct

SEQ ID NO: 153975 - DNA, 574 bp, Homo sapiens
accttttatttactcttataacatctcccaaaatatctctcttccttatcttgagcctttcataattctgtattacaaatgataatactaacacagaaaagataaccaacttgctgtaatcacacccggtgtaaatggccaaagtcagatgttcagcactcttctctatactacaccattccacacagggctcaaggaggttcaaaagagagtaggtggcttcaagcattccctgaaagacacatgatattttaaaaaaaaaaaaaagcattgaagctttctgacatctgctaaaagacctctttagtggtttgataccaagaacacattwctgcatgaatcctccagcaagtaccgctcttgaaggagagggctctgaatagcaatttgatctgacctagtcctaaacattagcttggattcaatatctaggaagcagtaggatgtggttgtttttaatttctctaagacatttctcactggacacccaggatctaagtattcatcagcatggtgtgagtgcgggtgtgtttttcctaggttttagctttatatagaacactcacttggacct

SEQ ID NO: 153976 - DNA, 582 bp, Homo sapiens
gaggaggaacagactgaaccaaggacagcaggaccagtagtttcattgctcagtgagttcaggacactgtgtgaggcttaatgcttcagcttatatctatctgaagcaagatggtagaacatttttccaaagcaagttaattttccacccaagaggatgaagggagagaaggctgaaggaagagggggcaaagctgaggctttctttccttcagggactattttctgtggcctgaggcaacacatttactaacttcagaaacatctcagctgaagtcccgcagcaaaaaagggtaaaaggggaactaggctggaaycttgttaggatttacaaagagaacagcatgaccactccagaagggttataaaaatgcttcaccactaactccaccaaaccctcctgctgtaaacagctctaatgctagtgactaccctcagacacttactgtctatccctttagggtgttcttaaaatacaccggaaagaacggaggtaaaaatactggagtgtttcctccacactggaaagaggtgagtcatatcattgtgattggtgttttaagtatatttttattgttatttt

SEQ ID NO: 153977 - DNA, 577 bp, Homo sapiens
tgggcatttttcttgttgagaggtctgtggtcagactaaacaactctcggaaactgattagatcctgaggttttcaaattcaatattcagcaaatatagatcatttctttggccataaggaataattaagaacttcagagctaatgcaactctcctgagcctgcttctgttttttttggatgacaygataatcagacagccttttctggtgttggtcctcaccatatttgagattgaggcagcataaatcacacacaattaatcttttgaaactctaggtgacattgctttaggtttttatatcagcaaagccttcatttgctagtactcaacttatgggaattttatatattattaagtgctttccttttcctcactcccaattatcctgatccagaaaagtagacacatggtcattatgtgaagacaaaggaacattgaatagttaattatacaacagccagaactgtccactgtgtattcatccttgtaacagatcactggagggtaaattagcatatttagtttgaaatcttgtaaaatagaaacgggattgtttgagtagttgcagtttaca

SEQ ID NO: 153978 - DNA, 527 bp, Homo sapiens
agaaagattgggtatattgggaggctgagacaggagaatcgtttgtacctgggaggcaaggttgcagtgagctgagatcacaccattgcactccagcctgggcatcaagagtgaaactctatctcaaaaaaaaaaaaaaaaaaaaaaaaagattgggtacataagtcctctgcactttctgcactggtgatgctggagaggaaggacggtgaatgataagaatcatcacagaggatgaaatcttagttctcattgttcccttcttttctactccagctacaaatgcccttatctttggagtccaaggttgggaacaaatggatttaagtacctggcctaaagcctattcctaaaaacttccctcaggtttcacacctaccttggcaagttggaaagtgcaaagacartataagggcccattttcaggccaggtccagcatgaaacagagtgaacaaaattagttccacacattagggaagagccaagtcagacgaatatccaatcatttgcagtagtagaggcaggt

SEQ ID NO: 153979 - DNA, 593 bp, Homo sapiens
tccctatttctaaaagaacaatatgatcaaaatataataatatgatcaaaatattatttattttggtcacatcctattatgatgtgaacaattagcagtattttatcttttgtaagttgaattattttaatgcatacatattcaaaaccraaatttccactcattgcatatgattgtcactaatggtgataactattcatataggtcattctaaaattaattttaaggtaaaaaaacaagtaaaattagtaagaaaagaaataacctatctctaaaaataaaagtcttttaatccaaagggtgcctcttagaatttaaaatatttcagcttgtcagaaagaggcaaagttttaaggaaaaaaaaaatagtcacatgaagatcatctagtcccttctgttctacacagaagcacatgtacaaacctagatttgtctaattttcaaatagattccaaaactgctaatgacattactcgattgaatttatgtgtaaagtacaggaaatgatgtgctttcaagggtgtcatttgcccatagctatttattttctattgtcatttcacctctgcattctccaaaagcctacttcattt

SEQ ID NO: 153980 - DNA, 612 bp, Homo sapiens
tttgtgtatttttaaagtagacacagggtttcacaatgttggccaggctggtctgaaattcctgacctcaggtgatccacccgccttggcctcccagagtggtgggattacaggtgtgagccaccgygcctggccttctgcaagttttgacataaaaattaatgatgagctaactataaaaaagtctttagattataacttttaaaaaagagttcaaatccccactaattctatgaaaaggttcaatacaattaccaacacaacagttggcactggccctgctgaacttttctttaaaggaaaattttctatgatacttattagcataacaaaattcctttctcttttagataagaatgctttgaggatttattccttttattcttcaaactgaatgagtcaactaacttaagctgtaagttaagaggatactatataaaacagctgaaaggacaagtctagcttttataaagtgttatattatgactgactcataagagtcaaacacaatgtcaaacatttttcaaagacatgattctcttttttgtgcctgtagcactatccagatgcaacctgatttattgtttcctccttctcatcataactagcatc

SEQ ID NO: 153981 - DNA, 612 bp, Homo sapiens
tttgtgtatttttaaagtagacacagggtttcacaatgttggccaggctggtctgaaattcctgacctcaggtgatccacccgccttggcctcccagagtggtgggattacaggtgtgagccaccgtgcctggccttctgcaagttttgacataaaaattaatgatgagctaactataaaaaagtctttagattataacttttaaaaaagagttcaaatccccactaattctatgaaaaggttcaatacaattaccaacacaacagttggcactggccctgctgaacttttctttaaaggaaaattttctatgatacttattagcataacaaaattcctttctcttttagataagaatgctttgaggatttattccttttattcttcaaactgaatgagtcaactaacttaagctgtaagttaagaggatactatataaaacagctgaaaggacaagtctagcttttataaagtgttatattatgactgactcataagagtcaaacacaatgtcaaacatttttcaaagacatgattctctkttttgtgcctgtagcactatccagatgcaacctgatttattgtttcctccttctcatcataactagcatc

SEQ ID NO: 153982 - DNA, 679 bp, Homo sapiens
caatgcaatgtgtaatttttttaatggctgcttttataatttttctttatcagttatttaattatgatatttcttagtatgcagtttatgtgtttgtgtgttctgtgatatttatcctcctttggggtttatgatcttgattctttgcatttgtaattttcagtaaacttcaaaaatttctatccawtacttctttaatatttaattaatgtttatatggtatataaaatattaagatacatggctattatactgcttattcatttatcgtatgtcactgaatgtttcatatgtcactgagatgctattcaataatcttttcaatcttttcctttctgtatttatgttttgaaaaagtctattatgtcattagattcacaattttttcttatgatttaatctgcatttagtctccaacagttaagttttcattttgcatatgtcaagaagtttcattgtttttgactaatttctctcttcattaaatacttaaatattcacatactggctgtttaaagatctttttgctggttgtattttctatgtcatttccacttattttttcttttgagtaatacttttcttggttataagtcatattttcttgcttcttggcccagcttgtacttttttattggatggtagacattcgtttcttgtttttttttttttttgttgt

SEQ ID NO: 153983 - DNA, 614 bp, Homo sapiens
ttttagtagagatggggtttcaccaagttagccaggatggtctcgatctcctgacctcgtgatccgcccacctcggcctcccaaagtgctgggattacaggcgtgagccaccgcrcccggccacagttttcttctttcttatgttggatgactggcatatatttgatattctttctctcataaatgattggaagaatttgctagtgatgtcatctaagcctggtatttagtttgcagtttttttattatgaattcaaattatttaataaatatatttagattttatttctacctgggtggcttataacatgttgtgtttttccagattaaccttcttttctaaatttccaaatttattgatatgacatttcccacaatacatttattattataaactttattttgattcataatattggtaatttgtactcttttatattttgttttcatcagctttgccaagctgccatcattttgaaagttattttgagaaaacaacttttgtctttgttaaaacagaaaataattgttctttaaatattgattttttatctttcttacttttaatacttccttttagtttcatatgctatttttttttttgcttcttgata

SEQ ID NO: 153984 - DNA, 588 bp, Homo sapiens
agaaaaatctttacactttgtcatttttcaaaaattataatgcttgacaaagtcataaaataaggtcttctgatatctagaggccaaataatttgcagtgatttttgtggtactctgaatgagtctttgttttttaaataataggattgagaaatgagtgataaatgtagtttgacatacagaagagtaccagaagttttctagtcacatatactgctcccacgaacctattgccattttaactatgctatattccaaaacatattgcacatttaaaggtatattattctttaaattaaagcagtaaagtataccacaacactaatacctttagcagtgatcaacatatttgtatatcatgtttttatttgactcttttcatatgaaaaattcagaacatttgcmagcttaaaaactcaaggaatttgtttttaagactaataggatatatgcatatattttgttttataaactcataaaaaatgagattttaaaattattaagatcaaactaaaatttcattcgagatcttgaccaacctgcattaaaaaaactgtatcgtaagccttttgtcgttatttattacac

SEQ ID NO: 153985 - DNA, 351 bp, Homo sapiens
tgtacttgtcattattgtatagtttttattactagttagatcatttaaaataaattaggttcaaatggtgatactgaatttttatcatcttcttaatgtagaaatggataaaggamtacaatatggagatgcatcttgccccaatttttaaacaaacaatagggctggtatgagatggtgttagattattcagggctgcacttgttaaatgactatgccttgaggaggaagaaaagaatcagcagccttctctgtttgtgatacttctcagcatgacttcttcccttcttaaaacagttggacaggtccatagatttttgttttactgtgtagttgctttgtctttacaac

SEQ ID NO: 153986 - DNA, 577 bp, Homo sapiens
gatgaaaactggtgcagcaggggtgggggaatcttcaatacctgctgcaatactctggggctgtttctcctgattggtcagtaccagtgcctccttacttgttaaatacagcatgtggcctattatccctgattattattttttttttaataagacatggtctcattctgttgtgcaggctggagtgcagtggtgatcatagctcactgcagccttgaactcctgggctcaagtcatcctcctgcttcagcctccstagtagctgggactactgttgcatacagaaaatcgtccaagctcattgttttggttttcgtaagatgacctttgtttatcgctgcaaatcttgtgccaccacatccagctaattattaaattttttttgtagagacagggtctctctatgttgcccagactgctcttgagctcctggcttcaagtgatcctttcaccctgtcctcccaaagtgctgggattataggtgtgaaccactgtgcgcagcctcttccccatttaaaacaatatacttcttggaacttaacatacttcattcctggctttacatatccacttgggt

SEQ ID NO: 153987 - DNA, 574 bp, Homo sapiens
tgttcatgcagacatagctgactagaackgcccagtagaactatagcacatcaaatgatattcagaccatctcaagcaaactcttccctttggaaaatgggtggcttatgtggctgggatttctgacttaaggattggcaagcatgtttctgtgtagttatgcaaactcctttacattatggaatttgaagaattggacctaggttgatgtgcagctgataaacggacttctgctgctacctcatgcactgttatccttgcaatagatatacgttattatggataacctaggtttgtttttgtttttgttttaagacactaggtggcctaaacagcaggtctaaggtctaatacatagtctttcacaaacgccttcaagtcaagctgggttattttatacaagccactgatatcctagagcttcagttatcttttaatataaaatgagggaaagtatctgtcactcagtgttgtttcaaacattatcaatgctcatatgtttagaaggtgcttagttaattaatataaatggaaataaaaacaacagaaacagttattgtcttgagctgctgtt

SEQ ID NO: 153988 - DNA, 549 bp, Homo sapiens
aacctcaaaccagagctttcagatttttaaataagataagtggaatcaaattagaagccagacatataaggttatgagatatatttaaaaatacattctaagaataaccatgtattttatcacgtttttcaatccagagactttgtttttggaaacaattatcaagccttagtttgcacttcctcctccttttcctttcttttccatttccttctttttccttttattcctgaaccattccagagcaatttaatcctgaagccctagtaagggcagagcagtgtggaaatggggagaggagggagctaagtgaagatgggagggaatgagcagggcatctacggagaggggctgcttggccccagtgaggaccaaagggggctctcatrgagtgctgtcaggagggaggggagggtatccttgcaaggagcccatcgcaggtgcagagggaatccatggggtgggacaggtgtctcacagtgtggaaatcggagcttgctgaggagggtgtctatgcatggggaggcccagtgtggagtttagggccag

SEQ ID NO: 153989 - DNA, 563 bp, Homo sapiens
aacagggcaatatcacattgagataaaatattgaactattgcacagaagggttctcatatatttggcaagacaatttgggaaggtgttttctaatgtgtactgtaatgttctatccttaaaaacaatagataaattaactttgtctttaaaaataatctgcacttgtgttctttgtggtttctgaaatcccattgtatatctttaatagtacttgagcaactgtaattattctgaggataaagtaaaaacagtgcataatccctgatttataggaaatgctactacaataagtctcatctgaacttctgtgtatcattcatatgcttattttcatctttwaactgctattacagagtcagtgataaatgtgttttgtttggatttttgcaaagattagaaaagacaatagatattcagatttttggaccaatgccattcatttaaagacaacacttgttcatttgtgctgtgaaatgaagatattatcaatattctacatgtactcagtgaatatattttaaaattcatttttctctttgagtgttttgctttttgcttttag

SEQ ID NO: 153990 - DNA, 563 bp, Homo sapiens
aacagggcaatatcacattgagataaaatattgaactattgcacagaagggttctcatatatttggcaagacaatttgggaaggtgttttctaatgtgtactgtaatgttctatccttaaaaacaatagataaattaactttgtctttaaaaataatctgcacttgtgttctttgtggtttctgaaatcccattgtatatctttaatagtacttgagcaactgtaattattctgaggataaagtaaaaacagtgcataatccctgatttataggaaatgctactacaataagtctcatctgaacttctgtgtatcattcatatgcttattttcatctttaaactgctattacagagtcagtgataaatgtgttttgtttggwtttttgcaaagattagaaaagacaatagatattcagatttttggaccaatgccattcatttaaagacaacacttgttcatttgtgctgtgaaatgaagatattatcaatattctacatgtactcagtgaatatattttaaaattcatttttctctttgagtgttttgctttttgcttttag

SEQ ID NO: 153991 - DNA, 629 bp, Homo sapiens
acttgcagtgtggatgtggaggttagagataatatacatatctgatcagtgcctaatacatcaatatgtaattctttaagtgatataactaaagatgcagctgaaaactgaagatgataagtgaaatccatcatttctctacacattatagaattccgctagggatttcccaagtgtgacactgtaatttataccatcacttttatgcatttctaataactctgacaccaggatggattaacttaaatggcagttaattattaaagttattaaagagccaaaatatattataaacaatagtaattagtttcatatttttatagagtctaagctttaaaagktatcagtatttaaaaatgttttaaaatgaatagtttagagatagttggcatagaatattccttgcagaaaatatctattcaaacacaattttaaaaagtcacggaattattctaatttaagacttccattggcttctttccagattttatgcacattcttaatataaatttaggcacttatgtaacttttgtgagtcacagatttctctaatagctaaccaactggttggccgtgagtgaacagcacatgtcaaatttccctggcaccaagtaggttccccctaaaat

SEQ ID NO: 153992 - DNA, 541 bp, Homo sapiens
ggaggcctcagaaaacttaccatcacagtgtaaggggaagcagacatgtcttacgtggaggcaggagagagagggcatgtgtgtaggaggaactgctaaacgcttataaaaccatcagatctcatgagaactcactatggcaagaagagcaygggggaaataacctccatgatccaatcccctcccttttttgacacatgggaattacagtttgagatgatatttggggtagagacacagagccaaaccaagccagtattttattgaggattttacaaaagtatttcatctccagttagcaagagcccatgaagaaaatgacatatttgtctacctcaagtttatttaaatcttcaagaaataatttgaaagtatatattttatttccaataatacctattctaatataatatataataaaatcttttcttcagattacccagttactttttaatattcaaaaaattaaatatcaactatcataaagaagcttgatatttcaaccagtagcattcaatactgctcatttaattttggcaaa

SEQ ID NO: 153993 - DNA, 494 bp, Homo sapiens
cattatcatcttattttacaatccaaaaaaaacccaaaccctctttcttgaagcctcctttgttgactctcctatctcaaatgtcaccattctccaacttctgatggctcatattctgcctcatttccctcctttagaagcttaagtgaaagttgtgggatttctgtcaaaaattcctgagatagtgctgttatyccagcactttgggaggtcgaggcgggcagatcacgtggtcaggagatcgagaccatcctggccaacatggtgaaaccccgtctctactaaaaatacaaaaatgagctgagtggtggcacgtgcctgtaatcccagctacttgggaggctgaggcaggataatcgcttgaaccagggagtcggaggttgcagtgagccgagattgcgccactgcactccagcctggccgacagagtgagactccgtcaaaaaaaaaaaaaaaaaaatcctgacgtagagcagtcaggatacaaacttagt

SEQ ID NO: 153994 - DNA, 518 bp, Homo sapiens
aagaaattgacaaatccaaaaaatagtggatattttagcacacatttaactgaaactaacatatacatgttatattctctcactatrctaattctaatataagaaatttcctgtatttggaaatgaatagttacacacctaaggagtcataataaaaattacagaattactaaaactgaatagtaactaaaataccatctctcaaattttgccatgtttaaacccactgaaatcctcacaggagcacagtggggtagatcatatgttcatcctagctttacagggaaggaatttgaggaaatagagtaattaacttgtccaagctgttgccaaaactaggattcaatccaagtttgagctcctaactactaagctgtaacacgtctcactagaaaaccattatattttgacaaaggggtgatatattaatgaagtaataatgattatgaatcattatgagataaattatgttgcaaatattgttatacatttaacaaaaagaaaattataaataataa

SEQ ID NO: 153995 - DNA, 518 bp, Homo sapiens
aagaaattgacaaatccaaaaaatagtggatattttagcacacatttaactgaaactaacatatacatgttatattctctcactatgctaattctaatataagaaatttcctgtatttggaaatgaatagttacacacctaaggagtcataataaaaattacagaattactaaaastgaatagtaactaaaataccatctctcaaattttgccatgtttaaacccactgaaatcctcacaggagcacagtggggtagatcatatgttcatcctagctttacagggaaggaatttgaggaaatagagtaattaacttgtccaagctgttgccaaaactaggattcaatccaagtttgagctcctaactactaagctgtaacacgtctcactagaaaaccattatattttgacaaaggggtgatatattaatgaagtaataatgattatgaatcattatgagataaattatgttgcaaatattgttatacatttaacaaaaagaaaattataaataataa

SEQ ID NO: 153996 - DNA, 518 bp, Homo sapiens
aagaaattgacaaatccaaaaaatagtggatattttagcacacatttaactgaaactaacatatacatgttatattctctcactatgctaattctaatataagaaatttcctgtatttggaaatgaatagttacacacctaaggagtcataataaaaattacagaattactaaaactgaatagtaactaaaataccatctctcraattttgccatgtttaaacccactgaaatcctcacaggagcacagtggggtagatcatatgttcatcctagctttacagggaaggaatttgaggaaatagagtaattaacttgtccaagctgttgccaaaactaggattcaatccaagtttgagctcctaactactaagctgtaacacgtctcactagaaaaccattatattttgacaaaggggtgatatattaatgaagtaataatgattatgaatcattatgagataaattatgttgcaaatattgttatacatttaacaaaaagaaaattataaataataa

SEQ ID NO: 153997 - DNA, 540 bp, Homo sapiens
acactataagcctatttgaaacaaaccaacaaaaacaggtgccccagcttctgcctacaggaattctcagtaggatctcttgataggaggtkggagagactgtgagacttcttttagggggaatacaagaaaatgcctcttcacgcattttctaaggaagccctcagaaagctccacaaatgtccctgaactttggcaactgtgaattataaagactagggctccactgggggctggaagagttctcaatgtacataagaatcaccttgtagactttttaaaagatcagaagctggatgccaccacaagaatcaaatatctgggaggtgcagccagctttccaggtaattctacccagcagcaagacttgggagccaaaaagcgaggtgataaaaagctcaacttcagagctataaatgtggggaaaatcctttccagcacttgagaccatgggccaggggcagaataaaccactggaaaagatggccgagcgcagtagctcacgcctgcaatcccagcacattgggaggccgaggcagg

SEQ ID NO: 153998 - DNA, 538 bp, Homo sapiens
cacatatatttatgtattgaaaactaacaaaatttatcttcctaactgagcatgaggccccttgcagggactcagctttacccatctttctgtacacctagggatgtgtgaaataccagactaccttgctgaagggaccctacaggccaccttgtagcccagaaaaaaaaaagtccagtagaattgagccgtaaatgagaagcagtaatcgcaataaatacctgcgaattcatattctaaagtgaatggctcttggaattcttgttttaaaagttatttagcaaacacttattgaacacttaatatgagccaaaccccttcaagtagggtgtggcctttgcattcctaagtattggtttacagctcattaggcctttgacaaggcagctggggttgaagagaaaggtaaccctggagtgtcccaagccattgtcacctggaggtaatgcatctctgcagcgttagggaaagcccgtgagaacataagctttattcaccrgcaccaaaggtatgctctagcatttaggaaatgcacaat

SEQ ID NO: 153999 - DNA, 600 bp, Homo sapiens
tgatcacacgatgcaggcagttgctatgcagctctggggggcagagtgcctggtcctctgcttgatggcattcctgaaccagagctggatggtcgcctccacatttcttgctttgtgaaatacttatagagtcctgctttgtttaggcttccactgtttggattttctgttatatgcaggtctgctcaggccccagctgatccatcatgctattattcctctcctggcctcctgcatcccaggctgacctcccacactgatgctctctccttcccccggccccattcgtgacttgacagcacttattctcttcctctgtacaaatcattcaagatgccctccctgtctgattcactgtagtattcccagggctcagatccatgcttggcacacagtaggcagtcaatgaatgtttcttaagcagacaaacgaattatctcactaacccggcattgctctcattatctgacagctgctyggcctactctcaaaccctgaccccttgtccttctcctatctcatatttcttattgtctatgaaagatctctatttggttggccttccaacccctgcaacaaaacttgtctgaagcaaagctt

SEQ ID NO: 154000 - DNA, 504 bp, Homo sapiens
agaggattttgcccaccttagcatgctttctgggtataactctatgtcccggataagcttttgggctccctgcaccccacacctcagtctgtttgtgccaactgatttatgcagggctgggaagcttccaaaaaacaaacaaacaaacaatttgggatttggacatatacagacatgtctgatgacattggcaatgccttcatgaaagccaaattgcagtgatgaactttaggagayagatcccaagggaaagaagccaccattatgaaccaatctggaaacaggacctgagcagtaaatggaaatgtttctgcatagaatgaggccaacactgcttgagcctccttgcagagaaaaggtcgtgcatatgcaaagtgaaaagagctggaacatcttggagctcaggcatccctgtaaaggagtcacaaaggaagagagaagcctttcccttcccattctgtagatgttcagataatagctgtccagagaaagtggtggtggcca

SEQ ID NO: 154001 - DNA, 482 bp, Homo sapiens
tacataataacatcatccccatgttttcaaagtagtattgaattaggctattttggtccttatagtaggcatgggttttcatacctttctgataaatctgactgatgataggacttggactaatatgttggtgttaaatatttgaatctggtaagaaagaaaaatatattgtatgcttttattagaaatagcaaatatcagtttatttcatcatagccagttttgccattttatagacaaaaacttgatacttttgagagtttaattaaacacgattcagcttttcagaggaagaaagaaaaactaaagatcacagagaaagcttttatacaaattgtagttataaaaaatsttaatgtttcttgcttctaactttctttacaataaagattttattgtttgggtaaagatggaacattcattgtaaaaaaatttaaatacctaaaaaatacaaagaagaaagttgaaaagtaatcatctca

SEQ ID NO: 154002 - DNA, 481 bp, Homo sapiens
ctatgtgtcagcactgtgcaaagtttaccaacattgtctcatgtaatactcaaagcaaacttatgataggcattatgccttttacagaggaggctttaaaagggtaaataagctccctaagaagacaatgagaaacagaccaaggattagaacccaagcagattccaaggtctgtgatcttyaacactacgcaacaatacctaccttccacatggagacattatatttttttatagtaaagtttaaggacattactattaaaataagatgaaatatgtggaaaaaatatgaatttctttcttccacaatcattaatcatggcaaataatctcctaatgagccttagctttattgattcaatttataatatatactatatgaactgagatgacagattcaaaatctaatgtcagtagaacttataaatactaagaatagtaattttgagccatcacgctcaaagcattgtacacattaaaga

SEQ ID NO: 154003 - DNA, 481 bp, Homo sapiens
ctatgtgtcagcactgtgcaaagtttaccaacattgtctcatgtaatactcaaagcaaacttatgataggcattatgccttttacagaggaggctttaaaagggtaaataagctccctaagaagacaatgagaaacagaccaaggattagaacccaagcagattccaaggtctgtgatctttaacactacgcaacaatacctaccytccacatggagacattatatttttttatagtaaagtttaaggacattactattaaaataagatgaaatatgtggaaaaaatatgaatttctttcttccacaatcattaatcatggcaaataatctcctaatgagccttagctttattgattcaatttataatatatactatatgaactgagatgacagattcaaaatctaatgtcagtagaacttataaatactaagaatagtaattttgagccatcacgctcaaagcattgtacacattaaaga

SEQ ID NO: 154004 - DNA, 481 bp, Homo sapiens
ctatgtgtcagcactgtgcaaagtttaccaacattgtctcatgtaatactcaaagcaaacttatgataggcattatgccttttacagaggaggctttaaaagggtaaataagctccctaagaagacaatgagaaacagaccaaggattagaacccaagcagattccaaggtctgtgatctttaacactacgcaacaatacctaccttccacatggagacattatatttttttatagtaaagtttaaggacattactattaaaataagatgaaatatgtggaaaaaatatgaatttctttcttccacaatcattaatcatggcaaataatctcctaatgagccttasctttattgattcaatttataatatatactatatgaactgagatgacagattcaaaatctaatgtcagtagaacttataaatactaagaatagtaattttgagccatcacgctcaaagcattgtacacattaaaga

SEQ ID NO: 154005 - DNA, 533 bp, Homo sapiens
acataacgtcataaaaacatagaagattacagttcagattttaggtattttccttcttacaaaactgttctggttctaaatattcattattacttattttwaaaaaaggataaccactgaaatatagtttcttagaatctaatatacttcccttcacaccaaacccccatattagaatctaaaatacttccctacaccccagcccacaatcatgcaccacgtgaactcagtactaggcctttcaaacaccctagaaacaaataagtggtgggaaggctgattcagccctgattctagcctaaaagcagtttatcatttagaaacccatacttgctaatctggcctctcagtgcaactgtttattttactgacctctccagagtcaggctaactccaaaaaatattttgacactgacttagagcccaagtggtagttttcatctctctggaggcaagctttgttgtctgttttttttttccccctcataatcctgtttacatccctaacgtcatcaacatcacaagcttcttct

SEQ ID NO: 154006 - DNA, 399 bp, Homo sapiens
actgttcttaccacccccctcaaaaaaatagcaatgtgaggtgatggataggttaactagctcrattgttttataatgtaattcacacattgtataccttaaatatatataatttttacttgtcaattgtacctcaataaagctgggggggttagggagagaaacaaaggaactctctgaaataacaccactgtagacctaacttcatgaagggctatagggtgtccttttctgcagaaataaagaaagaagccggaccgaaaaaagagaaagaaagaaaagaaaaaactatcttaaaacccactggctatgaaagaacactgctgttgaccagagtggaaataaatctagtgtcaaagatgtctggtgtcatttttaaaaagcagcagcaggaactat

SEQ ID NO: 154007 - DNA, 399 bp, Homo sapiens
actgttcttaccacccccctcaaaaaaatagcaatgtgaggtgatggataggttaactagctcaattgttttataatgtaattcacacattgtataccttaaatatatatartttttacttgtcaattgtacctcaataaagctgggggggttagggagagaaacaaaggaactctctgaaataacaccactgtagacctaacttcatgaagggctatagggtgtccttttctgcagaaataaagaaagaagccggaccgaaaaaagagaaagaaagaaaagaaaaaactatcttaaaacccactggctatgaaagaacactgctgttgaccagagtggaaataaatctagtgtcaaagatgtctggtgtcatttttaaaaagcagcagcaggaactat

SEQ ID NO: 154008 - DNA, 399 bp, Homo sapiens
actgttcttaccacccccctcaaaaaaatagcaatgtgaggtgatggataggttaactagctcaattgttttataatgtaattcacacattgtataccttaaatatatataatttttacttgtcaattrtacctcaataaagctgggggggttagggagagaaacaaaggaactctctgaaataacaccactgtagacctaacttcatgaagggctatagggtgtccttttctgcagaaataaagaaagaagccggaccgaaaaaagagaaagaaagaaaagaaaaaactatcttaaaacccactggctatgaaagaacactgctgttgaccagagtggaaataaatctagtgtcaaagatgtctggtgtcatttttaaaaagcagcagcaggaactat

SEQ ID NO: 154009 - DNA, 399 bp, Homo sapiens
actgttcttaccacccccctcaaaaaaatagcaatgtgaggtgatggataggttaactagctcaattgttttataatgtaattcacacattgtataccttaaatatatataatttttacttgtcaattgtacctcaataaagctgggggggttagggagagaaacaaaggaactctctgaaataacaccactgtagacctaacttcatgaagggctatagggtgtccttttctgcagaaataaagaaagaagccggaccgaaaaaagagaaagaaagaaaagaaaaaactrtcttaaaacccactggctatgaaagaacactgctgttgaccagagtggaaataaatctagtgtcaaagatgtctggtgtcatttttaaaaagcagcagcaggaactat

SEQ ID NO: 154010 - DNA, 590 bp, Homo sapiens
ccttttaatggagagagtcttcttactaatcctatgtgtatatcctgattttcttcaatatgtactttttaaattttaagttccagggtacatgctcasgatgtgcaggtttgttacataggtaaacgggtgccatggtggtttcctgcacctattaacccatcacctaggtcttcaatattttttaaaaactcatttccagtgtgtgtttaatagtaatttaacaagaaaaataagatctcagatgctttatcaagctcagcttcttctatggaacagaaaaacttaccaatattggggttgaatccttgtgaagagttatacataccaaactctatcctaaccccatatgcttattacaaattataattccaaattttatcaccaaatcaaactcagagtaatagaaaagaaatatttaacacaaactaataattaaaacacaaatttcacctattgttcaggatatctttttgagaaaggtttttgttaaagaaaatttcagatacaaacataaagaaaattaaacaatcaatccccatattcccagctctcaataatgagccactcatagcaatctttcaacttac

SEQ ID NO: 154011 - DNA, 590 bp, Homo sapiens
ccttttaatggagagagtcttcttactaatcctatgtgtatatcctgattttcttcaatatgtactttttaaattttaagttccagggtacatgctcaggatgtgcaggtttgttacataggtaaacgggtgccatggtggtttcctgcacctattaacccatcacctaggtcttcaatattttttaaaaactcatttccagtgtgtgtttaatagtaatttaacaagaaaaataagatctcagatgctttatcaagctcagcttcttctatggaacagaaaaacttaccaatattggggttgaatccttgtgaagagytatacataccaaactctatcctaaccccatatgcttattacaaattataattccaaattttatcaccaaatcaaactcagagtaatagaaaagaaatatttaacacaaactaataattaaaacacaaatttcacctattgttcaggatatctttttgagaaaggtttttgttaaagaaaatttcagatacaaacataaagaaaattaaacaatcaatccccatattcccagctctcaataatgagccactcatagcaatctttcaacttac

SEQ ID NO: 154012 - DNA, 651 bp, Homo sapiens
aatcaagacttttcttaagatttaaattattgccgaaagaatgagacatcttaaggtatcattcctaacatctctcatcaaatccaaatccaactcataaatgttttacataacatatgcttaagtttccaaactaccaattcattttgcaatctctgaatatatgctgataacaaaagaatgagtttaattatgcctaaggaattcaaccagttacccrccacatatattagagctcaatgatggggcccagcttaataattcttaaatttcttaatgattattacttttgaaaaagtaagaaaatttcgactggtttttaaaaaggtgaaaaagggaaagagaaagggagaaaacatagtcgcttaactaagaaagtttctaatgtattttaaatgaaggcatatcactgcccaaaagtgttcaggtaaataaagtaagggaggagtgtttaattcttatcttcaagagaaaataaaagcaaaaatatgatcctcatattgcctggaggattaaaataaaaggctctaacattatattaagggcataaatcaaacaacagaggatacagaaaacctacaaagcattttttttttaaagaaaaccttagtggaagcactaaattggaagttgagtgacatcgagttccac

SEQ ID NO: 154013 - DNA, 651 bp, Homo sapiens
aatcaagacttttcttaagatttaaattattgccgaaagaatgagacatcttaaggtatcattcctaacatctctcatcaaatccaaatccaactcataaatgttttacataacatatgcttaagtttccaaactaccaattcattttgcaatctctgaatatatgctgataacaaaagaatgagtttaattatgcctaaggaattcaaccagttacccaccacatatattagagctcaatgatggggcccagcttaataattcttaaatttcttaatgattattacttttgaaaaagtaagaaaatttcgactggtttttaaaaaggtgaaaaagggaaagagaaagggagaaaacatagtcgcttaactaagaaagtttctaatrtattttaaatgaaggcatatcactgcccaaaagtgttcaggtaaataaagtaagggaggagtgtttaattcttatcttcaagagaaaataaaagcaaaaatatgatcctcatattgcctggaggattaaaataaaaggctctaacattatattaagggcataaatcaaacaacagaggatacagaaaacctacaaagcattttttttttaaagaaaaccttagtggaagcactaaattggaagttgagtgacatcgagttccac

SEQ ID NO: 154014 - DNA, 651 bp, Homo sapiens
aatcaagacttttcttaagatttaaattattgccgaaagaatgagacatcttaaggtatcattcctaacatctctcatcaaatccaaatccaactcataaatgttttacataacatatgcttaagtttccaaactaccaattcattttgcaatctctgaatatatgctgataacaaaagaatgagtttaattatgcctaaggaattcaaccagttacccaccacatatattagagctcaatgatggggcccagcttaataattcttaaatttcttaatgattattacttttgaaaaagtaagaaaatttcgactggtttttaaaaaggtgaaaaagggaaagagaaagggagaaaacatagtcgcttaactaagaaagtttctaatgtattttaaatgaaggcatatcaytgcccaaaagtgttcaggtaaataaagtaagggaggagtgtttaattcttatcttcaagagaaaataaaagcaaaaatatgatcctcatattgcctggaggattaaaataaaaggctctaacattatattaagggcataaatcaaacaacagaggatacagaaaacctacaaagcattttttttttaaagaaaaccttagtggaagcactaaattggaagttgagtgacatcgagttccac

SEQ ID NO: 154015 - DNA, 466 bp, Homo sapiens
tggtttcctgatacctattgatttttttcccaaaarcttaatagttttccaatttgactcaaataggatttgtgagtaacaggggctgaatcaatgtccgttcttttcagggaaattactttaccatgacaattatttaacttagaactggagagtgtcagtctccaaaacgggaaacaactgaattgccaataagaattttgttcactttcttggctaaaacatgattttaattaatgagggggaaaattaaatctactgtatcactactccaaacaataagtcatttaaaaaagcatgaattttttcactcagtaaaatatctaacatacataaatcattttgtaatttttaaaaattcattgatttttattccaataaatagtttacaaatcctactgttaatatttgcctcttaagttgaaatgtaagagtatattaatgctttattctaaaactggtattt

SEQ ID NO: 154016 - DNA, 459 bp, Homo sapiens
atttttttcccaaaagcttaatagttttccaatttgactcaaataggatttgtgagtaacaggggctgaatcaatgtccgttcttttcarggaaattactttaccatgacaattatttaacttagaactggagagtgtcagtctccaaaacgggaaacaactgaattgccaataagaattttgttcactttcttggctaaaacatgattttaattaatgagggggaaaattaaatctactgtatcactactccaaacaataagtcatttaaaaaagcatgaattttttcactcagtaaaatatctaacatacataaatcattttgtaatttttaaaaattcattgatttttattccaataaatagtttacaaatcctactgttaatatttgcctcttaagttgaaatgtaagagtatattaatgctttattctaaaactggtatttatctttgatataa

SEQ ID NO: 154017 - DNA, 459 bp, Homo sapiens
atttttttcccaaaagcttaatagttttccaatttgactcaaataggatttgtgagtaacaggggctgaatcaatgtccgttcttttcagggaaattactttaccatgacaattatttaacttagaactggagagtgtcagtctccaaaacgggaaacaactgaattgccaataagaattttgttcactttcttggctaaaacatgattttaattaatgagggggaaaattaaatctactgtatcactactccaaacaataagtcatttaaaaaagcatgaattttttcactcagtaaaatatctaacatacataaatcattttgtaatttttaaaaattcattgatttttaktccaataaatagtttacaaatcctactgttaatatttgcctcttaagttgaaatgtaagagtatattaatgctttattctaaaactggtatttatctttgatataa

SEQ ID NO: 154018 - DNA, 459 bp, Homo sapiens
atttttttcccaaaagcttaatagttttccaatttgactcaaataggatttgtgagtaacaggggctgaatcaatgtccgttcttttcagggaaattactttaccatgacaattatttaacttagaactggagagtgtcagtctccaaaacgggaaacaactgaattgccaataagaattttgttcactttcttggctaaaacatgattttaattaatgagggggaaaattaaatctactgtatcactactccaaacaataagtcatttaaaaaagcatgaattttttcactcagtaaaatatctaacatacataaatcattttgtaatttttaaaaattcattgatttttattcyaataaatagtttacaaatcctactgttaatatttgcctcttaagttgaaatgtaagagtatattaatgctttattctaaaactggtatttatctttgatataa

SEQ ID NO: 154019 - DNA, 442 bp, Homo sapiens
atgactaaaattatacccattgaacagcccctcccaattttcgtctccctctaacccctggtaaccaccattttactttctgatttgatgagttttactgttttagacacctgatattagtggattcatgcaatatttgtccttctgtgactggcttatttcacttagtgtaatgtcctcaagattcatccatgttgtagtatatgacgggattttttttaaggatacataatatttggttgtatgtatattaccacatttattttatccattcaactgtcctggacatttaggtggttgttagtgtcttgactgctgtgacaaaataagtacttttaaaagtctcacatttgcaagttcaatttgaacctttttttagtctgcttgyacttctcttatcaagcaagaaagcacttttctgctttttgtattactagtaaca

SEQ ID NO: 154020 - DNA, 462 bp, Homo sapiens
cttgcatgactaaaattatacccattgaacagcccctcccaattttcgtctccctctaacccctggtaaccaccattttactttctgatttgatgagttttactgttttagacacctgatattagtggattcatgcaatatttgtccttctgtgactggcttatttcacttagtgtaatgtcctcaagattcatccatgttgtagtatatgacgggattttttttaaggatacataatatttggttgtatgtatattaccacatttattttatccattcaactgtcctggacatttaggtggttgttagtgtcttgactgctgtgacaaaataagtacttttaaaagtctcacatttgcaagttcaatttgaacctttttttagtctgcttgtacttctcttatcaagcaagaaagcacttttctgcttttygtattactagtaacagtggagattaaatat

SEQ ID NO: 154021 - DNA, 448 bp, Homo sapiens
aattatacccattgaacagcccctcccaattttcgtctccctctaacccctggtaaccaccattttactttctgatttgatgagttttactgttttagacacctgatattagtggattcatgcaatatttgtccttctgtgactggcttatttcacttagtgtaatgtcctcaagattcatccatgttgtagtatatgacgggattttttttaaggatacataatatttggttgtatgtatattaccacatttattttatccattcaactgtcctggacatttaggtggttgttagtgtcttgactgctgtgacaaaataagtacttttaaaagtctcacatttgcaagttcaatttgaacctttttttagtctgcttgtacttctcttatcaagcaagaaagcacttttctgctttttstattactagtaacagtggagattaaata

SEQ ID NO: 154022 - DNA, 538 bp, Homo sapiens
aaatccctgacttacttgaaaaagaattcactaggttggttattaagctaaggcaccagagaaaggtgaagcccaatgtaargatataaaaaaaaaaaaagatacaagaagtaaagggagaaatattcaatgaactagatagcataaataaaaaacaatcaaaactttaggaaataatggacatacttatagaaatataaaatgctctggaaagtcttagcaatagaattgaacaagtagaagaaggaaattcagagcctgaagacaaggtcttctaattaaccgaatccaataaagacaaagaaaaaagaataagaaaatatgaagaaagccttcaagaaatctggaattatgttaaatgaccaaacctaagaataaccggcattcctgaggaagaagagaaatctaaacgtttgttaaacatatttgggggaataattgaggaaaacttccccagctttgctagagacctagatgcaaatacaagaagcacaaagaacatctgggaaattcatcgcaaaaagatcatcatctaggc

SEQ ID NO: 154023 - DNA, 532 bp, Homo sapiens
gtataccaatggtaatgctgctggaagagtagccaggggactggrgaaaagaaggcaccatgttatgtgctgggacctcattcattcttcatgtcataaggagccaattcttctctggacttttccacattccatgcaaagtctgtctggcttcctgtccatttactttctggtcattcaaggcctaccactgtccggtgtccagttgctcctcacatgcagatggaaaacctgggccaggtcaaagtctgaagacctagagaactgggcagagctctgggcagtgtgggatctgcccacacctctcagagagaggaactgaggtggttgttctgagaggcagtgagcagggagaccccgaagccaaaggctggcaggatccagcagggcagaggccagcaggggaattcagggaagagcctcagggctgacaatggggacacctgactacagtcaaggggattcaaagcacagcctggaacctggaggaatcccctggaacatggacacagaaatgcggacagctgaagcc

SEQ ID NO: 154024 - DNA, 532 bp, Homo sapiens
gtataccaatggtaatgctgctggaagagtagccaggggactggagaaaagaaggcaccatgttatgtgctgggacctcattcattcttcatgtcataaggagccaattcttctctggacttttccacattccatgcaaagtctgtctggcttcctgtccatttactttctggtcattcaaggcctaccactgtccggtgtccagttgctcctcayatgcagatggaaaacctgggccaggtcaaagtctgaagacctagagaactgggcagagctctgggcagtgtgggatctgcccacacctctcagagagaggaactgaggtggttgttctgagaggcagtgagcagggagaccccgaagccaaaggctggcaggatccagcagggcagaggccagcaggggaattcagggaagagcctcagggctgacaatggggacacctgactacagtcaaggggattcaaagcacagcctggaacctggaggaatcccctggaacatggacacagaaatgcggacagctgaagcc

SEQ ID NO: 154025 - DNA, 532 bp, Homo sapiens
gtataccaatggtaatgctgctggaagagtagccaggggactggagaaaagaaggcaccatgttatgtgctgggacctcattcattcttcatgtcataaggagccaattcttctctggacttttccacattccatgcaaagtctgtctggcttcctgtccatttactttctggtcattcaaggcctaccactgtccggtgtccagttgctcctcacatgcagatgraaaacctgggccaggtcaaagtctgaagacctagagaactgggcagagctctgggcagtgtgggatctgcccacacctctcagagagaggaactgaggtggttgttctgagaggcagtgagcagggagaccccgaagccaaaggctggcaggatccagcagggcagaggccagcaggggaattcagggaagagcctcagggctgacaatggggacacctgactacagtcaaggggattcaaagcacagcctggaacctggaggaatcccctggaacatggacacagaaatgcggacagctgaagcc

SEQ ID NO: 154026 - DNA, 532 bp, Homo sapiens
gtataccaatggtaatgctgctggaagagtagccaggggactggagaaaagaaggcaccatgttatgtgctgggacctcattcattcttcatgtcataaggagccaattcttctctggacttttccacattccatgcaaagtctgtctggcttcctgtccatttactttctggtcattcaaggcctaccactgtccggtgtccagttgctcctcacatgcagatggaaaacctgggccaggtcaaagtctgaagacctagagaactgggcagagctctgggcagtgtgggatctgcccacacctctcagagagaggaactgaggtggttgttctgagaggcagtgagcagggagacccygaagccaaaggctggcaggatccagcagggcagaggccagcaggggaattcagggaagagcctcagggctgacaatggggacacctgactacagtcaaggggattcaaagcacagcctggaacctggaggaatcccctggaacatggacacagaaatgcggacagctgaagcc

SEQ ID NO: 154027 - DNA, 288 bp, Homo sapiens
cagtgatttcctgtcatccacaaaaaaagaggaaatagtaagagaaaagtaaatactaggtgaagtgctttgagccaaagrgagtccatataagaagtgatggatggctctgttgggatcccggcagtagtgcatgatgatgttgttgtataaatacgtcagctcctttaaccctcgggggaccctgaagcatgtgtttttcatgggcccctagcgtgctcatgcgggattaagtttcagttgcctactgtggtaattggcttgagaagcctatctttattaattttc

SEQ ID NO: 154028 - DNA, 372 bp, Homo sapiens
aaatgctctgtttatctgattattggttagccagtgatttcctgtcatccacaaaaaaagaggaaatagtaagagaaaagtaaatactaggtgaagtgctttgagccaaagggagtccatmtaagaagtgatggatggctctgttgggatcccggcagtagtgcatgatgatgttgttgtataaatacgtcagctcctttaaccctcgggggaccctgaagcatgtgtttttcatgggcccctagcgtgctcatgcgggattaagtttcagttgcctactgtggtaattggcttgagaagcctatctttattaattttctcctcttccttgtcttatttctcttctcccctacctgtgttctcttcattccc

SEQ ID NO: 154029 - DNA, 372 bp, Homo sapiens
aaatgctctgtttatctgattattggttagccagtgatttcctgtcatccacaaaaaaagaggaaatagtaagagaaaagtaaatactaggtgaagtgctttgagccaaagggagtccatataagmagtgatggatggctctgttgggatcccggcagtagtgcatgatgatgttgttgtataaatacgtcagctcctttaaccctcgggggaccctgaagcatgtgtttttcatgggcccctagcgtgctcatgcgggattaagtttcagttgcctactgtggtaattggcttgagaagcctatctttattaattttctcctcttccttgtcttatttctcttctcccctacctgtgttctcttcattccc

SEQ ID NO: 154030 - DNA, 385 bp, Homo sapiens
gaattccttccacaaatgctctgtttatctgattattggttagccagtgatttcctgtcatccacaaaaaaagaggaaatagtaagagaaaagtaaatactaggtgaagtgctttgagccaaagggagtccatataagaagtgatggatggctctgttgggatcccrgcagtagtgcatgatgatgttgttgtataaatacgtcagctcctttaaccctcgggggaccctgaagcatgtgtttttcatgggcccctagcgtgctcatgcgggattaagtttcagttgcctactgtggtaattggcttgagaagcctatctttattaattttctcctcttccttgtcttatttctcttctcccctacctgtgttctcttcattccc

SEQ ID NO: 154031 - DNA, 372 bp, Homo sapiens
gaattccttccacaaatgctctgtttatctgattattggttagccagtgatttcctgtcatccacaaaaaaagaggaaatagtaagagaaaagtaaatactaggtgaagtgctttgagccaaagggagtccatataagaagtgatggatggctctgttgggatcccggcagtagtgcatgatgatgttgttgtataaatacgtcagctcctttaaccctcgggggacyctgaagcatgtgtttttcatgggcccctagcgtgctcatgcgggattaagtttcagttgcctactgtggtaattggcttgagaagcctatctttattaattttctcctcttccttgtcttatttctcttctcccctacctgtgt

SEQ ID NO: 154032 - DNA, 372 bp, Homo sapiens
aaatgctctgtttatctgattattggttagccagtgatttcctgtcatccacaaaaaaagaggaaatagtaagagaaaagtaaatactaggtgaagtgctttgagccaaagggagtccatataagaagtgatggatggctctgttgggatcccggcagtagtgcatgatgatgttgttgtataaatacgtcagctcctttaaccctcgggggaccctgaagcatgtgtttttcaygggcccctagcgtgctcatgcgggattaagtttcagttgcctactgtggtaattggcttgagaagcctatctttattaattttctcctcttccttgtcttatttctcttctcccctacctgtgttctcttcattccc

SEQ ID NO: 154033 - DNA, 372 bp, Homo sapiens
gaattccttccacaaatgctctgtttatctgattattggttagccagtgatttcctgtcatccacaaaaaaagaggaaatagtaagagaaaagtaaatactaggtgaagtgctttgagccaaagggagtccatataagaagtgatggatggctctgttgggatcccggcagtagtgcatgatgatgttgttgtataaatacgtcagctcctttaaccctcgggggaccctgaagcatgtgtttttcatgggcccctagcgtgctcatgygggattaagtttcagttgcctactgtggtaattggcttgagaagcctatctttattaattttctcctcttccttgtcttatttctcttctcccctacctgtgt

SEQ ID NO: 154034 - DNA, 577 bp, Homo sapiens
tacctgtgttctcttcattcccttcctccctacaaaataaactatgtgagtttgaattcttgtttcaggattcaagtttgctcctggggaaccaaattaagactaaagaatatgtattctctttcttctcatttggcgttgagacattttaaagcctcaacaattttccctatataagcagttccaattatttgtgcctgacttataaaaagtaggtaatgagaaaattaaggcttgcagacaaatcttacacaattgcagcagaatatctcagaaatgtgcccaattctgagayagaaagaaaagaaaaaaaatcccacatctttattatggtttcccaatgcctcttcaaagcgcattaagtaggtgtaatcctcgcccctcccatacgatagtgggcagaccccatgacttttactagccaagataataatcaaaactccaccttatctttaatggcaaaccttcctccagttggagtgtgctttgggctgtccaccggtggtgggaaagagaggaaaggaggtatggtcggtgtcttctctccactttgtgccatttctcttttcttctccca

SEQ ID NO: 154035 - DNA, 577 bp, Homo sapiens
tacctgtgttctcttcattcccttcctccctacaaaataaactatgtgagtttgaattcttgtttcaggattcaagtttgctcctggggaaccaaattaagactaaagaatatgtattctctttcttctcatttggcgttgagacattttaaagcctcaacaattttccctatataagcagttccaattatttgtgcctgacttataaaaagtaggtaatgagaaaattaaggcttgcagacaaatcttacacaattgcagcagaatatctcagaaatgtgcccaattctgagacagaaagaaaagaaaaaaaatcccacatctttattatggtttcccaatgcctcttcaaagcgcattaagtaggtgtaatcctcgcccctcccatacgatagtgggcagaccccatgacttttactagccaagataataatcaaaactccaccttatctttaatggcaaaccttcctccagttggagtgtgctttgggctgtccacckgtggtgggaaagagaggaaaggaggtatggtcggtgtcttctctccactttgtgccatttctcttttcttctccca

SEQ ID NO: 154036 - DNA, 577 bp, Homo sapiens
tacctgtgttctcttcattcccttcctccctacaaaataaactatgtgagtttgaattcttgtttcaggattcaagtttgctcctggggaaccaaattaagactaaagaatatgtattctctttcttctcatttggcgttgagacattttaaagcctcaacaattttccctatataagcagttccaattatttgtgcctgacttataaaaagtaggtaatgagaaaattaaggcttgcagacaaatcttacacaattgcagcagaatatctcagaaatgtgcccaattctgagacagaaagaaaagaaaaaaaatcccacatctttattatggtttcccaatgcctcttcaaagcgcattaagtaggtgtaatcctcgcccctcccatacgatagtgggcagaccccatgacttttactagccaagataataatcaaaactccaccttatctttaatggcaaaccttcctccagttggagtgtgctttgggctgtccaccggtgstgggaaagagaggaaaggaggtatggtcggtgtcttctctccactttgtgccatttctcttttcttctccca

SEQ ID NO: 154037 - DNA, 446 bp, Homo sapiens
catttgccagtccctgtggacttaggccagatagtataaataatagtcacaaaaggagtatgaatgggataagaagccacttctagtctgagacaattaagagtagtagtgccttctctgcactctcacccctcattctgacagctgaagtgaaggactcccaacttctggaactgcccaatgaaagtagccttgtgtgagtgttagctggcctgctttggtctgggatgcaagtagaaataaactcctstcatattaagccactaagactttagggatatgttgctgtagcatagcctaatgtagcctgattactgaacgagccaccccatcaactgaatctatgtatatactaaaaacattttaagatatgcaaggtctcaaaagagttcactcgatgcacactttttctcaggaagctactagaggatgtgctccacaaaaaa

SEQ ID NO: 154038 - DNA, 550 bp, Homo sapiens
gtttcaagttagagccacaaactgtctttactgctttttgcctgtcttcgtagcttacttagactttatcaaaatttacttctaaaaatatgcatctgaaactgaataaataatggaagttaagaaactctagaggccaaatatgagccatttcatttatacttgcagaaatcaaaaagcattttggcattwaacaacatttttttagggtacagtgcttttaagacattatataattacccttactgagagtacagtttttagctttgtcagggtctctattggaattataattccatgctgagcaacgagttctatcaaacctctattatcatattaaaacacttgagtaggccaggtgcagtagctcacatctgtaatcccagcactttgggaggccgaggcgggtggatcacctgaggtcaggagtttgagaccagcctggccagcgtggcgaaacctagtcaccactaaaaatacaaaaattagccaggcatggtggcacacacctaaatcccagctactagggaggctgaggcaggagaatcgc

SEQ ID NO: 154039 - DNA, 644 bp, Homo sapiens
gttccgtaaaacaactgttggcaacctgccccaaaaatttactagctttggctactttgtcaaaacattggcaaaaatagtactttcctaaaacaaaacaaatacatttattgaatatttatatctcaaatgtatcagatgccttcagatataagcaaagcagtctattaacacttgagctgactttttctgaaacagttacaaaatattattctttcctgctgaaatatttctgcattagttttaatcaccttcagggtcaaaagcatctgttctcacatagcacatgggacacgtcacagtcctaatgatttcacaaaaggattactggtttgaaagtctgtttacccctgtacctctttgaagaagggattatgcccttcatcttccactctgtggtagcagaaatgattgagaataaagtagttatgagtatgagtcatgaagtcagacttgctggattygaaattgggctctaactggacaagtatcaattaatctccctatggcacagtctcctcacctgtaaaactaaaataattctgcttcccttatagggtcccctagagagcttctaactgtatgtgatacatactaagagtttaatcaatgttagccattgttaggatgcctagtatagtttc

SEQ ID NO: 154040 - DNA, 644 bp, Homo sapiens
gttccgtaaaacaactgttggcaacctgccccaaaaatttactagctttggctactttgtcaaaacattggcaaaaatagtactttcctaaaacaaaacaaatacatttattgaatatttatatctcaaatgtatcagatgccttcagatataagcaaagcagtctattaacacttgagctgactttttctgaaacagttacaaaatattattctttcctgctgaaatatttctgcattagttttaatcaccttcagggtcaaaagcatctgttctcacatagcacatgggacacgtcacagtcctaatgatttcacaaaaggattactggtttgaaagtctgtttacccctgtacctctttgaagaagggattatgcccttcatcttccactctgtggtagcagaaatgattgagaataaagtagttatgagtatgagtcatgaagtcagacttgctggattcgaaattgggctctaactggacaagtatcaattartctccctatggcacagtctcctcacctgtaaaactaaaataattctgcttcccttatagggtcccctagagagcttctaactgtatgtgatacatactaagagtttaatcaatgttagccattgttaggatgcctagtatagtttc

SEQ ID NO: 154041 - DNA, 625 bp, Homo sapiens
tttggttgccaggattttcatgttattgctacatatcacttcctaactgtgccacttcaaaatataatgtttagtaagtcctgagtcatttttaaccttaataatttggggcatgaatatactataaacactgtgtcaacagagcataaaagcaaaagccatgccatttcacatgaatgtttatattttagcagttgaccttactgtcagctttcctgatacatcgttcaatctaattttccaatccattgaaaacattctccagttgctgagtgacttcataaattgtatttatgatccttgtcttaagtttcttcaaatgatgtggctttgatgagtaaactgcagacttttttgcaaagtctcataaaaactaaaagtagtcaaatgaggacaggtcaacaaaatgagttcccaaaggatttttaaaatcctgttctctatcacgtaagaccaggatgcacagctttcccaagcaaggcctttgatgtaaggttgcaaattgtgtaactctacaactttttcaatgaactgaaggagsaagataccaaattagagacttactgttacaaaagaatagcacattttgcaaaacacatctgtacttgcaactgaaaacatgttt

SEQ ID NO: 154042 - DNA, 589 bp, Homo sapiens
  misc_feature (1)...(589): n = A,T,C or G
aaacataagtggcacctctaattgatataaccaataactctcagttaatgattacttactgtaattanaatagtgcacattatttaaaagttttaacataccacggggaagaacaatacaagatataaaatggcacagtataattctgagtgcaaccatgcaaaaaaaagcatcatttaaatcagagattattcatttaccatatattcttagcataaggaaagtatattcatttaaaaagtatgaaccctatgagtattgctttaatgytatgtgtctttttagaagccaaaaataaacaacgtttataaaaacattgttttaaaccaaaggctgttaaaaaaagaaaaaaatcacacagatcacaaataagtaacaattttttaaaagcaattcaacattttaaatttttgcctccaaagtattatatcacattgatcagaataccagactaccctttttattttcctttctggttatgcccttaaaaacactgtgatgcttctaagagctttaaacttgtaaataacccctcccagaagcgcaaatctccatatcttaatatcatgaaagctggaactgtaaaata

SEQ ID NO: 154043 - DNA, 583 bp, Homo sapiens
aattaatttgatattaatttgatgtagcattaaattaaaggtctcaatgttcctggctatttaaagcctgctatcctctccacaatgaaggagaagacactcatatccagagagaagcacccagtgaggttgagagacactgcaaggcctctcctgagtcttgctgctctgggcgtgtagacctcatggcttcagcaaaaataaytttttctcttgcttttctccttgtagatggcgtgtgccttctgtgaattattctttcatgggatccacaagaaaataaactccttttgtggtcagtccaaatcttccttgttacttctctctagtgcttgctgttttcagcaagagcactggtcaaaaacaaaacaaaaaccttgatttcccatcagcatctcacccattgatctaaacagcccttcatgagggatcaatgaacatcaggagatcagtactctagcattgctgttcattagaattcattaggggttaaaatcaatttcccattctgtgtattttactgccctgaaatcatctgttcagcacagctttctaacggttttcggcttaatttaatacttaa

SEQ ID NO: 154044 - DNA, 531 bp, Homo sapiens
accgaaaactaggaagtagagtagatctatttctagatagataccagccctttctgatttcaaagcaacactatgttgttctaataaggcatagtatctttyctcaaagagttcgaagtctagtgcatttggcatactttttgggccctgagcacctctgtctgttttttctatgtttagagaatttcctacctatgagtccaagacagaagacagaaacgcactttcccagccttccttacatatgacttaggctccttcaatcaggacttttatttggaagggaatggaaaaaaaaatgcaccatgtgaattccatttcactaagggcagtggcagagccatccgggtttcagaggcagcaggggcagaggttttgagatggcattcagtgcccaggagcgtgggaccaagatctggtgcttgtgctccgtgctgcagcagctgtctcccctggagtcatcttagatatagatcctaatgtctaacccagattttctgacttacctggaaattctctgggccttctaat

SEQ ID NO: 154045 - DNA, 527 bp, Homo sapiens
tgaggggaatttggattatctggggccaaaatgatgcagtcgtctgggcttgtggcctcgtattatgggccaggaagaattgaggaacagtgccaggcagtaattagacactgttcgttttagttaactttctagaccatttggcaatacagagtttaactctgactcctgccatggctgtgtatcctgtgcctttccagaggataaattcatacaaataagatagagagatgacaagtacgtttgtggttattcacatatamcagtatgactgatgcatctattattaagctactttcatgttaaaaaaatttattactatgacatttcagtttggcacttttaaatctcatctctgtcccttttcctgtgttaaatttcagtgactcagatatcccacatcagaactatgtgagacacgagatagaaaaaaaaaaaaatgaaacagacatagtcactgtcctcaagggtctcacagtctaggaacagagtgaatctcagccagagcgggagctagctcagctagt

SEQ ID NO: 154046 - DNA, 350 bp, Homo sapiens
cttggggagggctgtatttaaaaacataccaagctactataaaaaggtctgtaattgtccaaaagccaaggactcggggttggaattcacttgggcctttcatatcaactaaatttttagcaagatacagttaattacctgttttagaaatcttaaaaattcatatgtagggtaataytagtttggtgatgttacatttttgtctaattagataggaaatgtgccattattaaattgttaactatgggtaaaatcagtgattattaagagcttatatatgcagcatattaaaaaacacgtaagtcctcttcacttgtggtcatggaagcatgccatttaaatttctttag

SEQ ID NO: 154047 - DNA, 596 bp, Homo sapiens
ttcatttttaaccattcactgagcagatctagttctgggagttttcttatttacagaacacctaatgcactgaaacccacaaatcattggtgtgatgtcaaagaactgatgtgactgaaatttttacttttcatagctgctttggcatttttgaggtggcttcagaatgtgcctcttatcgctaatgttcaagtgcacttcagatttacctctcagccctgggaatctgaccctgattttctactccagctgcacagactgtatcttgatttgtgaacttgcttcctgaaggacatcttccagggaaacaaataaactaattaatccattaagaatgtttacaaattctcttaccgggttactagaatttttctttcaccttggattcattccaagctcctattcaaagcctactgtgtgaatgtggctccagagttttgaatccccactctagtcctgaggagagatgcaaatgaacacttgcatttgtaataaaatattgtagcagttgggtagaagtaggtcctcmcttgggaagatgttgggagttcctgactgtcagtgaggctgcactagcatttttcatgttgatatta

SEQ ID NO: 154048 - DNA, 595 bp, Homo sapiens
tttggctatctgaggtctgctgtggctccatataaattttaggattgtttcttctatttctggaaaaaatgtcattggaattttgatagggattgcattgaatctgtagatagctttgggtagtatggtaattttaacaatattaattcttccaatccatgagcatggtgtatcattttattatttatgtcatcttcagtttatttcatccaygttttacagttttcagtatacacatcttacacctcctccttggttaaatttatacctaaatgttttatttgttttttaatgctattgtaaacaggaattattttcttaatttctttttcagatagtttgttgttagtgtatagaaatactactgatttttgtatgctaattttgttttctgcaatctacttaaaggtttgtcagatctaacagttttttggtggagtctttaggatttttctacatataatatcatgttgtcagcaaacagagacagttttacttctttctttccaatttggatgattttatttccttttcttacctaattgctctggctgagactttcagtactatgttaagtcaaagaggtgaaagtggg

SEQ ID NO: 154049 - DNA, 582 bp, Homo sapiens
cagttaagatgttagcttatcatataaggcctttattgtgttgaggaacattttttctatacctaatttgcttacagtttttatcatacaaggatgctgatttttgccaactgctttttctgcatctttcaaataatactcacctacttcatatgtaatccaggcaccttgtaaaggagcattactaattcctccctttcactctttgagatattgctgtcatwcatttcacttgcccatatgctataattacacattatattgttactgttattgatataaacagttgcctttcagatcaattagaggtctctaagaattagaggttgggcatggtggctcgcacttgtaatctcagtactttgggaggtgaggggattgctggagccagaagtttgagactaacctgaacaacataatgagaccccattactccataaaatagaaaacattagccaagcatggtggtggcacgtgcctgtgtttccagatactcaggaggctgagcaggaggactgcttgagctcaggaagtcaaagctacaataagccatgattggaccactgttgtccagcctgggtg

SEQ ID NO: 154050 - DNA, 341 bp, Homo sapiens
gaattcagtcaattcaacttgattcaatttactctgtatttcatgaacttctactgggaggagggtggttcaagggaagttaaaaaaaaaaaaaaagaagaccttgtttcctaggagcttctgtgaaraactggtgagagggagggacttctgagatgcgttggatttaattccagcagctgctgcagtggatggccgggtcactcaccagggatgtagctcaatcgcctcattttctaaacccccaggtctctgggtaaaccactagagtccccacacagattccacgcagcaacagtacccacccctgagattctgagtagatagagaaaatatgggaa

SEQ ID NO: 154051 - DNA, 568 bp, Homo sapiens
tgtgagccctagattctcttctattgtactttcagatgttcccccacaccctggtgtagtttctatacacgaagtgctgagtattactctgttgagtgaatagtgaagaggagcctctgcagatctctaagcttctgcctatggatgctccactcttttgtatactgcaaaccaactgctttcatctccctggactctcagctctatcttgtcaacttagggagaccagcaaggtgtgcctgggtttcctctctctgtcctcgcctggagattctttcaagccgtcagttggggattcatagkgctcacctagtttgtttctatctctgagagatgactgtccttcattgtctgatactcagtgttttgaaaagcaatgtttactatattttgtttgtttcttgttgcaggtgggaagtgggaagataaatcagatccctgctactccttaagcagaagtgaaattcattcatggtatccctaataacattcttagttaacatgaatgtgttatgtgttttctgtgtatgaataagtgagcttagagattcatattagcaagtcattg

SEQ ID NO: 154052 - DNA, 325 bp, Homo sapiens
tcagtcctttcagttgcttaaggaaatcwgcagttatctgatttctcaacgagtcctgtaggttctactataaaaatatatggaagaaccacctatttctcaccactgctatttagaccatgctgctccacccacttctaccttcacctgggctctgggttactgcggtaacttcctcctcggcccacatcttccatccctgtccacttaggtctattctcaacacccctgccagaatgaggtgttgaaatgtaaatcaaatcatgtccccaccctgctcagccctctgatgactgtgactcacttcaaatacaagtcagtctgt

SEQ ID NO: 154053 - DNA, 599 bp, Homo sapiens
taatacacctggttatccaggggccacccctgggccagcctaagtcactttacgtcaaaggttgtgcttaagccttcttggcaagatagatattgacccttcaacattagatgtgtgtgtgagacttkgggactgaaatcacagttcctggagtttatgctgttgctctacgttcagtcaggcatcaaaagcttagattttgtctctctgattacacctgagggggcccaaccttgtgcatgctcacagtctttcagactgtcaggtgtgtttatgacttcacttttgtgcctggctccttaggctttgcccatggttcagagcagcatattgcttacccagtgtttggtcagaggctgtgctgaagcccccagtaccagtgagaattacactattggtgatgcctctgagtgcagcttgaggcatgctttcaagtctgccctccacctgcttacatgcccacaggagcccccggcagcagagtggactgtgattccagaagggttcttcctggctttcttgttccctggttctcactgttaaagttctggccactctgccattttgcttgctgctactgatgtcatggagctgtgagc

SEQ ID NO: 154054 - DNA, 605 bp, Homo sapiens
cacctggttatccaggggccacccctgggccagcctaagtcactttacgtcaaaggttgtgcttaagccttcttggcaagatagatattgacccttcaacattagatgtgtgtgtgagacttggggactgaaatcacagttcctggagtttatgctgttgctctacgttcagtcaggcatcaaaagcttagattttgtctctctgattacacctgagggggcccaaccttgtgcatgctsacagtctttcagactgtcaggtgtgtttatgacttcacttttgtgcctggctccttaggctttgcccatggttcagagcagcatattgcttacccagtgtttggtcagaggctgtgctgaagcccccagtaccagtgagaattacactattggtgatgcctctgagtgcagcttgaggcatgctttcaagtctgccctccacctgcttacatgcccacaggagcccccggcagcagagtggactgtgattccagaagggttcttcctggctttcttgttccctggttctcactgttaaagttctggccactctgccattttgcttgctgctactgatgtcatggagctgtgagcactctgctatt

SEQ ID NO: 154055 - DNA, 623 bp, Homo sapiens
tatgcaaatttctaattaacatttttctcttgtctactaatttactctctaagatttcttaaaaatttaaaaatatttttcttgactgcatttgctcatttaaagatgtgttgttttgaatttgtttttttgctatttactctgatttgtgactgcactttctagcaagttttattctgtttcttacaagctctgcttttattattctatttttgtaagwattaagcatttcttttcttgtattaattattgaatgatttggctcatcctgggtcacgtattaacagaagaaccatattgttggaatgtttaagggcactttccccatttctcaacttaagaaggtttcccttctctcttatcacagggaagcctcattttttcatatgtaactgtcgccttaatttttccatacttctcacaactgttatcttgactcttccttttcttctatgtttctttattggttctcaaatgtatctttatcatttctacatgctgccttttgtgtgtgcgtgttgtggtaaattataaatattggctataaatatttgggtttacttatgaactcttaattctattccattgatgtatatgtatataattgtcccaatattatactt

SEQ ID NO: 154056 - DNA, 488 bp, Homo sapiens
ttctttataatttttagtcaatttttatagtttttttgtttcaagaaatttgttcattacatcaaggttatctaatttgttggcatacaattgttaataatattctttaaaaatacattttatttctatagaatctgtrgcaataagcacattttcatttttattctagtaatttgagtctttgtttcttttttcttagtctagtctaggttaaggtttgtcaatattgttaatgttttaaaaaactaatttttgattttgtttattttctctattgcttttctattccctattttgtcatctttattattttgtttcttctgctagctttaatgttagcatcttcttctttttctactgcattaggatgtaactttcatttctttaaatgcaggcatttacagcaatacatttcctttgagcactgctttcactgtttcctatgagatttgtattctcattttcatttgcctcaaagtattttctaa

SEQ ID NO: 154057 - DNA, 580 bp, Homo sapiens
ctattaacatgaatttaaacatttttctgtaataaaatgatttgttgtaggtcattattttagattttaaacttttttactttaaaaattagaattgttgaaagtaatatacatctttgatattaaatttagaaaatacagagaaaagggtaaggaaaaaaagtaacccatatcctacaaccaaaatataatcagttaaaagatgactgtatttctttccagttctttatatatacttgtgtgtatgtgttcttgcttgtaagagcagactatatatactgtgtaactttatatccacttttctcttaatattaaatcatgggcattttctcacattattaaaacttcaaaatatayactttttttttttttttgagatggactctcactgtgtcaccaggctagagtgcaatggcacgatcttggctcactgcaacctctgccttccaggttcaagcgattcccctgcctcagcttcctgagtagctgggattacaggtgcacaccaccatgcctggctaatttttgtatttttagtacagaaggggtttcaccatgttggtcaggctggtttcgaact

SEQ ID NO: 154058 - DNA, 592 bp, Homo sapiens
ctgctctgctttcgagagtaagcgataaatgtctttgagggttggaatattaattgaaggcagcatctggtcagcagctgaccggctccagttgtcctgctccaaccgagcaggcgagaaagaagctttgctggctctctttgccaggctctcacttttccttggagccatggactaaatgaacccccattttatctctgctggatcactgcatggatgccagaaaatcaattgggcaggaaaatctgttaatctaaagtgaattcaatctaaggaatcatttaaaataaaaatttcaatcattactttttcagaaaagcacttttttccctcaagtctgtgtgtacatgtcatgacgatacttcgaaaggacctatagcaagagtaatttgaagtcaatagaattgtcttgcaaagaacaatttgctttttggaaaaaaaaaaaaatagggtggctgattacaaacttaagaggaaatggaaaacccaaacactgtgtggccagaaacmattaacacactctagcccagaatacacatcaggacagatttttctcctgttgagaaggaataccttggctgtgttacaattg

SEQ ID NO: 154059 - DNA, 301 bp, Homo sapiens
caagtaaaaatttaaggaaggaagggagaaaaaaggggtagaaagagttcagtggaagtggaagaggaaaaatggaggatgggctggtaagaaaccttggattcaaaagctggctccaccactttctgcattcagaagcctgaacaaatcagttcatctatctgagcctcagtttacacttttgtaaatgsgagttattcatacttctacttgtcttgaagatttgtagggaggagccagtgaatagggtgtttgtgtctttagttttgaaagcactttgaaaacaaatagttacatagaa

SEQ ID NO: 154060 - DNA, 301 bp, Homo sapiens
caagtaaaaatttaaggaaggaagggagaaaaaaggggtagaaagagttcagtggaagtggaagaggaaaaatggaggatgggctggtaagaaaccttggattcaaaagctggctccaccactttctgcattcagaagcctgaacaaatcagttcatctatctgagcctcagtttacacttttgtaaatgggagttattcatacttctacttgtcttgaagatttgtagggaggagccartgaatagggtgtttgtgtctttagttttgaaagcactttgaaaacaaatagttacatagaa

SEQ ID NO: 154061 - DNA, 443 bp, Homo sapiens
gaagcctccttctccccctgtaggtgggtacagcatgagagtaacagcatccttcgtgtaagggtatgatgtgtgcggagtgaaggtctggccttcggggtgagtgcggcacaccttaagtctcacaggctcctccccttgcacgtcaaggcagggcctaggacctaggtaagtcccggcttccagcacctcagcttcctctaagctgtcccaaggtgggatcttcccaggaccccaccctcccacaaagctgattcttttctcacctgctccagaatggcgtctacccartcaatgcacagctgccctaaggtttcccactggcctaagaaggcagcaaagaatgggtaaccaagctacctggctggaacacacagggaggagacctaccctacaggctagaaaggtaattttgaagcagcacacatcatagtctctgccta

SEQ ID NO: 154062 - DNA, 609 bp, Homo sapiens
agatcttcctctttgggcctctgactggtcaggcyagttctgcctcctggcctgatcctgctccctatatcactgctccaacttccctctccgtctgggaacctcagtggtaccggtttttggcctccagccttccactcagctggggtcctcactggggtccaacttacagagatgagactaactcttggatttcccagcctggggggcagctttgcctaacagaaaacaccagctcatttcagaggactgggaagggaggtcttggatccaagctggggaaggttgaaatgacaggggagagagaaagtctgggtcatgtgcaagaaaggcactgggctttgggtgcacgtaacagagagagacaccaggcaggaggccctggtataagccagaagcctaggagcagggacatttcagggagatgaataccagtggattagcaaaccacagaaactccttcctcttagcctacttccccacagcccatccctgttcccttcccctccttacaagaagggcaagcttcttttcctgccagcccacgtcacccattgtctacaacagacattttggcacttgactgaattccacttaaaaccagaaaac

SEQ ID NO: 154063 - DNA, 528 bp, Homo sapiens
aagtgattctcctgcctcagccttccgaatagctaaactacayatgtatgccaccatacttggctaatttttgtatttgtagtagaaacaggatttcaccatgttggccaggctggtctcgaactcctgacctcaagtgatctgcccaccttggcctcccaaagtgctgggattacaggcatgggccaccgtgcccagcctattacatgttttaaggtcataaaactgctacttctggaatatttcttaaacttgcttgatttgtctaaattgagctaaagctgtaaggtctggctgctgggctccctgaaaccttgcacatatcttactgtatgactgtatttcgttttgagtctctggattctggggtttggacagatgaccatagtgaggcctgcagaaatatgcatgtcctcagtgtttggactgccagctgcaaggcagagccaaacccaatatggccccatcatccctggctcagctgtgctacctggccatgctggaaggggtttgatcttccaggaattt

SEQ ID NO: 154064 - DNA, 528 bp, Homo sapiens
aagtgattctcctgcctcagccttccgaatagctaaactacacrtgtatgccaccatacttggctaatttttgtatttgtagtagaaacaggatttcaccatgttggccaggctggtctcgaactcctgacctcaagtgatctgcccaccttggcctcccaaagtgctgggattacaggcatgggccaccgtgcccagcctattacatgttttaaggtcataaaactgctacttctggaatatttcttaaacttgcttgatttgtctaaattgagctaaagctgtaaggtctggctgctgggctccctgaaaccttgcacatatcttactgtatgactgtatttcgttttgagtctctggattctggggtttggacagatgaccatagtgaggcctgcagaaatatgcatgtcctcagtgtttggactgccagctgcaaggcagagccaaacccaatatggccccatcatccctggctcagctgtgctacctggccatgctggaaggggtttgatcttccaggaattt

SEQ ID NO: 154065 - DNA, 549 bp, Homo sapiens
aacttccgtctcccaggttcaagtgattctcctgcctcagccttccgaatagctaaactacacatgtatgccaccatacttggctaattkttgtatttgtagtagaaacaggatttcaccatgttggccaggctggtctcgaactcctgacctcaagtgatctgcccaccttggcctcccaaagtgctgggattacaggcatgggccaccgtgcccagcctattacatgttttaaggtcataaaactgctacttctggaatatttcttaaacttgcttgatttgtctaaattgagctaaagctgtaaggtctggctgctgggctccctgaaaccttgcacatatcttactgtatgactgtatttcgttttgagtctctggattctggggtttggacagatgaccatagtgaggcctgcagaaatatgcatgtcctcagtgtttggactgccagctgcaaggcagagccaaacccaatatggccccatcatccctggctcagctgtgctacctggccatgctggaaggggtttgatcttccaggaatttg

SEQ ID NO: 154066 - DNA, 469 bp, Homo sapiens
gctgcccaggctgatcttgaactccctctgtttcccaaagtgttgggtttataggtgggaaaaaccacacccagccatttctcatttctaattaatgaaagatgatggaaataagatgtcacttccaataccaggttatcaaaggactgtggtttccgttccatcttagctacctgctcttgatcattttctcgtttgcttgctctaagaaccatgatgtgagctgccctatggagaagtccacgtgcccaggaacagagggaggcctccagcaaacagatagccagtgagggactgaggctctcattccagcaacccacaaggaacggaaaccccctagttgaaacttcagatgagaccacagttccagcagacagaagaagtgcaatcacatgagagatcytaagccagagaaactcgtgtacaaaaagtagaatcagggtcgggtgcagtggttcatgcctgtaat

SEQ ID NO: 154067 - DNA, 332 bp, Homo sapiens
tcaaaacatacagtttcctgagactgccacaaaagtgaccttcattactcatctgtaaggctgggaaccctgtagtccaggaaccaggtctatttttccaagacggctttttaaagcattgactccataaagtcaaacttagttgttaaaatattggtcatatctgattcaaggcacatcagtctcaaatatgacaatttagtcaaagccttcataatataacctatgtttccaattatttcttgtttcaaggggaagagatttttattaaacttacrcaaatagctgtattgccatgaaaataagaatactcaataagagtttctgaattc

SEQ ID NO: 154068 - DNA, 587 bp, Homo sapiens
gcgaacttgggcaagttacataacttccccggtgcccagttttctgtgaaaaaaagggaataatagttctcattttacagggttgttgtgtgaatgaaacattctaagcatttaaaaggctcagaacagtgtctggctcacattgctattattttctttctcatatcacctggggcagggggtgggggcagtggttaaagaggagataaagagacaagggaataaacagatgcagacaccttaaaaattgcaaggcaaagctggtgttaagacatagctctctaggactttcccctagagtctccctggctcagtgggtgctgttcatgcaggggaaagcttgaccragagtgagtccatcacgctgtgagtcactgggtcagggttgcgcgccctcacagacacctggcacgcttcttggctgacttcttctgtgaccagggcctctgatagccctgttcccctccctgcatgttgtttgtatcttcttttcctagttttctttgattcagataagctcaggggctcctgagccgatcttgtcttcctttgatggatgggtggcaagggagtagggctggggccag

SEQ ID NO: 154069 - DNA, 587 bp, Homo sapiens
gcgaacttgggcaagttacataacttccccggtgcccagttttctgtgaaaaaaagggaataatagttctcattttacagggttgttgtgtgaatgaaacattctaagcatttaaaaggctcagaacagtgtctggctcacattgctattattttctttctcatatcacctggggcagggggtgggggcagtggttaaagaggagataaagagacaagggaataaacagatgcagacaccttaaaaattgcaaggcaaagctggtgttaagacatagctctctaggactttcccctagagtctccctggctcagtgggtgctgttcatgcaggggaaagcttgaccaagagtgagtccatcasgctgtgagtcactgggtcagggttgcgcgccctcacagacacctggcacgcttcttggctgacttcttctgtgaccagggcctctgatagccctgttcccctccctgcatgttgtttgtatcttcttttcctagttttctttgattcagataagctcaggggctcctgagccgatcttgtcttcctttgatggatgggtggcaagggagtagggctggggccag

SEQ ID NO: 154070 - DNA, 413 bp, Homo sapiens
aagggctcctgtcctttttagggtgtggcaatmagggtcttttgtagtcatcactaccaaccctgtgaatgggtaggagcctcaaggagaagagatgtggggggtgcttttattttttaaacattatacaactattacatgttcttttttttagcactatgagaaaatagagataaacaatacaggaaaaggaagaggaagttgacacctgatcccattacccaatgaaatcactatgaacacttgtgtgtattctttcagacttttttggtggtggttgctatgaaaaggaaaaggaaacaggaaaaaactggtatcctcatgcactgcttcttggagggtgcattggtaaagcctttattagaaggcaactttgcaagatcattaaaaaataataataatgcacctcccct

SEQ ID NO: 154071 - DNA, 413 bp, Homo sapiens
aagggctcctgtcctttttagggtgtggcaatcagggtcttttgtagtcatcactaccaaccctgtgartgggtaggagcctcaaggagaagagatgtggggggtgcttttattttttaaacattatacaactattacatgttcttttttttagcactatgagaaaatagagataaacaatacaggaaaaggaagaggaagttgacacctgatcccattacccaatgaaatcactatgaacacttgtgtgtattctttcagacttttttggtggtggttgctatgaaaaggaaaaggaaacaggaaaaaactggtatcctcatgcactgcttcttggagggtgcattggtaaagcctttattagaaggcaactttgcaagatcattaaaaaataataataatgcacctcccct

SEQ ID NO: 154072 - DNA, 609 bp, Homo sapiens
tggctgctgactcggcaggctcaataaactattgtattgtaattggccaagccttattactggaccagaaaccaactgaccattgagttcaaagaatgtctgctaagcatttaattttgcggcttccaccaaacactacaggtaaatagctacagtaagcaatagaaatagtagttctttagagccttccttattcagcaaattccagaggcatggatagtcatttccagatgtggcctgcaggagcagcccaggatatcatatataggaatctggatctggcgacgactcgatgcagaggagrcagatgcctcagaggtttccctttggatgggtagaatgattagattgatcccggtgcaggtgcatgagctcattaccaagtccaaccccttcccgtgctgtctctcattggcttctgctgcttttgtggcctgcagtaggagaggtagcaaagaactcctacccctcattttcactgcattcttctgttgacatttctgaagcaatgacacaattgagcagagttctaaaaaggccacctgggcgctagctcccaattaccctctcactgagttttagtggacatctgattcctacttaaacaat

SEQ ID NO: 154073 - DNA, 531 bp, Homo sapiens
ccactagaaattttggaacagcttgtgtcactggagctgaggggctgagtttccattatattgagagcttgaaggyataatcatggggagctgtgatgaaatattggaggaagcatgttaatttaaatattactgatgcctcagttgggctgagtttatagtctgagcaaggataattcactctaaagttctaatatcaggctgtatttgactttacatgcttttcaaggtcaccgttgacggtgagtcatcccagtgagccagcagagaaaaggcattccaaggagcacacatgcatgggcagtgtttacgggccagacctggaagcaacacacaccttcactcacatttcattgcacagagcctggtcagtcccatggtcagacctacctgtaagagaggctgagaagttagattagctgtgtgtccaggaagaaccagaaatggattttggtgctggtgaccaaacctgtgtttgcactcttctttcccttctgaaagaagacacccaaccattccatctaatcagat

SEQ ID NO: 154074 - DNA, 540 bp, Homo sapiens
tgtttagtacctggtactaaagaggacctaattcaaatgaatcgtgtagttgacaagcaggaactgaaataagttccctgtaaattatttacgtaacttggatgggaggwcagctggtcccttgggcttgggctcctgtacccacatgagcaatctctgtttttgccttgcaacagtccacagctagggttaagttatctggaaagaatctccccacacatcagtaaagtggacttggctcacaataagctggtgaggtctgaggagggggtgaggggacgtatattgcacatacttcaacacacacatacatgcacctgcacatccctgcaaaccactttcacaactttcaggatttcttctctccaaagtcccacttggctatgttttaagggttccccttgatgccctttgctccatagcagcctccagtgttgtttttgctctgcctctggggaacttcaaattccttactctttttagtaagcggagctgtttagctctgtccctgctctgaccctcaatattactccatcatac

SEQ ID NO: 154075 - DNA, 567 bp, Homo sapiens
acccctcacttcaacccctcattctagattccctgacggcaggatccccttacgtagggaatatttattggcctcatagtcacatgtgacatcrtgctctgtgttgggaattttgtatggaataagatgttggaccactcctcaaaatcctcatattgcctatgaaatctggtttttttgagacaaagtctcactctgttgcccaggctggagtgcagtggcgtgatcttggctcactgcgacctccgtggtatggtttggctgtgccccacccagacctctacttgaattgtatctcccagaattcccacgtgctgtgggagggacctaatgggaggtaactgagtcacgggggcccgtctttcccgtgctattctcgtgatagtgaataagtctcatgagatctgatgggtttgtcaggggtttccacttttgcttcctcctcattctctcttgccaccaccatgtaagaagtaccttctgccctctatcatgattgtgagaccttcctcagccatgtggaactgcaagtccaattaaacctctttcttttgtaaattgcccagt

SEQ ID NO: 154076 - DNA, 567 bp, Homo sapiens
acccctcacttcaacccctcattctagattccctgacggcaggatccccttacgtagggaatatttattggcctcatagtcacatgtgacatcatgctctgtgttgggaattttgtatggaataagatgttggaccactcctcaaaatcctcatattgcctatgaaatctggtttttttgagacaaagtctcactctgttgcccaggctggagtgcagtggcgtgatcttggctcactgcgacctccgtggtatggtttggctgtgccccacccagacctctacttgaattgtatctcccagaattcccacgtgctgtgggagggacctaatgggaggtaaytgagtcacgggggcccgtctttcccgtgctattctcgtgatagtgaataagtctcatgagatctgatgggtttgtcaggggtttccacttttgcttcctcctcattctctcttgccaccaccatgtaagaagtaccttctgccctctatcatgattgtgagaccttcctcagccatgtggaactgcaagtccaattaaacctctttcttttgtaaattgcccagt

SEQ ID NO: 154077 - DNA, 446 bp, Homo sapiens
aaacagcaagggggatatgtgcccccatgatccagtcatctcccaccaggccccttgtatttattagtccattctcacgctgctatacctaagacaggataatttataaaggaaagaagtttaattgactcacagctttgcagggctggagaggcctcaggaaacagaatcgtggtggaaggggaggcatctaatcacatcccaccaggctcctcctccaatattgggattacactttgatgttagatttaagtggggacacaaatccaaaacccagatccaaaccagatcacctagtatgtccagactggaatcattttcctctaaaacttgcyctccttttttaatttcctgcctaggttaaagttaccatcagctaccaaacttgagatttatcctaaaatccttcatctttctcatcccttatagcttaatcaaatgtccag

SEQ ID NO: 154078 - DNA, 534 bp, Homo sapiens
ggtgttctttttaaagtctttacaaatctttgagaaaaccagttcactgtacatttctttaaccaccagtgaggctgaaacaaatttaatgatttattattatccattgtgtttcccttctggtgacttgtctgttactatttttgcatacttttcctttggagttagctttttttcttatttgtttgaagagtttttttttwaataaggctaataatccatcatatttgaacaagtatttttcctagtttgttatttattctatctttatgaagtttggtgatgttatgctcatatttatggtgaaatttatttacagaccttgatatttttatattgccttaatgactagaaaatctttcctcagcttaaattttatttctcctgtgcagtttttttttactctagactcctacattcagaaaaaattttggtgccttgtgtgaggtggtgatataatatgatacatttttccacatatcaaatgttctcaacataacttattggataatctatccctcccattgatttctg

SEQ ID NO: 154079 - DNA, 403 bp, Homo sapiens
aatattattgctattggagaacaccaagaaccctggagaataactgaatgccgttgtgagaaaggaaatatatattaagaccctggaatgttccattgggcctaaaagtaagctaaaaaagatgcatagtacatgttcaaaacacacaggtgccaaaaaagaaggggctcccattggccaaagatgagatatatgaatattaaaaagaataatgaatgcaactggttgaaacatacttgctgtatagaaagccargagttcaaaatgatacttaagaaaaagctcattgaacaccactggaaggaacaaaagtaaaagcaacttgtctcaaaagccaggaactaaaagtaaagaattagacatttattccatcttttcatatgacctatatttcagagttatc

SEQ ID NO: 154080 - DNA, 537 bp, Homo sapiens
gggaggattggtatctactgtcgaagcagttttaaccagtatcccttggattaccaacaagattacattttttaatgttttaattcatatttcatatttattatgcttattttttataaatagcttattcattccctttgtcaatttttatattggagtgcttagcttttttttgtttaagataaatctgaagagtttttgttttttatttttaaatgaaagatatttacccacttgcttgttaaaacatatcgaatttttccttggggatataattattctgttttacatattgttaattacatgccccaacaccatttatggackaatccatgctttttcaaactattttaatttctacaatatcattaaaataagagactttctactttgttttatttttcagaaatgtcatgcttagttttctaagtaagttttaaatattttctaagcagtcaaatttgattggggcagtatttataagttaatttgggaaaattatctctattctattttggctctttatatccaaatgct

SEQ ID NO: 154081 - DNA, 560 bp, Homo sapiens
ggattcctcttaaacattttgcccattttgaggctttataagctgagatttttgtctttcttaaattatggcacattcttgattattatttctttaaatatttctttcttccttgtttttttttctcttttctggaacccctattatgtggagattgatactctgcttctaatctccaaaccttgtaacttttgttctatatttcccatatccttattccttcccagtactttctgggagatttactcaattgaacttccaatttactaattccttctttgactctatccattaagcaatgtatctaatctactgaggtcttaattcaatacttatcgtcttgatacccagtattttttttgttttttttgagatggagtttcactcttgttgcccaggctggaatgcagtagtgccatcactgctcactgcaacctctgtctcccaggttcaagtgactgtcctgcctcagcctcctaagtagctgggattacaggygcctgccaccatgcccggctaatttttgtatttttcttttttcaatagagatggggtttcag

SEQ ID NO: 154082 - DNA, 592 bp, Homo sapiens
gctgcaaacatagatatgcaagctggaaacttgcgtggatgaatgccagcagctgtaccaataggaaaaggccacctgagggctgggcatatccaacatggaagctccatcatccsttttctttgtcaccacaggtacagtaaagaggcaggcaacatggtgccagtcaggcagagaacccatctgcataataaaagattagagtgggccaggcaccgtggctcacaactgtaatccccgcactttgggaggtcgaggaggcagatcacgaggtcaggagttcgagaccagcctggccatagtgaaatcccatctctactaaaaatacaaaaaaattagacgggtgtggtggcacgcgcctgtagtcccagctacttgggaggctgaggcagggaatcacttgaacctgggaggcgggggttgcagtgagcagagattacgccactgcactccagcctggtgacagagtgagagttgtctcaaaaaaaaaaaattagggtggggcagccagcttcttcgtgcactatgcaaacagcacacctagtcctaaccagttctttgagcactattcaaatggcacacctggtcccac

SEQ ID NO: 154083 - DNA, 544 bp, Homo sapiens
acttttctctttctttcacctgttaaacccccattctcaaccttatyccttatgtgtccatgtccttgatttccttgacacgggacaataaaccttgagtattactccagacgaacaacaccacttcaacaggacacctaggtacctggtaaaaccatatttgtgagtgtgtccatcaggatgtttctagaaaatatcaggatttgcattggtgaactgagtaaagccgatggttctccccagtaagggtgtgcgtcattcaacctattgagggtctgcatagaacaagaaggtggagaaagggctagctcattctctgtgcttgagctgtgacatccatgttctcctgcccttggacatccatgttcctgattctcaggcttttgaactcagacctagatttacactattactctctgactcccaggcctttggacttgggcagaattataccactgccttctcttgttctccagcttgcaggcagaagattgtaggaattcttggctttcataatcatgtgatccaattcctataacaaatc

SEQ ID NO: 154084 - DNA, 544 bp, Homo sapiens
acttttctctttctttcacctgttaaacccccattctcaaccttattccttatgtgtccatgtccttgatttccttgacacgggacaataaaccttgagtattactccagacgaacaacaccacttcaacaggacacctaggtacctggtaaaaccatatttgtgagtgtgtccatcaggatgtttctagaaaatatcaggatttgcattggtgaactgagtaaagccgatggttctccccagtaagggtgtgcgtcattcaaccyattgagggtctgcatagaacaagaaggtggagaaagggctagctcattctctgtgcttgagctgtgacatccatgttctcctgcccttggacatccatgttcctgattctcaggcttttgaactcagacctagatttacactattactctctgactcccaggcctttggacttgggcagaattataccactgccttctcttgttctccagcttgcaggcagaagattgtaggaattcttggctttcataatcatgtgatccaattcctataacaaatc

SEQ ID NO: 154085 - DNA, 544 bp, Homo sapiens
acttttctctttctttcacctgttaaacccccattctcaaccttattccttatgtgtccatgtccttgatttccttgacacgggacaataaaccttgagtattactccagacgaacaacaccacttcaacaggacacctaggtacctggtaaaaccatatttgtgagtgtgtccatcaggatgtttctagaaaatatcaggatttgcattggtgaactgagtaaagccgatggttctccccagtaagggtgtgcgtcattcaacctattgagggtctgcatagaacaagaaggtggagaaagggctagctcattctctgtgcttgagctgtgacatccatgttctcctgcccttggacatccatgttcctgattctcaggcttttgaactcagacctagatttacactatyactctctgactcccaggcctttggacttgggcagaattataccactgccttctcttgttctccagcttgcaggcagaagattgtaggaattcttggctttcataatcatgtgatccaattcctataacaaatc

SEQ ID NO: 154086 - DNA, 532 bp, Homo sapiens
ccttttacccggcccacccgagttaaatgtacaactgtcttcatgtaatgaatcatgaggattggatgttactaattctacacctgctatttgccaatgacagctagaaaaacaaccttgccttctaaaatgttatgttaaatttttaaaatacagaatatcagatgtatctcaatgctttaggatcaaagtagtccattgctggaaaaaaaygattttttaaatgacacattcctttgaaataaaataagcgatatctaccatttccatctctgctgatcatgtgtagtgaatcctgtcctctagagaagtagggattccatgaaggaatataaatcattctgctacaaagacacatgcacacatatgtttattacagcactatttacaatagcaaagacatggaaccaacccaaatgcccatcaatgataggctggataaagaaaatgtggtacgtagataccatggaatactatgcagccataaaaaagaatgagatcttgtcctttgcagggacgtggatgaagctgg

SEQ ID NO: 154087 - DNA, 518 bp, Homo sapiens
atcagtagcattttaatatgccaacagcaaatgatctgaaaacaaaatcaagaaagcaatcctgtttacaatagctatagaaaaaaagtacttaggagtagacttaaccaaagaagtgaaagatctttacaaggaaaactataaaacactgatgaaagaaattgaagagggcacacaaaaaatggaaagatatcccatgtccacagattggaagaatcaatattgttaaaatatcaatactactcaaagcaatctacagaatcaatgcaatccctatcaaaataccagtgacattcatcatggaaataggacaaacaatcctgaaattcatatggaaccacaaaagrtcctgaataactgaagaaatcctgagcagaaagaaaaaagcaggaggctgttcttgtttgctgttggcatataaaaatactaccaatttttgtattcaaaatgctactgatctttcattttcatcatattacctgacctcaagttatactacaagctgggtgtggtggctt

SEQ ID NO: 154088 - DNA, 577 bp, Homo sapiens
aaagaaataaaattcaggctgggttcagtgggtcacactggtaatcccaacactttgaggggccgaagcaggaggatcccaacttgtgcccgggagtttgagaccagcctgggcaaaataatgagactctgtctctacaaaaaatgtttaaaaatagcgtgscatggtggcgaacacctgtagttccaagtacctgggaggctgaggtaggaggatcacctaaacctagaggtcaaaggctgcagtaagccatgatcatgccacagcactccagtctgggcaacctagtgaaaccttgtctcaaaaataaataaataaataaataaatcagtaagttggctggaaccaaagatagaattaatcatgaatattcctgttatttattaagtaaaaacagttttaaaatatataagaaaatataatatttatactgactaccaaataaaatcataagaaatataacacatgtgcaaaaattacttaattttaaaaatatgtgaaagatcaaatgtaaacaaattgagaggcatgtccttttcttgtatagaaacaattagctccataaataaatgaaatt

SEQ ID NO: 154089 - DNA, 577 bp, Homo sapiens
aaagaaataaaattcaggctgggttcagtgggtcacactggtaatcccaacactttgaggggccgaagcaggaggatcccaacttgtgcccgggagtttgagaccagcctgggcaaaataatgagactctgtctctacaaaaaatgtttaaaaatagcgtgccatggtggcgaacacctgtagttccaagtacctgggaggctgaggtaggaggatcacctaaacctagaggtcaaaggctgcagtaagccatgatcatgccacagcactccagtctgggcaacctagtgaaaccttgtctcaaaaataaataaataaataaataaatcagtaagttggctggaaccaaagatagaattaatcatgaatattcctgttatttattaagtaaaaasagttttaaaatatataagaaaatataatatttatactgactaccaaataaaatcataagaaatataacacatgtgcaaaaattacttaattttaaaaatatgtgaaagatcaaatgtaaacaaattgagaggcatgtccttttcttgtatagaaacaattagctccataaataaatgaaatt

SEQ ID NO: 154090 - DNA, 456 bp, Homo sapiens
tgcccaaatacaattgaaaatccctcaccatataaagaamcagaaacaactcaacttgaatgagaaaaaacaatcaacagatgaccataatgaaatgacacaaatggtggaattagctgacacgtattttaaagaagccatcatgaaaatgcttcaataagcaattacaaacatgcttgaaacaaataaaaagcagaaagtctcagccaaaaacatagaaagcctcatcaaagaaatagaagctatcaagaggagccaaatggaaatcttttaactgaaaaagacaataactgaaataaaaatctcaatgaatgggctcaatagcagaatggaagaatagaggaaatagtgaatgttaagatagaacagtaggaattaaacagtatgaacaacagagaaaaaagttaaaaattgaataaaactagagtgacctgtgagtctatatcaaaaaatatg

SEQ ID NO: 154091 - DNA, 466 bp, Homo sapiens
atgtagccccaaatgcccaaatacaattgaaaatccctcaccatataaagaaccagaaacaactcaacttgaatgagaaaaaacaatcaacagatgaccataatgaaatgacacaaatggtggaattagctgacacgtattttaaagaagccatcatgaaaatgcttcaataagcaattacaaacatgcttgaaacaaataaaaagcagaaagtctcagccaaaaacatagaaagcctcakcaaagaaatagaagctatcaagaggagccaaatggaaatcttttaactgaaaaagacaataactgaaataaaaatctcaatgaatgggctcaatagcagaatggaagaatagaggaaatagtgaatgttaagatagaacagtaggaattaaacagtatgaacaacagagaaaaaagttaaaaattgaataaaactagagtgacctgtgagtctatatcaaaaaat

SEQ ID NO: 154092 - DNA, 456 bp, Homo sapiens
tgcccaaatacaattgaaaatccctcaccatataaagaaccagaaacaactcaacttgaatgagaaaaaacaatcaacagatgaccataatgaaatgacacaaatggtggaattagctgacacgtattttaaagaagccatcatgaaaatgcttcaataagcaattacaaacatgcttgaaacaaataaaaagcagaaagtctcagccaaaaacatagaaagcctcatcaaagaaatagaagctatcaagaggagccaaatggaaatcttttaactgaaaaagacaataactgaaataaaamtctcaatgaatgggctcaatagcagaatggaagaatagaggaaatagtgaatgttaagatagaacagtaggaattaaacagtatgaacaacagagaaaaaagttaaaaattgaataaaactagagtgacctgtgagtctatatcaaaaaatatg

SEQ ID NO: 154093 - DNA, 470 bp, Homo sapiens
gccccctccctcccttccactgccccccgcccgcctccctcctcccctcctcgtcctccgcgccccgcctcccaggcccgccgaagctgccgtctggtcctgtaacttgatgcccgtgacagttggcagctgcggccgcttcggcggagaaaagcgagaaaagcggcggccgcgccaagagcgacaggtgttggccgcgcctttgtctcgcacsctttgtccggcgggcaggcggcgggcgcttgtcccggccagacgcccgcgactcccccatcgcggcgggccgcccatctgctgggttcctcttggccgcgggcggggtgcgtgggcggtggggccgcgccctcgggcagcgtcctggggacccctgcccggctcctgccccggcgtcagtccagacgctgtgtggaggagccggaacgggagacgccttctcggaccccagccggccgactaccagcctgccccgc

SEQ ID NO: 154094 - DNA, 501 bp, Homo sapiens
atgaggtgtaagacaggggtgtctaatgctttggcttccctaggccacactggaagaattgtcttgggccacatataaaatacactaatgatagctgatgagctttaaaaaaaaaaaaaatcgcaaaaaaaaaaaaaatcaatgttttaagaaagtttatgcatttgtgttgggctacattcaaacctgtcctgggccgcatgcagcctgcaggccgcaggttggacaagcttggtgtaagacttgggtcaaggttcatcttttgcctatggatgtctaactgccttggcacgatctgttgaaaggctaactttcatctgctgaactgatttgcgtctcctgcggttgtatctgcacccgtaactcatatgggcctatttctgtttgggtctattctcctccattgatctacttgctgggattttgatagaaattgttaggcttgtatatccayctttgacatctttggtatgtagaatcttccaatctatgaacacggca

SEQ ID NO: 154095 - DNA, 596 bp, Homo sapiens
ccctgtccccttcatcctatttcttgattctttccagtatttcttaacaaaagtatgtaaatctttgtgcattatttttttctactttcttacattgaaggtagctatgtagcagtgaatttttctgagaagattaagacaagttttatttttattttacaaggaaggcagctgaacagatgggamgtttacatatagcatttaaatttaaatgtcagtactgtgtgcctagaacttgatcaagtgcaggcctctgataaccaaaagtaactgttctagcattgtacctttggttatctctgtagcactcattgtattaatatgttggatttaggcatccaccagtctttggatggtcaggagatggagcttccacctcccaaccttaactttgcaaacatcacttgtggatagtctgtttattgagaccagctgtgtcttgcttttactgacatgcaagaggagctgaagaccaagcagcttccagctcgctttagcagccagattagccttaaacacacaagtagtaggatgtctcagtctcacccagtctctctctctctctctggagaaagaacagaaaatatcaacaaaac

SEQ ID NO: 154096 - DNA, 621 bp, Homo sapiens
tggctgtctcactagtaggtatatgtccaaaggaaaggaaatcaagatgttgaaggaggtacctgtactcccatgtctattgcaacactattcacttatgaaatcaacctaagtgtctatcaatcaacaaatgaatggattttacaaatgtggtatatatacacaataaaatactatttggccataagaaagaatgaaatcctgtcatttacaacaacatggatgaacccaaagaatattatattaaatgaagcaaggcaagcacagaatgacaaatagtgyttgatctcactcataggtggaatctaaagttgatctaacagaagtagaaagcaggagattggttaccagaagctggaaagtataaggaggaagggtgtggggaggggttggttgatgagtacaaaggtacagttagataggagaaagaagttctgttgttctgtgcacaataggatgactataattataataatgtgtatttcaaaatagctacaatagaggattttgaatgtcctcataaagaaatgacaaatgtttgaggtgataggtatactatttatcctaatttgataattacacaatgtatacatatattaaaacaatacactttaccccatc

SEQ ID NO: 154097 - DNA, 572 bp, Homo sapiens
ttcatcacacaacagaaattaaatatttgaaattgaaactagatttcaaaaacatcaaaaggaaaaatagtactttcaattctttcttacattaaacaatttgtataccaaagctataaaaagaagtcaagtatatattgatctaaacatgcgcatagatggatragaaatttagatttaccttatttatatataaaatatatttaagtattatgccattatgattatttgttcacatcttatctcgtttgagctaacacttcctgttttaaagaaagacgctttctaatatataatttttgggtgattatgcagacttgctaaatataagtagattgggttctcattgtctagaaatttataaaaaagctaaattaatcaaataaagttaggagacaattcacatagtcattcctaaaattgttgtttttattctcctcttctatttatttttcttttagatatcgtaatgactacctcgggttgtaagtataggaggaggagaggagttatgtatatacaaagtgtatttggtttaagtactccatgtctaggagtgatcaaactgtcct

SEQ ID NO: 154098 - DNA, 618 bp, Homo sapiens
atttccttcaatataatataaaaggaagccttgatgattgcttcctctttttactcacaatcctctgtgcttcttagtctttcttctcttagataacagaattgcaaatgtgcccacacttcatcttgtgtgtgcatatatatatatgcgtgtgtgtgtgtgtatatatatatatattcytctttatttattacaggaaaatttcaaattctcttgagtttctattattgtcagcttgcccaagttaaaatttaatctttttttttaactcaaactgttcatacaataaagaacaaaaacaaaaaacaaagccaacattcccatcctattaggtattcctctttctataaagctcatcttttgtcctccttgaacctggatgccaaaggatgtttgtgtcaatgtgattggctagagacacatttggtacaactgctgtcctctggacttaacgagtctccacaggattaaggtctgctctgacctctactcttggtgttcaactttgatttccactgaagcttagctggtcttgcctgtttcttgtgagcagcttgttcccacctgccatagacaagcaccaaaatgtccagtcgcaatccctctattgtgattcca

SEQ ID NO: 154099 - DNA, 618 bp, Homo sapiens
atttccttcaatataatataaaaggaagccttgatgattgcttcctctttttactcacaatcctctgtgcttcttagtctttcttctcttagataacagaattgcaaatgtgcccacacttcatcttgtgtgtgcatatatatatatgcgtgtgtgtgtgtgtatatatatatatattcctctttatttattacaggaaaatttcaaattctctygagtttctattattgtcagcttgcccaagttaaaatttaatctttttttttaactcaaactgttcatacaataaagaacaaaaacaaaaaacaaagccaacattcccatcctattaggtattcctctttctataaagctcatcttttgtcctccttgaacctggatgccaaaggatgtttgtgtcaatgtgattggctagagacacatttggtacaactgctgtcctctggacttaacgagtctccacaggattaaggtctgctctgacctctactcttggtgttcaactttgatttccactgaagcttagctggtcttgcctgtttcttgtgagcagcttgttcccacctgccatagacaagcaccaaaatgtccagtcgcaatccctctattgtgattcca

SEQ ID NO: 154100 - DNA, 648 bp, Homo sapiens
atatccatctcctctgccacttatttcatttttgtcatgagaacattaaaacctctttttttaagcaattttgaagtatagaatacattattattaactctggtcaccatgcagtcaaaaagattaataaaacttattcctatagtccaagactttgtactatccgataaacatctctttctccatcaatccctttctcacagccagttgcattcatgttgtcaaatgacagaatctctttttaaggctgtatagaggccaggcacagtggcttacacctataatcccagcactttgggaggccaaggcgggtggatctgacctgaaggtcaggagtcggagaccagcctggccaaaatggaaaaaccctgtctctactaaaaaatacaaaaattagccgggcgtggtggctaactgagcctgcagtctcagttacttgggaggctgaggcacgagaatcatttgaacckgggagggggaggttgcagtgagccaagatcatgccactgtactccagcctgggagacagagcgagactctgtctaaaaaaaaaaaaaaaagtttgcatatggtatttcatattttggttattatgaataatgttaccatgaacatgggagtgcagatatctctttgacatattaattt

SEQ ID NO: 154101 - DNA, 648 bp, Homo sapiens
atatccatctcctctgccacttatttcatttttgtcatgagaacattaaaacctctttttttaagcaattttgaagtatagaatacattattattaactctggtcaccatgcagtcaaaaagattaataaaacttattcctatagtccaagactttgtactatccgataaacatctctttctccatcaatccctttctcacagccagttgcattcatgttgtcaaatgacagaatctctttttaaggctgtatagaggccaggcacagtggcttacacctataatcccagcactttgggaggccaaggcgggtggatctgacctgaaggtcaggagtcggagaccagcctggccaaaatggaaaaaccctgtctctactaaaaaatacaaaaattagccgggcgtggtggctaactgagcctgcagtctcagttacttgggaggctgaggcacgagaatcatttgaaccggggagggggaggttgcagtgagccaagatcatgccactgtactccagcctgggagacagagcgagactctgtctaaaaaaaaaaaaaaaagtttscatatggtatttcatattttggttattatgaataatgttaccatgaacatgggagtgcagatatctctttgacatattaattt

SEQ ID NO: 154102 - DNA, 648 bp, Homo sapiens
atatccatctcctctgccacttatttcatttttgtcatgagaacattaaaacctctttttttaagcaattttgaagtatagaatacattattattaactctggtcaccatgcagtcaaaaagattaataaaacttattcctatagtccaagactttgtactatccgataaacatctctttctccatcaatccctttctcacagccagttgcattcatgttgtcaaatgacagaatctctttttaaggctgtatagaggccaggcacagtggcttacacctataatcccagcactttgggaggccaaggcgggtggatctgacctgaaggtcaggagtcggagaccagcctggccaaaatggaaaaaccctgtctctactaaaaaatacaaaaattagccgggcgtggtggctaactgagcctgcagtctcagttacttgggaggctgaggcacgagaatcatttgaaccggggagggggaggttgcagtgagccaagatcatgccactgtactccagcctgggagacagagcgagactctgtctaaaaaaaaaaaaaaaagtttgyatatggtatttcatattttggttattatgaataatgttaccatgaacatgggagtgcagatatctctttgacatattaattt

SEQ ID NO: 154103 - DNA, 607 bp, Homo sapiens
gtactaataatgattgctatggaatatatttattatatgaataaatttcaaatgctaaatatgcagggtaaatgctttaaaaactttactagtattatgtgtgataaaagaatatttagagactacagagtcactcttagatactttctttatactctagctctgggttcttttttcttctatcaactttcatctgcctctataattagttctaatcattactatgggttttcttgtgttttccagtctgcagccaacctaatttctccaaatgcttcgtcttcctatttttttgtcattgatattgataattttaacaggtaaaggctcaactcgataatttcatagyaagtctccttaagcacaaggaaagaaaagagtagaatgaatcctttacatgtccgtggtaggccagcaatctaccaaaacatggtacatgttccactaaaacctaaatcggggcattgaggtggctgatgatgataatatccttgacccagctgctaattcagagaaatttgttctccataaagttgccatggtgatggaatgttccagtctacacaagagttttcttttttcccttatgctatggacatcaacttac

SEQ ID NO: 154104 - DNA, 562 bp, Homo sapiens
gtgaatcaaaaccacagtgacatattatctcacataagtcagaatggctattattaaaaatacaaaagcaacaaatgttgatgagtctacagagaagaaggaatgcttatacgctcttcatggaatgtaaatttgtttagccactgtggaaagcagtttggagatttctcaaagaagtaaaaatagaactactattccacccagcagtcccaacaatgggtatgtatctaaagggaaataaattgttctaccaaaaagacacaygcccttgtaagtttattgaagcaccattcacaataggaaagatatgaaatcaacctaggtgtccaccattcatggatttgataaagaaaaatttggtacatatacaccatggaatactatgcagacataacataaaatgaaaacatattttttttcagcaacatagatgcagctaaaggccattatcctaagcagattaatgcaggaacaggaaaccaaacaccacatgttatcacttataagtggcagctaaacattgggtactcgtggacataccaatgtccacggcaacaataga

SEQ ID NO: 154105 - DNA, 562 bp, Homo sapiens
gtgaatcaaaaccacagtgacatattatctcacataagtcagaatggctattattaaaaatacaaaagcaacaaatgttgatgagtctacagagaagaaggaatgcttatacgctcttcatggaatgtaaatttgtttagccactgtggaaagcagtttggagatttctcaaagaagtaaaaatagaactactattccacccagcagtcccaacaatgggtatgtatctaaagggaaataaattgttctaccaaaaagacacacgcccttgtaagtttattgaagcaccattcacaatagsaaagatatgaaatcaacctaggtgtccaccattcatggatttgataaagaaaaatttggtacatatacaccatggaatactatgcagacataacataaaatgaaaacatattttttttcagcaacatagatgcagctaaaggccattatcctaagcagattaatgcaggaacaggaaaccaaacaccacatgttatcacttataagtggcagctaaacattgggtactcgtggacataccaatgtccacggcaacaataga

SEQ ID NO: 154106 - DNA, 562 bp, Homo sapiens
gtgaatcaaaaccacagtgacatattatctcacataagtcagaatggctattattaaaaatacaaaagcaacaaatgttgatgagtctacagagaagaaggaatgcttatacgctcttcatggaatgtaaatttgtttagccactgtggaaagcagtttggagatttctcaaagaagtaaaaatagaactactattccacccagcagtcccaacaatgggtatgtatctaaagggaaataaattgttctaccaaaaagacacacgcccttgtaagtttattgaagcaccattcacaataggaaagatatgaaatcaacctaggtgtccaccattcrtggatttgataaagaaaaatttggtacatatacaccatggaatactatgcagacataacataaaatgaaaacatattttttttcagcaacatagatgcagctaaaggccattatcctaagcagattaatgcaggaacaggaaaccaaacaccacatgttatcacttataagtggcagctaaacattgggtactcgtggacataccaatgtccacggcaacaataga

SEQ ID NO: 154107 - DNA, 618 bp, Homo sapiens
aaaaatttggtacatatacaccatggaatactatgcagacataacataaaatgaaaacatattttttttcagcaacatagatgcagctaaaggccattatcctaagcagattaatgcaggaacaggaaaccaaacaccacatgttatcacttataagtggcagctaaacattgggtactcgtggacataccaatgtccacggcaacaatagacactgcagacaattagaggtggaatgaggcagtgggaaataactgaaaaactacctattgagtactatgttcactgcttgagtgacaggattagttgtatcccaaacgtcagtatcatacaatatacacacgtaacaaacctgcacatgtatccccttgaatctaaagcagaagttgaaattattttaaaaattataaaaataaacaattgagaaaaaaataaaataaaataataaatacaatgatggtgaatccccaagctgtgtttctatcctgcaacatataaccaatttcatgtgcaagcatccaaaatgggccctttgcatttccttagtaggattggagarcatagagaactgatgtaaatcagcgtgaagctttggctactgttgatgccatgagcaat

SEQ ID NO: 154108 - DNA, 618 bp, Homo sapiens
aaaaatttggtacatatacaccatggaatactatgcagacataacataaaatgaaaacatattttttttcagcaacatagatgcagctaaaggccattatcctaagcagattaatgcaggaacaggaaaccaaacaccacatgttatcacttataagtggcagctaaacattgggtactcgtggacataccaatgtccacggcaacaatagacactgcagacaattagaggtggaatgaggcagtgggaaataactgaaaaactacctattgagtactatgttcactgcttgagtgacaggattagttgtatcccaaacgtcagtatcatacaatatacacacgtaacaaacctgcacatgtatccccttgaatctaaagcagaagttgaaattattttaaaaattataaaaataaacaattgagaaaaaaataaaataaaataataaatacaatgatggtgaatccccaagctgtgtttctatcctgcaacatataaccaatttcatgtgcaagcatccaaaatgggccctttgcatttccttagtaggattggagagcatagagaactgatgtaaakcagcgtgaagctttggctactgttgatgccatgagcaat

SEQ ID NO: 154109 - DNA, 327 bp, Homo sapiens
tgagtgtatgagagaaaaatgtagaccttatttttatgccaagtttacaaaagggatcctaagtagtagtattagtattgctgccaccttggctatatcctcctaattactgtgaaacaagacacaaacttctgtgaaatgtaaacctacatataaagccaaggttttatttagtctgaagaaatttttwaaaaattaacctctgattttcttatcgagacaaataaacagactgacacagacttccaattaatttgtggttaagcctaacatttacaagttgtagaaataatagtcaaataattagtgcttattaaaaacaaaact

SEQ ID NO: 154110 - DNA, 404 bp, Homo sapiens
tgtggatgcatatttgtattctccaagcctagcacaacgcttgtcacacaatggatgttgaaatcgctgaatgaaacaacgagcgggtgactctgatccttgggtgcccagggcaagggtggagctattcataaaagtaagaagcctgagaagttcaattgaggtgcatgatgcgtttggtttcagacatatggaatctaaaactcataggactcaaacacagaaagggaagttagagccagatctacatattttgatgttcccttcacagagaagataatttaaaccattggaaaggataaatacttgatgacattattgagggcagacttgggaactaagggaacacaaccaaagaaaagcattttaaaaacaaragagaagagaatgatacaaatttatct

SEQ ID NO: 154111 - DNA, 530 bp, Homo sapiens
atgcaagtccaacaagctccctgatgttgctgatgttgccagtccagggaccacactttgagtagcaagggcatagagaacataccattctcggcttcaaatgcacacatgcacacacagacatgcaagcacaaacaacagcagcttaaaatgggacactaaaaatggcctgtttgtctgtttctgaattagactgctttgaagattgttaagttctccacatggcatcaagctgcacgctgctgtcattttgataacatttataaacacatgtttaaaaaaaaaagtctttatcctcatattcaattcaaaacacttttgacagggagcaatggaaacacctaagggaaggagcattcactttgggccactagggaactccccagtgactcaaggcctcaggtgaaagtgctgatttatggatgtggaattgaacctgaaggggctccagaataaggggagtggctgacaycacccggcagctccggaaagccccgcgtcaggctgacagcagccctgccttgtgccca

SEQ ID NO: 154112 - DNA, 601 bp, Homo sapiens
tccagagagagatttttgttcatgggccttttgttgttgttgttgttgttcttggaggtggttgaagagttcctctgatttctctcagataaagagctgccgacattgctttacagctgcactggtggcygccattgctaggtctagagaatgatttcgtgccttttaccacccagcttgatcctctctgctgtgtttctttgagacagattcaggcccttaacttacacagctttgtttggttttttcctgccagtcatcatgggctaaagtgattttctagaatatgaaataaatggcaaaaagagaggcaacagaaaaattaacaaccctctttagtggaatacattcaactcaagagagttgagggtacaggctcattggcagagagagtttgcatcatacaatgccagtctcattgtctaagagtgtgcagaacaatttctactctgtttttgagcaaaagtatacaagagcacttaaaacatggagataaatttataacagtaaattgcaatggatttttcatacacgcacacatacatacatcttcttagggaaaaagttcagaaacaacataataaattagtacagtgcagat

SEQ ID NO: 154113 - DNA, 601 bp, Homo sapiens
tccagagagagatttttgttcatgggccttttgttgttgttgttgttgttcttggaggtggttgaagagttcctctgatttctctcagataaagagctgccgacattgctttacagctgcactggtggccgccattgctaggtctagagaatgatttcrtgccttttaccacccagcttgatcctctctgctgtgtttctttgagacagattcaggcccttaacttacacagctttgtttggttttttcctgccagtcatcatgggctaaagtgattttctagaatatgaaataaatggcaaaaagagaggcaacagaaaaattaacaaccctctttagtggaatacattcaactcaagagagttgagggtacaggctcattggcagagagagtttgcatcatacaatgccagtctcattgtctaagagtgtgcagaacaatttctactctgtttttgagcaaaagtatacaagagcacttaaaacatggagataaatttataacagtaaattgcaatggatttttcatacacgcacacatacatacatcttcttagggaaaaagttcagaaacaacataataaattagtacagtgcagat

SEQ ID NO: 154114 - DNA, 565 bp, Homo sapiens
atgactatagtcagtggggtggggacaagggccccactggccatctctagccaggacaaagccattgcacacatagatgagcttggtctcctccagawcacacaggtgttctggcccgagggctggaacaggccgttggagctcattcaaatgtggagaaatatttagatccaatcaaaaccactccagattgttggctcttattttagacaaataggataagcaaacttggcctaaatgagaagtggtaataaataccctttttctgtctaattattcaaagccaaatgctctgagtctaaatgtctcatgggaaatgtctgaagggtttctggagtatttggttaataacaaaaattctttgtattgcacagacgtctcacatatgtgtgatgctcatgatatggcacagaggagaacaggacgactggccacaacctcatactagacagttgggaaccaaggcctgtgagtgctggtgatttgtctggaggctcccaaatatttctggagaaaagggcatgaaatctcagtctagaaatggactccccctcctgttcactga

SEQ ID NO: 154115 - DNA, 571 bp, Homo sapiens
tgctgtgtgaatttcatccctctctaaagtaaaggtggcaaacttgtggtcaacaggctaaatctggccggaagacaaaggcagcccacagatacrttgtatttagctggcacagtgttgtacaaaaacttttgaattagttgtcagcatttgaaaaatcagaagatttcatgtaagagtcagctttctggctgctcttgaacaatggaagaagaggtgatgcggggtttgcatttcttcatgattggatacagctgagtatcatttgctcccttagaagagcctcaagtcccgctcagcccactctactggctcctttgctccatattaccttcctggtcccttgtccccagaggccttggggaaaaaggaaaccttctgtttaataatgcttctccaaaacatcttgcgtgtgatcgaaatcctctaagattcactaagcacttcctttctggtacatgctctccttaaagcactgaacacagggcagactatatcttcttacatagaggggagggaaagagtttatcaggagaaaaaattattagaaagaattttatcctgaattttt

SEQ ID NO: 154116 - DNA, 506 bp, Homo sapiens
ccttcaataagtgaatagataaaaaactgtggtatatccataaaatagaatattattaatcaataaaaatgagatatcaagcaatgaaaagacattgggaaaccttaaatgtgttttgctaagtgaaagaagccagtctaacaagatgacaaactgtaagattctaactatatgacactctggaaaaggcaaaactatagagacgttaaaaagatcagtagttgccagtggggaatgggggagggataaataggtgaagcacaggtgacttttgttgttgcgggggtgggtgaactattctgtrtgatactgtaatgttggatatgacattatacagttgtcaaacccatagaattttataatataaagagtgaaccttaatgcatacaattaagaagtaatgtacgtggttaggggattctaggaaagaatctgtagtgtgacgagggattctgattgtgttgcaaatgtatgaaacaacctcactgaagggaggggtgataaag

SEQ ID NO: 154117 - DNA, 528 bp, Homo sapiens
  misc_feature (1)...(528): n = A,T,C or G
gaaaaaaaccaataacccggtttgaaaacagtcaggcaggagaaattccctcttatctgggggagggttggctttttgtacttactattcatgccttcaactgatgggataaggcccacctacrctagggagccaatcccctttactcgtgcaaaaacagcctcacagaaacgcgtttgaccaaatatctgggcaacttgtgacccaggaaagtagacacataaattaaccatcacnattgtnttttaacatacccccctgttatgagaaatcaatagggataataaagtgggagcacctcgtaaanacataaaatgcttagctgtgnaatgaatgtcnagactaatgaaaaactttcttcttaatcccaaccttttccactcatattgtttagggattttagatatttctatgcagtcacccgagcttgtcttgtattatcttcccacatgctgtattatcttgtattatcttctcacatgctgtatgggaacagcagcatgaggtctccatgaacacggggcttgg

SEQ ID NO: 154118 - DNA, 223 bp, Homo sapiens
agatcatagataattactggcataactgagttgttaggggcatttgggagacaaagttattaatatggcatctgccatgttctttcacaatgctctacggacmctttcctgggcaagatggaccatatagaccatgagtctgaccatttgattttgtattttgagtcttaatgctatacacagtgatttaaaatacatatctacagaaatatatatacacata

SEQ ID NO: 154119 - DNA, 541 bp, Homo sapiens
ctttgtttctgtcttgctgggaagcaggatgaccttcaaagacttgcctaatgagtcctgtctcccctgaggtttgtcaaccacgacaggcagcattttggggcactcagctgtggtgcaagtgggacacatgcattgagactctgtctgccctggaagccttcttgagccttgcagggccagcacacaatggctcctaggcttgtcttatcctttgctgcaagtactaacctacttcatgtaacttgttgtgtatgaaaatgttctgtctcactggactcaggtgagttggtaaccagtgcacagggaacctgctctgcagtgtccttttcgtgttaaaaatgagcccgactttcatttaggtggttaataagccttcttcaagattaaccagcccttcttaaatagttcactctgctrtgagtctagaagacttgcacctagccaggtaggcagacaacagtttattttcctactcctaaaatccatgaatcctttgatctcatctgtccccattgctttctgagtccagatattgtcc

SEQ ID NO: 154120 - DNA, 553 bp, Homo sapiens
atctgaccagctgactgccacagctgtttttggtgatactcatcctgacatctgggaggatggaattcaacttttgccctcagctgtgtgtattcacaaatgtggaccagttgagatggccgcggtggggactgaccacaggctggacctcatttcagggtttctctgatttatgtgaggccatttcccaccactctattcttagaggttcacatgaaaatatggcagatttggaagacttggttgttctagaatttcaattttcactttttaatgaagcggcccagctgtggaattagattagttattggaattttatggtgtgtgaggtttaagaaatcaagggaatagagcagaaaacacaaaataattagctaygaattcatcctcttaactgtatcctcagtgggtatgtaaaggaagatgggtaactacattcagcatcagaggaccaggatctagtccagttactttctgactcagcttctgctttgagtaatcactcactgtctctgggcatcagttgcatttcctatcaaaggacatgttgagc

SEQ ID NO: 154121 - DNA, 610 bp, Homo sapiens
ctcttcgcgctccagtagcatcagcccatgaagctcctgacaacaaagctgttctgtctttggggaacacaaacatattgcctgttagtcatggtacagcatgattgtctgtgtgcatgtgtgtcagcatgtgtgtgtgtggataaatgagaaatgaagaccaaacagcccaaacagaataagatctgcaaaggtggaccatgggctcttggatgttgctatgttgctctggtctgttctgactttggagatgggatactacttctgcaagtaatgttgtttttctaaatttaaaaattagtactattttgaacatcattatgaataatcaataatattaataatgtcatcatcattattaarggcacttcctctggatttgaattgccttggttcacatctggcatctccttctgattagctgtgtgattcagggaaaataacttggctgttttctgcctccatttcttcaacagcaaattggaagttacaggtggttttggggtggtttaataagttattgtgggtgtatagaacttgagacataataagcactccacgaatgtcaactctcatcatcatcatcactaccatcaccatcatcatcacc

SEQ ID NO: 154122 - DNA, 567 bp, Homo sapiens
tctaggtggccatgtgacacagtcctagccaatgagacctgatgtcatagtggagtcacagcctaggactggctaccttccaaaacttcactttatgtgagaaaaattaaacccctaagtttagcaaccagtggccaggtttctgtaaccctcagcaggaagccatcataactgataccctggctaggagggtgtcccagcagccaagcattctgatcaggcaggaagtcgtttggactgcagcactctcctcacacagtctttctattcaggcttcttggagctctgcttttttcactggaatttgtggctgtgctgctgttgccagaccttcctcagactctgtaatttctgttcccttcaatctggcataatggataataagttttcattagtggtgcccaaaatgtcaaygacttacacattctcataaaatctccaaatgaatggagaaagaacggtaaaccatgcctcgtctagactgtaatgaaggggaagctgctgaaaataagatgccgtccaattactttgtatttaccaagactcactttttaacctcagtgtgac

SEQ ID NO: 154123 - DNA, 606 bp, Homo sapiens
aaaacactattaagagagtgaaaaggcaagctttctcagatagactgggagaagatatttacaaaacatgtgtctaacaaggaatgcatactcaaaatatatcaagaactataaatcaataggaaaaagtgaggcaatccttttttctaaaaaatggcggaaagatttgattggtactttatataagaggcaatcagccactatgcataygaaaagatgctcaaccttgttagcaacaaaatgcaaattaaaaccataatgagatacctctacacatccaccagaatggctaaaattaaatagtcagtaccaagtgctgacaaggatgtaagataatgggagctctcacatactgctagtgggatggtaaattggcacaaccatttttgaaaaactgtttagaaatatcacctactataaacatatccttatcttacagcccaataattccactcttgatgtataaccagcaaattccccatgcagtgttattcataaagaccaaaactagaaaccaaatgtccttagcaatggaatggataaactctggtatgtacacacaatggaatattacatagcaaaacaaccaactactgttataagaaa

SEQ ID NO: 154124 - DNA, 522 bp, Homo sapiens
gtcagtccacagaaatggttcatgaagaaatctgtcttactgcctgacatatcctaagacctagaacaatacttgggcatagaatttcataaatgaatattgttgaattatggaaccraaagaaaaaaggctaagaggaaagaggaatggggatggaatttagaaccagaaaatgagaatggggatcccagcgcccccaactgccattaggtatgtgttcttatacatctaacttctcagggctttcatttccatgtagatgtatataaaattagaataagaatctcctctctaatatttttgaggatcaaatcagataatacttataaaagtaaatgaagcagtaaatgaagccgccgtcaactatgaatatcattattattattataataaaggcagcatcagtgaagatgggtctaggcttggtttttatgcagcacacatcagcttttgcagggcctggaaagttattatgatttttactattttcatttaagaataattcagctcaagtggctgcaa

SEQ ID NO: 154125 - DNA, 522 bp, Homo sapiens
gtcagtccacagaaatggttcatgaagaaatctgtcttactgcctgacatatcctaagacctagaacaatacttgggcatagaatttcataaatgaatattgttgaattatggaaccgaaagaaaaaaggctaagaggaaagaggaatggggatggaatttagaaccagaaaatgagaatggggatcccagcgcccccaactgccattaggtatgtgttcttatacatctaacttctcagggctttcatttccatrtagatgtatataaaattagaataagaatctcctctctaatatttttgaggatcaaatcagataatacttataaaagtaaatgaagcagtaaatgaagccgccgtcaactatgaatatcattattattattataataaaggcagcatcagtgaagatgggtctaggcttggtttttatgcagcacacatcagcttttgcagggcctggaaagttattatgatttttactattttcatttaagaataattcagctcaagtggctgcaa

SEQ ID NO: 154126 - DNA, 562 bp, Homo sapiens
ggaattcagacagccgtgtacaaaacatgacaagataacatgtgccttattctccgtggttcctgaagcaataaagcgaagcaagaggccaaaagacacaatcatctcaggcagctgcaagagcatagcgcacagtcagtgcaccttaactctgttacatccaaaacaccacttgattgaggctgtgtaagaagcagtaaggttgaacaaaacccaagaagcagcgagttgacaaaaacagaggatgaatccaacagtggagtccaacctctttttagtaactctgaagccaatagcttgtcttgatgttgcatatgaccataattcatgtctaaataagaataagccctctcaattttatatacactcttaaatgtgagattttatatttcattagtcagtgttctccagagaaacagtaccagtagggtgtacataaatatatatakagagagatttattttaaggaattggcttatgcaattgtagaggccagcaaatccaaaatctgtaggatggggctgcaggctggagactaggaaagggctgacatttcagttca

SEQ ID NO: 154127 - DNA, 545 bp, Homo sapiens
tctttgttctttttaggctttccactgattggatgaggccagtcctcactatgaagrgtagtccatgaatttaaacattaatctcacatttaaaaaaatccctcacagaagcccacacagaataatgttcaatcagatatctgggcactgttagatattacatcttactattataagttatttgtcttatctaacatttggctcttataaataactctataatgaacaacctcatacataaggtaccgcacacattttagattgtatctttagggcaagttactagaaatagaatcatttggtcaaaagctatgcacatatttagcaaacagtcatccataatggtcatatcactttacaagcttaccaaaaattgttgagctcttatttcctttggacacttaaaattatcagaatttcccggtgtctttaaaaatgtctgcactgcaggtgaaaacctgtacaatattatcactatatgtgtatttatttatcaccgaggttgagcattttctcaaatatttaaatcagaaatatttgtgaat

SEQ ID NO: 154128 - DNA, 422 bp, Homo sapiens
ttggggactcaagggaaagggtgggagcagggtgagggataaaagactacatattgggtgcagygtttactgctcaagtgataggtgcaccaaaatctcagaaatcaccactaaagaacttatccatgtaaccaaataccacctgttcccgaaaacctattggaaaaaaaaaaaaagaatgtgcaaagaaaaaaaactatttggaggaagcacaactggcatgataaaaagttaaaaataaactaaaaaacatcagtgtggtactggtgcaagaaaatacagttaaaaagaatggaatagaaatttcagaaacagacccatgcagtatggacacttgattcatgacacatgtggcactgaaagcatgggaaaagatagtcttgtcaataggtattgctgatcaattagacagccatatttaa

SEQ ID NO: 154129 - DNA, 639 bp, Homo sapiens
gtttggcattttgaaccctatgaatgggttatgacctaaaacacgaacacatttcttcataaatgtcaagtccagaagtggaggcatcactgggcctggaccccgagaacagcacggagagaggcagagggaacatggtgggacctgacaatacagcactactgtgtcttctcsagacctcatggttctcaggcataagagccacacgaggtacctgctctgagactcagcatcagttcacttggatgtacctgaaggaaacacgagggcttagcagggagtttaacaaactcctgagacactgaacatacaaatgaccttgggtagaccacataaaaaagtcaataactgacccccaacctgcagcaaccagcacaagaaaccaacctattatctagctatagatagccagcctgctgtctataagtcagattgctatctctagttactagtccaggaatccaagcaataaatcctgtaacagttggcccaaaatggccaggccttgattaataactgacagcttccctaatttttgtccccacttccaaattaaggccaaccagagaaagtcaaatatacacccctaacaaatcacataggctactctgcttctagttggccagcctgcagcttccc

SEQ ID NO: 154130 - DNA, 604 bp, Homo sapiens
gagggtgcacagcaggtcaaggtgagtgcaggatggatttcatagtccctggggcttgtggtgtttctgctttgtttttgcctgggttggttcttccacctttgctgggataggactttccagtagccagatggtgccatgaacttacagtctcatgagaacacagaatgtgacctgcagggtgaaagttagctctgcagggtagcacacacagagtacctgaacagcggcacaggtgattttaggtaaccagaaaaagagagggagtccagggaaggctttgtgaygagacgcttgggtggggctggaaagacttgaaagacaggagccagtggtctcatggcaacactgcttctcatgacctgggagaggactgaggctttgctaggtgtcctcagccaagctcagaactacggtggtcctctgacatctcctccacagaatagcccaaacctgctctgtccaataaggtaaacactagcctcgtgtgcaattgaaattgaaattcattaaaatgtaattaaatttaaaacccagtttcacaggtggctagatgcaacattttagacagcccagacggtgaatatttccatcagcataaaag

SEQ ID NO: 154131 - DNA, 377 bp, Homo sapiens
agaaatgatacacgtttgaggtgacagatatcctaattaccctgatttggtcattacacattatatgtatgtmtcaaaatataacatgaccccataaatatgtacaattattatgtatcaattaaaaattatttataagagcctaagttcagcaatgacctcactcagaagtatgggtttactgctggagcatatcttgcctattctctgtgaccggatctgcctcatccatacaaacactgatgtaatgtacaaattcaggggtgaggtatatagggaacatgcagtccttagggctgtgccatcatttcgttcctgctcactgtttcccattttcatcttctttcctctgagatgcgaacccagcctgacaacac

SEQ ID NO: 154132 - DNA, 582 bp, Homo sapiens
tatggtaaattactaaagactgaaataaaagagaaaaatacttaattaaaattcattaatttaatcatcctattaaattaaaaaatattgaacccattccctttatgtttactaagtgaatttgactgaagtaatattcattccctattcattaatactgtttattattttatatcagttaaaattttgtggtgctattttgtgtacttcaagtcacagattgcttccccagaatactatgtatattgcctggcatttattttataatttgataagaattttttttgttgtacatgagtatctgagaaagaatactatttcaactttttctctacgtttccttcaatactctctggagtaggatggaagaggaggacagagacaatgagagagaggaggcaaggttccttcttggtaacttttcttttaaactttctttcaatgcacaaccttttttttttttttttagaatattcaaagattctaatatsacctctatttacataaatctcaaatcaaagattgtgctaaccaatgtatcttacttctctcacaggtctaacccccttagcaacttcgtaa

SEQ ID NO: 154133 - DNA, 582 bp, Homo sapiens
tatggtaaattactaaagactgaaataaaagagaaaaatacttaattaaaattcattaatttaatcatcctattaaattaaaaaatattgaacccattccctttatgtttactaagtgaatttgactgaagtaatattcattccctattcattaatactgtttattattttatatcagttaaaattttgtggtgctattttgtgtacttcaagtcacagattgcttccccagaatactatgtatattgcctggcatttattttataatttgataagaattttttttgttgtacatgagtatctgagaaagaatactatttcaactttttctctacgtttccttcaatactctctggagtaggatggaagaggaggacagagacaatgagagagaggaggcaaggttccttcttggtaacttttcttttaaactttctttcaatgcacaaccttttttttttttttttagaatattcaaagattctaatatgacctctatttacataaatctcaaatcaaagattgtgctaaccaatgtrtcttacttctctcacaggtctaacccccttagcaacttcgtaa

SEQ ID NO: 154134 - DNA, 634 bp, Homo sapiens
tatatcaatgtattatatgccataagcattgaaatgtgggctttcttttttcactttgatatcattggagttaataatctgactctccctgaaaatcatcagagctagggtatgaaaagaggataaaacaaggaaaacatagatgagggagaggtaaataaagaaagataaaataaaccataatgtgtattataggtagtttcaaagcctgaacgaaaactaatcactgtaaaatgaattgtaagctttctttgccaagccagtttgaacattgtgatcagattaaaatcctggtagatttatattgaatattttaatataaaataattatgtgaatrttcagcattatggctaacacatagggaattcaattattttgtttttttactacaaatctgattacaaacgttatgaattgcataaatgtttagttttattttcatttaattagcattaattccaatatttgatttttttcatattttctatttttaccgatcattaagtccaacaaacttatttgtttggatgtattaggtaggaaaaagaacaggatagtgagtaggactctgacaataacctctacaagcttacaatatggtatgagatgggaaaaagggactaaggataaaac

SEQ ID NO: 154135 - DNA, 415 bp, Homo sapiens
acaaaacgatatttgtatatctgaacctgtctaaatgtaaaaaggtacagtaaaaatattatagtatactattatattaatgttaatagtatattatattattattcataatatttttattaataaatacaatatttyattaataaattaataaatataataataaaatatattactataatatattttaatgtataatatattataatatgtattataataaatataataataaaatatgatattaatattaatattatactataatattatatattatatcatactatagtgggaccactattatatgtagcatgtcattaacctaaacatcattatctggctcatgactgtaaatagttagctttaaactcctataccatccaactcttgttcattttagacctttacattt

SEQ ID NO: 154136 - DNA, 600 bp, Homo sapiens
acatttgtggtgtttcatagttttttgtgtcagcagtaataatctgtctctctggcagtcacactgtaaagccaatgtttgtgcttaaggaaatgctaatcctaaaccttctggatatttcattaaaataataatgtctggtatatattgtgttatagtctcctaaagaattaattttaaacaaaaagccattcagatataactgagttagcaatatggacacataaattttaaaccacctgttatatcaatctaatcatttcttgccgtcttggttttcttcatcttacctcaatttagcatctagttttttttgataataagtggatatatttccaaaatggtcactatatagcaaaatctttcatttgtaatttatgtatattatttaattaaatmtttatgactcttcactggagtagtcattatcatctctgttttatcagtgaggatattgaagcatagagaagtaaaatagcttaccaaagaataaagactgagatttcaatccatatttgtctgctaaagggccactactgaaaccttgataagaatttattaaccatttacttttactttcaactttagagaaaattcatg

SEQ ID NO: 154137 - DNA, 546 bp, Homo sapiens
ctcatatgtgaaggcaattatgaatgagcaattcaaggtctagtgtaataattgcagacagtttcttagtgaagagttacaaccattatctagtaatacctaaaaactgtaatgttttttaaagtttgtattttgaataatggcttattttaacttattagcctactaatgacgcactctgtttagcttcaacaaccagccagtaaatttccattcctaaggtggttccaagatgttatgatgaaacaggctgtaatttgttaaaaaatagttagttcttatcatgtacatgggctgttataataataataattgtttccttaatgtgcttttatcattgcttcatagatttgattatcaatctgatgaatattatctattttctacaaggaaggagtggaaagatctgtaagatccaaaatatattataaaataactagagcagtgcagtgagagaaagaacaaattaattagataagcataaatcaaatatttttaagctwatttggaatcaatttatattattaatcaggtggtttcttattt

SEQ ID NO: 154138 - DNA, 554 bp, Homo sapiens
aagttataattttatctgctttagagtaaactgagaatttcaaagttcttgtaaaagtgcttcaaagaaacaattaacactataaattacattatgtgatttttttatatatacttggtgataaatatttgtatgtttatcagaatccattctgaagtctactttcactgtaacatgttccacgataacaggttagaaagaaattttaaacagccaccatctgtctctatttactaaaagaacctgacaattgttcactgcaaacatttgcttagattaatacacagcaactcctctgattgtcaataccatattaaatatatacataataaatacatcaatacatattaacacttaaagyaataacagaacactaaaatgtatatttaaacagaacactaaaaatgtatattttaagagaagcaatataagttagtggtatttacagaaatactgagccttaaaattagaagcttcaaatacaataagcaaacaaatctaaatttcattttataaaaacaacacattgttcagatgattataattgtaagtag

SEQ ID NO: 154139 - DNA, 576 bp, Homo sapiens
tggctgctatgttgagaggtcaaatttcacacattcccttgttattctgaattgatttcaattctgaagttagactgttcttttacttacctttgttatggttcyaggaacagtttggaagagtagttcatgtgagtcagtaataatggagttaaaacaagagtgaaaaacatgaaaattataaataaagctaagactctgagggaattggtgagttgaactggcaagaagcagcccactctgaccttaggcctctggaatcctgacagaatgagaccttttgtcactgctgcttaagaagtggtaagataagtggtatttatttatttatttatttttaagatagaaattttctttttattaatgaccccaatcgtatttctttagatacaggagttttgaactcatatacataagagaaaacaaattaagattgtgttatcctgcaacttattaccagtaacatattgcaaagtgaaacagcttggaaaagagggtgggagaaaagggaagtgacggaaggaagataaagaaaaggaattaagttgatcaagtggaattctttttcttttttta

SEQ ID NO: 154140 - DNA, 576 bp, Homo sapiens
tggctgctatgttgagaggtcaaatttcacacattcccttgttattctgaattgatttcaattctgaagttagactgttcttttacttacctttgttatggttctaggaacagtttggaagagtagttcatgtgagtcagtaataatggagttaaaacaagagtgaaaaacatgaaaattataaataaagctaagactctgagggaattggtgagttgaactggcaagaagcagcccactctgaccttaggcctctggaatcctgrcagaatgagaccttttgtcactgctgcttaagaagtggtaagataagtggtatttatttatttatttatttttaagatagaaattttctttttattaatgaccccaatcgtatttctttagatacaggagttttgaactcatatacataagagaaaacaaattaagattgtgttatcctgcaacttattaccagtaacatattgcaaagtgaaacagcttggaaaagagggtgggagaaaagggaagtgacggaaggaagataaagaaaaggaattaagttgatcaagtggaattctttttcttttttta

SEQ ID NO: 154141 - DNA, 376 bp, Homo sapiens
aacctacaaactgctttctgatgactcttaaatttgtgtgtattgttttccttttcatttgtctctagttawttttttaatttcctttgtgattttttctaagagtgtactgctgaatttccacaaagttttccttctgttactgattttgaacttcatcctgttgctgaaacactttgtataatacaaatcttttaaaacttttgggagtcttaaattgtggcctaatatattgtgtatactggaaaatgttctgtgtacatttgataaatatattctgttttatttatacattattttcctgacctttcccaagtctttctttagctctttgaacactttaaagacggttgtcttaaagttgtctaacagatct

SEQ ID NO: 154142 - DNA, 575 bp, Homo sapiens
gaaaaaatctgagtaagaattaaatacgttcctagtgaaagtgctaataaaaggaatagaaaatgtttaaaaatggtgtgaaggtaaaatcaaaagtactttgtcaataattgatatttatgttgtattgaagagatgttttctaatatggagacaaaatttcttttcattttttatcagctgtactgagatatgattgacaaataaaggttgtgtacatttaggatgtacaacacgttttgttatactaacagactgtgatatactaatacactrtgaaatgattatgtcaatcaaagtaattaacatattcagcacctcacatagttattattctgtgtatgttgtgtgatgaaaacactacacacacttagcaaattgcaagtgtataacacattattattaactttagacacaatgctgcacattagatcttcagtactcatccatcttatgagtgaatgtttgtatcttttgaccaatatctctccttttctctgaaccctcctatcccttggtaaccatcattctactctctaactttgaggggttttgtttccttttttttattctaa

SEQ ID NO: 154143 - DNA, 575 bp, Homo sapiens
gaaaaaatctgagtaagaattaaatacgttcctagtgaaagtgctaataaaaggaatagaaaatgtttaaaaatggtgtgaaggtaaaatcaaaagtactttgtcaataattgatatttatgttgtattgaagagatgttttctaatatggagacaaaatttcttttcattttttatcagctgtactgagatatgattgacaaataaaggttgtgtacatttaggatgtacaacacgttttgttatactaacagactgtgatatactaatacactgtgaaatgattatgtcaatcaaagtaattaacatattcagcacctcacatagttattattctgtgtatgttgtgtgatgaaaacactacacacacttagcaaattgcaagtgtataayacattattattaactttagacacaatgctgcacattagatcttcagtactcatccatcttatgagtgaatgtttgtatcttttgaccaatatctctccttttctctgaaccctcctatcccttggtaaccatcattctactctctaactttgaggggttttgtttccttttttttattctaa

SEQ ID NO: 154144 - DNA, 510 bp, Homo sapiens
gtgaagtctatggtcatgaattttaagtgaaaccactgtggaacaaaatcaaactttgccttgggtttggttctgctctgtcagagacaattttattatgattttttaatgcagccatgtgaaagtgtaaggcaaaatagcccctgatgagaacctatactasaatgatgagctaatatacagattaagtgagcaaatttccatactaaatatttcatacgtaagtgaaaaaaatacaatttctgatggcaaacaatgattactaattttatggtcacaaaataccctcatagttaaaagttatattccgagcatactaaacatgagttttatacttaaatttctgctttggaaacctgaattataaactttaatttatttgatttaattatggaaatataagttacaactctattagatgaagagccttgagagaaatataatgttgttggcataattattgtggtacagttatgcaattgttcttctcagcaagttaaggaagagcaa

SEQ ID NO: 154145 - DNA, 510 bp, Homo sapiens
gtgaagtctatggtcatgaattttaagtgaaaccactgtggaacaaaatcaaactttgccttgggtttggttctgctctgtcagagacaattttattatgattttttaatgcagccatgtgaaagtgtaaggcaaaatagcccctgatgagaacctatactacratgatgagctaatatacagattaagtgagcaaatttccatactaaatatttcatacgtaagtgaaaaaaatacaatttctgatggcaaacaatgattactaattttatggtcacaaaataccctcatagttaaaagttatattccgagcatactaaacatgagttttatacttaaatttctgctttggaaacctgaattataaactttaatttatttgatttaattatggaaatataagttacaactctattagatgaagagccttgagagaaatataatgttgttggcataattattgtggtacagttatgcaattgttcttctcagcaagttaaggaagagcaa

SEQ ID NO: 154146 - DNA, 592 bp, Homo sapiens
aagaaaataatttatcaaaatctggtagtaataaaaatagctactagctgaaatttcaattaataggtataaatataatagatctatattacctgatgtagaatattatttggggttgggcacagtggctcacacctgtaattccagcactttgggaggccgaggtggacggatcacctgaggtcaggagttcaagaccagtctggccaacatggtgaaaccctgttctccagtgaaaatacaaaaattagctgggcgtggtggcaggcgcctgtaatcccagctacttgggaggctgaggcaggagaattgcttgaacccgggagggcagaagttgcagtgagccaagatcagattggccactgcactccagcctgagagacaagaacgagactctgtctccaaaaaaaaaaacagcattatttggtaaggcaaaggaygcatacatatgaatgaaatgtgtcactagggattaatttctaaatgaaattcaagtcaccgtaatttgcatgatatcataacatttatgaaaactttaaaacaataggaaaaacttctataagtatacatatgtagtgaaatgtaaaaatat

SEQ ID NO: 154147 - DNA, 502 bp, Homo sapiens
ttgttggtttactggaatgagggcaaggaacacctggcccacccagggcagaaaaccacttaaggcattcctaagccgcaaacaatagcatgagtgttctgtgccttaaggacatgctcctgctgcagacaactagccagagcccatccctttttttcccattttagttaatctataatctatagaaacagtgtttatcactggcttgctgtcaataaatatgtgggtaaaactctgttcgtggctctcacctctgaaggctgtcagccccctgatttcccactccacactctatatttctgtgtgtgtgtctttaattcctctagygccactgggttagggtctccacaacagagctggtcttggcagtttccatggctagatttgcctaataaccctgagctttatgtactggagtatgttagggcacagtcttaggacttctcctcttgtctattgatctcacccattctcaaggctttgaccatcatgtataaataat

SEQ ID NO: 154148 - DNA, 589 bp, Homo sapiens
tgatctcctcatctcaagattctttatttgattaaatctgcaaaaccattttcccaaataaggtaatgtttacaggtttcattaattagaacatgaacgtatctttcagtgtgttacaaaaaaacccactacaatttttttcatttatcttaattgcaagagctacttgatttatttattagtccgagttctccagagaaacagaaactttaggatatatgtgtgtgtgtatatatgtgtatatatatatatatacacacacgcataaaatatgtatttatatacatacacagatatatattggctaatgtgattgtggagctggcaaatcgaaactctgcagggcaggccagcagactggaggcccagggaagttgatattgcaacccaagttgaaaagcagtctggaggcagaatttcaacttccttggaggatttcagtctttttctttaaagggcttcagctgattgaatgaggtccactatattatggaagttaatctatttaytctaagcctaccgacttaaatgtaaatcatgtctgaaaaataccttcacagcaacatctaaaccagcgtttggccaaata

SEQ ID NO: 154149 - DNA, 480 bp, Homo sapiens
cccagaggtctatctatgggtccctggcaaaagggagtccaagggttcagttgcctgattggaatttgaatggcctctaggctagtagcaaacaagacttacaaggttaagtatgcatgcatcaaatatgtgtattatacaaaaagagataaaaggagagaatctaatgccaaakattacagaaatagacgtgaaatatactaatcattctgaaaacaacattgtaccccatggtatagaacagaacaaaggtaaagacagcaagcataggcaagactatgaagaggatattcatgaaatgttaattattaacacttatcttgtgtgatttttagcttgaggtccccgatctcctcacattggtactttgtgttctcttctgggttaacagaggtaactctgtcagctttccagttctttactcaggtataatgaatccaagaatctattccaatgatctattgtaatacaccgaggtga

SEQ ID NO: 154150 - DNA, 480 bp, Homo sapiens
cccagaggtctatctatgggtccctggcaaaagggagtccaagggttcagttgcctgattggaatttgaatggcctctaggctagtagcaaacaagacttacaaggttaagtatgcatgcatcaaatatgtgtattatacaaaaagagataaaaggagagaatctaatgccaaatattacagaaatagacgtgaaatatactaatcattctgaaaacaacattgtaccccatggtatagaacagaacaaaggtaaagacagcaagcataggcaagactatgaagaggatattcatgaaatgttaattattaacacttatcttgtgtgatttttagcttgaggtccccgatckcctcacattggtactttgtgttctcttctgggttaacagaggtaactctgtcagctttccagttctttactcaggtataatgaatccaagaatctattccaatgatctattgtaatacaccgaggtga

SEQ ID NO: 154151 - DNA, 480 bp, Homo sapiens
cccagaggtctatctatgggtccctggcaaaagggagtccaagggttcagttgcctgattggaatttgaatggcctctaggctagtagcaaacaagacttacaaggttaagtatgcatgcatcaaatatgtgtattatacaaaaagagataaaaggagagaatctaatgccaaatattacagaaatagacgtgaaatatactaatcattctgaaaacaacattgtaccccatggtatagaacagaacaaaggtaaagacagcaagcataggcaagactatgaagaggatattcatgaaatgttaattattaacacttatcttgtgtgatttttagcttgaggtccccgatctcctcrcattggtactttgtgttctcttctgggttaacagaggtaactctgtcagctttccagttctttactcaggtataatgaatccaagaatctattccaatgatctattgtaatacaccgaggtga

SEQ ID NO: 154152 - DNA, 551 bp, Homo sapiens
agccatcaatttatatattttgcttaacattaaatatcaattatgtttggagtcatttttcatataattattgttacgtgagatgatttagttctaattcctccctacaaaatcctatttagtccataatatccctgatgtattttattgttctcataaaaacataaatccaaataattttacccatcaacaatttttcaagtaagtgtgttcaaagcctatattgggactcttcaaatatatgtgttctcaattcaatggtaacatttaagatcatggactttcatacagaactgttagcttatgtatacattctaggttgatgaaagagactgggaacatagtggacaaacagggacttgaaataaaaagaaatggaatctcttatggggtgtatggcaaagatagaaaactaatggaacacttaaggtctctgcacctttatacagagtagaattgttgttgagcagctgctacytatttccattcatgtgagaccagctctggtgaatagaaatgtaaagttaaagtgatgtgggttgcagtgttcc

SEQ ID NO: 154153 - DNA, 448 bp, Homo sapiens
agcacttgtatgagtgcccaactctttaatttttggcttcttttccttaagtcactgaactaatctttaaacacataaatgcttaaaggagtacactctgtgagggaagctgaaggtgaatccttctgcaaagggaaataactatgtgttcattttgtgtgtaaacactctcmatttcccagatttaaagtgtggacttttgagcggtggattttcataaaaggggcacatcagcaccaaatataccactcttttcccatgcagaggctaaagcagcaagacacatctcctaaatgcactgtagacaaagacagtgctggggcccataggtcatgtaattctggttatgtttgataaacttatgatcagaataatattgagaactagaaagttgatgatgttctttgaaggttagagtcaataaataaagttggcttttgagggagta

SEQ ID NO: 154154 - DNA, 619 bp, Homo sapiens
acaaaagtgagcttggaagtggatgcttccccagttgagccttcagatgagaccctagctctggctgatgctttgattgcagccttgagagacaccctgaaatagaagacccagctaagctggactggattcctcacccacagaaagtgaataaataagtgctattattattattagaataataattttaagcttccaagtttgtgataatttgttcacaacaatagataactaayacaagagacataaagtaatttgcccagtcacatgttagtctggctataagctatggattcccttctagcgatcatctcatgtagaaatatctccaaaaagtttgccacatggtattggatttcccatttagaacactagaagggttggttaacatttcttaaacagttctttgaaagagatatggtattttttaagcctcaggaatctgaagggaaaagaacctaggaaatcttgtttggagtacgcagtaagctatcaatcttcacttttccctactgtttttattttattgttcaggggccaatggttctttgggtttagcatcagtctgttttcacttcatattgattctaaagggaagtaaggctggacaaaaaggagt

SEQ ID NO: 154155 - DNA, 488 bp, Homo sapiens
ggagctgcagtgggctcacccagtttgaatttcccagaggcttcgtttatactgtgatggggaaaaccacctactcaagcctcagtaatggtggacacccctccctccaccaagcttgagaatcccaggttgacttcagactgctgtgctggcagcgagaatttcaagccagtggatcttagcttgctggactcatgggcatgggatctgctgagctagaccacttggttccctcgcttcagctcccattccaggggagtgaacggttctgtctcgctggtgctccaggtgccactggggtatgcaaataaactcctgcacgtagctgggtgtctgaccaaatggccgcccagttttgtgcttgaaacccagggccctggtggtgtaggcaccagaaggaatctcctggtctgcaggttgcgaagacttcrggaaaagtgtagtatctgggctgggatgcaccatccctcatggcacagtccctcatg

SEQ ID NO: 154156 - DNA, 456 bp, Homo sapiens
gaattctcttctttctcatggagtacatgaagttatgaaacttcttttctctctctgcagcttgcccattttctttcataggccattccaaatccatatcctttacttcagggtacattttcttctctgctccttaratctttctattctttcctctacttcccattgccatcccttcaacatcaccactactaagaaaccatggaatctaagctattggcattgggttgcctgtctttacagtaaaatgggatccacgcacttcagccatggtttagacacctgtagaaaaccatgggggagaaaatgaaatggtgatgtgggttacatgggtagatccatttgtccaaattattaagatctttttatgtacattaaatttctctcaaaagcttaaaaatgattgagtagggggtagggaatgggtgtagataaatataaagcaagaataataat

SEQ ID NO: 154157 - DNA, 572 bp, Homo sapiens
attactcaggatgaaaatggagtctgcaatgtgatatctcagggaaccaccaggtatgtgaccaaacactttcccctaaaattatcactctgactgacagtgctattagagacactgttctcattcttgcctggtagtttatttccttttcactggtacgttcttaaattaccaaaatatttrtaatctatggttttcactaactctctagcgtttatttcatcacctcaacatgggttacttccttcccatcctgttttacctttctcagttttgctgccttttccttaacataatctcctacattatctggatttatctctatatcaaatgaatttattccattagaaaagaaaggccacatcctagaactctttgaaaatagtctgttcataaaccactcactaaacatttcagtgtaagacaaaatacttaatgatttagacaaatgaaggatagcttagtatgaattatggaatatttaaaaagaaatatcctataaaataaaaaactattacactcagtaaaggagagaggcttacaaatgactgggagtggaatgcttgcagact

SEQ ID NO: 154158 - DNA, 594 bp, Homo sapiens
aacatcacatgcttattttgaaagtactcatgagggttaccatgatactagaaaacatagtctcatatattataatccagttggataaataatgaaaagaacataaaacatataaaaaattaaaaagttgaagaacaaaacctttagataacagatcaagataaaatagttaatctsccactatttcaaaaagaattgcacaaaaattaattgtatttatgttttgaagaggaagagtttgtattaaggctaggaaatcttatacaatgcctagcacacagtagaacttactaaacattggctgaagaaatgaatggaataataggatggctcagaaagaagcctctttagaatgagaccaaaatgatgggatttagctccaattgtgaggacttttatatcctagatatggagcttgggctttatcttttggcaaagggaatgttgattgtcccaaattcaaggcttgcactccctgttagggtatcatggatagcttatccttcactttcccactcaaaagtgttatcggtcttcacctatctgccttctaaaactactgcagactgaagctatctcactttcctcagggat

SEQ ID NO: 154159 - DNA, 499 bp, Homo sapiens
agcctgggcaacatagcaagacctcatctctacaatataaacataaaaaataaattagccaggcatggtggcacacatctgtagtcatgactacatggctactcgggaggctgaggtggaagaatggcttgatcccaggagttggaggcttcagtgagctatgatcatgctgccactgcactccagcctaggcaacagaggtagaacctatctctgaaaagaaaagagtggatttgatgggaacacagtgagttctgttaggcatgctttgttggaggtgcctacaggacagtcaggaagcggctggatctatgagccaagagctcaggagaaaggctggggcaggagctctatattgagagttacctgcttcaaggcaagcaaggcagagcgtgacstgcctgagctaggatcctggacaatccaaagaaaccctgcgtatatagctgtcttcataagtaaatggcgagttcctgaagggtcaaatcattcatttttc

SEQ ID NO: 154160 - DNA, 580 bp, Homo sapiens
tgctagccatttcccccacagccccaaaargcttcccattgcaggtgtaaactagggtatttagccctttgttctaaatattcataactttccaagtaattgcagaggaaatacaaaatatttctagaataatattcaagctatctttaaaaatcggtgtaatctgcagcatgagaagatttcaagatgaaaaactcccattttaattgaggttttgtcaatttaattaattctttcaatatgttttgttattcttgatatttgtaccccaactctagttaatatattatttctctttagtttgcccttttgagatatatgtaaggcttttccacccaagccaattcttagctaaagaattgaatactttttaacttctatattacagttatgatttcaaggtttgtacttccttaatgtaaatctagggaaattgaaaaataaagcaccccacttccagtttctacatttataccacatctgttatcttacttatagatataatatccaactccttgaggttattatgtttataatgaactggtttatgttttcattccagatgtgtaaatagtagcat

SEQ ID NO: 154161 - DNA, 580 bp, Homo sapiens
tgctagccatttcccccacagccccaaaaagcttcccattgcaggtgtaaactagggtatttagccctttgttctaaatattcataactttccaagtaattgcagaggaaatacaaaatatttctagaataatattyaagctatctttaaaaatcggtgtaatctgcagcatgagaagatttcaagatgaaaaactcccattttaattgaggttttgtcaatttaattaattctttcaatatgttttgttattcttgatatttgtaccccaactctagttaatatattatttctctttagtttgcccttttgagatatatgtaaggcttttccacccaagccaattcttagctaaagaattgaatactttttaacttctatattacagttatgatttcaaggtttgtacttccttaatgtaaatctagggaaattgaaaaataaagcaccccacttccagtttctacatttataccacatctgttatcttacttatagatataatatccaactccttgaggttattatgtttataatgaactggtttatgttttcattccagatgtgtaaatagtagcat

SEQ ID NO: 154162 - DNA, 580 bp, Homo sapiens
tgctagccatttcccccacagccccaaaaagcttcccattgcaggtgtaaactagggtatttagccctttgttctaaatattcataactttccaagtaattgcagaggaaatacaaaatatttctagaataatattcaagctatctttaaaaatcggtgtaatctgcagcatragaagatttcaagatgaaaaactcccattttaattgaggttttgtcaatttaattaattctttcaatatgttttgttattcttgatatttgtaccccaactctagttaatatattatttctctttagtttgcccttttgagatatatgtaaggcttttccacccaagccaattcttagctaaagaattgaatactttttaacttctatattacagttatgatttcaaggtttgtacttccttaatgtaaatctagggaaattgaaaaataaagcaccccacttccagtttctacatttataccacatctgttatcttacttatagatataatatccaactccttgaggttattatgtttataatgaactggtttatgttttcattccagatgtgtaaatagtagcat

SEQ ID NO: 154163 - DNA, 580 bp, Homo sapiens
tgctagccatttcccccacagccccaaaaagcttcccattgcaggtgtaaactagggtatttagccctttgttctaaatattcataactttccaagtaattgcagaggaaatacaaaatatttctagaataatattcaagctatctttaaaaatcggtgtaatctgcagcatgagaagatttcaagatgaaaaactcccattttaattgaggttttgtcaatttaattaattctttcaatatgttttgttattcttgatatttgtaccccaactctagttaatatattatttctctttagtttgcccttttgagatatatgtaaggcttttccacccaagccaattcttagctaaagaattgaatactttttaacttctatattacagttrtgatttcaaggtttgtacttccttaatgtaaatctagggaaattgaaaaataaagcaccccacttccagtttctacatttataccacatctgttatcttacttatagatataatatccaactccttgaggttattatgtttataatgaactggtttatgttttcattccagatgtgtaaatagtagcat

SEQ ID NO: 154164 - DNA, 586 bp, Homo sapiens
gaaaaatagacctacaacaatgaaatctatttaatttttcaagaacaaaaagctcattaaaaaagactgagatgcactaaaatggaatctatttcttagataagtatataagatatgaggcatagcaaatcaatgtatgagaagcacagattaattaatggtgctgccacaaccggttaacaattggaggagcaggaggtgaagattartttagatctttttcacataataaaattgaaataaatacaaatagtaataaagacttttttttttttaaattctcatttagtataagagagagagagtgaagaaaatggccctgatcatattactggaggaaggaaggcttttctaagcttagactatattaaataatcacaggaaaagatataaaaatttgaaacttttacaccaaaaaagaaaaatccctattaaaaaaggagatgcctgactgggaaaaaaaattacttacaacatttatgacaaaggacatctaataattccaatctcaaaaaaagatacatcaaagtaccaagaaaaaaacatgaagctgcacaccccccaccaccacctggcaaaaataacc

SEQ ID NO: 154165 - DNA, 444 bp, Homo sapiens
tgtaaaaaaagcccagggaagtttttttcagggaggaaatggtcaagtgttaaatttgctaataagtaagaatttgaaaatatgcagttatgtttctgtcctataaaaggattgatccaagtggactgtgttagcctcttatcaagttctgtgagagaatactttcagaaacctttccctaaaaatcatttactgaaagtgtcccattgtgggttataactgttcagtctggtcctttctccatctccttttcattattcaactatcagtgagggtttagatataaggagctcttaatattttcctgtttactattgtatttaagatgattggatacatttaagtgcrtttaaactgaaatgcagttcacacagtgccataacttgcaaaggactgtaacagcagatgattgtattcttagattttttttagactacttagctg

SEQ ID NO: 154166 - DNA, 393 bp, Homo sapiens
ttttaaaaaataaaatttggacattttaaaagcatggttgtgattgcttgaaaaagccagctagtaggaaagtggggaaagggccccgacttcattatatgatgactaggccggcctagtggagaattttattctttcttaggtggtagtccccaggctgcccttcactctgttgactccatgggtaggggctgsgaggaagggagctattcatttgtccatctagtaatcagtttctctataaatctaaatgtctacaattccctttagatagaatagcaagatagaatagctagttttttagacaatcagtaagacaagagtgttaggaccttcttgaaggtctcaaagctatttctgatgttggaggaggatgttcacattacatgtttc

SEQ ID NO: 154167 - DNA, 393 bp, Homo sapiens
ttttaaaaaataaaatttggacattttaaaagcatggttgtgattgcttgaaaaagccagctagtaggaaagtggggaaagggccccgacttcattatatgatgactaggccggcctagtggagaattttattctttcttaggtggtagtccccaggctgcccttcactctgttgactccatgggtaggggctgggaggaagggagctattcatttgtccatstagtaatcagtttctctataaatctaaatgtctacaattccctttagatagaatagcaagatagaatagctagttttttagacaatcagtaagacaagagtgttaggaccttcttgaaggtctcaaagctatttctgatgttggaggaggatgttcacattacatgtttc

SEQ ID NO: 154168 - DNA, 456 bp, Homo sapiens
tgcataatcaccactatctgtctccctaatgcttttcatcttgtaaaactaaaactctgtacctattaaacaataactccccatttctccctctccccagtccctagcaaccaccattmtactgtctgtctctatgattctgattactctaagtacctcagataatgacttatttcacttggccaatgtctcaggtttcatccatattgtaaccatgtgtcactgccttcctttttaaggctcaataatattcattctaagtacacgccacattttgcttacccattcatccagtgatgaatacctgtattaattccatgttttagcttttgtgaataatgctgctatgaacatgggtacacaaatatctctttgagaccttcatttgtctgagtatatacacagaaatggaattgctggaccacatggtaagtctatcttcaattttctgaggga

SEQ ID NO: 154169 - DNA, 456 bp, Homo sapiens
tgcataatcaccactatctgtctccctaatgcttttcatcttgtaaaactaaaactctgtacctattaaacaataactccccatttctccctctccccagtccctagcaaccaccattctactgtctgtctctatgattctgattactctaagtacctcagataatgacttatttcacttggccaatgtctcargtttcatccatattgtaaccatgtgtcactgccttcctttttaaggctcaataatattcattctaagtacacgccacattttgcttacccattcatccagtgatgaatacctgtattaattccatgttttagcttttgtgaataatgctgctatgaacatgggtacacaaatatctctttgagaccttcatttgtctgagtatatacacagaaatggaattgctggaccacatggtaagtctatcttcaattttctgaggga

SEQ ID NO: 154170 - DNA, 366 bp, Homo sapiens
ccctgcaagaaattataaaaggagttctgcaggttgaaatgaaagaatatggccgggcatggtggctcatgcctgtaatcccagcaatttgggaggctgaggtgggyggatcatgaggtcaggagttcaagaccagcatgaccaacatggagaaaccccatctctactaaaaaatacaaaaattagccaggcatggtggggcacactgtaatcccagctattcaggaggccgaggcagaagaatcgcttgaacacaggaggcagaggttgcagtgagcggagaaagtgccattgcatgctagcctgggcaacagagtgagactgtctcaaaaaaaaaaagaaagaaagaaagaaagaatactagat

SEQ ID NO: 154171 - DNA, 580 bp, Homo sapiens
gtgtacaaatacacccccattctgttatgcagacttgcaaatgcatttaccctctaacttattaatcccayttggggaacctatttcccagatatatctgcttcattaagctggcgtaggcaaacaatggcctgctggctacatctagcctgcagtttgttttcatacaggctgtaagctaagaatgatattaacattttaaatggttggataggccggacacggtggctcacgcctgtaatcccagcactttgggaggccgaggtgggcagatcacctgaagtcaggagtttgagaccagcctggctaacatggtgaaaccctgtttctattaaaaatacaaaaaattagctgggcatggtggcgcatgcctacaatcccagctactcgggaggctgaggcaggagaattgcttgaacccaggaggcagaggttgcagtgagctgagatcgcaccatttagcttgggcaacaagagcgaaactctgtctcaaaaataaataaataaataaataaataaataaataaataaataaatagttggataaaatccaaataaacactttctcacatgaaaaata

SEQ ID NO: 154172 - DNA, 580 bp, Homo sapiens
gtgtacaaatacacccccattctgttatgcagacttgcaaatgcatttaccctctaacttattaatcccacttggggaacctatttcccagatatatctgcttcattaagctggcgtaggcaaacaatggcctgctggctacatctagcctgcagtttgttttcatacaggctgtaagctaagaatgatattaacattttaaatggttggataggccsgacacggtggctcacgcctgtaatcccagcactttgggaggccgaggtgggcagatcacctgaagtcaggagtttgagaccagcctggctaacatggtgaaaccctgtttctattaaaaatacaaaaaattagctgggcatggtggcgcatgcctacaatcccagctactcgggaggctgaggcaggagaattgcttgaacccaggaggcagaggttgcagtgagctgagatcgcaccatttagcttgggcaacaagagcgaaactctgtctcaaaaataaataaataaataaataaataaataaataaataaataaatagttggataaaatccaaataaacactttctcacatgaaaaata

SEQ ID NO: 154173 - DNA, 547 bp, Homo sapiens
aagttaaacagagaccaaattcaaacccaggcagccaactcttaaccactaggcaacactgcctctcaagaaattccttctctgcctacacccacttgytcaacaggcaacacaagcaccatcacctccagcaaggctccccgatttcttctttatccaccagacaccccgcccagtgcacccactcctgggtgaggggtgcctgctactctcccatagcaccttcctgtgtggcattcaagccactgcctgctccccaccagccatcagctccctgatgctgaaaggtccatcttttcatttctgtgggctccacgtctggtgcccagtgggtcctcaagaaatccctgctgacaaatggactgatgaatgaatgaatgaacaaatgaacacagtcctgggaaggcattaggagaagccatccccaagatgcaaactccaagaggtgaaaatgactgaaggagaactggaggacacacatcctctctcctccccactacctgggtaccagcttcacgaagccaagctttggggggacccgtgcccc

SEQ ID NO: 154174 - DNA, 551 bp, Homo sapiens
cttgctggctacaggtgagactcagaacattaccagctgtagtggctacaggacaaaactcttccttcttgagaaaagcagagggaaaagtaaacaggactttgtcttgcactttagctaccagcacagccacagtgggatggaagcactgatatggtttggctgtgaccccatccaaatctcatcttgaattcacatatgttgtgggrgggacacagtgggaggtaattgaatcatggggacaaatctttcccatgctgttcttgtgatagtgaataagtctcatgagataatgatggttttaaaaaggggaatttccctgcacaagttctcttctcttgtctgccgccatatgagacgtgacttttactttccaccatgattgtgagaccttcccagccatgtggaactgtaagtcctataaacctctttgttttgtaaattgcccagcatcaggtatgtctttatcagtagtgtgaaaacagactaatatagtaaattgtaccagtagagtggggcactgctgtaaagatacctgaaaatgtggaagt

SEQ ID NO: 154175 - DNA, 551 bp, Homo sapiens
cttgctggctacaggtgagactcagaacattaccagctgtagtggctacaggacaaaactcttccttcttgagaaaagcagagggaaaagtaaacaggactttgtcttgcactttagctaccagcacagccacagtgggatggaagcactgatatggtttggctgtgaccccatccaaatctcatcttgaattcacatatgttgtgggagggacacagtgggaggtaattgaatcatggggrcaaatctttcccatgctgttcttgtgatagtgaataagtctcatgagataatgatggttttaaaaaggggaatttccctgcacaagttctcttctcttgtctgccgccatatgagacgtgacttttactttccaccatgattgtgagaccttcccagccatgtggaactgtaagtcctataaacctctttgttttgtaaattgcccagcatcaggtatgtctttatcagtagtgtgaaaacagactaatatagtaaattgtaccagtagagtggggcactgctgtaaagatacctgaaaatgtggaagt

SEQ ID NO: 154176 - DNA, 520 bp, Homo sapiens
aaggatgtttccatttcagaaggagataattcacctttcctcttccttgttattctatctgggctctcaaccaattggatgctgcctgtattcatccatttttatacagctatgaagaaatwcctgagtctgagcaatttataaagaacaaaggggtttaatgggctgacagttccacatggctgcaggggcctcacaatcatggcagaaggggaagcaaagctatccctcttcacatggcagcaacaagaagtgctgagccaaaggggaaaagccccttataaaaccatcagatcatgagaactcactcactgtcatgagaacatcatggcagtaaccaccaccatgattcagtcacctcccattgggtccctcccacgacatgtaggtattacaggaactacaattcaagatgagatctgggtggggacacagccaaaccatatcagtgcccatccacattgggtcatggttatctcagtgtcttccagaaacgccctcatagatatgcccagaaatc

SEQ ID NO: 154177 - DNA, 520 bp, Homo sapiens
aaggatgtttccatttcagaaggagataattcacctttcctcttccttgttattctatctgggctctcaaccaattggatgctgcctgtattcatccatttttatacagctatgaagaaatacctgagtctgagcaatttataaagaacaaagrggtttaatgggctgacagttccacatggctgcaggggcctcacaatcatggcagaaggggaagcaaagctatccctcttcacatggcagcaacaagaagtgctgagccaaaggggaaaagccccttataaaaccatcagatcatgagaactcactcactgtcatgagaacatcatggcagtaaccaccaccatgattcagtcacctcccattgggtccctcccacgacatgtaggtattacaggaactacaattcaagatgagatctgggtggggacacagccaaaccatatcagtgcccatccacattgggtcatggttatctcagtgtcttccagaaacgccctcatagatatgcccagaaatc

SEQ ID NO: 154178 - DNA, 520 bp, Homo sapiens
aaggatgtttccatttcagaaggagataattcacctttcctcttccttgttattctatctgggctctcaaccaattggatgctgcctgtattcatccatttttatacagctatgaagaaatacctgagtctgagcaatttataaagaacaaaggggtttaatgggctgacagttccacatggctgcaggggcctcacaatcatggcagaaggggaagcaaagctatccctcttcacatggcagcaacaagaagtgctgagccaaaggggaaaagccccttataaaaccatcagatcatgagaactcactcactgtcatgagaacakcatggcagtaaccaccaccatgattcagtcacctcccattgggtccctcccacgacatgtaggtattacaggaactacaattcaagatgagatctgggtggggacacagccaaaccatatcagtgcccatccacattgggtcatggttatctcagtgtcttccagaaacgccctcatagatatgcccagaaatc

SEQ ID NO: 154179 - DNA, 520 bp, Homo sapiens
aaggatgtttccatttcagaaggagataattcacctttcctcttccttgttattctatctgggctctcaaccaattggatgctgcctgtattcatccatttttatacagctatgaagaaatacctgagtctgagcaatttataaagaacaaaggggtttaatgggctgacagttccacatggctgcaggggcctcacaatcatggcagaaggggaagcaaagctatccctcttcacatggcagcaacaagaagtgctgagccaaaggggaaaagccccttataaaaccatcagatcatgagaactcactcactgtcatgagaacatcatggcagtaaccaccaccatgattcagtcacctcccaytgggtccctcccacgacatgtaggtattacaggaactacaattcaagatgagatctgggtggggacacagccaaaccatatcagtgcccatccacattgggtcatggttatctcagtgtcttccagaaacgccctcatagatatgcccagaaatc

SEQ ID NO: 154180 - DNA, 586 bp, Homo sapiens
ttccttcgctttcggtgccatcttgtgaaaagcgaaaaacattatttcaaaaataatttgtttacagtaaatctgcctaagaatagtttccaaagtacttttggtaatttttaaccttaaagttaakttaagtaaaagatttgcattaaatatctagaccatttataaataagatacaatactaaaacattaattactgaacataaataattcaagtttatatacttttggcttcctatttttacagagagactaaagatattttggcccgttaataaacatgtttttttctgccacactgaggaattgtattatgaggaaacacatccctctagatgttgggagatggtatattcatacattttctaacctactatagaatgctaatatatgacagtttataactgtctacttcctagttttctctggaaaataaaagattactaagtattaaaattataatcaatatatgtaaataaaactactagaaataatagaataactagaaacaactctatgcaaagcatgcaagaaaagtagggcatgtttcgcaagtaaagtaggttgcattttttataaggaaaac

SEQ ID NO: 154181 - DNA, 586 bp, Homo sapiens
ttccttcgctttcggtgccatcttgtgaaaagcgaaaaacattatttcaaaaataatttgtttacagtaaatctgcctaagaatagtttccaaagtacttttggtaatttttaaccttaaagttaatytaagtaaaagatttgcattaaatatctagaccatttataaataagatacaatactaaaacattaattactgaacataaataattcaagtttatatacttttggcttcctatttttacagagagactaaagatattttggcccgttaataaacatgtttttttctgccacactgaggaattgtattatgaggaaacacatccctctagatgttgggagatggtatattcatacattttctaacctactatagaatgctaatatatgacagtttataactgtctacttcctagttttctctggaaaataaaagattactaagtattaaaattataatcaatatatgtaaataaaactactagaaataatagaataactagaaacaactctatgcaaagcatgcaagaaaagtagggcatgtttcgcaagtaaagtaggttgcattttttataaggaaaac

SEQ ID NO: 154182 - DNA, 586 bp, Homo sapiens
ttccttcgctttcggtgccatcttgtgaaaagcgaaaaacattatttcaaaaataatttgtttacagtaaatctgcctaagaatagtttccaaagtacttttggtaatttttaaccttaaagttaatttaagtaaaagawttgcattaaatatctagaccatttataaataagatacaatactaaaacattaattactgaacataaataattcaagtttatatacttttggcttcctatttttacagagagactaaagatattttggcccgttaataaacatgtttttttctgccacactgaggaattgtattatgaggaaacacatccctctagatgttgggagatggtatattcatacattttctaacctactatagaatgctaatatatgacagtttataactgtctacttcctagttttctctggaaaataaaagattactaagtattaaaattataatcaatatatgtaaataaaactactagaaataatagaataactagaaacaactctatgcaaagcatgcaagaaaagtagggcatgtttcgcaagtaaagtaggttgcattttttataaggaaaac

SEQ ID NO: 154183 - DNA, 445 bp, Homo sapiens
tgcatgactaaaattatacccattgaacagcaccycccaattttcgtctccctctaacccctggtaaccaccattttactttctgatttgatgagttttactgttttagacacctgatattagtggattcatgcaatatttgtccttctgtgactggcttatttcacttagtgtaatgtcctcaagattcatccatgttgtagtatatgacgggattttttttaaggatacataatatttggttgtatgtatattaccacatttattttatccattcaactgtcctggacatttaggtggttgttagtgtcttgactgctgtgacaaaataagtacttttaaaagtctcacatttgcaagttcaatttgaacctttttttagtctgcttgtacttctcttatcaagcaagaaagcacttttctgcttttcgtattactagtaaca

SEQ ID NO: 154184 - DNA, 445 bp, Homo sapiens
tgcatgactaaaattatacccattgaacagcacctcccaattttcgtctccctctmacccctggtaaccaccattttactttctgatttgatgagttttactgttttagacacctgatattagtggattcatgcaatatttgtccttctgtgactggcttatttcacttagtgtaatgtcctcaagattcatccatgttgtagtatatgacgggattttttttaaggatacataatatttggttgtatgtatattaccacatttattttatccattcaactgtcctggacatttaggtggttgttagtgtcttgactgctgtgacaaaataagtacttttaaaagtctcacatttgcaagttcaatttgaacctttttttagtctgcttgtacttctcttatcaagcaagaaagcacttttctgcttttcgtattactagtaaca

SEQ ID NO: 154185 - DNA, 462 bp, Homo sapiens
atcttgcatgactaaaattatacccattgaacagcacctcccaattttcgtctccctctaacccctggtaaccaccattttactttctgatttgatgagttttactgttttagacacctgatattagtggattcatgcaatatttgtccttctgtgactggcttatttcacttagtgtaatgtcctcaagattcatccatgttgtagtatatgacrggattttttttaaggatacataatatttggttgtatgtatattaccacatttattttatccattcaactgtcctggacatttaggtggttgttagtgtcttgactgctgtgacaaaataagtacttttaaaagtctcacatttgcaagttcaatttgaacctttttttagtctgcttgtacttctcttatcaagcaagaaagcacttttctgcttttcgtattactagtaacagtggagattaaat

SEQ ID NO: 154186 - DNA, 431 bp, Homo sapiens
tgcatgactaaaattatacccattgaacagcacctcccaattttcgtctccctctaacccctggtaaccaccattttactttctgatttgatgagttttactgttttagacacctgatattagtggattcatgcaatatttgtccttctgtgactggcttatttcacttagtgtaatgtcctcaagattcatccatgttgtagtatatgacgggattttttttaaggatacataatatttggttgtatgtatattaccacatttattttatccattcaactgtcctggacatttakgtggttgttagtgtcttgactgctgtgacaaaataagtacttttaaaagtctcacatttgcaagttcaatttgaacctttttttagtctgcttgtacttctcttatcaagcaagaaagcacttttctgcttttcg

SEQ ID NO: 154187 - DNA, 462 bp, Homo sapiens
atcttgcatgactaaaattatacccattgaacagcacctcccaattttcgtctccctctaacccctggtaaccaccattttactttctgatttgatgagttttactgttttagacacctgatattagtggattcatgcaatatttgtccttctgtgactggcttatttcacttagtgtaatgtcctcaagattcatccatgttgtagtatatgacgggattttttttaaggatacataatatttggttgtatgtatattaccacatttattttatccattcaactgtcctggacatttaggtggttgttagtgtcttgrctgctgtgacaaaataagtacttttaaaagtctcacatttgcaagttcaatttgaacctttttttagtctgcttgtacttctcttatcaagcaagaaagcacttttctgcttttcgtattactagtaacagtggagattaaat

SEQ ID NO: 154188 - DNA, 462 bp, Homo sapiens
atcttgcatgactaaaattatacccattgaacagcacctcccaattttcgtctccctctaacccctggtaaccaccattttactttctgatttgatgagttttactgttttagacacctgatattagtggattcatgcaatatttgtccttctgtgactggcttatttcacttagtgtaatgtcctcaagattcatccatgttgtagtatatgacgggattttttttaaggatacataatatttggttgtatgtatattaccacatttattttatccattcaactgtcctggacatttaggtggttgttagtgtcttgactgctgtgacaaaataagtacttttaaaagtctcacatttgcaagttcaatttgaayctttttttagtctgcttgtacttctcttatcaagcaagaaagcacttttctgcttttcgtattactagtaacagtggagattaaat

SEQ ID NO: 154189 - DNA, 462 bp, Homo sapiens
atcttgcatgactaaaattatacccattgaacagcacctcccaattttcgtctccctctaacccctggtaaccaccattttactttctgatttgatgagttttactgttttagacacctgatattagtggattcatgcaatatttgtccttctgtgactggcttatttcacttagtgtaatgtcctcaagattcatccatgttgtagtatatgacgggattttttttaaggatacataatatttggttgtatgtatattaccacatttattttatccattcaactgtcctggacatttaggtggttgttagtgtcttgactgctgtgacaaaataagtacttttaaaagtctcacatttgcaagttcaatttgaacctttttttagtctgcttgtacttctcttatcaagcaagaaagcacttttcygcttttcgtattactagtaacagtggagattaaat

SEQ ID NO: 154190 - DNA, 453 bp, Homo sapiens
atgactaaaattatacccattgaacagcacctcccaattttcgtctccctctaacccctggtaaccaccattttactttctgatttgatgagttttactgttttagacacctgatattagtggattcatgcaatatttgtccttctgtgactggcttatttcacttagtgtaatgtcctcaagattcatccatgttgtagtatatgacgggattttttttaaggatacataatatttggttgtatgtatattaccacatttattttatccattcaactgtcctggacatttaggtggttgttagtgtcttgactgctgtgacaaaataagtacttttaaaagtctcacatttgcaagttcaatttgaacctttttttagtctgcttgtacttctcttatcaagcaagaaagcacttttctgcttttcstattactagtaacagtggagattaa

SEQ ID NO: 154191 - DNA, 507 bp, Homo sapiens
atttgattctgatgtaagaaatgatggtcaccagctggttactgctaccaccccacaaccccgagcatactggacgaatgtctaagccttgtggttagtggggacaatgctggtggagtctgaagttgtcatgcagtgactcatgcaagcttaggcagatttggtgatataygacacagagatgcaaagaaatgttgtagctgacacacaccggctggctctgggagatgcagaaggagcacgtcacccaaaatagagccagacagacatccttaaggaaagagccaaggggctgcatcttaaagaatgaagaaaggatttgtcatgagagatgggacaggaagtcttgagaggcagagggagattgtgagaatgttgggaagggaggagagattctcacacatctgggaagctgacaatccatcagcatgtccagaaggaaaataaggaggaggagcagaaacagatgaggctggatatagaagcagggctgaagctgtgttgatt

SEQ ID NO: 154192 - DNA, 507 bp, Homo sapiens
atttgattctgatgtaagaaatgatggtcaccagctggttactgctaccaccccacaaccccgagcatactggacgaatgtctaagccttgtggttagtggggacaatgctggtggagtctgaagttgtcatgcagtgactcatgcaagcttaggcagatttggtgatatatgacacagagatgcaaagaaatgttgtagctgacacacaccggctggctctgggagatgcagaaggagcacgtcacccaaaatagagccagacagacatccttaaggaaagagccaaggggctgcatcttaaagaatgaagaaaggatttgtcatgagagatgggacaggaagtcttgagaggcagagggagattgtgagaatgttgggaagggaggagagattctcrcacatctgggaagctgacaatccatcagcatgtccagaaggaaaataaggaggaggagcagaaacagatgaggctggatatagaagcagggctgaagctgtgttgatt

SEQ ID NO: 154193 - DNA, 519 bp, Homo sapiens
tcaccagctggttactgctaccaccccacaaccccgagcatactggacgaatgtctaagccttgtggttagtggggacaatgctggtggagtctgaagttgtcatgcagtgactcatgcaagcttaggcagatttggtgatatatgacacagagatgcaaagaaatgttgtagctgacacacaccggctggctctgggagatgcagaaggagcacgtcacccaaaatagagccagacagacatccttaaggaaagagccaaggggctgcatcttaaagaatgaagaaaggatttgtcatgagagatgggacaggaagtcttgagaggcagagggagattgtgagaatgttgggaagggaggagagattctcacacatctgggaagctgacaatccatcagcatgtccagaaggaaaataaggaggaggagcagaaacagatgaggctggatatagaagcagggctgaagctgtgtygattgtggtaaagagttacgattctatccagaaggcaataggt

SEQ ID NO: 154194 - DNA, 544 bp, Homo sapiens
atgtaagaaatgatggtcaccagctggttactgctaccaccccacaaccccgagcatactggacgaatgtctaagccttgtggttagtggggacaatgctggtggagtctgaagttgtcatgcagtgactcatgcaagcttaggcagatttggtgatatatgacacagagatgcaaagaaatgttgtagctgacacacaccggctggctctgggagatgcagaaggagcacgtcacccaaaatagagccagacagacatccttaaggaaagagccaaggggctgcatcttaaagaatgaagaaaggatttgtcatgagagatgggacaggaagtcttgagaggcagagggagattgtgagaatgttgggaagggaggagagattctcacacatctgggaagctgacaatccatcagcatgtccagaaggaaaataaggaggaggagcagaaacagatgaggctggatatagaagcagggctgaagctgtgttgattgtggtaaagagttrcgattctatccagaaggcaataggtagcattcta

SEQ ID NO: 154195 - DNA, 406 bp, Homo sapiens
gtagagtgaacatacactggaattctatcctgcttgacccaagctcttgatagcgaaaggtagaaaagatagatggtaaacagatagatagatgatagataaagaaaatacatagctgttccagaaaacagaaatggataacttcatgaaccaaaarcagagtaatatactttagaaaggaagcaggccagaaaacccacagttgcaaagcaaatagaatttccaactgcctcttgtagccccttcctggaagtagtcacagcccagggtgtttgacttcttcctctgttttttgtttgtttgttgtttgcttttctctggggttttgttgttgtttgctttttttaaaaaaaaattccctttccctgcttttttgtcacagcagcctttgtcacttcaaacaccg

SEQ ID NO: 154196 - DNA, 406 bp, Homo sapiens
gtagagtgaacatacactggaattctatcctgcttgacccaagctcttgatagcgaaaggtagaaaagatagatggtaaacagatagatagatgatagataaagaaaatacatagctgttccagaaaacagaaatggataacttcatgaaccaaaagcagagtaatatactttagaaaggaagcaggccagaaaacccacagttgcaaagcaaatagaatttccarctgcctcttgtagccccttcctggaagtagtcacagcccagggtgtttgacttcttcctctgttttttgtttgtttgttgtttgcttttctctggggttttgttgttgtttgctttttttaaaaaaaaattccctttccctgcttttttgtcacagcagcctttgtcacttcaaacaccg

SEQ ID NO: 154197 - DNA, 406 bp, Homo sapiens
gtagagtgaacatacactggaattctatcctgcttgacccaagctcttgatagcgaaaggtagaaaagatagatggtaaacagatagatagatgatagataaagaaaatacatagctgttccagaaaacagaaatggataacttcatgaaccaaaagcagagtaatatactttagaaaggaagcaggccagaaaacccacagttgcaaagcaaatagaatttccaactgcctcttgtagccccttcctggaagtagtcacagcccagggtgtttgacttcttcctctgttttttgtttgtttgttgtytgcttttctctggggttttgttgttgtttgctttttttaaaaaaaaattccctttccctgcttttttgtcacagcagcctttgtcacttcaaacaccg

SEQ ID NO: 154198 - DNA, 415 bp, Homo sapiens
ttgatagcgaaaggtagaaaagatagatggtaaacagatagatagatgatagataaagaaaatacatagctgttccagaaaacagaaatggataacttcatgaaccaaaagcagagtaatatactttagaaaggaagcaggccagaaaacccacagttgcaaagcaaatagaatttccaactgcctcttgtagccccttcctggaagtagtcacagcccagggtgtttgacttcttcctctgttttttgtttgtttgttgtttgcttttctstggggttttgttgttgtttgctttttttaaaaaaaaattccctttccctgcttttttgtcacagcagcctttgtcacttcaaacaccgcaagtgttctttaaaaaaaattatatcaacctttcaattaaaatgcaacatgtct

SEQ ID NO: 154199 - DNA, 567 bp, Homo sapiens
atcaataagatccccattgctatagaaaagagaaaaaagcatgcggaatagaacgctgtttcttggagatttctcctgaaaaagtcacatgttatttcttctcacctccattggcaaaaaaaaaaaaaaaaaaaaaaaaaaaaaagtcatgtggccatgggaaaatttaagtaggtgggatggaacagtcagaatgcattcataaaaaatgaactgaaaatatttggagaacarcaccaatgactatcatgaatgccaacatacatccctaacaacccagtgctgttaccctccaaactttttatgtcttgcaaagtattagaacttcatatctgaagccataccactcagagggaatgcaatacatattgacatctcctttaggatgtccatagagaattcaagaaaagaaataatttaaaagtgcttttgggtacagctatttagcactagggggtaagagtagagatagattgtaaagataataatagggttaggcataggattaggatctgggtcagagtcggggccggaagtatggttagaggtggggtcatggtcagggtc

SEQ ID NO: 154200 - DNA, 558 bp, Homo sapiens
ttagaaagcattgtggtaaaacattgaatcatcatggtcataagttctgttcacattctttcttgctttgaatattttttcccagtggccaatatttgattctgttgtatcatggctaaaaggtaggcatggcaacaaaataaagacaggaagtctttggaataagtgatcccatcacaatgaatcaatttgccattggaacatatttttacaaagtcactcttttgaaaatatttagctatgaattaaaacagagtctgtatggttaatatttttcctggtctaargtgaacagcattttagagaatgaactcaggacacaaccacagcacaagaaaaacgtgataattaagtttacacatatgtgttactactgcaacagaaaacatgtaaagaacatttgatttatgtatcagtctgcactgtttaattttttgtgtcataaatactcttatttaaaaaaacaggactagttaacagtgtcaattactagtaattcatggtataaataattaaacaaggaagtgttcaaaaaaaacagtgttttaaataaagttt

SEQ ID NO: 154201 - DNA, 545 bp, Homo sapiens
tgcagatcctcactccgtaaggagttggctccaccttcttgayggctgagtgtctacatcaattatttggaattcttttgcaaaggagatttctatgcaactccatttgcttattcaccgaggtatacaaatacagacacctagataattactttaagctttagttattattcaacactacagtattatgttgcacaattcattcctgtgttggccatcagtagctgtttttattggctcttatttttctttgatatgttttaatttttttagtacttactttctgatacttccagattatcctggttcctatatttactgtcccagttctagtatcagacatttcttcaaagagcctgattcctttcagaatggtaggaaaacttacatctggctgctgaatgagcacattgtatcttctccctcattggcaatgctaggaagtatatgtgtgtgtctaacctacctatacacacctaattataaagttttctatgtagaactgtgtgtgtctatattaaactaaacataagtttacgttgatg

SEQ ID NO: 154202 - DNA, 550 bp, Homo sapiens
gagtgtctacatcaattatttggaattcttttgcaaaggagatttctatgcaactccatttgcttattcacckaggtatacaaatacagacacctagataattactttaagctttagttattattcaacactacagtattatgttgcacaattcattcctgtgttggccatcagtagctgtttttattggctcttatttttctttgatatgttttaatttttttagtacttactttctgatacttccagattatcctggttcctatatttactgtcccagttctagtatcagacatttcttcaaagagcctgattcctttcagaatggtaggaaaacttacatctggctgctgaatgagcacattgtatcttctccctcattggcaatgctaggaagtatatgtgtgtgtctaacctacctatacacacctaattataaagttttctatgtagaactgtgtgtgtctatattaaactaaacataagtttacgttgatgtctccacctctgatctactatcacatgaatcattctagccttctcgccttgc

SEQ ID NO: 154203 - DNA, 545 bp, Homo sapiens
tgcagatcctcactccgtaaggagttggctccaccttcttgatggctgagtgtctacatcaattatttggaattcttttgcaaaggagatttctatgcaactccatttgcttattcaccgaggtatacaaatacagacacctagataattactttaagctttagttattattcaacwctacagtattatgttgcacaattcattcctgtgttggccatcagtagctgtttttattggctcttatttttctttgatatgttttaatttttttagtacttactttctgatacttccagattatcctggttcctatatttactgtcccagttctagtatcagacatttcttcaaagagcctgattcctttcagaatggtaggaaaacttacatctggctgctgaatgagcacattgtatcttctccctcattggcaatgctaggaagtatatgtgtgtgtctaacctacctatacacacctaattataaagttttctatgtagaactgtgtgtgtctatattaaactaaacataagtttacgttgatg

SEQ ID NO: 154204 - DNA, 545 bp, Homo sapiens
tgcagatcctcactccgtaaggagttggctccaccttcttgatggctgagtgtctacatcaattatttggaattcttttgcaaaggagatttctatgcaactccatttgcttattcaccgaggtatacaaatacagacacctagataattactttaagctttagttattattcaacactacagtattatgttgcacaattcattcctgtgttggccatcagtagctgtttttattggctyttatttttctttgatatgttttaatttttttagtacttactttctgatacttccagattatcctggttcctatatttactgtcccagttctagtatcagacatttcttcaaagagcctgattcctttcagaatggtaggaaaacttacatctggctgctgaatgagcacattgtatcttctccctcattggcaatgctaggaagtatatgtgtgtgtctaacctacctatacacacctaattataaagttttctatgtagaactgtgtgtgtctatattaaactaaacataagtttacgttgatg

SEQ ID NO: 154205 - DNA, 287 bp, Homo sapiens
taagccccgatctacaggaagaaaactggaaataagactgaggacttagtttaagatgttcctactcagcctctagcttttgtgctacagttccgggaacagactcctctctcctgaaaaccayttccctctgcagcattaaatttcaccaagatgtcttgcttgtgggaaagacttccaaggatgcctggagagaggaggatggaaatgtcctgctctctaaacagatagacagatgcagccagacagaaaatagtttatcttgctgaggtttctaatgtatttga

SEQ ID NO: 154206 - DNA, 287 bp, Homo sapiens
taagccccgatctacaggaagaaaactggaaataagactgaggacttagtttaagatgttcctactcagcctctagcttttgtgctacagttccgggaacagactcctctctcctgaaaaccatttccctctgcagcattaaatttcaccaagatgtcttgcttgtgggaaagacttccaaggatgcctggagagaggargatggaaatgtcctgctctctaaacagatagacagatgcagccagacagaaaatagtttatcttgctgaggtttctaatgtatttga

SEQ ID NO: 154207 - DNA, 390 bp, Homo sapiens
ctacctatatatgtctcaggarctttccagagtttcctttgagtgcttctaaattttgcataaatggtatgttgtcccttgtctctttttaaaaccagtaagccattttcccttattttcctggaaaattaaaggaacaaggaccaggaaataacaatgtattagctaaggttctgttgattgaaagcaacagaacctaattctggctagcttaaaccatgctaggatttaatgaagaatactgcagaatcttagatatcttatgactgggaaagaggaggttcaggcagttcctgggatgtcagcaacaggtagctgtcaattaactgcccccacaccacccactgctgccgtcatcaatatagcacaccacaatggctcccagcctct

SEQ ID NO: 154208 - DNA, 423 bp, Homo sapiens
ttcaagttttatgctgatcctacctatatatgtctcaggagctttccagagtttcctttgagtgcttctaaattttgcataaatggtatgytgtcccttgtctctttttaaaaccagtaagccattttcccttattttcctggaaaattaaaggaacaaggaccaggaaataacaatgtattagctaaggttctgttgattgaaagcaacagaacctaattctggctagcttaaaccatgctaggatttaatgaagaatactgcagaatcttagatatcttatgactgggaaagaggaggttcaggcagttcctgggatgtcagcaacaggtagctgtcaattaactgcccccacaccacccactgctgccgtcatcaatatagcacaccacaatggctcccagcctctgtacgtctgggttc

SEQ ID NO: 154209 - DNA, 408 bp, Homo sapiens
caagttttatgctgatcctacctatatatgtctcaggagctttccagagtttcctttgagtgcttctaaattttgcataaatggtatgttgtcccttgtctctttttaaaacmagtaagccattttcccttattttcctggaaaattaaaggaacaaggaccaggaaataacaatgtattagctaaggttctgttgattgaaagcaacagaacctaattctggctagcttaaaccatgctaggatttaatgaagaatactgcagaatcttagatatcttatgactgggaaagaggaggttcaggcagttcctgggatgtcagcaacaggtagctgtcaattaactgcccccacaccacccactgctgccgtcatcaatatagcacaccacaatggctcccagcctctg

SEQ ID NO: 154210 - DNA, 393 bp, Homo sapiens
ctacctatatatgtctcaggagctttccagagtttcctttgagtgcttctaaattttgcataaatggtatgttgtcccttgtctctttttaaaaccmgtaagccattttcccttattttcctggaaaattaaaggaacaaggaccaggaaataacaatgtattagctaaggttctgttgattgaaagcaacagaacctaattctggctagcttaaaccatgctaggatttaatgaagaatactgcagaatcttagatatcttatgactgggaaagaggaggttcaggcagttcctgggatgtcagcaacaggtagctgtcaattaactgcccccacaccacccactgctgccgtcatcaatatagcacaccacaatggctcccagcctctgta

SEQ ID NO: 154211 - DNA, 405 bp, Homo sapiens
gttttatgctgatcctacctatatatgtctcaggagctttccagagtttcctttgagtgcttctaaattttgcataaatggtatgttgtcccttgtctctttttaaaaccagtaagccattttcccttmttttcctggaaaattaaaggaacaaggaccaggaaataacaatgtattagctaaggttctgttgattgaaagcaacagaacctaattctggctagcttaaaccatgctaggatttaatgaagaatactgcagaatcttagatatcttatgactgggaaagaggaggttcaggcagttcctgggatgtcagcaacaggtagctgtcaattaactgcccccacaccacccactgctgccgtcatcaatatagcacaccacaatggctcccagcctctg

SEQ ID NO: 154212 - DNA, 408 bp, Homo sapiens
caagttttatgctgatcctacctatatatgtctcaggagctttccagagtttcctttgagtgcttctaaattttgcataaatggtatgttgtcccttgtctctttttaaaaccagtaagccattttcccttattttcytggaaaattaaaggaacaaggaccaggaaataacaatgtattagctaaggttctgttgattgaaagcaacagaacctaattctggctagcttaaaccatgctaggatttaatgaagaatactgcagaatcttagatatcttatgactgggaaagaggaggttcaggcagttcctgggatgtcagcaacaggtagctgtcaattaactgcccccacaccacccactgctgccgtcatcaatatagcacaccacaatggctcccagcctctg

SEQ ID NO: 154213 - DNA, 390 bp, Homo sapiens
ctacctatatatgtctcaggagctttccagagtttcctttgagtgcttctaaattttgcataaatggtatgttgtcccttgtctctttttaaaaccagtaagccattttcccttattttcctggaaaattaaaggaacaargaccaggaaataacaatgtattagctaaggttctgttgattgaaagcaacagaacctaattctggctagcttaaaccatgctaggatttaatgaagaatactgcagaatcttagatatcttatgactgggaaagaggaggttcaggcagttcctgggatgtcagcaacaggtagctgtcaattaactgcccccacaccacccactgctgccgtcatcaatatagcacaccacaatggctcccagcctct

SEQ ID NO: 154214 - DNA, 390 bp, Homo sapiens
ctacctatatatgtctcaggagctttccagagtttcctttgagtgcttctaaattttgcataaatggtatgttgtcccttgtctctttttaaaaccagtaagccattttcccttattttcctggaaaattaaaggaacaaggaccaggaaataacaatgtattagctaasgttctgttgattgaaagcaacagaacctaattctggctagcttaaaccatgctaggatttaatgaagaatactgcagaatcttagatatcttatgactgggaaagaggaggttcaggcagttcctgggatgtcagcaacaggtagctgtcaattaactgcccccacaccacccactgctgccgtcatcaatatagcacaccacaatggctcccagcctct

SEQ ID NO: 154215 - DNA, 398 bp, Homo sapiens
ttttatgctgatcctacctatatatgtctcaggagctttccagagtttcctttgagtgcttctaaattttgcataaatggtatgttgtcccttgtctctttttaaaaccagtaagccattttcccttattttcctggaaaattaaaggaacaaggaccaggaaataacaatgtattagctaaggttctgttgattgaaagcaacagaacctaattctggctagcttaaaccatgctaggatttaatgaagaatactgcagaatcttagatatcttatgactgggaaagaggaggttcaggcagttcctgrgatgtcagcaacaggtagctgtcaattaactgcccccacaccacccactgctgccgtcatcaatatagcacaccacaatggctcccag

SEQ ID NO: 154216 - DNA, 615 bp, Homo sapiens
gtgtttgcttactgaggaagaaaagacttccaaacactcgagagggtaactcagtacagaaatctgaagtatattgaggaatcttaatttgaagtgttttaaatggctttttaatatttaaaaagccttcttagtgttttatagttgccaaaaaatacatggagtctttaccttgaagttcctgacaaattcttttattaaattttgactttcattttctctaggttctgttcctamaacatctgtgaagtgtatttctgtagattaaattctgttttccattgaatgttatcttaatttcagaaaatttctgtgcagggttattttattaagctcatttttttttttttttttttttttttttggtgagaaaggctcagcagctgatagactcagcaacaggcagccaggagctctgaggctcacagctggcagtctagttccactcagtctctacttgagaaattctttctttggaagtacagcagaggccttaggtgaatggcttgtctgctatggcagagattagaggtgctgccagactgccataagtattaggcagtaacagcagcagctgcttatatgcatgtgaacagctggggaattaatttggta

SEQ ID NO: 154217 - DNA, 610 bp, Homo sapiens
cttgccagtgcatctgagaatctagggactttctgaaatagtacttccttgctatgaggactgaagttggattagaatccwtttcaatgaagatcagatgtcctgagtagaattcttactattgggtcctgaatcttacattaaatattctctcaaattccttgaggcatagcaacttgagcttaccagtttagaaactggagatttgggctgggcgcggtggctcacgcctgtaatcccagcactttgggaggccaaggtgggcggatcacgagatcaggagatggagaccatcctggctaacactgtgaaaccccgtctctactaaaaatacaaaaaattagctgagcctggtggtgggcgcctgtagtcccagctactcaggaggctgaggcaggagaatggcgtgaacccgggaggcggagcttgcagtgagctgagatcgcaccactgcactccagcctgggtgacagagcgagactctgtctcaaaaaaaaaaaaaaacaaacaaaaaaaccggagatttggttaacaaaatagtcaaagtcactcttacagaagttttgttttattttttgttttttaaaatttttttaccattttgtagctg

SEQ ID NO: 154218 - DNA, 610 bp, Homo sapiens
cttgccagtgcatctgagaatctagggactttctgaaatagtacttccttgctatgaggactgaagttggattagaatccttttcaatgaagatcagatgtcctgagtagaattcttactattgggtcctgaatcttacattaaatattctctcaaattccttgaggcatagcaacttgagcttaccagtttagaaactggagatttgggctgggcgcggtggctcacgcctgtaatcccagcactttgggaggccaaggtgggcggatcacgagrtcaggagatggagaccatcctggctaacactgtgaaaccccgtctctactaaaaatacaaaaaattagctgagcctggtggtgggcgcctgtagtcccagctactcaggaggctgaggcaggagaatggcgtgaacccgggaggcggagcttgcagtgagctgagatcgcaccactgcactccagcctgggtgacagagcgagactctgtctcaaaaaaaaaaaaaaacaaacaaaaaaaccggagatttggttaacaaaatagtcaaagtcactcttacagaagttttgttttattttttgttttttaaaatttttttaccattttgtagctg

SEQ ID NO: 154219 - DNA, 610 bp, Homo sapiens
cttgccagtgcatctgagaatctagggactttctgaaatagtacttccttgctatgaggactgaagttggattagaatccttttcaatgaagatcagatgtcctgagtagaattcttactattgggtcctgaatcttacattaaatattctctcaaattccttgaggcatagcaacttgagcttaccagtttagaaactggagatttgggctgggcgcggtggctcacgcctgtaatcccagcactttgggaggccaaggtgggcggatcacgagatcaggagatggagaccatcctggctaacactgtgaaaccccrtctctactaaaaatacaaaaaattagctgagcctggtggtgggcgcctgtagtcccagctactcaggaggctgaggcaggagaatggcgtgaacccgggaggcggagcttgcagtgagctgagatcgcaccactgcactccagcctgggtgacagagcgagactctgtctcaaaaaaaaaaaaaaacaaacaaaaaaaccggagatttggttaacaaaatagtcaaagtcactcttacagaagttttgttttattttttgttttttaaaatttttttaccattttgtagctg

SEQ ID NO: 154220 - DNA, 610 bp, Homo sapiens
cttgccagtgcatctgagaatctagggactttctgaaatagtacttccttgctatgaggactgaagttggattagaatccttttcaatgaagatcagatgtcctgagtagaattcttactattgggtcctgaatcttacattaaatattctctcaaattccttgaggcatagcaacttgagcttaccagtttagaaactggagatttgggctgggcgcggtggctcacgcctgtaatcccagcactttgggaggccaaggtgggcggatcacgagatcaggagatggagaccatcctggctaacactgtgaaaccccgtctctactaaaaatacaaaaaattagctgagcctggtggtgggcgcctgtagtcccagctactcaggaggctgaggcaggagaatggcgtgaacccgggaggcggagcttgcagtgagctgagatcgcaccactgcactccagcctgggtgacagagcgagactctgtctcaaaaaaaaaaaaaaacaaacaaaaaaaccggagatttggttaacaaaatagtcaaagtcwctcttacagaagttttgttttattttttgttttttaaaatttttttaccattttgtagctg

SEQ ID NO: 154221 - DNA, 605 bp, Homo sapiens
ccaacaaaatcccctgtcttctccactagttattgtctgtccactaaataagaggtggtccgtcacttcttcagatgagcaactacaggcttttcaaaagataattgctaatcaacccctttgtgcctgggttttcttatttgtaaaaatagatactactacctaactccaaagtgtgtggtgaagacaaacaaytggggtgatgtatactaaagtaacgaaagtgttgaccacacactacgggctggttagtgttagattcccttgtttttccctcagtatcaaaaacagatctaatttaggtttacataaagacaaagtatgaagataaggtgacttacagttggtactactaacaaaatgggctaagatttgcattattgcatgaaaacaacaaaacatatcaataaataacaaaaagcttggaattcagacaacagatcaagtctgggcttgatctcaagctagtgttttgatgttgaaaaaatgttatttggtctttctaaccccatttccttatgtaaaattggggatgatgataaattcactgataataagagttaaatgagattcttgaggactcagaatggttctaacgtgtaagt

SEQ ID NO: 154222 - DNA, 602 bp, Homo sapiens
actgtgtcttatttctccttgtactcccagtgttcacaccatgctgcactcacagaagactcttcggtgatattttgtggacagagagaatgcctgtgagagtgggctgaagtgtgcgttgggctccagagaccttaaggaggggagaccaggtcctgagtaaagttgaaggggaggggctgagtcctgctagcgaggagtctcatcccctagggaagttccagggaccctcagaagtgcaaggggacggtgttagtgttagtccagtracacagcccagagcctgccttccacgtgggtttgacaggagcctcctaactgctcttctgcttccatttttgccccttcagtctattctcaacagggaagcctgaggcatccttaaccatgtcagatcatgtggctcctcagctcaaagcctcatctcagaggaaagctctggtcccttagaaatggcccaggtggtgacagacagactctaaggtgagcagactgttgctagatatctgggctcggaggactcgccactgctcaaaggcagtgaggattttcgcactagaagctggaggacagggatccttgttaggtaggagcagaaagct

SEQ ID NO: 154223 - DNA, 602 bp, Homo sapiens
actgtgtcttatttctccttgtactcccagtgttcacaccatgctgcactcacagaagactcttcggtgatattttgtggacagagagaatgcctgtgagagtgggctgaagtgtgcgttgggctccagagaccttaaggaggggagaccaggtcctgagtaaagttgaaggggaggggctgagtcctgctagcgaggagtctcatcccctagggaagttccagggaccctcagaagtgcaaggggacggtgttagtgttagtccagtgacacagcccagagcctgccttccacgtgggtttgacaggagcctcctaactgctcttctgcttccatttttgccccttcagtctattctcaacagggaagcctgaggcatccttaaccatgtcagatcatgtggctcctcagctcaaagcctcatctcagaggaaagctctggtcccttagaaatggcccaggtggtgacagacagactctaaggtgagcagactgttgctagatatctgggctyggaggactcgccactgctcaaaggcagtgaggattttcgcactagaagctggaggacagggatccttgttaggtaggagcagaaagct

SEQ ID NO: 154224 - DNA, 180 bp, Homo sapiens
ttgtccaatgggctcatgagccaagtggctgwtacggtttagatgtttgtctcctccaaatctcctattgaaatgtaaccctcagtgttagcggtggggcccagtgagaggtgtttgggtcatgggggcgagtccctcatgaatgggttagcaccacgtcctcgatgataagtgtgttct

SEQ ID NO: 154225 - DNA, 180 bp, Homo sapiens
ttgtccaatgggctcatgagccaagtggctgttayggtttagatgtttgtctcctccaaatctcctattgaaatgtaaccctcagtgttagcggtggggcccagtgagaggtgtttgggtcatgggggcgagtccctcatgaatgggttagcaccacgtcctcgatgataagtgtgttct

SEQ ID NO: 154226 - DNA, 180 bp, Homo sapiens
ttgtccaatgggctcatgagccaagtggctgttacggtttagatgtttgtctcctccaaatctcctattgaaatgtaaccctcagtgttagcggtggggcccagtgagaggtgtttggrtcatgggggcgagtccctcatgaatgggttagcaccacgtcctcgatgataagtgtgttct

SEQ ID NO: 154227 - DNA, 180 bp, Homo sapiens
ttgtccaatgggctcatgagccaagtggctgttacggtttagatgtttgtctcctccaaatctcctattgaaatgtaaccctcagtgttagcggtggggcccagtgagaggtgtttgggtcatgggggcgagtccctcatgaatgggttagcaccaygtcctcgatgataagtgtgttct

SEQ ID NO: 154228 - DNA, 665 bp, Homo sapiens
gatctcaccactatagggaaggccgttgcatgacttttttgtgtgtgcttaactgctaaacaggagaatcttttcctgagcaaccagctgggaaggatttaatttgacattctccctactaggacccyccaaagagactcattccctccaatagttcctacaagttctttctctttcctaaacttgctgttactaatttacccctcactcttcttcaaggcaaagcatctgcaaggttttcagtcctttccccctcccgtcctgtccccatcagtgttgaaatgtatgctacagttattatggttgtaatttgttatgccatgttgatcttcttgtgcttttcatatcagaacaatgcatttttaacattctgactttctttttctctcaattggtaactgactatatagaaaatttatatttatggatactatttcttttttaataagttcaagggaaaacattgataaaggaaaatttatcctttcaactttctttaggtgccagcattattttcatattaggaagcaggagaaagttaaggaactctgagcaatactagaatggttatatatatttaagtttgtattaaacctgttggaatggtaaagaaatttactgacatatttaaccatacaaaatagtgttgctaaaagactagtttt

SEQ ID NO: 154229 - DNA, 665 bp, Homo sapiens
gatctcaccactatagggaaggccgttgcatgacttttttgtgtgtgcttaactgctaaacaggagaatcttttcctgagcaaccagctgggaaggatttaatttgacattctccctactaggaccctccaaagagactcattccctccaatagttcctacaagttctttctctttcctaaacttgctgttactaatttacccctcactsttcttcaaggcaaagcatctgcaaggttttcagtcctttccccctcccgtcctgtccccatcagtgttgaaatgtatgctacagttattatggttgtaatttgttatgccatgttgatcttcttgtgcttttcatatcagaacaatgcatttttaacattctgactttctttttctctcaattggtaactgactatatagaaaatttatatttatggatactatttcttttttaataagttcaagggaaaacattgataaaggaaaatttatcctttcaactttctttaggtgccagcattattttcatattaggaagcaggagaaagttaaggaactctgagcaatactagaatggttatatatatttaagtttgtattaaacctgttggaatggtaaagaaatttactgacatatttaaccatacaaaatagtgttgctaaaagactagtttt

SEQ ID NO: 154230 - DNA, 615 bp, Homo sapiens
gtcgtggctaacaaagtctcacattctctgttggtcctgggggtaaaatttgaatgagactctcatgcctctgcctgcaaggagcttgttattcaatggatgagactggcaatgaaacaattaaaatatagcacaggaagttctatggaaggatggtggtggtgggggacatcacagatcacaaaaggaacaygtaggagggatatctaatccagtctaagatctgccaccatccctccccaggctggactgaggctctgaaagctgactgggagcagggagggataaggagcaaaggcagtgctgggagcctcctgtttgtagagaagtaaccattcctgcaattccctccacatcctcagcaaggacaagcctgctgctcccatgatgtcactttgccctttaaaaattgtgtacgggctgggcacggtggctcacgcctgtaatcccagcagcactttgggaggctgagtcagaaggattatttcagcccaggaggttgagactgcagtgagctgtgactgcgccactgcgctccagcctgagaaacaaagtgagaccctgtctcgaaaagcaaaatgcaagaaacaaataacaaagttgtgtgtgttccac

SEQ ID NO: 154231 - DNA, 454 bp, Homo sapiens
ggtacactatgcagccatattgagctttgctccccagtctgaaggtgtttctctgggttttggcagggccatggtctcctgtttcactcttgcacatatgacaactttccaggatggggacaggaggcctgattgcttagggacactctgcagatgtcaaatctcttcctaccactgctggatgccactcaatctctccttccacaatcttccttccctaagtctggcctgcacttggccagtcaaaatcacacagactctggggaacagttggcatgagatgttggggtcagcctagggctaaaggagatgcacatgatctgttcctgaaagacctagcagggaaggagctttgaaggcattaggtgtcccgagtccrgttacactggtgaagaagccccagggcacgtctgggtgcctgaaatcagcagagactgttttgggaggttggtca

SEQ ID NO: 154232 - DNA, 627 bp, Homo sapiens
aaaaagcaccccataaatactgtgcaagtttcattttaatttgatgccattgactttttatatcaataattataattcttctttgttatttttagtagctatatatcacattctagtttttagatgtcctgctattcttttaactaatctgttgatggagttgggcttattctaatttttcactattataaataacattgtgataaaaatgcttacccttaaggctaagtcttagaggctggatatctgggccaaaggatatcttaaatattgatacatactgtcagactgtactttagttttcaagtggaattatctatttttctgtgtgtgtgtgtgtgtgtgtgtgtgtattctcatgagtgcacatgtgttttccttagctaaacttgagtgcttactatatttcagatattagaccaagtgctttgcatacattgtccaatataatgattgtaactcttcataccaagcaaaccactgactcatacactattatagcasatactccaagaaaaataatccacatttcatttgtcaacccaagaaactaagtggtatttagaggcagaaaagtaggcatataaagtataagagaaaccataaaatcttggtttgagccttgtt

SEQ ID NO: 154233 - DNA, 547 bp, Homo sapiens
atgactgttgtgcccttaagaacaaaacaaaacttgcacagtttacctgtccaagtccccttcttttttattttaaaactactttattggccaggtgtggtggctcatatctgtaatcccagcactttgggaggctgaggcgggcagatcacgaggtcaggagatcgagaccatcctggctaacacagtgaaacccsgtttccactaaaaatacctagccgggcgtggtggcgggtgcctgtagtcccagctacttgggaggctgaggcaggagaatgacatgaacctgggagatggagcttgcagtgagccgagattgtgccactgcactccaacctgggcaacagagcaagactccatctcaaaaaacaacaacaacaacaacaacaacaacagcaaaactactttattgaggcatggttgacatgtaaggaactatatgtatatttaatgtatacaacttgatgagtttgggaataagtgtccatccataaaaccatctccctcctcaaggccacagacatacccatcacctcccaaggcttcc

SEQ ID NO: 154234 - DNA, 562 bp, Homo sapiens
cgtactgaccatgatccactcaggtgctgctgtggacaggaagtttttctttcctggatgaggatgtaataaaggccaggggttccccatatttctgtcaattatttctggcttctccacttgatactttgatcaactaaccaggtaataggcaccttgcaagggagaagaaggagaagagatctatcaggggagaaactattcctggaggggtacagccctctgtgtcttgctttctctgttccaaaaatattccttctccaccgttgctttgcctggtttggagcacactgggcacagggtgggtgatttcccccattaaacacctctgagagtcaattgtcatcttcagtgagacatgaagaaagarggcaaagaaacgaagcctgttttcatggtagttgctcctgagttgtgccagctcatgatgctcagggtggcatcaggcatggtgctccaagtggctgggctgaaggttatcagtgctgatactgagcgtgagtgggtggaaactaggcacagtcttccaaggcaatgcagtttgtatgcctacacatgcatg

SEQ ID NO: 154235 - DNA, 615 bp, Homo sapiens
ctctattttattgctatgattagctttaatatatagcttttaaaattgaatatgggctctatcccaaccgtcttcaaatttttactttcagaaatagtgcttggaaatttcaattactaatttaattctactatcaaatatgagatgctctgcacaatttatgtttttcttattgtctggaaattttatatcaattaggtatcatgccttttagtttcaactagattttatgtacctgtattatttttaaaaaatgaagcacaatttacatataacatcaaccatttttgaagtgcatttctatgagtttgaaaataagatyataaataatgtaccagcttccagaatcaagatgtagaacagtttcattaccttcaaacatattcccatactcctttatagtcaacctctccccatcttcagcccctatcaactactgatctgttttggccttttctagaatatcacagaaatgaaattatgcagtatacagccttttgagtcagcctctttcaattagcagaatgcatttgagtttcatacagggtgttcctttattttgctaaatattggtaaatagtattcctttgcatgtatataccacaatttgtctat

SEQ ID NO: 154236 - DNA, 556 bp, Homo sapiens
aatctgacaacgatttaggataaaaactctcagcaaactaggattagaggggaacttcttcaatttgataaacaatatctacaaaaaccctacagctgacatttaatggtgagagactgaatgctttctacctaaaatcagaaacaagtcgaagatatcttccctcatcactyctattcatctttgtactagagtcctacctaatgaaataagagaagaaaagaagataaagttatacatactgggcaggaagaaatacaactgtctttgctcccagatgacaagattgtttatatagaaattcctaaagaattgaaaacaaaacaaaaactcctggaactaatatgtgagtatagcaaggtcgtaggacataaggctaatatacaaaagtcatatgctgtcctgtacaccagcagtgaacaattgaagtttgaaattttaaaaatcaatttacgtgaagtcaaatgcttatgtataaatgtaactgaatacatacaagacctatatgtggaaaactataatattgatgaacaaaatcaaggaaaattaataattg

SEQ ID NO: 154237 - DNA, 542 bp, Homo sapiens
cttctattcatctttgtactagagtcctacctaatgaaataagagaagaaaagaagataaagttatacatactgggcaggaagaaatacaactgtctttgctcccagatgacaagattgtttatatagaaattcctaaagaattgaaaacaaaacaaaaactcctggaactaatatgtgagtatagcaaggtcgtaggacataaggctaatatacaaaagtcatatgctgtcctgtacaccagcagtgaacaattgaagtttgaaattttaaaaatcaatttaygtgaagtcaaatgcttatgtataaatgtaactgaatacatacaagacctatatgtggaaaactataatattgatgaacaaaatcaaggaaaattaataattggaaagatactctgtgtttatgagttgaaaacacaaatcaggggacaaattaaagagagggctgggactaaactctgttttcagatttttaaaccagaaaagaattttaatttgaggaactttattttgatgccttattaataggaacaattttaaa

SEQ ID NO: 154238 - DNA, 500 bp, Homo sapiens
agtagataaatcatccagctcytaggtcagacagctcagagacaaatgaacacagcaggtcgttgccactataatgatgcagtggctgttctgtttgccagttactggacaaacaatagatttccttccttctcttaactttaattccatttctcataagcctgaaattgcagttgctttttccaacttcttttccccccaccctgccctagttcatgtcagtgttaccttaactaacatttttatggcttgaaaatcaattcagcaccagatataaagacattctctgtctcaagcctttgttctcagcactagcctcacaccctccattggcccagtgctgtagcttcgaacctgcttcagggtctctagtctctgattcctttttttgtttgaacttttgttagatctgcattgatgtttatgagatagactttctcttgctctcctttcattgatttattttcagataacataatctttgtaattatgaagttgaa

SEQ ID NO: 154239 - DNA, 521 bp, Homo sapiens
cagacaagaaaaaatcacaaaggcactgggtcctggaagcgcccccaagtctcaggtctgttctaaacacaacagaarggaggtggacttccaccatggacccaggtctccttaccttgcctttccagtctctcaaaactgcactattaaggactcagagaaaccatatacaaacaccctcctatattatatgacattacgttagcatccagataaagccagccaaggtttattgactaaggaatgtcttcacatccttactgaacttcagcataggcatgactgcccttgataaatcatagggcaaaatatctctcagtatctgcattattggccataattgaaagccataagagttgcatttttcaaataagtgtaattaaaaggaagtggtgtctgttcagatgacaaagcagaagtgtagaagcagagacggtgcttgtctctgaaaaagtgttacaagctcagtgagaaatgtcttctgggaaaagaggaggaactggccccacatacaaaaatta

SEQ ID NO: 154240 - DNA, 521 bp, Homo sapiens
cagacaagaaaaaatcacaaaggcactgggtcctggaagcgcccccaagtctcaggtctgttctaaacacaacagaagggaggtggacttccaccatggacccaggtctccttaccttgcctttccagtctctcaaaactgcactattaaggactcagagaaaccatatacaaacaccctcctatattawatgacattacgttagcatccagataaagccagccaaggtttattgactaaggaatgtcttcacatccttactgaacttcagcataggcatgactgcccttgataaatcatagggcaaaatatctctcagtatctgcattattggccataattgaaagccataagagttgcatttttcaaataagtgtaattaaaaggaagtggtgtctgttcagatgacaaagcagaagtgtagaagcagagacggtgcttgtctctgaaaaagtgttacaagctcagtgagaaatgtcttctgggaaaagaggaggaactggccccacatacaaaaatta

SEQ ID NO: 154241 - DNA, 501 bp, Homo sapiens
gaattcaggagacaaaactattagtttaactggtgaggctaacttacccctaacagaaaaacaggtcatcagcttgccatgcataatggctgctcagggaataaagatttatgacacagaaataaggtcactttgaaatatgcttttagatttagattttggcaaggcttccaaatttaaraaaaagacaaggtggtagagagttcttatgaggcttatacaaggagatactcaaatggaattggggaaagccattctggggcaaaggtctgtagtcaatagatacctgaaacctaactctgtacttccctttagaggagggattctttctgggtctatggatgagattcagggaattggcgaagcctctgaaattttaagccaaatgtcacatgcatgcacatatgtgcattttgcctggtgaaagcattcagagcttttgtaaaatctcagaggccccttgattaagaaaatttaagagaaatactgtacttgatagag

SEQ ID NO: 154242 - DNA, 419 bp, Homo sapiens
ataaaacctctctggcatttcttacatttgcaaagagcttttaggatatayttgctaataaaatctcccattttaagtcttatgtttagcactaaactagacaagataaaaattgggaatataatacccctccccacaagtaatctttttatttttggctaatggagtgattcaaatattattaaatgatttgattaccttttcagagaaacttagttgttgcttgcaactacagcatccaggaaaggaggaaaaataatacttatataaaactggttgcgaatatatgcaagggaaaaaagtattaatgttttcttcccaatacatttataaggagaaatctggagtagatgaagatacaagtacaaggatgtttacattcaggcaagctaggatcacagagaaccctaggatcccaa

SEQ ID NO: 154243 - DNA, 438 bp, Homo sapiens
gtagggcaaccatatgttcgttctggtttgcaaggtacagctaaggttatgtctgctgtcccggtgcaattattagtgtcccctttcactctccgaagtgtctggatttggatgataaagcatatgatcaccctattaaagagaggaaattagccagaagacctatgtgtctatttcaaacggtgtggatccatccgcagccgcgctggtggcgctgcccagctgagcggtgtgcaccacctctgcctagccctaccccgccctgcccgggtctccaggamcgctggagcggaacccttggctcttgcgctgctctggtgccacctacaggttatgtgtgggaactgcttctccccaccccgctacccaccaccccgcctccccaccccgaccctggacagccttggacttgcccaaaagacattcagagcacgcgaa

SEQ ID NO: 154244 - DNA, 574 bp, Homo sapiens
acctaatagttgttaaataatgttttgtggcaactagctcaaaagcttccacctgagcctcactgctaaattttaatctccatttttaggggaaggctaagttggagagaggttcagagatgtgtgcagctattagtaaaataaataatttataaagatttagtgggatgacatcagccagaatggtgaaataggatctatgcctgaaatcctctcctccataaaatcaacaagaacagtggcaaaaatcatcaatatcgactttttcagaactctggaaattaaccaaaggcttgcaacaatttgtagagtgtttactaaagaaaaacagctggatttttgtaacaacagcaaggtttttggcattttaacttgccatagtcctatacttttctcccagccccgtgtcagcctagataaccacagtaatcacagtgaaaaatagtgacttagcaactggtagaggggacaaaacagaatttgacccactccaaagccagacaactgttattattcgacatgtytgatagttccttggaaaatctcactcatgaggcttattgttatttagtct

SEQ ID NO: 154245 - DNA, 505 bp, Homo sapiens
cagtatttaataatattttattttccaaattatggaaagcttcagaaatagaaatattcaatataattagtactctctaatcttttttctaggttgaaaaatctttgttttgctttaggttagattatgttgaaacacatctgtgtttcagatgtgttcagagctgaggtctcagctgaggctccactgaagcaggattcacttccaaaataacagagttgttgccaatattcarttcgtagcaaactactggaacaagaatctgttttcttgctgagtgaatttcttgccatgtggccctctccaaatgctggacataaaaaagtaggctgagcacaatggcgcacacctgtaatcccagcagtttgggaagccaaagtaggaggatcgcttgaggccaggagttcaaaactagcctgggcaatatagggagacccccatctctacaataaataaaaataaaagctttcatttacaatgatggtagaccaagaaatttgtccta

SEQ ID NO: 154246 - DNA, 505 bp, Homo sapiens
cagtatttaataatattttattttccaaattatggaaagcttcagaaatagaaatattcaatataattagtactctctaatcttttttctaggttgaaaaatctttgttttgctttaggttagattatgttgaaacacatctgtgtttcagatgtgttcagagctgaggtctcagctgaggctccactgaagcaggattcacttccaaaataacagagttgttgccaatattcagttcgtagcaaactactggaacaagaatctgttttcttgctgagtgaatttcttgccatgtggccctctccaaatgctggacataaaaaagtaggctgagcacaatggckcacacctgtaatcccagcagtttgggaagccaaagtaggaggatcgcttgaggccaggagttcaaaactagcctgggcaatatagggagacccccatctctacaataaataaaaataaaagctttcatttacaatgatggtagaccaagaaatttgtccta

SEQ ID NO: 154247 - DNA, 608 bp, Homo sapiens
ctggtctggcatctactccttgggctccagaagcctgtggtttccctgcttcccttctgctcttaacctccccacccacacacagcaccacagtgggcttctcaagctgcagcaccgacctgccggggctgccccctctctcttctccaggaccctccccaactttgctcttcttcaaatcaaagcctccccaggtccccctccaccaccaggtgcctgtggggttcctgccctggtcgacactcggttctctctggcagcctttttccctacgtcattccctagactgggaacgctgtagacagaaagggtggcaagtgtgtgggtgaccggcgtgaggacctgggcrgccctggaacctgggactgactggaggctctgatgtggaagttccttggcacctgttgctcagctctgggcttcccttgtttgcgcatcgtctcccagctcctcctctgggccttcaccctctcagcctggtcttgtcccgctgcctagcccggtgggagagagcagaccagagccgctgtcctgcttttctgccctctactgcccggtcctgcctcacgtcacacgcagaggcctgtggggagaccagggcttcctct

SEQ ID NO: 154248 - DNA, 608 bp, Homo sapiens
ctggtctggcatctactccttgggctccagaagcctgtggtttccctgcttcccttctgctcttaacctccccacccacacacagcaccacagtgggcttctcaagctgcagcaccgacctgccggggctgccccctctctcttctccaggaccctccccaactttgctcttcttcaaatcaaagcctccccaggtccccctccaccaccaggtgcctgtggggttcctgccctggtcgacactcggttctctctggcagcctttttccctacgtcattccctagactgggaacgctgtagacagaaagggtggcaagtgtgtgggtgaccggcgtgaggacctgggcagccctggaacctgggactgactggaggctctgatgtggaagttccttggcacctgttgctcagctctgggcttcycttgtttgcgcatcgtctcccagctcctcctctgggccttcaccctctcagcctggtcttgtcccgctgcctagcccggtgggagagagcagaccagagccgctgtcctgcttttctgccctctactgcccggtcctgcctcacgtcacacgcagaggcctgtggggagaccagggcttcctct

SEQ ID NO: 154249 - DNA, 602 bp, Homo sapiens
tcctgcttttctgccctctactgcccggtcctgcctcacgtcacacgcagaggcctgtggggagaccagggcttcctctggctcatccgggtttcttattggcccgggcttttcygtctcttgacttctgcttgatatagtaatacagcagtagagattatgcaggcttgggttttctttctcaccatctcagcctgaaggccctttagctcttggtcccaggaagcagcagtgctgcccatggctccccctgccaggctggagagtgagtctctgaagcaagatggggactcagtctgaggctttctctgccaagagacacgtgtgggaggtgtgagttccagagcaatgagcacacctgtgtgggaagtggtcgtgccccttgcagcagctgtcacgtctgtgtctggacaatgtggtagtgttgccctcacactgacacaaacatgttctgcttttccagaatgagtctgcaggtcttaaacgacaaaaatgtcagcaatgaaaaaaatacagaaaattgcgacttcctgttttcgccaccagaagttaccggaagatcgtctgttcttcgtgtgtcacagaaagaaaatgtgccaccc

SEQ ID NO: 154250 - DNA, 602 bp, Homo sapiens
tcctgcttttctgccctctactgcccggtcctgcctcacgtcacacgcagaggcctgtggggagaccagggcttcctctggctcatccgggtttcttattggcccgggcttttccgtytcttgacttctgcttgatatagtaatacagcagtagagattatgcaggcttgggttttctttctcaccatctcagcctgaaggccctttagctcttggtcccaggaagcagcagtgctgcccatggctccccctgccaggctggagagtgagtctctgaagcaagatggggactcagtctgaggctttctctgccaagagacacgtgtgggaggtgtgagttccagagcaatgagcacacctgtgtgggaagtggtcgtgccccttgcagcagctgtcacgtctgtgtctggacaatgtggtagtgttgccctcacactgacacaaacatgttctgcttttccagaatgagtctgcaggtcttaaacgacaaaaatgtcagcaatgaaaaaaatacagaaaattgcgacttcctgttttcgccaccagaagttaccggaagatcgtctgttcttcgtgtgtcacagaaagaaaatgtgccaccc

SEQ ID NO: 154251 - DNA, 520 bp, Homo sapiens
gatgatgccttttatggaaatgtagatggtccatttgacttttgtggttctttcaacacttgtggttcattcttctccatttacattggatcattgggtaaagtaagcaactagatgcactggtcagtagtttatccttcttgctggttgtcaaaatgccttttatactaactaaggttccatttttgtktctttggtcctgaaaagaatggccacagggacagtagtataatttatggagggaaataattgtcctgaaagggttaagacctaaaccttagggggtaagttagaaggataatcctaacaggtcagttgctgatgttttgattagatagtttcaaagtgaaaaggttagaaggtattcttacttgaggttttattttgtttaatgttaatcagcagagtctttgaggcttgtaatgcacttctgttaacaggcatcaagggaaattgctttttttgttgttggtgatttgggtgggctgaagattcattgactccatgaagaaggaagctt

SEQ ID NO: 154252 - DNA, 593 bp, Homo sapiens
gtgaatctatttcctgtctgccccctcccttttctcctctttcatgcctcacctacaagcaggtattctctcctctccacagctgttccaagttagagattggatcttgaaggcagccctcccctacctccatcaccagtaagacttccagattttcattaagacaagagctaagaaaagtagactagtttttagccaagccaccccaccctcttgccacagttataacctggatgtgaaatagggcctctagtttgagttttgccatctattaggatagaaagcacacagtttgcctgattcttaaaaggcgaaagatggcgcgagtagcataaactgacaaaataatccacggcgyaaagatactcctggatgatttggaattaaaagctcaaaaagcgtgggtgggccaggaacagccaacacacatgagctaactagtcctctgctagcaagtgccagcagctaagtctcagtgaaggcatagcaagttgcggggtctttagagcaggaagaattaagagaggcttagccgagaggacagacaggacagacgtgttgggatggaaattcctaaggctcctcggctctct

SEQ ID NO: 154253 - DNA, 594 bp, Homo sapiens
aacagatctctagaactttttcatcttgcaaaactgaaattgtactgattaaacaacyccccattttccccttccccagcccctgccaaccaccattctactttgagtctctataaatttaactattttagataccttatagtggaatcatagtgtatttatctttttgtgactggcttattttgcttagcataatatcctcagggttcatccatgttgtagcatatgtcagaatttccttccttttcaaggctgaataatgttccattgtatgtatataccacattttgtttatccagttatctgttggtgacccttgggttgcttctgccttttggctactatgaatgatactgctctgaacattgcttgtgcaagtatctagtagttagttcctttttattgctgagcagtattttattattgcataactgtaccacagtttatttattgttcatatttctttttcacttggattctcatagtctctgatctcacctgtcatcttgcctgcctctttctgtctcgtttttctctctgtgcttgtcccctcgctggcccctctcatcaccacagaaaaacatttaagctctg

SEQ ID NO: 154254 - DNA, 565 bp, Homo sapiens
aaaactgaaattgtactgattaaacaaccccccattttccccttccccagcccctgccaaccaccattctactttgagtctctataaatttaactattttagataccttatagtggaatcatagtgtatttatctttttgtgactggcttattttgcttagcataatatcctcagggttcatccatgttgtagcatatgtcagaatttccttccttttcaaggctgaataatgttscattgtatgtatataccacattttgtttatccagttatctgttggtgacccttgggttgcttctgccttttggctactatgaatgatactgctctgaacattgcttgtgcaagtatctagtagttagttcctttttattgctgagcagtattttattattgcataactgtaccacagtttatttattgttcatatttctttttcacttggattctcatagtctctgatctcacctgtcatcttgcctgcctctttctgtctcgtttttctctctgtgcttgtcccctcgctggcccctctcatcaccacagaaaaacatttaagctctg

SEQ ID NO: 154255 - DNA, 524 bp, Homo sapiens
gataaatctcagtagctgcaagaagccgggcagtgagcagggataaagaattcactgggcaaaggaacttagatccaagtcttcctggagggtatttagtgaagccacgagactcgccaaaggtatgatgagacaggtatcatgcagatatcatttcccaggcctgagcactggcagacagaggcaaaggcagagagcaagaggaaaacagggtgtgggggtccccatatttctcatctggactgtactgggaacaactcactaggttggtaaaagatttacagcycttgctcattttggtctctggggcagctctcacagatctaatggtgtggtgtggtccagcagagagaggccctgaggtttagcttttctgagtcccttcagttcacaagttgaataggtgtggagtagaaagtcagtagctctgctactggctcagccattgcagagtgaggtgactctcacagtagaggttaggagtagattgtcaagccaacagactggagagcaaatgtggtaga

SEQ ID NO: 154256 - DNA, 531 bp, Homo sapiens
tgactgaggtaaaacatagagcaaagctctgagacaaaatgacctcaaggttatttgctatacagaattggggtagatactagttcatgaaaagaaacaattccaagccagagaggacaagagtcaaggccatcctttgaatataacttccattcaatttaagaaacctggaaaacatccaagtatgatcttagggctatagtcatgaaatgctaaaagccactgctgggtcagaataaactgaaaagaagcataaatgtcacctgaatagaatataagaatgtatgtcatccaraggttagtatattaatggaattgaagatgtaaagtacaagaagtcattatggtactttattcaattatttttagaaaaatcggttactaaagccaaagcagaaaaagttgtatatgaattgtgttttgatttggttaagccagacttggatacatttattattcaataaggcaaacatttattgaatcctcctgtgtgccaggtacagtgggtataaaaataaataagacataata

SEQ ID NO: 154257 - DNA, 531 bp, Homo sapiens
tgactgaggtaaaacatagagcaaagctctgagacaaaatgacctcaaggttatttgctatacagaattggggtagatactagttcatgaaaagaaacaattccaagccagagaggacaagagtcaaggccatcctttgaatataacttccattcaatttaagaaacctggaaaacatccaagtatgatcttagggctatagtcatgaaatgctaaaagccactgctgggtcagaataaactgaaaagaagcataaatgtcacctgaatagaatataagaatgtatgtcatccagaggttagtatattaatggaattgaagatgtaaagtacaagaagtcattatggtactttattcaattatttttagaaaaatcggttactaaagccaaagcagaaaaagttgtatatgaattgtgttytgatttggttaagccagacttggatacatttattattcaataaggcaaacatttattgaatcctcctgtgtgccaggtacagtgggtataaaaataaataagacataata

SEQ ID NO: 154258 - DNA, 429 bp, Homo sapiens
gacaacagcagtcatataaatggtcccaggcatctgagatccattagttgctgcctttgctctttatactgtagctatgagattcctggcagctaggaaaatacagaaaagctattctgttattaaaatcatctttatattgaaaggaatcatatgttgtttacttggaaaaatagattttttcctccctgtgaaatgaaagggatttattattttaaatgatgttctttaaatgactctccattagagcaaaaactgtaatactaaatctttactcaacgatgacytaatttaatgctgggagaggatttcaagaagatgaaaactaacaagtttctcagagtcactctcagatactgcttcaagtaagcttttagcaggtactcactcacaatcagattagctcctaaattctcttgaagtgctgat

SEQ ID NO: 154259 - DNA, 178 bp, Homo sapiens
ctgaattctaccaaacatttaaagaacgaatgccaatgctactcaaactattccaaaaaacggaggaggaggagggagtacttccaaactcactctacaaggccagtgttaccstgataccaaaaccagacagaaacacatcaaaaaaggaaaactacaggccaatatgtctgatgag

SEQ ID NO: 154260 - DNA, 502 bp, Homo sapiens
ttcccctccccgcaacctctaatactttcaagatgttgcccattgtcttcccacatgacaagcctctgataagaaattaagaaatctgctgtaactcactgttcttctgtatgtcttttttcctctgacctcaagattttttcctttttcttyggtgctcagcagttggagtttgatgtgtctatttggttgtttgctgttgtagctgctttgttttctgtcctgcttgaggttctccaagcttcttggatctgcgattttatgtctttcattatttttttaaaagcctgagccattatctcttcaaatatttcttctgctccattccctctcctctttctgggactctcacattatgagttgaggttgatgtcatttataggattgtcatgttacacagttcttggatgctctggttttccctcacttttttttctctttgtgttccagtttggttaatttctactgacatcttcaatttctctctttcctcagttttcgt

SEQ ID NO: 154261 - DNA, 225 bp, Homo sapiens
aatatttcttctgctccattccctctcctctttctgggactctcacattatgagttgaggttgatgtcatttataggattgtcatgttacacagttcttggatgctctggttttccctcacttttttttctctttgtgttccagtttggttaatttctactgacatcttyaatttctctctttcctcagttttcgtgtctgctgatgggcccattgaaggaattc

SEQ ID NO: 154262 - DNA, 354 bp, Homo sapiens
cttctgcctcagcctcctgagtagctgggatttacaggcacccgccaccatgccgagctaattttttttggtatttttagtggagatggggttttgccatgttgggcaggctggtctagaactcctgacctcaggtgacccacctgcctcggcctaccgaagtgctgggattataggcatgagccaccatkcctggcctgtactgttttcatggtacaaacaatagaaaataaaatctgacagcatttaggggatatgcagaagatggtgtgagaaactgtgtaagagacctgggtgaaaaatggtttcaaatgccaatgaggaacggagtattcttatttgactttcaggatc

SEQ ID NO: 154263 - DNA, 527 bp, Homo sapiens
tttcagcttcactgtgtaacctccacctcccaggttcaagtgattctcttgcctcagcctccccagtagctgggattacaagcatgcaccaccacagtcggctactttttgtatttttagtagagacggagttttgccatgttggccaggctggtctcgaacccttgaccttaggtgatccacccacctcagcctttcaaagtgctaggattacaggggtgaagcaccgcgcccagcttgcctgtaatcttatacgcctttttaattcctcctttctcaaccgttttaagagttgactgcattcttcatttttcatatcccatctttgcattctaacttccatgsctctcccatcactgagacttctctcgctagtttatcagtgcctcctaattgttacgcacagtagacttcggattgcctctcagccacactttacactattatgtgtcttcttgacttttttgacattccttctcaattccctttcctttcctcctcttttgactgttctcatgctcctgtgc

SEQ ID NO: 154264 - DNA, 600 bp, Homo sapiens
ctgccctgtgtgctttctggtcagtcttatttgtccaaattggccgtagtgctcgttaacagtggatcttctttctagtatttccttggaacaaaggaaggaataagtaatgaatgaagagaaggaagaagcaggagggagggargaagctgagcacccactgtaacatccctgccctgggggctctgggaaatgggaggaagcgaaatggtatctgtttcttccctgctatgggaatgtccatgtcccaactagacctgaagcaagctccttgctggctcccttgccgccctcagcctgtcttctcccttcaaactggttgccagatgcatctctctacagccgccctctctcagaggggttctttgataggtggcttcagcatgagctcagagctgggtagaaatgcaggctctagagcggcaccccagacctgcagaaagatggctggcacgcagcttacctttcgagaagttctgctctctgggacaccaacagatgccgctgagtcctaagataaaacccctgagtgggtccctgtcctctccaggatgagggctgcaggccctctgctgaggactagggcccagccagcagccg

SEQ ID NO: 154265 - DNA, 354 bp, Homo sapiens
tctctgctcagccccttcagctccccaccgagggtctcagccactgctgtgtctctcatgtcatgaccacctctgcatccaagaacattcaagcttctgcatccatgcctggcctccttttgtgctctcatctttctccatgcaggtgctcttcagagtaattaaaataatgagcatcggctgggagcggtgactcatgcctataatcccagcactttgggatgccgaggcgggcagatcacctgaggtcaagagttcaagaccagcctggccaacatggtgaaaccccgtctctactaaaaatacaaaaattagctgggcrtggtggcagacacctgtaattccagttactct

SEQ ID NO: 154266 - DNA, 390 bp, Homo sapiens
catttaaaaatcagctagagaaaaagatttaatgtaacacggagcaaagataagaataatcacaaacttcatgtcataatttatgcaagctagaaaacaacagaattatatttttcaagtgtgaaaaaagaaaaaaawtacttgtcagtttggaactctatatgcagtaaaagtatccttcaaaaacaaagtcaacataaaactcttcagataaacaaaagctgagagaatgcattgccagcagaccggcactgttaaagttactaaaggaaatccttcagataggaagaaaatgacaccagatggaaacttcaatctgcaaagaaaaaaaagtgctagaaattataaatatgtgggtaaataaaaagttcttgtttctagtttttaaat

SEQ ID NO: 154267 - DNA, 392 bp, Homo sapiens
attgtgatacctaggtttctccttagataaaacagacataaaacatgtgctttacaagtctcagatgaccttcaagacatctaagtacagtatctgtggatttttaagtataattaacaacttgtttttctatttaaagaattttcattctgtttccttaacaggcaaaagccaatcagtcttgttctcaaatgctaatgtaagtaattaaaaataacattaattgaaatactgcagggctgttaggtttttagatggtgagttatttttttttccttcatcttaaccttgyggcaatactaatttacatgaccaattagggaagcaccctttgtatgatccatctctaggataaagagctgggctttaaaatccagcaaagaactgcagaa

SEQ ID NO: 154268 - DNA, 611 bp, Homo sapiens
gaacatcttcttgtgatcactggacttcaaaaccaagtctcttgtcaataactgctatttgtgtatatatacatatayatatatgtgcaataaatactgaataaattatattaaatgcctcttaaaagacattctcagaggagtcaatgccaccctctgttacaaaaggagaggctgtgttagcattgttctcaccactacaccacaaaaacacctcaagtacttatggacagctgtcacagtaattgcctagagttgagagagataggaaaattagtacagctgagaagaaagagcaatgacacctctttaaaatgctaccgtgtaagttttcatattgctggcaccaagttcaagcccaggtgggcaaacctcacccagactgtccatcctgacctaatgtacaagtctcgctagtctgctttttaaggacaaggaaggacactgcttggtgatatggccacaagctgttcagggaagagactttgctcagcacatttcagctactgagcagggctgggctcatttcagagagccacataaaataaataatcatgcaaaagcagattcgttctgatagggctctgacagctgctccgagaggtgggtcc

SEQ ID NO: 154269 - DNA, 684 bp, Homo sapiens
gaccccagagttatatccacagctgcattctagcctgcctgggtctgagctgctgcagtgtgccttagagcaacataccctatcttagtggctgaattacacgcatttatgccttggaaagtaaaactatgcttcaagtcccaggtataacaatagtttcacaagaccctgagcccaggaagctggccctgcagctgctctgagcacctgtgtcctggatcctggtactgatgtagcttcctatgagctgtgtcagactcaatacaaagagatcatcagctaataygcctcactgtgaggaaacaaaaacaaaaggatccctaaagcctttaccctaataatctatgtagctactgtcactgccacaagctcctacagcttagatcactgacactcccacagtcctaatgttgatcccaactgcagaagctgtatagagaccacaccactatgcccacatagaaccagagccactgcaccctacatgatcagcaccctcaggctcatcttcaggggagtcttcctctgtgaaagccactctgtaaagtttgaaagaggtgaccacaccaccagatgtacagacattaatacgaggacacaagaaaaataaaaatgtaaggaaacataacaccaccaaaagaataaaataattctctagtaactgacctcaaaaaatggaacttt

SEQ ID NO: 154270 - DNA, 595 bp, Homo sapiens
ttttttgactcctgctcacgtatatagacgtcttccagaaagatatgtctaactgacataaatgtcctatgtccttgacagttgtattttaaatcataaatttataaattgacattttggtttctatatcattgtcttgagagttgctagatatgagtctatttcaggagaaatggatattctctaagaatgttggcaaaactttagtttctgagcaaacaaagctgaggatcgtggctgtggccagtcacaataatgtcctccaaaggacattgtccaactgtctgggtggaccctccaggtatcatcccttttgctcatatccttcaaactaccagagccatacaggtcatcaggttaatttcattgcaaaggatcaacttccaytataatcagaagcatagaagagtcctttataggttgaaatattgtgatttcttcaaagtagccaaaagtcaaaacactgtatagaatgtaagagctgcaatgaccccgtttcacaaatcatgacaaaatggtctcaaatgacttgtttatggtgacatctttttggtctcgaattcttgggttaaatctaagtttcttttcattgcat

SEQ ID NO: 154271 - DNA, 543 bp, Homo sapiens
ttcatccctgctagataaatatttctccacttggaaatgccctcatttttccttcaagatttagctcaaatattaygttctccttggtatttaaaaaaattctttgacccaaccaacctcatagtgatcattcaactaaaatttcattatgcaagtaatatgagacagaactgagagacagggactcactatgcaaacatagaacctctatacttgtttgcttcactcatccagctgggtaggaatcttgatcatgttgttcttgtatttctctttggcaaagtaaaatgtctggcaagttatgatagtttgcatgaatatgttcttgggcatctcttagttgttgatttgttgtcaacttaaagtcaatattccattttaacaactagtctttgtacgcatcacttatgaaaatgcaaatgactatagacagaattttcatgaatgaaatttttcagatttctatagtagagaactctctgtattaattctagaagctgacaatatcttcttgctaccatctttcagatctgtccttgtaaa

SEQ ID NO: 154272 - DNA, 543 bp, Homo sapiens
ttcatccctgctagataaatatttctccacttggaaatgccctcatttttccttcaagatttagctcaaatattacgttctccttggtatttaaaaaaattctttgacccaaccaacctcatagtgatcattcaactaaaatttcattatgcaagtaatatgagacagaactgagagacagggactcactatgcaaacatagaacctctatacttgtttgcttcactcatccagctgggtaggaatcttgatcatgttgttcttgtatttctctttggcaaagtaaaatgtctggcaagttatgatagtttgcatgaatatgttcttgggcatctcttagttgttgatttgttgtcaacttaaagtcaatattccattttaacaactagtctttgtacgcatcacttatgaaaatgcaaatgactatagacagaattttcatgaatgaaatttttcagatytctatagtagagaactctctgtattaattctagaagctgacaatatcttcttgctaccatctttcagatctgtccttgtaaa

SEQ ID NO: 154273 - DNA, 388 bp, Homo sapiens
ggaaggtaagaggaactagctggaggaacaaacttagatgtcttcaacggcctaggcaggcaggtgaggtgaagccgatgagaaatgtactaataagaagataaggtatgaggcacactggagagagatgcttccccaaactccacccagctgatggcattcaggatgcatgcaccctccccccacccaccacccacacacacaatattaacaagccatgtttggcctatatggcaccagttcatgactattaagctatatataacttcacaggtctcttccaaggttagaattcccgcattctaagattgytttctgtactgtgccctaaggactatgtaatattttatgttaatgatcatgaacaactttccatttattttaaaaa

SEQ ID NO: 154274 - DNA, 491 bp, Homo sapiens
gaacaggcagcctacagagtgggagaacrtttttgcaatctacccatctgacgaaggtctgatatctagaatctacaaggaacttaaacaaatttacaagaaaaaaaaacaaccccatcaaaaagtgggcaagagacataaacagacacttttcaaaaaaaggcatttatgtagccaacaaacatgaaaaaaagctcaacatcactgatcattagagaaatgcaaatctaaacctttatatttaattaagaagtaagctgagctgtctaataatagacaatgacatttttttcaccaagaatgagaagaacaaatatgcttttctttaaaaaagctatcttgaattcaacttctaatttattgttttactcagttatattttggcgcgcgcgcgagagagctctttagaatttctcttacaaatctcagatcaataatgtgatacttattcaaattcataagcgttttagaaaagcctctcatgaattaga

SEQ ID NO: 154275 - DNA, 491 bp, Homo sapiens
gaacaggcagcctacagagtgggagaacgtttttgcaatctacccatctgacgaaggtctgatatctagaatctacaaggaacttaaacaaatttacaagaaaaaaaaacaaccccatcaaaaagtgggcaagagacataaacagacacttttcaaaaaaaggcatttatgtagccaacaaacatgaaaaaaagctcaamatcactgatcattagagaaatgcaaatctaaacctttatatttaattaagaagtaagctgagctgtctaataatagacaatgacatttttttcaccaagaatgagaagaacaaatatgcttttctttaaaaaagctatcttgaattcaacttctaatttattgttttactcagttatattttggcgcgcgcgcgagagagctctttagaatttctcttacaaatctcagatcaataatgtgatacttattcaaattcataagcgttttagaaaagcctctcatgaattaga

SEQ ID NO: 154276 - DNA, 569 bp, Homo sapiens
cttccagcctaatatagtgtcatatagtaaaaatatatagcttctcatgcgtaagctctcatgattttgtcaactgacatttagcagcttttacctcttggctgccaattcttcactttgcataatatatttttttcttacataaaaactgaaacatagggggattgtaagttggcgttggccctgtgagatgacagtatgatcggcatctgtgtaataaatgcagacttataatgtacaaagacagccacactttcacactctgacatttccacacacctcagacttacatgctgaaatgctgaacaattacagaagaaaaaaacaatgcatgatggaaaaaagtggtataagaatagataacactaagtagagttgccatattgtatactatttaatataatgacagttctattctttctgggragtacctaaaatactagttagtgaataaagcgatagatgcttttggaagaaatttatatttccaggcaatactataaaacatgttttaagtgatagagattggctaaacagcattttaagttgaaaattttcttatttttttc

SEQ ID NO: 154277 - DNA, 572 bp, Homo sapiens
tatttctcattaccgtgttaaatgggttcaacaaagacacattcatccattgccacctcctaacattaaaatgtttaatgctgcctacagcatcttagtcacttgctagatacagaggcagtgagtgactgaatatttcaatactgttgcattgtcttctttttctgcactctggttgtgtatttatttgtgaggaagacattctttcatagtacacataatatgcatcatagaagaactagatagttctgtaggatttgtagtgtgaggtatctacccatgtaattataacttttccttaatgttattcccattattcagaagatggcttttgttggactgaatcatatccactggtgcagtgaaactttatgttagctttcttaggctttccacacctcaatgcatgmctgatctgtaggcttagcttgttctattgtgctgcagtgtatttgctatcctgtggtttttcactgttttgatcattttgaagtataatgcttttctccctgctaggacatttctcataatgtttcatcatcaacacggtttcttacactcctagagaaaat

SEQ ID NO: 154278 - DNA, 470 bp, Homo sapiens
cctcaggactgagcgcagctcagtaatacagagtcaagatctgaggccagtgctggagtgacagagaagcccacataatcagagcactgaaaagggcaagacttacaggttcttgggctggggctggagcagggtgtgcctccttctgctgggctggtctagaaagagtatggcatattccctggtcacagcctgtgcctgagggggccccaccgcgagggaacgcctaagaacagcaacaaatacaagcatggtgctggtgttcaggcggggctttcccaacgcccaggggtggacctggtgagggggcctctcctgtcctaccacagaggatgcctgtgaacacaggaagtccaagagtcrtacagctgggaatcagcctactcttaagcaccatctgctggatctcaacccaaactacaacaccaaaaattgtcctgctaatacatatacctgtgaaacccagtgca

SEQ ID NO: 154279 - DNA, 520 bp, Homo sapiens
tctttgacatgctgatttcattttctttgagtaaacacccagtagtgggattgctggataacatagtagttaaattttaatatttttgaggctcctccttgctattttctataatggctgtactaatttatattcccatccacagtgtgcaaggcttccctttctctacawccttgccaacactttttttttgtctttatgataatagccattctaacaagcataaagtgataactcattgtgattttaatttgcatttcttggattagtgatgttgaacatttttttgacataccttttggccatttgtatgtcttcttctgagaatgtctattcaggaactttgttcatgtttttaattgggttgttatattactattgagttttttgaattccttatatattttggacattaattaactccttaacagatatgtgatttgcaaatatttcccccattccacagtctgtgtctccattttgttgttttctttgctgtgcagaagctttttagtctatg

SEQ ID NO: 154280 - DNA, 595 bp, Homo sapiens
tgtttttaattgggttgttatattactattgagttttttgaattccttatatattttggacattaattaactccttaacagatatgtgatttgcaaatatttcccccattccacagtctgtgtctccattttgttgttttctttgctgtgcagaagctttttagtctatgtaattccatttgtctattttttgcttttgttgcccctgcttttggcattatccaaaaaatcattgcccagatctatgtcatggagcctattccctgtgttttcttcaagtggttttacaggttccggtcttacatttaagtctttaatccattttgagttggttgtggtgtaagataagggtataatattattcttctgcatgtggatatttagttgttccaacaccatttattaaggagattgtctttttcctattttggcacctttgtcaaaaataaattggctgtaaaggaatgaatttatttctgtgctttttattckattccattggtttgtctgcttttatgccagtaccatgctgttttgattaaaatcacttcataaaatgctttgaaatcagggaatgtggtgtctccagccttgt

SEQ ID NO: 154281 - DNA, 515 bp, Homo sapiens
accactccaacttctacctgatgacaggggcatggttggggttgaagttgggcctatctagagaagaataaaaccactttggagttgtctgtgtttattaacaagtgcctggctaagatcccaatgtttgtatggcaaagacattagttctcgtattcacagctttagcacagcacttcagtcaacagcaaaccataagataaataataggcactaacattaggagtgaaagcactagcttccggagtccctatagaactgacctaaaatcttgaggcatccaggtgaatgacactgagaatcagtcagatatggggtcatcagtagagaatcaaaaacaatgaacaaagctagaatctaataagaggtatactatagttttttcctgaaacatattttctctctctggttccccattttaccaaagagaaatcatagyaggaccaatgtctttgaaaaataaattacagtctcattatttttggccagattatttgcataaagtacagcaagaa

SEQ ID NO: 154282 - DNA, 591 bp, Homo sapiens
ggtatactatagttttttcctgaaacatattttctctctctggttccccattttaccaaagagaaatcatagcaggaccaatgtctttgaaaaataaattacagtctcattatttttggccagattatttgcataaagtacagcaagaataatcacttgccatataggctcttttttctaaattggctttgctggaatattttcataaggtatctgattaggccttttaaaagcctcttgagcccagccaagaattcatctgtgcctgaaaatacctgtatgaatcaggtgaattcatctcctctcaagtttctaaaataacttggagctcctgggcctgtcagaaagtaacttagagctctgcaaagagactgcatagacaagaaatgaggccartttttccagttggttattattagctctatatgtcaacctcaattctttaaagcagtctactcatatctgaaaacatgccattccagtcaaagcctcgttgaacttatgcaaataatgatattgctataaatttagagtacttacaaatagttttcaaattctggataaatcaggtaaagagaaacttttcaatgt

SEQ ID NO: 154283 - DNA, 645 bp, Homo sapiens
acaaatagttttcaaattctggataaatcaggtaaagagaaacttttcaatgttgtttacaagagtatactttattcaattgttaaaaactctaaattgctcaaaacaaaaaaaagttttcttaactctgaaaagcaaaataaaatgaatcagtagtgtttcaggcaaaaatttataaagattatttcaatattctattcagtccatgcagtaaatgctttctctattcaatactcatgaacacattagctctccaagagtaactttgaagcttttttccctattccaatgacaccatttacaaagttatcagaaaccagcattcacgaacacccatgagagtcctatagctgatcacaaaactgccttttggaaagaattaaagtaaaataataatggtgaatgacaaaagatagccatggtcaaacacacaattgacaaggaaatctgttcatctttgtggcatacaacaatttaacataacaatcataattcttamtgataacatgcacccagtcatcagaattatgagtctcacacaattctggaatacataccaataacaaattcatgcaaataccactcaaagaaagccaaacattgtttcatacttgacaatgcttgctgtataattgtaacttacca

SEQ ID NO: 154284 - DNA, 513 bp, Homo sapiens
ccagaagcttcaaaggggaggaaacacaaccaacagtggggccaaccagaacctgcaaaagggaccaaccagatcaggagaaggaagggaatgttggttacacttagaatactcactagaccarttgaacccgttctctactgtaagcgggcacaaccactatgggttgacagtgccttacaagcagagacagccctagagatggccctctgttcaagagaaatgagcagccaccaggactctgtcgaagtctgctgtaccagtgagagactgctgaactgccagcaggtgccttgcaaggggaatactgggtgagttctcaaatttgtaatcacttgacaggttcttcttgcttactacacaggtaaaccaactcactgagacagcggtatttcagtagagaaagagtttaatgtaagtctagccacttggaaggacaggagtttattactcaaatcagcctccctgagaactcagaagcaaaggtttttatggataatttggtaagcaggg

SEQ ID NO: 154285 - DNA, 493 bp, Homo sapiens
ccaatttatcaatcttttccttcatggttaatgctttgggtgtcctgtctaagaaatctttcactttccgcaaggtcatgaagacattccctgatgtgatcttctagaagctttattattttgtcttatatgtttacatctacaatccacctggactttatttttaagtatgatgtgaggccaggattaggtttcatttttttccatttagatatttagttgattcaggataatttattagkgaaaatattttcccactgcttttcaatgtcacattgtcataagtcatgtgcctatacattgggggtctctttctggtctctactctgttttattcatcttaagtctaagtgtccatacattgggggtctctttctcatttctactctgttttactgatcttctatccatgagtcaaaaccataatatattactttccatttaaaacaagtcttgaaatttgatagagtaatcctccaacttaattcttctt

SEQ ID NO: 154286 - DNA, 528 bp, Homo sapiens
agatgttcacacattcatttatgcaaaggtatattaagcacttactttttgccagactagtattcaacagggcaatgggcatacaggtgaataaaacacccgcccaactaacacttctgcctttttcaggttagtgtgtctctgtcagactcttctctttcccttatcatcttccctcatcctttgcagacaccagwtgacccaatgccacaaaaagttaattaaatatcacctctctatgaatgttttctgaccttctaaatagattccttttctgaacaatgcctctgacccaaacaacaatcctgtgcatgtgcctttagcaagtttttgtacttcttgttattttgtctgctttccccctggactgtgaattacatgaaacagaatatctgcattagtcgttattgtaaccccagagatagttaattgcttgacacatagtgcttgaaaaaggtaaatagatttaataaatatctgatattatgactatgtttctggtgaataaaagagcttaacaaaaaacat

SEQ ID NO: 154287 - DNA, 528 bp, Homo sapiens
agatgttcacacattcatttatgcaaaggtatattaagcacttactttttgccagactagtattcaacagggcaatgggcatacaggtgaataaaacacccgcccaactaacacttctgcctttttcaggttagtgtgtctctgtcagactcttctctttcccttatcatcttccctcatcctttgcagacaccagatgacccaatgccacaaaaagttaattaaatatcacctctctatgaatgttttctgaccttctaaatagattccttttctgaacaatgcctctgacccaaacaacaatcctgtgcatgtkcctttagcaagtttttgtacttcttgttattttgtctgctttccccctggactgtgaattacatgaaacagaatatctgcattagtcgttattgtaaccccagagatagttaattgcttgacacatagtgcttgaaaaaggtaaatagatttaataaatatctgatattatgactatgtttctggtgaataaaagagcttaacaaaaaacat

SEQ ID NO: 154288 - DNA, 468 bp, Homo sapiens
tctaaaatttatatgaatatgtggaagaccaagaatgctaaaacaattttaggaaagaagtacaaagttaaagaacttacactacttcatttgaagactatggtaatcaacattgtatggtagtgytgcaagtgcaggcaacagaaaaaaatggagagtccaaaagtagacccacatatatagccactgatttttgataaagtgctaaggtatctcagtgacagtattttcaacaaatgttgatagaaaaaatgaatgtccatatgggaaaaataaacctcaaaccttatctcatgtcacacacacacacacacacacacacacacacaaattcagaatgaatcatagatatgtatataaaagataaagctatacaaattccagacaaaaataagaaataaaatcttcaataccttgaaatgagcaaagatttcctagatataaaacaaaaagcggtggtcggagcca

SEQ ID NO: 154289 - DNA, 283 bp, Homo sapiens
ccacatgatccagcaatcccacttctggrtatatatccaaagaatctagatcagcatctcgaagagatatctgcactcaatgttcattgcagcattattcacaataatcaagacatggaaacaatttaaaacctgtaggacattatgctaaataaagtaaggctgtcatgatctcacctacatgaggactctaaaatagttaaagtcatagaaacagaggaaaatggtggttgccagtgactggggagagagagaaatggagagatgctctttcacaggtacg

SEQ ID NO: 154290 - DNA, 283 bp, Homo sapiens
ccacatgatccagcaatcccacttctggatatatatccaaagaatctagatcagcatctcgaagagatatctgcactcaatgttcattgcagcattattcacaataatcaagacatggaaacaatttaaaacctgtaggacattatgctaaataaagtaaggctgtcatgatctcacctacatgaggactctawaatagttaaagtcatagaaacagaggaaaatggtggttgccagtgactggggagagagagaaatggagagatgctctttcacaggtacg

SEQ ID NO: 154291 - DNA, 544 bp, Homo sapiens
gaaatccaagtttttgcttcttactgtgaatgttaattatatctctaagaaagctatcaaaccactctctcactgcctttaaaagccccatagggcagcctctaaattgggggccgggaaggtgtgggcttcagtgatgacagaggaaagctgtgtcttgctcctggtctgacaggcccaatgcttacatcaggccctctgccttggtgggtgcttyattctttatctgctggcttttggcattaggttctcaaaggtttttcagaggtacgagggttgtggttgttactagatgtctcaaggtagctgagagggcttggggatggatgaagggtacaattaagagaatgggaacggtatgccagataagaaacatgggtaagtgatttatttttctcctaggcacataggtatctgaaaaggaacatgactaaataatcagaggaatctaatgttttctccttgcaccctttttcctacaaacctggttgaggaagtcttttcctcctaaattagagcaaagtcttcttgcatacatagcaaa

SEQ ID NO: 154292 - DNA, 557 bp, Homo sapiens
cttaatttttggcctcccctttttctttattagcacatgaaggcataggttgtgatagcttaagaattactctaaccccagtgtctagcacggtgtctgcatgcaatataactttgataaatgggtttatgacagtatgtagatttttgtatagacccaaatattcatgtggagatttattatctatctgtttttgatgagtcctgtcaaatagtgggagagtggagtacagaatttgacatcaggcagacagctttgctacttcaaactayctggcagtttacttaactctgccaaactccatgtataagaatgggaataatgatacctacctttttaggtgctatcactaccccattaaaaaatctggaaatagatgcataaagaggttagaacatctagtgagtggcagaggcaaaattagaaaatctgattggaaatccttcatctctaggcagtgctatacccaagggtgctactttacaggcaattgtatatactgttcatctgctttttctcctctctcacaatttggaaatagcagataagaaaggata

SEQ ID NO: 154293 - DNA, 616 bp, Homo sapiens
agcaaattcatttatatgtgaatttaaaatattttagaggtaaaattttaaataagtaaaagaaattcaatatgcaattttctacccgtataagagaaaaaaagttgatcatctttcacaatatacataaaattgagttgaaaattatttaagctttaaaagagattttgtaaatggtaaaaatattaaaattttaaagactatatttataatctttgagtgagtaagstttgcttacataaaaaaatacataaaaattctactctctaagaaattgaaatttctacacagcaaaaaaataaaaaattataaaatttttaaaatgccatagggttaaaaattaattgacaaacttggaaaaatatctggcacacatcaaataaaatagacaaaaattaattagtttaatatatatagaattcctagaaatcactgaaaaatagattaataatatggtaggaaaatgagcaaagcatttgaaaagactactcatatcgaggaaagatactcagccttggaaattagggaggtgcaaaatgatgtacttttttatgcatcatattggcaaaccctttaaagttcgaaaatatcaggtgggaaatactggaaatgggag

SEQ ID NO: 154294 - DNA, 573 bp, Homo sapiens
agttgacttgggttttataagtggaacatttatcaaaatctgcttttctttttgatgaaagattcacataatagcagcaggttcatattctttaaatgaagccaagtttttaggaacattttttagatttctaagaaaaactttcaacttaaattttgttgaaaccagattttgtcatcatagtccccatctgattctgaaaagtgtttgatccatatgtcaccgtcagaggaatttgcttctgcagatatgcaatttgagtttgtttccatgaggaagactttgtttggtgatgttatgaacatgatatgctttttgggaaaaaaatgactgtcatcagatatgctaaaaaatatttcatatacatgttctcggcctcatatcaacactatgtactcttttagtcttgtttttcacaatagggaaagtgagcttgagcagctaggtaattggcccctagctacmtagctagtaaatgttagaacaagatttgaacccaagcagtgtattgcattagggcacgtcctaactgctgtgctatgagtacaagcccttggcttgagacttaaaagg

SEQ ID NO: 154295 - DNA, 611 bp, Homo sapiens
ttgcactaccagatactgcttctcttgagaagaacagtctagatttatggatatttaagcaaataacattcgtgacagtatgttgtaattaccatagcagtaagaccatgtgccacggaggaataaatgttagagagtggccttgcatggtgtctgatgcctgtaatcccagcattttgggaggctaaggygggtggagcacctgaggtcagaagttaagagaccagcctggccaatatggtgaaaacccgtctctaccaaaaaatacaaaaattagccagacgtggtggcatgtggctgtaatcccagctactcaggaggctgaggcaggagaatccttaaactcggggggcagagcttgcagtgagccaagatcacactactgcactccagcctgggcaagaaaggtcagagagccagtttcacttaggaaagatgacattgagctgggcttgaggcagaacaaaagtattttaagcaaagagaagagcatgcaaaaagtcctgcaggcatgaaaaagcttagtgtgttcgaggaatggagagatgcctgggatagctggagagagagtgtagctatcagggaagatgtgaagagaggggagatagatg

SEQ ID NO: 154296 - DNA, 611 bp, Homo sapiens
ttgcactaccagatactgcttctcttgagaagaacagtctagatttatggatatttaagcaaataacattcgtgacagtatgttgtaattaccatagcagtaagaccatgtgccacggaggaataaatgttagagagtggccttgcatggtgtctgatgcctgtaatcccagcattttgggaggctaaggcgggtggagcacctgaggtcagaagttaagagaccagcctggccaatatggtgaaamcccgtctctaccaaaaaatacaaaaattagccagacgtggtggcatgtggctgtaatcccagctactcaggaggctgaggcaggagaatccttaaactcggggggcagagcttgcagtgagccaagatcacactactgcactccagcctgggcaagaaaggtcagagagccagtttcacttaggaaagatgacattgagctgggcttgaggcagaacaaaagtattttaagcaaagagaagagcatgcaaaaagtcctgcaggcatgaaaaagcttagtgtgttcgaggaatggagagatgcctgggatagctggagagagagtgtagctatcagggaagatgtgaagagaggggagatagatg

SEQ ID NO: 154297 - DNA, 611 bp, Homo sapiens
ttgcactaccagatactgcttctcttgagaagaacagtctagatttatggatatttaagcaaataacattcgtgacagtatgttgtaattaccatagcagtaagaccatgtgccacggaggaataaatgttagagagtggccttgcatggtgtctgatgcctgtaatcccagcattttgggaggctaaggcgggtggagcacctgaggtcagaagttaagagaccagcctggccaatatggtgaaaacccgtctctaccaaaaaatacaaaaattagccagacgtggtggcatgtgsctgtaatcccagctactcaggaggctgaggcaggagaatccttaaactcggggggcagagcttgcagtgagccaagatcacactactgcactccagcctgggcaagaaaggtcagagagccagtttcacttaggaaagatgacattgagctgggcttgaggcagaacaaaagtattttaagcaaagagaagagcatgcaaaaagtcctgcaggcatgaaaaagcttagtgtgttcgaggaatggagagatgcctgggatagctggagagagagtgtagctatcagggaagatgtgaagagaggggagatagatg

SEQ ID NO: 154298 - DNA, 549 bp, Homo sapiens
cattgatagccttatggtaattcccttgtatgtgatgaattgcttttctcttgctgctttcaaaattatacctttgtccttggcattgtacaatttgattgcaatgctgatatgcagcattatggaaagattgcaataggatgtgatatgtcagcatgcctgttgcagtcacggctgtagcacgcaaggggcatgtgtctgtggagcaaatggctggagcacagggctatttgttgtggcagtggctctgatgtttatagcacttgtgtgctctctgaagaagtggcaccagtattttaggtgcagttgctcrtggagagactgtgcctctgagatcccagcatgcaagtggttgtgggagggacaagggtgtagtcgctttgtcccatagtgatgcagcatcagttccttttctcaaaagatgcaggggtacttccctttctagaatgtttgggacagctatggctcttgatgtctttaatagcaaagattgcttgggtgttctgtagagcaggctgttagggcatccacccagtggctgctactaat

SEQ ID NO: 154299 - DNA, 612 bp, Homo sapiens
tataaattgcacagtcttgggtatgtctttgccagcagtgtgaaaacagactaatacaagtgacatgattttatatattttaacatgattgttttgaaagttgctttgggaataaattgtgtggaacaatgatagaattaaggagataggttaaaagagaaatgaaataaagttagttaaaatagaagtgaggagatgtggtgaagtcctggatatatgttgacggtagggtttcctgatrtcatagtcatgtggtgtgaaaggaaaacaggaatgaaggatgatccaaagtgtttgacctagaatacagaaaactgtgagatgaactgtttgtggggaggtggttggaaatcaggagttcaattttggatctactctgagattatgtctcagagactcaagcagacatattcagctggcataacatacactggtttttagaggagcaagctaaaatagtaatataaatatgaccagcataaagatactacttaaagcccttaaccttatgaaattagcatagaaatgagtatgtatagaaagaggctcaaatactggatactgacacataagattgagagaaaaggtaaaagcaaaagatgcccactgatc

SEQ ID NO: 154300 - DNA, 419 bp, Homo sapiens
taacttgtataggatatttaaatgtttttagttatctttctaattttcttgattaatagtatcccataaatagcatagataatctcaatactccccatagagtgtaagtttcctgatgctaaaattctttataactattcattaattacaggaagtcgtgttctatgtgttgactaaacagcaattatttggaggtcaggttcattttccttcacttgcttatcctctaaatacaacatatacctgaactcatgaaatatgcttacaatggaccatagctgaaatattccatttgtgagttatgtttgtttctctatatgtcatgcactccatttctggagagagacagtgagaggaagagaggcagaaagagaggaaggcaagaggacatrgtaggtacacaatatatagtatgattt

SEQ ID NO: 154301 - DNA, 583 bp, Homo sapiens
acagaattctatatgctccatcaactctggaaagcagaaggatgtgactaagagcacaaaaaataatgtcccattcaatatatagttactggctgcattatttactgttttattttattttgttttttaattgtggtaatggcacttaatgagaactaccttttaaacaatttttaagtgtccgatacagtatcattaactgtaggcacagtgttgtacagcctttagaacttattcrtcttgcacatctaaatctttatacacattaaacagcaacaactcatttccctctcactcagcccctggaaaaccaccatttattctattcttgacactgtgagtttgacattttcagattcctcatataagtaagatcatgcagtatttgttctgttactggcttattttacattacataatgtctttgaggttcatgcagcagtgaacataggagtgcaggtatctctatgagatcccgattataattctattggatgtggacaacaggtatataaaaagataatcaacaacactagtcatcagaagaatataaatccaaaccacaaggagatatcacctcata

SEQ ID NO: 154302 - DNA, 582 bp, Homo sapiens
ctctgtgcctcctctattcattctctcaccaaatgagcttctaagcaccagtctccgtctgccatcagattagctgctttaggtgcacagttctcttctcaccccgtacttgctttcttcccctgcctttctatctcagtcttcctctgcctacttttgccacagtctcattgctcgctgacttggaggctagggctggtctgcacttagcctctcccttcctgactaatttctagmcccagtgggcagccctgtcttagccctggctgacctccacagtgtatcatcatgttcctgctaccttcctgacccctatgctcagtctggaattgttgtaggaggtaacaagggcactcagaagagtcagttggataccagtgtcttggtgtttactgtttcacgtcttcattcctgagttggggatggggtgtgacagagaaggggtggtctagctagaatgcaaactaagaacttctccatctgctttactttttcttctttgacaaactgttaccttttttactccaaaatgaccaagaagttgtgttaaccgtttgtggctcctcaagtcttaccatccag

SEQ ID NO: 154303 - DNA, 431 bp, Homo sapiens
gttttcttcttcatcagtttctagggcttatactttcttgtggaacaaagaacatggtttaaatctacatctctgttaaggattttaattttagctaaatctgagtaaaamcacaatttcaaaataaggaactttatgtcttcaagtttactctctaaattattaataataaaacttcatatcaaaaatataactataataccatctttacacagttctattttattttatgactttataagaacttattctataaaagaaaatgatccatttgtactatacaataaatagcctgctgataatttaatgagttatcaaacttttttaataggaaaaaactcaggctgtggaactctggcagactgtttctcaggagttggacagactacacaagctttaccaggaacatatgactgaggcccagattcatg

SEQ ID NO: 154304 - DNA, 625 bp, Homo sapiens
ccagccgggccatgacagtgcccaggcgtggcccccactttgctccaaggtcagagccagtgccaatagcagggagaagccagacagcaggagcaggtacttctaagcctgcaagagtgggggtgccttccagggcccccaagagtgcagagatgcctgagtctttagccacagtctggatggctgcagctgtgccagtggggcagggcttctgcctgctctatggagcaggaggcccaagtctgcagctgtggtttgggcagctgcaactatacccaggaggrtggggttcctgcctgctcccaggccccaagagcacaaggatgcccaggtctgcagccatggcttgggcagcggcagcaacacccagggagttccctccccaactcagaagggtggggctcccgcttatcaccagcttctgccagctcccaccggctccatggagcatgcagctctgactgtgtctctctgctgcagctgaagtaatggcagtggttgctccagatggcctgccactgccatcagtgagaagctcgctgggctcagtggacactggagggcccagcagtaggtgtggccagaggagagaaactggcaataccagtggtatttgaggacttag

SEQ ID NO: 154305 - DNA, 472 bp, Homo sapiens
  misc_feature (1)...(472): n = A,T,C or G
attgcgttgccttttatgttgtttgtgccccatcagcagtttctctttgcagtggaaaaacatcccaccttcagggaggcctctcagctcaggggtctttagtgacctcaatgaggtagaaaaagtgcttatatctctgcagaggaaagggagcatctcagaggtaagaagaaagaagcccagcagaggccggaagtgcagaggcacagactcaaagggatggatgcaccagtgccacacgacattagaggctcttgtctcccatgcaccccaccccacanacttcacctccatcccccctaaatcatgcctcctcacagcccctcaggtcacgcctctgcacaaacccctcaaggcctctccattgmcctcagaaaaagtcaaaactcttcagtatggttgaagaggggtggtcagcccacccctccctcacctgctacaccccaagcatgctaagctacttgggcttccc

SEQ ID NO: 154306 - DNA, 592 bp, Homo sapiens
tgaatccttcttagaaagtgagtggtcagaactgctagacactgcaaaattactttcatcaaaacataatagaaccctgtgttagatgcttcccatgccttttcttgtttaaatctcactaggaggaagtccagttagttcttcattttgtatttgaggaagccagtgttcaggtagatctataagcttgcccagcctcagggtgggagctgcacccaggacttgtccgcataactgacaacctgaaccactgtgctgaatgctggctgccattgatatgttaaggtggaggaaggcttcagctcacctgtgccacctgaactgagatataaactgcracagtacgagacagcctgtgaatggccagaggtaagaccaaggcctcctcaggcgcagaagaaagtctaaagggaagcttccgtaacacagtgggtatagtagaagaagaatagacttggagttcaaagaaactagggttcaaatccctgcccctccacttagaagcaagtatcaaaactgtggcaataacaatgccttaacctttatttcctcatctgtttaaaatgaaacaatgtttaaaaatgaattatcc

SEQ ID NO: 154307 - DNA, 623 bp, Homo sapiens
gagtcagcatagaggaagcagagcgaagatacagagagaagataaaccacaacctggtggtattgctgaagcattggagcaagcatatttgaagtcggatggattcctaggtacttgagttgtatacagcagtacattcccttttgtagtcaagtcaatttcaatccgttttttaaaaaaatttacaccaaaagaatactaattaataaaagataatagtacagtcaagaacttaagaaagaatcttaaagattctttgtgttggttctgatgcaagtttataggcaattttctgggcctgttcagccatcaataaaatgaataccttcatgtccattatcagaggaaatccacacggcttctccaaagatgctttcaaggacacttctaaaacattaatatagacatatgaatgacagaaattaatcctgytgctccttgttgattttgaagatgcacatggaggcaacagtgggctgactctcaagacctggacaataaaactgctgtacccttaaagcataccggggaagccaacacataatatgctcatagaaaatttatgttaaatgaacaaatgaatgactaatttatcctagttataccatttttccaaacctaga

SEQ ID NO: 154308 - DNA, 578 bp, Homo sapiens
tcttcaatcacacagtagcactggaacctctctgaacctattctggtttgggggctgcctgattcacaaatcattctttgctcagttaaactctgttaaatttagtgtgtctaaggttttaacaatgctatggtggaagaacccaagccaggcagctctgggtgtgagctcagcagcccagcatggttgattagctctagagtcagactccctggctctgccacagaagagttatataacctgggcaatttacttagctgctctttccctccaattcttactcaacaaaatggggaaaatggttaggggtacaaagaagatgcctttctcttcatctctggtttccaagaaagagattgtccctaaacactcctggctacttggccccatcatctcccccagtcagagatggattgagttacctcrttggtgaatggcagctgttgatacacatttcttgtatgtgggtggagcttatttatcaaagtccaaagcacagaagtttctctctttggaccctacctcacctggataagtgaaagggcatcatcatgcatatgtctgctctgtagacctca

SEQ ID NO: 154309 - DNA, 609 bp, Homo sapiens
gcttgataaaggatatctacaaaaatgtacaactaacaccatacttaatggcttaagaatgaatgtttttcctttaagattgggaataaggcaagaacattcactcacaccagtctattcaacatagtgctgaaagtttcagcttgtgcaacaaagtaataaaacaaagtgaaaagcatacagatcagaaaataaattgtttctatttgccaatggcataattgtctctataatataattatgctgaggaatctatagtctgctggaacaaataatgaattcrttaagttcatagaatgcaagatcaatatacaaaagtcaatagtatttctatatactagcaatgaaatgtggacaccataattaaaaatacaataccatttacagttgctcagaaaataaaattctttggtgtcaatctcacaaaacatgtatagaatatttatgttgaaaactacagcacattgataagagaaatttaaaaaagaagtaaatttatggagatacataccatattcatggattggaagattccatgtagtaaatgcatcaattcacttcaagttgatatgcatgtttaatacaattcctatttttagctgtttttag

SEQ ID NO: 154310 - DNA, 577 bp, Homo sapiens
tgtgccctttaaaatggaaaccttctcagcccaacatttcctccactatttattctctgcttaatgtctctttcctctctctctcctctggaatttatgttttaaagatgttgacattttatttctacacttgtatttagtagctacattgttatgttttctgtctctgtatttctttattttgggggtggggcgcatgctctgctggacagatccttagcctggtctttcagatcagtaacttgttctttgcagacttttgtgtttgtcctagcaaatgtgtccattgttctttataattgcttgtctctgcttcatgttacaaacacttttaaaaaaattatttggagartgttttcaatacctgctttctcgggttcattacctttggcccacttgctctagatcctctactctgtttttattttgttgaagttgtactcctcacatctcatgatatttcccttgtaaactcatagtcctctggtgaaaatttgaatgggggaaaagcaaaaacttgcctttaactacattctcctcagataactgtgtctctcagggctgtacctgtactttt

SEQ ID NO: 154311 - DNA, 569 bp, Homo sapiens
gagagggtggttagtggatggaaaattactaagaggagatatcaagggtaggaggattcttgctaaactaaaaacaggattcttgctgaagacagcccagggtgatgagtggggagtgaggaatgtgatcaaatatcacgggtggaggcttcccactaaactgacttagcaggattcttgctgcagctgggctatacrattccagcaaggatgggggcaaaggttgacacctagctgagcaggggactaagagcagcctgactaaagtttggtgaaggagagagtctgtcacatttcacccatcaaaacctacattccagtgatgtcattcctcctctgaactccttcctcttcagaaccttggcttatgacagtctctcagtctggtccctgttgctcctcatctcttagttcggatgttcctccaggtgtcaggatagacgcacctttcccaggatttttttctctgatgccttcaagtctcagccagcagcctctcacaagcacttctcacatgtggttgaagtgatccagttcacgaaactacacattccttaaagtcagaggcc

SEQ ID NO: 154312 - DNA, 569 bp, Homo sapiens
gagagggtggttagtggatggaaaattactaagaggagatatcaagggtaggaggattcttgctaaactaaaaacaggattcttgctgaagacagcccagggtgatgagtggggagtgaggaatgtgatcaaatatcacgggtggaggcttcccactaaactgacttagcaggattcttgctgcagctgggctatacaattccagcaaggaygggggcaaaggttgacacctagctgagcaggggactaagagcagcctgactaaagtttggtgaaggagagagtctgtcacatttcacccatcaaaacctacattccagtgatgtcattcctcctctgaactccttcctcttcagaaccttggcttatgacagtctctcagtctggtccctgttgctcctcatctcttagttcggatgttcctccaggtgtcaggatagacgcacctttcccaggatttttttctctgatgccttcaagtctcagccagcagcctctcacaagcacttctcacatgtggttgaagtgatccagttcacgaaactacacattccttaaagtcagaggcc

SEQ ID NO: 154313 - DNA, 569 bp, Homo sapiens
gagagggtggttagtggatggaaaattactaagaggagatatcaagggtaggaggattcttgctaaactaaaaacaggattcttgctgaagacagcccagggtgatgagtggggagtgaggaatgtgatcaaatatcacgggtggaggcttcccactaaactgacttagcaggattcttgctgcagctgggctatacaattccagcaaggatgggggcaaaggttgacacctagctgagcaggggactaagagcagcctgactaaagtttggtgaaggagagagtctgtcacatttcacccatcaaaacctacattccagtgatgtcattcctcctctgaactccttcctcttcagaaccttggcttatgacagtctctcagtctggtccctgttgctcctcatctcttagttcggatgttcctccaggtgtcaggatagaygcacctttcccaggatttttttctctgatgccttcaagtctcagccagcagcctctcacaagcacttctcacatgtggttgaagtgatccagttcacgaaactacacattccttaaagtcagaggcc

SEQ ID NO: 154314 - DNA, 585 bp, Homo sapiens
agctcataacttcttccctcaagttttgttctaaaagctttaccttaacatttagatatgcaatcaatgcagaaattacatatgagagtagtttgggtagagatcaaaatttatttttctttattctatatgaaagtctggtatgtgtagagctatttccaaactttattctgtttaactggcttgcttccttggccaataccatactaaccaaattactatagctttacagtaaatattaagacctggtagtatctgtttccaagtgyagttgttctgcaagattgtcttagctcttcttgtcccttttcatataaattttgaaaacaaaatagttctagttttaattttttgaggacttccatactgctctccacagtggctaaactaatgtacatttctaccaacagtgtagggaggggttcccctttctccacatcctcaccagcatccattattgcctgtctttaggataaaagtcattaaaacaggggtgatatgggatctcactatggttttgattggcatttctctaatgattacttatgttaagcattttttcatatacttcttggccagttgtat

SEQ ID NO: 154315 - DNA, 406 bp, Homo sapiens
ctgactaaagtagcctgggcctggaataaatttaagtggcagtcaggccacaaggactgcagtcctaaggcawgccctggtgctgcactggtctcagaggcagtgcacttagggtacaatacagtgtgaccagcagtggcagccaaaggattgcctgtgtcatcccttcccaaactccaggcagtactgctccaaagagactctttctgctcagggaaaggggaagaaagagtatagaggactgtgtcttgcaacttgaggacgagctcagccacagtaaaggcaccaagcagatttctgaagtcccagattctagatttttgcacctggatgcgtttctagactcactctgtgctagaagagaatccactcctctgatgggatggaccccatcctagcagaattc

SEQ ID NO: 154316 - DNA, 514 bp, Homo sapiens
gaattcatttgaggaccatgccagttcatggacaggtgcctgggagttaggcacagttgggrtgggtcgagttgtctaagggtacctaggactgtcatacccacacctgagttggctccttccttccttcattgaacagacattattaagagcctacactgtgccaggctttgctaggtgctggggatgcaatggtgaaggtgaaaaacagatgggtcctttgacttcatggagcttccagcctatgccaatgacaggttaataaaaaaggagctgagtgctctgcagtgggtattaaagatggggtgagcaatgagtgagtgtattttctgtagagattttacaaacaataatacaaaggattaaaagttgttctgttttttatgatcaccacgcatctgcaattctaaaccacatcagtgataaaacacttgaaggggtccataatacatcattgtagcataaaaattattttgagctaaaggcatttggttcctgaaatcttctatctgat

SEQ ID NO: 154317 - DNA, 483 bp, Homo sapiens
ggggtgggtcgagttgtctaagggtacctaggactgtcatacccacacctgagttggctccttccttccttcattgaacagacattattaagagcctacactgtgccaggctttgctaggtgctggggatgcaatggtgaaggtgaaaaacagatgggtcctttgacttcatggagcttccagcctatgccaatgacaggttaataaaaaaggagctgagtgctctgcagtgggtattaaagatggggtgagcaatgagtgagtgtattttctgtagagattttacaaacaataatacaaagrattaaaagttgttctgttttttatgatcaccacgcatctgcaattctaaaccacatcagtgataaaacacttgaaggggtccataatacatcattgtagcataaaaattattttgagctaaaggcatttggttcctgaaatcttctatctgattaaaagcagagcctcccaacagaattc

SEQ ID NO: 154318 - DNA, 514 bp, Homo sapiens
gaattcatttgaggaccatgccagttcatggacaggtgcctgggagttaggcacagttggggtgggtcgagttgtctaagggtacctaggactgtcatacccacacctgagttggctccttccttccttcattgaacagacattattaagagcctacactgtgccaggctttgctaggtgctggggatgcaatggtgaaggtgaaaaacagatgggtcctttgacttcatggagcttccagcctatgccaatgacaggttaataaaaaaggagctgagtgctctgcagtgggtattaaagatggggtgagcaatgagtgagtgtattttctgtagagattttacaaacaataatacaaaggattaaaagttgttctgttttttatgatcaccacgcatctgcaattctaaaccacatcagtgataaaacacttgaaggggtccataatacatcaytgtagcataaaaattattttgagctaaaggcatttggttcctgaaatcttctatctgat

SEQ ID NO: 154319 - DNA, 414 bp, Homo sapiens
atttcattgagttttctcaaraaacagctattttgaactctctgtctgaaagatcacatatttctgtcactctgggattgatcactggtgccttatttagttatggtgaggttatgttttcctgaatgatcttgatggctgtggatgttaatcaatccataatccacaatcttcaatgtctgggcatcgaagagtcagatatttattgtagtcttcacagtctgggcttgtttgtactcatccttcttggggggctttccaagtattcaaagagaactgagtgttgtgaactaagtctttggtcactgtagctttatctgtattaggaggcaccccaagcccagtaatgctgtgactgttgcagacttgtagaggtaccaccttggtggtcttggggaagatccgggagaattc

SEQ ID NO: 154320 - DNA, 584 bp, Homo sapiens
caagccaaacgcgagacctaacttgtgtattacataattcctctccaaatgggccacaaggccaaactctatgattttcctaggaaaaaagaagttgtttattattccaactgttgccatagcagtcagtgtttccatatcaccatccttttctctccagacattactccactaatacatgttccagacctgcaattccaggcatttcagccagaaggaaatatccttgtgctgttgtaaaaatcaactgagaaggccagccctgtagttgtcgtctaagttccagcattttcagtcactgcctcagtgaggaagaaaaagtggagtctgtctctagactcagcagggtgggatcctgaagaattttatccaaccccatgatccaaggctggcagcccaytctcctccacctttgggacccctttggtcccagccattagaacagagctagcctccttaagaagagtaaaagaagaatatagaaacctagagatctgttatttgaaagctcaaccctggttatatctatgttagtataatgaaataaagaatcagggcaattcttcaattctcatcaaatatct

SEQ ID NO: 154321 - DNA, 584 bp, Homo sapiens
caagccaaacgcgagacctaacttgtgtattacataattcctctccaaatgggccacaaggccaaactctatgattttcctaggaaaaaagaagttgtttattattccaactgttgccatagcagtcagtgtttccatatcaccatccttttctctccagacattactccactaatacatgttccagacctgcaattccaggcatttcagccagaaggaaatatccttgtgctgttgtaaaaatcaactgagaaggccagccctgtagttgtcgtctaagttccagcattttcagtcactgcctcagtgaggaagaaaaagtggagtctgtctctagactcagcagggtgggatcctgaagaattttatccaaccccatgatccaaggctggcagcccactctcctccacctttgggaccyctttggtcccagccattagaacagagctagcctccttaagaagagtaaaagaagaatatagaaacctagagatctgttatttgaaagctcaaccctggttatatctatgttagtataatgaaataaagaatcagggcaattcttcaattctcatcaaatatct

SEQ ID NO: 154322 - DNA, 505 bp, Homo sapiens
tggtatgtgtgtctctctgtctaactgaggtcacaatataaaatatatgtgtcttactgtgagttctggtccaaatattagaaattatcagcctaatcaaatatcttcccattgcaggcaagataactgaagccagagggggaaatgattttctcaaatcagacagtgtatcagaagtagcccaggtctcctgtctctcagtatcctttccattagactctaatgcctaaaatatgcttgaaggcggatgtcaacccttgtcctttgatttccgtacygccttggcagctgacattctattctcttttggagcatttcctatgctctgaattcccttttctccatctctagcactcccacggcccttctaccacttgggatcagcgatcttgtgtgatgcgggctggtgtgcgcaggggcaaaatatcagcgcttaggcttgcatggtccatgactcacggatagctcatggtagctcagaagatttggagttccacagctcact

SEQ ID NO: 154323 - DNA, 545 bp, Homo sapiens
ctgccaccgttggacctactgcttactgtggtggtggtgtgtcacatttcagggcatgccttatggagtcagactggattcaaaaacacggatatccagctatatgacctgggcaggtactgaaaccctttgcctaagctcttttgtgtatgaagtgggggcaaacaacaatagtacttacctcctaggtttgtggtgaggattaagtaaatatatataaagcatatacgggagtgcctagtgtttaccacaaactcaataaattatttggatagccaaacttgggattcatttccttaggtatgctagaatggaagcctcttcaaaggtgtttccaccattgatgattstatcatcaagggtaaagatgccttgatgtgcaacccctacttactccactctcaacccacgtgggccctgagtctgtctcatagacaactgcaaccaagtaaaaggggtagagttgagtaggaggtagcagtcacactgattcagagattagtatctccagccaactccaattctctgccttccttgagcagttc

SEQ ID NO: 154324 - DNA, 545 bp, Homo sapiens
ctgccaccgttggacctactgcttactgtggtggtggtgtgtcacatttcagggcatgccttatggagtcagactggattcaaaaacacggatatccagctatatgacctgggcaggtactgaaaccctttgcctaagctcttttgtgtatgaagtgggggcaaacaacaatagtacttacctcctaggtttgtggtgaggattaagtaaatatatataaagcatatacgggagtgcctagtgtttaccacaaactcaataaattatttggatagccaaacttgggattcatttccttaggtatgctagaatggaagcctcttcaaaggtgtttccaccattgatgattctatcatcaagggtaaagatgccttgatgtgcaacccctacttactccactctcaacccacgtgggccctgagtctgtctcatagacaactgcaaccaagtaaaaggggtagagttgagtaggaggtagcagtcacactgattcagagattartatctccagccaactccaattctctgccttccttgagcagttc

SEQ ID NO: 154325 - DNA, 532 bp, Homo sapiens
ttttttatttgtagagatggatggagtcttactatgtttcccaggctggactcaaactcctggactcaagcaatcctcctgtctcagccttccaaagtgctgagattacaggcgtgagccaccatgcttgcagatattatcctttgatactacacaaaatttgctaagtggtagtttcttaaaggttattttcagttcactaatatggttcactaaaaccatattggtgaactcttcataccctgttatataaaatccaytggtctgtcttgaaatttgaagggatcttttacccatgcatgattttgtaacattgtggaaaatattggctcactgaggttatgtatatattccagatattcaaacatttcactataaaatattacaaaatcatacttgtcaatattaccactgatttcattagaaaagctcttaaatattgagaaactattagagctcatagcagtaaataaaatttttccaaattctaattttcagttgaaagcttaaattttatcattggcgacacata

SEQ ID NO: 154326 - DNA, 532 bp, Homo sapiens
ttttttatttgtagagatggatggagtcttactatgtttcccaggctggactcaaactcctggactcaagcaatcctcctgtctcagccttccaaagtgctgagattacaggcgtgagccaccatgcttgcagatattatcctttgatactacacaaaatttgctaagtggtagtttcttaaaggttattttcagttcactaatatggttcactaaaaccatattggtgaactcttcataccctgttatataaaatccactggtctgtcttgaaatttgaagggatcttttacccatgcatgattttgtaacatygtggaaaatattggctcactgaggttatgtatatattccagatattcaaacatttcactataaaatattacaaaatcatacttgtcaatattaccactgatttcattagaaaagctcttaaatattgagaaactattagagctcatagcagtaaataaaatttttccaaattctaattttcagttgaaagcttaaattttatcattggcgacacata

SEQ ID NO: 154327 - DNA, 532 bp, Homo sapiens
ttttttatttgtagagatggatggagtcttactatgtttcccaggctggactcaaactcctggactcaagcaatcctcctgtctcagccttccaaagtgctgagattacaggcgtgagccaccatgcttgcagatattatcctttgatactacacaaaatttgctaagtggtagtttcttaaaggttattttcagttcactaatatggttcactaaaaccatattggtgaactcttcataccctgttatataaaatccactggtctgtcttgaaatttgaagggatcttttacccatgcatgattttgtaacattgtggaaaatattggctcactgaggttatgtatatattccagatattcaaacatttcactataaaatatyacaaaatcatacttgtcaatattaccactgatttcattagaaaagctcttaaatattgagaaactattagagctcatagcagtaaataaaatttttccaaattctaattttcagttgaaagcttaaattttatcattggcgacacata

SEQ ID NO: 154328 - DNA, 427 bp, Homo sapiens
tgctcaattattaagaattaacttgaagagaagaaagagcaatgactatatccctagtgcactttctatccattaaaaatgcttctaagtatttttctttctatgtaagtgccatgattcatttttaaattwacatcccttttcctagaaggcaaaaaaaaaaaaaaaaaggcagcatttgggatcactcaaaagtcatcctacatcattggctttgagtagctagctgttcctagatcctcaagttggagaaattaaccaagcttttaaaagatgtcatggcattactattgttaaatcaaactccctaaggtcttaaattttcaaagttataccatgaggaccttctggatggaaaaaaaaaagaaagaaagaaagaaacatctctggcaccctagcttaaattattcattactttttggtaacc

SEQ ID NO: 154329 - DNA, 472 bp, Homo sapiens
tttcaatatataaatggcactgaaacatgtatgaacggaagaggtcaccagggagggacagtatagctagaaaagggcaaagcacccaggaatgagccctgagaaaccccagcattaggagggggctggcaaaagaagccacaaagtgagtatgtgtgagcagaccactggagcaaaggggctaaagcccaggcaaaaggaatgcttggtgagattcagatttgtgggacatcagcatctaggataagacgaaaacgaagggartggacgggagtgagaagaacagtggaccccagaaacatcaatgtgtcaggagagcaggaagaagagacctagaaacagatggtgaaggatcagccagagaagtttgaggaggataaggacagagtacagtctcagaaactggatccattaagatattttgactgcatataatgggatagctgactaaaattggtttatctaataggaa

SEQ ID NO: 154330 - DNA, 505 bp, Homo sapiens
aatgggaaagagtccaaatctgctagatgttccaaagtcacaactggaagttttggtgactggtttctggaacaggagggggtgaagtagaggagccagctctctaacttgggtggtggcacaagccaagatttagagcacatgggtaggacacgtagatggcaggtttctctgtgcacatgtagtctagcagcccagaggatactcggggaaaatgtagtcatccttggcttcacaaacattcagatgacaactgttctgagaggtgcatatggaattgccctgactatgaacatcatgtggtggraagaggtgggacattggttcttttgggtcaagttctcctactaactagctatggaaccttaagcaagtcgtaactgttcttcgtaagtctctaaaatgagaatgagaatatctctaaaataaaatgagaatattttcaaggtctgtttcaagtgtcacatttagagccaaatgtactttgattcactctgtcactttt

SEQ ID NO: 154331 - DNA, 590 bp, Homo sapiens
aaagaaatcagcaatttacaaatgggtaactcgttttaagaagggatgagatgatgttgaagatgaagcccatagtggcaagccatccacatcaatttgtgaggaaaaaattcatctttttcatgccctagttaaagaggactgataattaacagcagaaacaatagtcaacaccacagacaactcaattgattcagcttacacaattctgactgaaaaaatcaaagttgagcaaactttcccacaatgtatgccaaaaccattgcttctagatcatctgcagacaaaarcagagctttcaatgaaaattggaaacaagtaacatcaagatcctgaagcatttctttgaagtaacaagagatgaaatatggctttaccagtacaatcctgaagacaaagcacaatcaaagcaatggctaccaagaggtgttaagtgctccagtcaaagcaaaagtatactagtcaagagctaaggtcatggcaacagttttttgggatggtcaaggcattttgcttgttgattttccgtagggccaacgaatgataacatctgcttattatgagagtgttttgaaaacattagccaaaga

SEQ ID NO: 154332 - DNA, 553 bp, Homo sapiens
gaattctcttcctgttcaaggcctctcctcaatgcagctgtcagctcacctgctcctggctgtccagggtcccattcacccatgatccgtcagcatccctagccccttcccgcccatgaacatgccctgttacctgtctggccttccctgcctactctgctttcctattcagcctaacctgttgaaaggatagtctgcaccagggtttgtcaacctcagcactactgacactttgcaccagaygattctttgctgtgggggctgtcctgggcactgtaggatgtttagcagcatttctggcctctacccagaggagatgcatccctttccatttagaagaagaccaaaagactctagatgccagtagtgacagttgtgatcattccccaatgatgacagatgttaagatgttatagtccccccgacccagttgctatagttgttggcaacttccagttatgacaaccaaccaaaaatgtctccagatcttgccaaatgtcccctgtaggacaaaatctcccaccattgagaaccattggtctacactgtctat

SEQ ID NO: 154333 - DNA, 630 bp, Homo sapiens
taagtctttaatccactttgaatagattttttgtatatggtgagrgataggagtctagattcatttttttgcatatggatatccagttttcccatcaccatttactgaaaagactgtcccttacccagtgaatcttcttagtgcctttgttgaaaatctgttggttgtaaatacgtgaatttatttctgggttctctattctgttctgttggtctatgagtctatttatgtcagtaccatgctgttttggttactatagctttgtagtatattttgacatcaggtagtgtgatgcctccagctttgtttttgtttttcgtttttttttaatcaagattgccttagctgttcagagtcttttgtggttgcatatgaattttaggattatttctatttctgtgaagaatgtcattggtattttgataaagattgctttgaatctgtagattgcttttggtattatggccatttcctcaatcttaattctttcagtccatgacatgggatgtctttcatatttttgtgtccctttcaatttctttcatcagtgttttgtagttttccttgtagaggtctttcacctccttggttacatttattcctgggtattttaaattttttatagctatt

SEQ ID NO: 154334 - DNA, 537 bp, Homo sapiens
ttttacaaaatagctgaccaatagggagatacaaggaccccggagaagacttggtacagtgtatgacactcatgatcagacccggtttctttctttcctacttcatcattctgcagagaaatcttcagtttctttgctacccactgacctcttccttttgcttttgtttcacttgtgtttattcgcattgtgaagatttatccttctctatttttcattttttgactttgttacttttgtaggaacaggtctgctggaccattttgctggttccttgagggtttctttactgacccttaggctgaatccgccttgctcttgtggatcttggcggtgcctgcgttggggaaggggcccctggctacctctgggcygtcacccagcaagtgcttttgcacgggctgcctgctgctgccgctcccgccgatgagctgctggggcctgtggcatcatttttcatggctgtgcaatagcccatggcgtaattgtgctggatgtgacagtattttaccaattctgtagagatgatggacattt

SEQ ID NO: 154335 - DNA, 607 bp, Homo sapiens
taggctaaggctgtctaatggacagatgccctcaaagcagtgggaccagttgagaaggctttgagttatacttgctcagttttcctcactgtgatggctaagttcatgcatcaatttgaatggtcattgaccatggagtgttcagattaaacattatttctggatgtgtctgtgagggtactaaattacttacatatagccaattaaaaacagatattaaccctgtccttcattccctgacctccccccaactcgccacacacacacacacacacacacacacacacacacacacacacacacaatgaattctacaagagtgtggtgagattcactgctcatggtaatgtcaatcagaacgaattttcttaaaagtaatgcagcttataccaaaagcctttaagacatatatatycttggtgcagtcatccttagcctcagtcttctcatctgtaaaatgaggacaatgatgcctccctatgacagctgaaattctgtattcaggccatctgaaagctatagttgcttaataaatgccacttccatttgtctctttcctctggtaaaaccccatcttgttcactatccaaacaacagcatggttact

SEQ ID NO: 154336 - DNA, 588 bp, Homo sapiens
tgacagcactcacttaggaaaaaagcacctctttcttaattcctttatgatgaagttcttgctttgactgtatcatttctttccccttggagtcagcacagttgtttaattcatagaagttccaaaattgctgaaattattttattctcatgttttgattcctgttctgaatgcagctgtagaaaaatttttcagagtaatgaacaatgtgtacatgaataaatgaagctgcctggtgagggaaattagtacagagtcaattttgtttcctcttctgtgctctataccaggggttggmaaaccatggcccatggcccaacacttagttttgtaaataaagtttatttattatctatgattgcttttgtgctataacagcaggattgagtgcttttaacaaagatcatatggtccagaaaggctaaaatatttactatgtggtcctttatagaaaaatttgttgtctcggattcagaggaacatggcagatgggaggcaggactagattgaagctctggacagagcagcatgcgggggctcacattgtgaattttagctccagatctctgcaagaacaaaccagcaatc

SEQ ID NO: 154337 - DNA, 588 bp, Homo sapiens
tgacagcactcacttaggaaaaaagcacctctttcttaattcctttatgatgaagttcttgctttgactgtatcatttctttccccttggagtcagcacagttgtttaattcatagaagttccaaaattgctgaaattattttattctcatgttttgattcctgttctgaatgcagctgtagaaaaatttttcagagtaatgaacaatgtgtacatgaataaatgaagctgcctggtgagggaaattagtacagagtcaattttgtttcctcttctgtgctctataccaggggttggaaaaccatggcccatggcccaacacttagttttgtaaataaagtttatttattatctatgattgcttttgtgctataacagcaggattgagtgcttttaacaaagatcatatggtccagaaaggctaaaatatttactatgtggtcctttatagaaaaatttgttgtctcggattcagaggaacatggcagatgggaggcaggactagattgaagctctggacagagcagcatgcrggggctcacattgtgaattttagctccagatctctgcaagaacaaaccagcaatc

SEQ ID NO: 154338 - DNA, 506 bp, Homo sapiens
gcctgaaaaagaattcaggaggttagttattaaactaatcagggagggaccagagaaaggcaaagaccaatgcaaggaaatccaaaaaatgatacaagaagtgaagggagaaatattcaatgaaatagatagcttaaagaaaaaaacaataaaaagttcaggaaactttggacacacttttagaaatgcgaaatactctggaaagtctcagcaatagaattgaacaagcagaagaaagaaattcagagcttgaagacaaggtctttgaattaacccaatccaacaaaagaaaaaagaataagaaaatattaacaaagcctcmaagaagtctgggattatgttaaatgaccaaacctaagaataatcagtgtacctgagaaagaagagaattctaaaagcctggaaaatatatttaggggaataatggaggaaaacttccccagccttgcaagagacctagacattcaaacgcaagaagcacaaagaacacttgggaaattcatcat

SEQ ID NO: 154339 - DNA, 566 bp, Homo sapiens
attattcttcttttgattttttccaatcattaaaaacacataaaatcaatcttagctcatgagacagtagaaaaacaagttgtatgtaggctggatttggctagaaagtttgctcaccaagagagacagaaaaagcaaacttgctctgacccacctctccttccagtcccatgtattcacccctctttttttattaccaaaattatcctcatttatttttattgcttttgacgtggtttcccattacataaataactctatgtcctcttttaagggaggaaactttccattcaamctccactattattattatgtactaaaatcccaaatatatttgggtccatttatggattcacttctattccgtggatcttattggttcttcgtatcctagggctaaacttcaaaaaagtgtaacagttagtagcacacttaggcttatctttgttaatacatctctgtgctagaattttcaggaggatttccatagactggaaggctgatttaaaaggcatctttacctgtttataaattctcccaaaattgccctctagaaggtggccacc

SEQ ID NO: 154340 - DNA, 566 bp, Homo sapiens
attattcttcttttgattttttccaatcattaaaaacacataaaatcaatcttagctcatgagacagtagaaaaacaagttgtatgtaggctggatttggctagaaagtttgctcaccaagagagacagaaaaagcaaacttgctctgacccacctctccttccagtcccatgtattcacccctctttttttattaccaaaattatcctcatttatttttattgcttttgacgtggtttcccattacataaataactctatgtcctcttttaagggaggaaactttccattcaacctccactattattattatgtactaaaatcccaaatatatttgggtccatttatggattcacttctattccrtggatcttattggttcttcgtatcctagggctaaacttcaaaaaagtgtaacagttagtagcacacttaggcttatctttgttaatacatctctgtgctagaattttcaggaggatttccatagactggaaggctgatttaaaaggcatctttacctgtttataaattctcccaaaattgccctctagaaggtggccacc

SEQ ID NO: 154341 - DNA, 569 bp, Homo sapiens
ttatctgctgaagatggcagggccttactccaaaatcctagaggcttctgctgttattcaccaatgggggcctaccagaggctccaaacagtatccctatctgccactgacacctcaagcaccactggatctgctgggtcatatggcccaagtggyagagcagcttgcacagcagcctggacctgttgcagagccttctcctgttgtggaccccattcaaaactggcagcctttcaggtcactcaataaatgggccagagtaacacacccaaatgaggaatgtgctgccttcaaaatccaaataggcccactaggctttgtgcctctttcttggtttgggagggacctaatgcagcaagttatccttcaccttagaaagaatatctcaacaggccccacaccactagacccctagaaattttactgaggtagaagatccctgaattttagtcagatttatttcccatcctctggcacacagatggctcaccaataagtccagtgtgtttgctacttcttgctcactggatccaattagcataatgtcatcaatgtaatgaaccagtgtg

SEQ ID NO: 154342 - DNA, 559 bp, Homo sapiens
gttggatgtggaagtgaaggaggggacagtgtcaaggataattcccagattctggcctgtatgcttggcagaatggagatgtcatttactaagatargagcactgaaagagggcaggtgagaggaggtttcatgagttcattctttgtctgtatattggtggtcagctgcaaagaacagaaagacctactggagtggctgaaacagttatgggtgtctgtgattcacaacacaggaagtccagggctatgcaatctagaccttgcagggtagcttaacaattcagggatgctgcaggctcttttcagcctactggtctacctaccttcatgtgtggaccttcacctttttgctcatctccttttggttcaagatggttgctgtgtgcctagtacctgcactccaaaattggagggagggccaaggggtgaagactttatctttgttaaatttttcctttttatttaagaagagacctttcctcaggaactttgcctatgttatatatgcctgagctaagttttatggccacctctggctaaatggaggcttggaaacat

SEQ ID NO: 154343 - DNA, 559 bp, Homo sapiens
gttggatgtggaagtgaaggaggggacagtgtcaaggataattcccagattctggcctgtatgcttggcagaatggagatgtcatttactaagataagagcactgaaagagggcaggtgagaggaggtttcatgagttcattctttgtctgtatattggtggtcagctkcaaagaacagaaagacctactggagtggctgaaacagttatgggtgtctgtgattcacaacacaggaagtccagggctatgcaatctagaccttgcagggtagcttaacaattcagggatgctgcaggctcttttcagcctactggtctacctaccttcatgtgtggaccttcacctttttgctcatctccttttggttcaagatggttgctgtgtgcctagtacctgcactccaaaattggagggagggccaaggggtgaagactttatctttgttaaatttttcctttttatttaagaagagacctttcctcaggaactttgcctatgttatatatgcctgagctaagttttatggccacctctggctaaatggaggcttggaaacat

SEQ ID NO: 154344 - DNA, 559 bp, Homo sapiens
gttggatgtggaagtgaaggaggggacagtgtcaaggataattcccagattctggcctgtatgcttggcagaatggagatgtcatttactaagataagagcactgaaagagggcaggtgagaggaggtttcatgagttcattctttgtctgtatattggtggtcagctgcaaagaacagaaagacctactggagtggctgaaacagttatgggtgtctgtgattcacaacacaggaagtccagggctatgcaatctagaccttgcagggtagcttaacaattcagggatgctgcaggctcttttcagcctactggtctacctaccttcatgtgtggaccttcacctttttgctcatctccttttggttcaagatggttgctgtgtgcctagtacctgcactccaaaattggagggagggccaaggggtgaagactttatctttgttaaatttttcctttttatttaagaagagacctttcctcaggaactttgcctrtgttatatatgcctgagctaagttttatggccacctctggctaaatggaggcttggaaacat

SEQ ID NO: 154345 - DNA, 568 bp, Homo sapiens
gctactctttttcttgaggggragggggtaatttggcagtaattttaaagcatgacaactaagacatacatctcaagtcttctctatttcctcaaacaagaggaaagcagaaacactctagccaaaataatgactccttaactgctgggttattgaaggcgggtgaccaaagggactttaaaataaggacacaaaaactctgtgtaggttgtgcttgaaagtggcagggaatgggcttcctgaccttgcaatgacccagccagcctctctgatggtacgtgaacctgtagcatcagctcttaataatgtgaccactctggagcacatcataaactttaatgcaccaattataatgatggtaataacttttttgcttcatgggctgaatcccattcctccccgtccattttctccttgagagaaggcggtaagaacaagggagctgccatttcaaaggagattgttactgatgcggtgacagctgagctgagactcaaaggaggtgagggagtgccaaaagagcctgtgcccagaaaacccggtggtggagcagttcaggcaggggcga

SEQ ID NO: 154346 - DNA, 568 bp, Homo sapiens
gctactctttttcttgagggggarggggtaatttggcagtaattttaaagcatgacaactaagacatacatctcaagtcttctctatttcctcaaacaagaggaaagcagaaacactctagccaaaataatgactccttaactgctgggttattgaaggcgggtgaccaaagggactttaaaataaggacacaaaaactctgtgtaggttgtgcttgaaagtggcagggaatgggcttcctgaccttgcaatgacccagccagcctctctgatggtacgtgaacctgtagcatcagctcttaataatgtgaccactctggagcacatcataaactttaatgcaccaattataatgatggtaataacttttttgcttcatgggctgaatcccattcctccccgtccattttctccttgagagaaggcggtaagaacaagggagctgccatttcaaaggagattgttactgatgcggtgacagctgagctgagactcaaaggaggtgagggagtgccaaaagagcctgtgcccagaaaacccggtggtggagcagttcaggcaggggcga

SEQ ID NO: 154347 - DNA, 604 bp, Homo sapiens
cctacctatttctaaggcatctttgaaatggcttaaaataaaagaaacataagcaattagactacttatggaataaaaagttaaagctcatgtaatgtatgaagtgataagcctaggctaataatagctaatatagtttcacactaattttagtagtgggttcctacgcaatcaaaatttaaaaacataatgagggacttaattttggttacgtgacaaaaggaaatgtacttgtttgtgcataggtgagatttcttcttagctcactgttaattgaaacttattacataaatcctgtatacaggcaaaggstaactaatgaacacatttaatgatatttgtaaaaatattcttcctgtgtctgtttctcacagtgtgaaaagaagttggctgctttgtataaaagaaataaagtactttttagcttttgagtttttctttatctgaacaccatcttatctgtgtcagaaacacagacatgagctttttggcaggaagtgtgatcactggccactctgtctttggccaaaggggtttataccccaggctcttaaagggttcaccatgtgcttttccctcaaggatatgttgccaagcttccata

SEQ ID NO: 154348 - DNA, 649 bp, Homo sapiens
tgctgctggtgaggctgcaaagaaaagagaacacatacacatttggtgacaatgtaaattagttccagcactgtggaaagcagtttggagatttctcaatgaccttaaaacaaactaccattcaacccagcaatcccagtactgggattactggtatacgcccaaaataaaatagatcattataccaaaaagacacatgaactcaggtgttgatcactgcactattaacaatagtgaagacagaatcatcctaggtgtccctcagtggtggattggataatctgcagagtatatgtagtgcatacacaccatggaatattatgcagccatgacaagaatgaaatsggcctggcgcagtggctcacgcctgtaatcccagcactttgggaggccgagacgggcggatcaagaggtcaggagatcgagatcatcctagctaacacaggtgaaaccccgtctctactaaaaatataaaaaattagctggtgtagtggcgggcgcctgtagtaccaactactcgggaggctgaggcaggagaatggtgtgaacccgggaggcagagcttgcagtgaaccgagacggcgccactgcactccagcctggacaacagagcgagactccgtctcaagaaaaaaaaagaatgaaatca

SEQ ID NO: 154349 - DNA, 649 bp, Homo sapiens
tgctgctggtgaggctgcaaagaaaagagaacacatacacatttggtgacaatgtaaattagttccagcactgtggaaagcagtttggagatttctcaatgaccttaaaacaaactaccattcaacccagcaatcccagtactgggattactggtatacgcccaaaataaaatagatcattataccaaaaagacacatgaactcaggtgttgatcactgcactattaacaatagtgaagacagaatcatcctaggtgtccctcagtggtggattggataatctgcagagtatatgtagtgcatacacaccatggaatattatgcagccatgacaagaatgaaatcggcctggcgcagtggctcacgcctgtaatcccagcactttgggaggccgaracgggcggatcaagaggtcaggagatcgagatcatcctagctaacacaggtgaaaccccgtctctactaaaaatataaaaaattagctggtgtagtggcgggcgcctgtagtaccaactactcgggaggctgaggcaggagaatggtgtgaacccgggaggcagagcttgcagtgaaccgagacggcgccactgcactccagcctggacaacagagcgagactccgtctcaagaaaaaaaaagaatgaaatca

SEQ ID NO: 154350 - DNA, 537 bp, Homo sapiens
ataaaaacggaaaagcttcttccaataaatctcaaatataatgaaaatcatagtagtgtaggagaaattatttactttttatttggacttgtagaaagtagttttctgttgtttggtttatttttgcctgaaagaggttcaaatacaacccctagagccacattttaaaagactgccatcaaagggaatctgcaggacagttcatatttcttttaaattcttttaaattgaacccatattcaaacactttattgctccataaatatccaatgctctttctctattctygaacacccaatctgggtatctaaaaatatgcctcattctggtctgtcaaatatgtgtagctggccgggtgcggtggctcacgcctgtaatcccagcactttgggaggccgaggcaggcagatcaccagaggttgggagcttgagaacagcctggccaacatggtgaaaccccatgtctaccaaaaaatacaagcttagccggacatggtggcgtgcacctgtaatcccagatactcaggaggcccaggt

SEQ ID NO: 154351 - DNA, 537 bp, Homo sapiens
ataaaaacggaaaagcttcttccaataaatctcaaatataatgaaaatcatagtagtgtaggagaaattatttactttttatttggacttgtagaaagtagttttctgttgtttggtttatttttgcctgaaagaggttcaaatacaacccctagagccacattttaaaagactgccatcaaagggaatctgcaggacagttcatatttcttttaaattcttttaaattgaacccatattcaaacactttattgctccataaatatccaatgctctttctctattcttgaacacccaatctgggtatctaaaaatatgcctcattctggtctrtcaaatatgtgtagctggccgggtgcggtggctcacgcctgtaatcccagcactttgggaggccgaggcaggcagatcaccagaggttgggagcttgagaacagcctggccaacatggtgaaaccccatgtctaccaaaaaatacaagcttagccggacatggtggcgtgcacctgtaatcccagatactcaggaggcccaggt

SEQ ID NO: 154352 - DNA, 469 bp, Homo sapiens
aatattatgcctgctgtatatgtggcacaatggctttaaaactgtgcacttttaattcagttcttcctttctttatactcttattgtcatacattttatttttatacatactataaacacacaacatgatcctgttaattttgtttgaaatattcagtaaccttttagagaaatcaaaatagagaaattaaatttttatatatacttgggtgttttatattttcagtgctcattatttgggtagatccaaacttctatcttacattaattgtggaaaaacttggaatattatttctttaaatatttcttctgacccattctctttctttttattctgggactcyagttatgcatatgttagtctgtctgataatatcctgcagctctttacattctatttttttcattttttttttaaattgtgctggttgtggtggctcacacctgtaatccaagcacttttggaggc

SEQ ID NO: 154353 - DNA, 559 bp, Homo sapiens
gtgaagatgggacaaacagaaaatgaggtcttgggtgaaaggcaaaatattagacctgaaggctcttccttttttttttgagtcggagtctccctgtcgccatgctggagtgcagaggtgcaatctgcaatcttggctcactgcaacctctgcctcccgggttcaagcaattctcctgcctcagcctcccaagtagccaggactacaggcacacaccaccatgcccagctaatttttgttgttgttgttgtattattagtagagatggggtttcaccatattgtccaggctggtcttgaactcctgacctcgtgatccacctgcctcggcctcccaaagtggggagagattacaggcatgagctagtgtgcctggccctgaagctcttttaaacttcagaaaattttatagaagaaaaaatgtcaataaatgacagagggtgtgactgtgtcccctccaaattcatgttgaaacttaattcccartaagagagtttgaagaagtgaggcctataagacataattaggccattagggcttcactgtcattcacggattag

SEQ ID NO: 154354 - DNA, 528 bp, Homo sapiens
atattgttttaaactggttttgggtatggaataaaatttataactgagttcactagcaaataaacaaaggaaaaacatttaatattttaataatatattatacattattaaggcaaagaaggcaaagatgaaacttcagtataaatatagaaaaactttatatttattttttctttcataaagacttgttttatgtaagtagactgttttcctagccaacccatcaccccaaatccccccagaaatattccttgttataactgtaagcctaaagatatatgctctataatatttaactttgtgtgcatttaatttaaaaaatccttttaaacaatacattttcagaattaataaaatgtattacacttcattcatagtaaatgaaaacaaatccaagaaatatactttctcctgcatatcagttttaattaaaatatttacatgacttataattygtaaaatttgtttcaaaatgctctgtacaacattagtgtgttatttcattgattcattaattctgaaaaaagt

SEQ ID NO: 154355 - DNA, 587 bp, Homo sapiens
attattaaagatatacctatagattatagtcttaatttgattgatatttcaatcgtttttaaagcagactcaaattaaaaattttgttgataacctttttctgttgtttttttgcagaatttctgggatattacaaaaatcaattttctcatacaagcttattgatttttttcaacttacataaacacattttttctgtctttacacatactttatattttatatgtaaattttaaaatgaaaacaccttcaatgtcagacataacattagacataattctgcttacaccaaagaaaaacaattaaatacagttaatgtgctattgtagcccaaaggaacacacacacaaacacacacacacacacacacacagacaaaacagtctatgtctatttacctgttttattcatctgttctcatgctgctggtaaagacatacctgagactgagtaatttacaaagaaaaagagatttaatgaactcacagttgcaaatgactgggaaagcttcagaatcatggcagaaggtgaaaggcacgttacatggtggcagrcaagagagaatgagaagcaagcaaaagagtttt

SEQ ID NO: 154356 - DNA, 505 bp, Homo sapiens
gtcttgaaattatttcatgggcagaaagtttccaaattattaaagaactgaaaagttaaaagttttgcagatgtcagaccatttatataagaatttttacaaacaagaaataatttgtggtcatttggtaataaacaagtatttcctgctcaaaaaaaaaaaaaaaaggaattgaaaagttttggggattaaaatgagaactttcttaagaattytggaaataaaaacaagtagattatcttaatagggttatttcatgcattattttatatggttatgtcaacagaattttagtccaattttattctactaatttaaggagaaaattgaaaaagacagaatgtaaacataaactactctctcaaaacaaaggatgggaagaaagaaaggatgataattgatcattgtcagtttatttacttggcaataataacctatatttttatgcgtattgtttctcttgaatgcagtatcttaaagtttcctccttaatttaaattttcca

SEQ ID NO: 154357 - DNA, 561 bp, Homo sapiens
agccacatggaactgaattacgacaataggcagaatgagattggagtctgggtcttcctcagatccttcagagaagagctcagctggggacattttttgtggccacatcagatccaatccaactacttggtttctagatttctgagccatataaactaagaggtgatactctcacaaacaatacatttgtgttgttttaagccattaagtttgtatcaattcgctgtctaacactagaaaatgaataaacctgccataaccccttacttccgtatttcactcttcctacattttctaactagaagagagaattttttaaataaataagatcgtggttaacagcctgcactttttattaacagagactggggcttgatgatttattacctctgagacttggcaaaaatttcttcattttytttattacaaacttcacgtattttaaatggacataataacatgctatgttcaacagctctaacaagaaaacaataatccgtgtgcattaagagtttttcacagtacctggtgcaaagtaactactcaataagtataagatat

SEQ ID NO: 154358 - DNA, 561 bp, Homo sapiens
agccacatggaactgaattacgacaataggcagaatgagattggagtctgggtcttcctcagatccttcagagaagagctcagctggggacattttttgtggccacatcagatccaatccaactacttggtttctagatttctgagccatataaactaagaggtgatactctcacaaacaatacatttgtgttgttttaagccattaagtttgtatcaattcgctgtctaacactagaaaatgaataaacctgccataaccccttacttccgtatttcactcttcctacattttctaactagaagagagaattttttaaataaataagatcgtggttaacagcctgcactttttattaacagagactggggcttgatgatttattacctctgagacttggcaaaaatttcttcattttttttattacaaacttcacgtattttaaatggacataataacatgctatgttcaacagctctaacaagaaaacaataatccrtgtgcattaagagtttttcacagtacctggtgcaaagtaactactcaataagtataagatat

SEQ ID NO: 154359 - DNA, 560 bp, Homo sapiens
tctttacaatagtatcaaaaacaaaatacttaggaacgattgctagaaattaaggaaaattaaataaatgatcaagtttttaagttagaagactttataacttcctgtaatcctgatcaaaatctcagcaagaaatttgtaaaggtgccaaaagattgtataatttaatgtaaatgcaagtggcctagaatagtcaaaactatttggaaaaagaatttaaaagtttacagacacttaacttttgatttcragacatataatgaagcttgattacatataagcttcattatatgacttgaaatcaaatagttaagagtaatcttaagattaagagtaatcaaggcagtatgatgtaggcatgagggcattttattgtttttaaattatattgcaacatatttaatttaaaaatctaaattaaggtttatgatatgttattacagttataacttcttttttatattaccacaaatgagcattcctaacatttgaaatattagaaatattatattttaattgaattgcatatatttgctggaaagaatggtctatggagtttc

SEQ ID NO: 154360 - DNA, 560 bp, Homo sapiens
tctttacaatagtatcaaaaacaaaatacttaggaacgattgctagaaattaaggaaaattaaataaatgatcaagtttttaagttagaagactttataacttcctgtaatcctgatcaaaatctcagcaagaaatttgtaaaggtgccaaaagattgtataatttaatgtaaatgcaagtggcctagaatagtcaaaactatttggaaaaagaatttaaaagtttacagacacttaacttttgatttcaagacatataatgaagcttgattacatataagcttcattatatgwcttgaaatcaaatagttaagagtaatcttaagattaagagtaatcaaggcagtatgatgtaggcatgagggcattttattgtttttaaattatattgcaacatatttaatttaaaaatctaaattaaggtttatgatatgttattacagttataacttcttttttatattaccacaaatgagcattcctaacatttgaaatattagaaatattatattttaattgaattgcatatatttgctggaaagaatggtctatggagtttc

SEQ ID NO: 154361 - DNA, 591 bp, Homo sapiens
atttcctcttgtctctgtctgtatctaaattctgactcttgatacttttgcagaccttagggttatttgcttaatgcaactgaaaggcaaaaactatatttcaagtgcaaccacaaggcactgaatctttttcgtaacattaacttttccttgagcatctcaaggaactgctgactgaaactgtttgagtcttttgctagttccattgtgataaactctgaggggttttatcatacatgcacatttttcttttggttattactcttgaactccacaaaatcataacctttcagggcactttcaagttcatgtttcctgaagtgattttcttgaaagcaaataaatcttataaatgactttaaccttattcaatataagactactcattgytttcttttattattattttctttttacccttgccaacagtgttcttcacatcatttgaccaagtcattcatggatcttaaacattttgtgttttcttatatttcaaagaacacatgtattagaacatattttgagcctattctaataaaccttaggccattttcaaaatttggtatgtctgatattttaaagatcaattga

SEQ ID NO: 154362 - DNA, 583 bp, Homo sapiens
aatcccttctggcttgtaaggtttgtgctgaagagtccactgttattctgatagggtttccttcatagatagtatggcccttttctttagctgcctttgaaatttttctattgcattgaccttgaaaagtctgatgactctgtactttagggatgattgacttctatagcatctcacatgagctttttaaatttcttgtacctgcatatcaacttctcatgactactgtgtacattaagcgtgcacaaaatagaaaacctacagataatagataaatttgtagaaacacacacccttccaagattaaactcggaagtaatagaaaccctgaacagaccaataatgwtttataaaattggggaaaatatttagaaatattagtgggttatataatcaaacatgtttttgaagttgcttaaattctcttatttctcagaaatgtaaatgagtattaagtttggttgctttacataatcacatatttctcagagacttttctcacttaaaaaaattctttttgttttcatttttgtctgactgagttcattcaaaggactgctaattgagatctgaaattctttcc

SEQ ID NO: 154363 - DNA, 533 bp, Homo sapiens
tatatttgtaggctggaaagaatgaacagcaaagtcttatcactctcatgcatcgttgtgtggcatcctctttcttctcacactcattcagaagcaaaagacagtctatattaatccattctcacactgctataaagatactacctgagactgggtaatttataaagaaaggaggtttaattgactcacagtttcacatggctggggaggcctcagaaaacttagaatcatggtggaaagtgaaagggaaacaaggcatgacttacatggtaggaagaaagagcaaaagtgagaaggaagaagcatcrgatacttatcaaacgaccagatcttgtgagaactcactcactatcacaagaacagcaagggggaaatccccccacgtgatccaatcatgtcccaacaggtctatcccttgacacatggggattacaattcgagatgagatttgggtaagggcacagccaaaccatatcattccacccttgcctgccaaaatctcatattctttttacatttcaaaacacaccatg

SEQ ID NO: 154364 - DNA, 533 bp, Homo sapiens
tatatttgtaggctggaaagaatgaacagcaaagtcttatcactctcatgcatcgttgtgtggcatcctctttcttctcacactcattcagaagcaaaagacagtctatattaatccattctcacactgctataaagatactacctgagactgggtaatttataaagaaaggaggtttaattgactcacagtttcacatggctggggaggcctcagaaaacttagaatcatggtggaaagtgaaagggaaacaaggcatgacttacatggtaggaagaaagagcaaaagtgagaaggaagaagcatcagatacttaycaaacgaccagatcttgtgagaactcactcactatcacaagaacagcaagggggaaatccccccacgtgatccaatcatgtcccaacaggtctatcccttgacacatggggattacaattcgagatgagatttgggtaagggcacagccaaaccatatcattccacccttgcctgccaaaatctcatattctttttacatttcaaaacacaccatg

SEQ ID NO: 154365 - DNA, 626 bp, Homo sapiens
taagaagaaatgtattgactgagagtaggcttagcctcaaaaatatgtaacagtagtaaaatagttcattgtattttaaattttagccatatattgcttaaatgtttttctctgctcagaaaaagctaatagcttgtgaaggaaaacactgtgtgcttattttttattgcttgacatgtcttaatttaaggtaagtgataagtcacaaaccacgttaaaatctagcatcaatattgcagtctttaacaagattacaaagaagaaaagataactctatttggcattgatgctgtgctttcagcatgtgttaataaaatgtaatctaaaaggcaattaattacatgattaacaaaagagtatgttaaacacacacacacacacacacacacacacacacacacacacacacaccagaattgttttccaggagtaagaaattggagaaaagagtagcatatattaaggtgaattcaaattgcattatgttcactkttgctctgaagtcagattaattacatctcctaattctgttggcatttttttaattctaatgaaaatacctatgctaattagatacttttaaagaattctgaaccaaaaggaagtaaaaactgacagcatataat

SEQ ID NO: 154366 - DNA, 368 bp, Homo sapiens
gaattccatttagttgcggtattagtctactctcatgtcactaataaagacatagccgagactgggtaatttataaaggaaagaggtttaattgcctcacagttccacatggctggagaggcctcacaatcatggctgaaggagaatgagaagcaaagtcatgtcttacactgtggcaggcaaaagagcttgtgcaggggaactcccatgtataaaaacatcagattcatgagacttattcactattacaagaacagtatgggggaaatgtcccccatgattgarttatcttcacctggccccacccttgataagtggggattactacaatttaaggttaggtttgggtgtggacacaaaaccaaacc

SEQ ID NO: 154367 - DNA, 615 bp, Homo sapiens
gaaatgaaagttttatgtgccctcctgaggaacttaatgtccttatagatttttctggttctaatagtaaatccattytaatattaatttaaataaatttaaaatttatttgaaataaactcaaataagataattctaacaattcatcaatttttatagtctgtatttggcaagcttcaaagaggcatcccagcagcaaattaagactggatccaggtgtttatatcaatatattatattttaagtttattatcaacaaacttactcagccttgtattctgcccactgtgtccagcaccctcaagatccacctaactgttttctctaggttgtagccggtgcttaccggctaagtctcatagatctttctggaaataacctctttctttcaatagcagagcaaattgaacctcagtgggcccttgaccataagtgtttaactctagttattagcataatagtaatatgtaaatatatgagcagatttgcagaagaattattagcattttgcagggcacctgcttaagctgaggtcattccatgacctcttggcaatgagaggcttctatcttctaataaagagtaggagagaaatgcttcctgaccagagtttag

SEQ ID NO: 154368 - DNA, 615 bp, Homo sapiens
gaaatgaaagttttatgtgccctcctgaggaacttaatgtccttatagatttttctggttctaatagtaaatccattttaatattaatttaaataaatttaaaatttatttgaaataaactcaaataagataattctaacaattcatcaatttttatagtctgtatttggcaagcttcaaagaggcatcccagcagcaaattaagactggatccaggtgtttatatcaatawattatattttaagtttattatcaacaaacttactcagccttgtattctgcccactgtgtccagcaccctcaagatccacctaactgttttctctaggttgtagccggtgcttaccggctaagtctcatagatctttctggaaataacctctttctttcaatagcagagcaaattgaacctcagtgggcccttgaccataagtgtttaactctagttattagcataatagtaatatgtaaatatatgagcagatttgcagaagaattattagcattttgcagggcacctgcttaagctgaggtcattccatgacctcttggcaatgagaggcttctatcttctaataaagagtaggagagaaatgcttcctgaccagagtttag

SEQ ID NO: 154369 - DNA, 570 bp, Homo sapiens
atattgaaaaaatattggaatagactgttggattaattttgaggtgtgaatattcactaatcagcagtggatcctcatgtctatgagtttgtgtattaaaatccatgggccagggggagcggctcatgcctgtagtccctgcacttgtggaggtcgaggcagatggatcacttgaggtcagaaatttgagaccagcctgaccaacatggtgaaaccccatctctactaaaaatacaaaaaattagccaggcttggtggtgggcacctgtaatcccagctacttgggagtctgaggcaggagaatcacttgaaacctggaggcagaggttgcagcgagccaagatcatgcaacagaactgcagcctggkccacaaagtgagactccttctcaataaaatgaactacaataataaaataaaataaaataaaatataaaataaaataaataaaatccatgaataattgaatctatggggcattagtgcattcttgtgtttaccaaaggcatggatataactcttttggagtgtcagcattctaaaatcaatatcccaaaaggcctgtaaacac

SEQ ID NO: 154370 - DNA, 617 bp, Homo sapiens
tttgtggctggagcgtttcttgttgccactgctgataaggatatcggagcccacagattcctggaggtgccaaaatcttctgttgatgtttctatcacagtcagagcaagaagtgacctgttttcttttatcttcccttctaaatttycataagggactcctagtcacagcaactaagtagaaatcagctgttaaagatgtctccaaaatatgacttgtaggttcctagctctgtgtaaaactgttaagaactagagagggttggaatggaactttggaaaaaacatgtagtatctgacagagtgtttgcactggttttctaggtctgccataatgaaggagtataaattctgaggcttacgcaactagaatttattttcacacaattctggagactagtagttcaaaattaaggtattggcagaattggtttcttctgaggactatgagacaaaggtttggtctaggcctctctccttggcttgtagatggctgacttctccctatgtctcttcactaactcttctctcagtatatgtctgtccaagtttttccttcttatatgaacacaagtcatattggattaggggccaccctaataacctcatttaacttga

SEQ ID NO: 154371 - DNA, 580 bp, Homo sapiens
aatctttatttaagtaattgaattagcactttaagatcacccttgttatttatgccctttaatccagtggggatttcaattcaggagttattgatgtgggccaatgtagatttaaaaatgaaattggttttcaacaggtgaaacaaagtatgtgaaataatagatgtacacaaatagagtttgaaatatttttaaaatatgcttttagttgaacactttgggtttcctgagttattccataatttttattatacmtttttgtttcttaataaaaagtagtaaacatattttgaaaatttcagagaaaattgcacgatacaggtcataaagcagtggtcaaatggattaatataattaattaatacagatgtttcttccaggattcttatagttagaggttttacatttaagactttaattcatcttgaatttatttttgtataaggtgatatgtaggaccacagtttcattatactgcatatagatagccagttatcacagcatcatttattgtagaggaattcattccccattgcttaatttgaagatcaaatggctgtagatgtgcagctttatttct

SEQ ID NO: 154372 - DNA, 528 bp, Homo sapiens
ctgtcagcagggtctttgcacttgttcttcagacttctggaaacggttttctctaagatattccaacatgttcttttttacctttaatcacatctcaaaytcgtacctcttcagagatagatttctttatcatctcacctaaaaatgcaccctttgcatatcttcttcctttattgtagatgacaacatacgctaatttgcatctcctcaatgtttgcgatatccataattctaaaagagaaagaaataaagaaaatatgatggtagagagagagagagctaaactaaataaaagcattgagcgaataacactagcatttttgaactatattattttattgggagtgagtaaactaggaatcaggatagacaagtttagtagtttcctggcagaaatttattatgtttaatgttacagttatttaacttcatgcattgatgaaagagttggcaaaggttcctggcccatacacaacgttccaaaaaaattgataataaaatgttactcaattactttttttattagac

SEQ ID NO: 154373 - DNA, 561 bp, Homo sapiens
cctcctcctaggaatgcattctctttctcagggctattycttgctgagaaaatgaattcagtgatatttctcctatttgcttttgaaaaaagagaaatatggctttgttctgcccagctttcaggcagccagacctaatggttgtctcccttgttccctgaacattgctgttatcctgttcttttttcaaggtgcccagatttcatattgtttaaacaatttgtgcagttaacccaatcatcacagggtcctgaggcaacatacatcctcagcttatgaagatgacaggattaagagattaaagtaaagacaggcataggaaatcacaagagtattgattggggagtgataaatgtccatgaaatcttcacaatttatgttcagagattgcagtaaagacaggcataagaaattgtaaaagtattaatttggggaactaataaatgcccatgaaatcttcacaatttatgttcttctaccatggcttcagccagtccctccgttcggggtccctgaattcccacaacacagattcaatgcaatctctgtcaaaatatcaat

SEQ ID NO: 154374 - DNA, 618 bp, Homo sapiens
acaaaataaacctaaaataaaactcacagttattcacttcacatctggaaagaggagcacaaagatcaacttttaaaacttatttatggccaggcatgatgtctcatgcctgtaatcccagcactttgggaggccaaagcgggcagatcacttgagctcaggagttcgaaaccagcctggccagcatggtgaaaccccatctccactaaaaatacaaaaattagctgggtgtggtggcaggcacctgtaatcccagctacctgggagggaggcagaagaactgcttgaacccagaaggtggaggttgcagtgagctgagactgtgccactgcattccagcctgggtgacagagcaagactccatttcaaaaacaaacaaacaaaaaaacttatttaatttagtacagagaaaggccagcatcacaaaagcttttatttcctcttactttttaggtgcccaaacaacttagatttgagatataagcattttatgatttataacaaattttaataaagcttttatgccatttcattgataattcacattttacttgtcctttgactagttttttkttttttttttcccagattcgattcagttggaaagacatggttaat

SEQ ID NO: 154375 - DNA, 509 bp, Homo sapiens
agttatccaccaccttttaagtaagagccatatcacctcattacaattaaccattgcctgctaatgaagataccagacactgttttgtccttggaggtggtatatgtttatatctgtgtcatccctgatatcaatagagaaaaggaagtgtttggcactttgagagggaatttggtgttgtgtggaatatcagctctgttaatacctggcttggaccttgatcaaggcactaaaatctcctttggtcctagatcttatctataaatgtctaggtttcattatctatcagtaaagatatatgcatatccacatatatgaatttgattttaaatatttaaatcaagtgttgaattgatataarataagatttatgactgggcatgatggctcatgcctgtaaccccagcactttgggaggctgaggtgggcagatcacttgaggccaggagtctgagaccagcttgggcaacatagcaaaaccccttctttaaaaaaaaaaaaaaaaattc

SEQ ID NO: 154376 - DNA, 528 bp, Homo sapiens
gcagtggcatgattataggtctgtattagtttgactcatactgttatgaagaaatacccaaaactgagtaattttaaagaaaaagagatttaatggactcacagctccacctggctggagaggcctcacaatcatagcagaaggcaaaggaggagcaaaggtacgtcttacatggtggcaggcaagagagcatgtgcgtgtgcaggggaactrccttttataaaaccattagatctcgggagacatattcattatcatgagaacagcatgggaaaaacctacctcttgattcaattacctcccactgggttcctcccacaatacatggggattatggtagctacaattcaagatgagacttgaatgtggacatagccaaaccatgtcaaggtcacagtcctggactcacactcctggactcaagcaatccttcccactcagcctcctgagtagcttagactacaggcacatgtcattgcactcagctaatttttttatttttaaaatttttatagagacagggtcttt

SEQ ID NO: 154377 - DNA, 528 bp, Homo sapiens
gcagtggcatgattataggtctgtattagtttgactcatactgttatgaagaaatacccaaaactgagtaattttaaagaaaaagagatttaatggactcacagctccacctggctggagaggcctcacaatcatagcagaaggcaaaggaggagcaaaggtacgtcttacatggtggcaggcaagagagcatgtgcgtgtgcaggggaactaccttttataaaaccattagatctcgggagacatattcattatcatgagaacagcatgggaaaaacctacctcttgattcaattacctcccactgggttcctcccacaatacatggggattatggtagctacaattcaagatgagayttgaatgtggacatagccaaaccatgtcaaggtcacagtcctggactcacactcctggactcaagcaatccttcccactcagcctcctgagtagcttagactacaggcacatgtcattgcactcagctaatttttttatttttaaaatttttatagagacagggtcttt

SEQ ID NO: 154378 - DNA, 629 bp, Homo sapiens
cctttaacagcatctccatctcttcctggccttgccgccccacccagtaaaaccataatacttgctggtatagcctcttcctgcaaataaaagtatacaaggagttcagaacggacactccaaacaaagggatttatgaccttggtctcatgttctcttgtggtggtaaaattcacttttctatgaaattaaaaattcctcccttgaacaacattgccagaggtccccagaacaaggcaaaactgggtattcaaaactttttaagtttaggaaacgctgcctggaatctctatttctccctcctctggttgcattctattcctcaggttatgtgcttctgaaattcgtatctagctctgtgcccraagatgcttccagctcgcttgcttcccctgctccctgctccccgcaggcctgcggagagcaccgccccagtctgctattaagatctgctcaactgtttaattgcacagcccgtcccagcagcaacctctccacagcctctcacttgccaaccaactggccgcccactcacattctcttgccggcttgctcactgcccaaacacacacccctccccccagttcatctcttacccactcacacaacgaagatccgacttatccaat

SEQ ID NO: 154379 - DNA, 400 bp, Homo sapiens
aggtgacagagctagtattcaaatccacatagcctatatttacctctgctgatataatgtacttattctttttttatttagaaaaagcatttaagagtttgatttattgttgtttggtgtataacattccatatctatcacatctgctgtgaggattataccctttattggtataaaaatttccttttttaaatttaatgtatattgactcactttacatatcaaaatatttaattttgtcttatttgtattygtcaatatatctttgaacattgtttaatttacaaccttataaagagcacacagttggagtttatttcttatactgactgtgtcttctgttgttatgcttaatgcttttttcccctttccctcatttcctttgttatttctttttatg

SEQ ID NO: 154380 - DNA, 400 bp, Homo sapiens
aggtgacagagctagtattcaaatccacatagcctatatttacctctgctgatataatgtacttattctttttttatttagaaaaagcatttaagagtttgatttattgttgtttggtgtataacattccatatctatcacatctgctgtgaggattataccctttattggtataaaaatttccttttttaaatttaatgtatattgactcactttacatatcaaaatatttaattttgtcttatttgtatttgtcaatatatctttgaacattgtttaatttacaaccttataaagagcacasagttggagtttatttcttatactgactgtgtcttctgttgttatgcttaatgcttttttcccctttccctcatttcctttgttatttctttttatg

SEQ ID NO: 154381 - DNA, 563 bp, Homo sapiens
aacgaaaagaaaattggactaacagagttgtagggacattaatgagaaaggacaagtctatcaggaaaacaaaagcaataaatctggatgagcctaagtctaaacagctaaagttgttactttttcttaccatggaactcttatttatactgaaagtttcctaattttaagtgtatttaaaaggattattacttgtatgcatttttcataccttctaaattgtgatgtgcaatggacaaacaaagtccttatcatacctagaaggctctgtatgacctatgtctttctctgactcttgtctctctgtccttcactccttccyactcactccaattgccctggcctgtctgctgttctgtggtcacaccaggacatcatacctcagggcctttgcactagaggttctctctgcctcaaactcactctcttcctggaatatctgactagccacttcctcaggttcttcacacctctgttcaaatgtcatactgtcagtgagaacccaccctgacaactctttttgaattgcagtgtcccataccccttaactttttatttgcatt

SEQ ID NO: 154382 - DNA, 459 bp, Homo sapiens
ttttaacagcctgcctcctagtggattggaagactgttgctctgtttgtggaaccctatcacttctctytgagaaagccccgcagatctaggtttctggttttgcgagtttgggattttccccctaaccaggcttgtatcgacaagtttactgaattgtcaactttaagtgtgcagcactcatggcatctcaggacactcaggatgcccctccccccgccaccaaagttttaggattttttgttagttttttactatgtcgcaaacaacttgcataagctccatggatgttagcacatgaagttttataacaaatcaagaatatcccagacaacgtgtctctttccccacagcttcaatatttctccagcgagagcataagatttgccaaggaagctcatgactcttcatcagaaacagatccctgcccttcatcactacccagacagggaccgaattg

SEQ ID NO: 154383 - DNA, 289 bp, Homo sapiens
cgttatctaatagatacacttttacatacggtgcttrggaaagaaaacacagaggagaatgagcaataaactatggacatgaaatggccgacgcacggtgacatttaccagtttagtaatctttggctgaaagagctagcaatcatgccactggcctagctgcattctgtcaaaatcattagataaacagtggataactgtgtctttcagggagttttaggggatgctgacataacctctgagtttattatcatttttttcatcaactggttatataggtttacacact

SEQ ID NO: 154384 - DNA, 585 bp, Homo sapiens
gaatggttaatctagtgatgatctmttcataaccagatgactaggcagagccttaaacagtgacacagaaatttattttaagacatgtcattacatgagaaaagcaaaacagaacaatacaaggtctcttttatatttttttaaaaaaacatattgcatcatatgatgttttatcccctactttgaacatcaaaaatctgaatacatcttaaaatcaataacatcatagattaattggcagtgttttttctttcttagtggtacataaaatcattgcatgccttacaaacaaaaggatcatatatttgttaggaatgtggtgtatatacataaatttattatgcaaatgagctttttcaaagtcaggaaggatgcctactacaatgtccataggagataatctgtaagatgtgtctgattaaacaaagtaaggggatgggaatgttttactctgtatgtttctatgtttgaattttaactacatgtgaaatagaatcccatttgaacagttaaaaatatatgtgcctagaaaaaaaaatctagtggaatgtaagccaaaatattatcagtagttttctctgggta

SEQ ID NO: 154385 - DNA, 585 bp, Homo sapiens
gaatggttaatctagtgatgatctattcataaccagatgactaggcagagccttaaacagtgacacagaaatttattttaagacatgtcattacatgagaaaagcaaaacagaacaatacaaggtctcttttatatttttttaaaaaaacatattgcatcatatgatgttttatcccctactttgaacatcaaaaatctgaatacatcttaaaatcaataacatcatagattaattggcagtgttttttctttcttagtggtacataaaatcattgcatgccttacaaacaaaaggatcatatatttgttaggaatgtggtgtatatacataaatttattatgcaaatgagctttttcaaagtcaggaaggatgcctactacaatgtccataggagataatctgtaagatgtgtctgattaaacaargtaaggggatgggaatgttttactctgtatgtttctatgtttgaattttaactacatgtgaaatagaatcccatttgaacagttaaaaatatatgtgcctagaaaaaaaaatctagtggaatgtaagccaaaatattatcagtagttttctctgggta

SEQ ID NO: 154386 - DNA, 603 bp, Homo sapiens
tccacaaagacaaatgaccttttgatttaaaatcaaccgtgtaggatctgaatttgtatactgtgcatacaatgaggaagagaggcagtagtttctaatgtaacctaggatatgcttgggactgatacagtggaaaagtggaatctagtgtatttctcttaggcattaaagtttggtgctgacataagaatgtaatttctgtagcttttattccaaagatgtaaaagggtggttttggttttgatcttgtaatgtgaggaatttattgctttttacttgaaatttcataattgcttagaaagtgagaataggatgagagctrgtacagaagtatgagttgagatggggaaatgttctgatgaggaaactgatggtgaggcaacatgtaatacagaagtataagaaagaataggaagaataccacagagaccctccaggaaaggcactgtgctcattaactgaggtattgaggaattttacttcaccacctttcagccaaatcctcctttccaaaggaaatatcgtagcccaaaggtaggggaacagcggccacccacctttatcaaatcctttccagtcccattgacatttgaagtatctcaa

SEQ ID NO: 154387 - DNA, 603 bp, Homo sapiens
tccacaaagacaaatgaccttttgatttaaaatcaaccgtgtaggatctgaatttgtatactgtgcatacaatgaggaagagaggcagtagtttctaatgtaacctaggatatgcttgggactgatacagtggaaaagtggaatctagtgtatttctcttaggcattaaagtttggtgctgacataagaatgtaatttctgtagcttttattccaaagatgtaaaagggtggttttggttttgatcttgtaatgtgaggaatttattgctttttacttgaaatttcataattgcttagaaagtgagaataggatgagagctggtacagaagtatgagttgagatggggaaatgttctgatgaggaaactgatggtgaggcaacatgtaatacagaagtataagaaagaataggaagaataccacagagaycctccaggaaaggcactgtgctcattaactgaggtattgaggaattttacttcaccacctttcagccaaatcctcctttccaaaggaaatatcgtagcccaaaggtaggggaacagcggccacccacctttatcaaatcctttccagtcccattgacatttgaagtatctcaa

SEQ ID NO: 154388 - DNA, 534 bp, Homo sapiens
gttttatataaggtgagaggacccagttttattcttctgtatgtggcttgccagtttttccagcaccatttattgaatagggtgttcttttcccaatttatgtttttgtttgttttgytgaagattagttggctataagtatttggctttattcctgggttctctattctattccattggtttaggtgcctatttttatgccagtaacatgttgttttggtaactatagccttgtagtataatttgaagttgtgtaatgtgatgcctccagatttgttcttttttcttagtattgctttggctatgcagtctcttttttggttccatataaattttaggatttttttctagctctgtgaagaatgatgatgttattttgatgagaattgcattaaatctgtagattgctttgggcagtatggtcattttcacaatattaattctacccattcatgagcatgggttgtgtttccatttgtttgtgtcatctgtgatttttcaggagcgttttgtagttttccttgtagagatctt

SEQ ID NO: 154389 - DNA, 534 bp, Homo sapiens
gttttatataaggtgagaggacccagttttattcttctgtatgtggcttgccagtttttccagcaccatttattgaatagggtgttcttttcccaatttatgtttttgtttgttttgttgaagattagttggctataagtatttggctttattcctgggttctctattctattccattggtttaggtgcctatttttatgccagtaacatgttgttttggtaactatagccttgtagtataatttgaagttgtgtaatgtgatgcctccagatttgttcttttttcttagtattgctttggctatgcagtctcttttttggttccatataaattttaggatttttttctagctctgtgaagaatgatgatgttattttgaygagaattgcattaaatctgtagattgctttgggcagtatggtcattttcacaatattaattctacccattcatgagcatgggttgtgtttccatttgtttgtgtcatctgtgatttttcaggagcgttttgtagttttccttgtagagatctt

SEQ ID NO: 154390 - DNA, 586 bp, Homo sapiens
gattcccaaacatcttcttggataattttaaaatctcaaaatataagaaagaactttaaatgtcacttagtccagccagtattccacctcatacttaattttcagttctttccaaactccaaaaggagttctgtactctagctacgtgaattacatgaagattgcccagtcaagaagtttggctccattgttgtgaaagagtggcgttttccactaaaatagccttgaaatgttaccagtgtccatacatttgctatctagcacattttttgtagtctctgcataaaattacaatwttcctgcttactacatctgcttttggtgcatttaacaatgcctcctctcatttttggtcttttattttttgatcaatgtaagtgtttaagactatgaaacaagtgtaacaaatttaatactcatacgttaaagaaaaattgtttaaaatgagtattcattttcatttttctacttaattcagaatgctattggaagactcttgtttcatacctgttacctagaattaatctttctgggttttggcattcttcaagaaaaatgacacgagtaggcagttaggatgtgctgc

SEQ ID NO: 154391 - DNA, 586 bp, Homo sapiens
gattcccaaacatcttcttggataattttaaaatctcaaaatataagaaagaactttaaatgtcacttagtccagccagtattccacctcatacttaattttcagttctttccaaactccaaaaggagttctgtactctagctacgtgaattacatgaagattgcccagtcaagaagtttggctccattgttgtgaaagagtggcgttttccactaaaatagccttgaaatgttaccagtgtccatacatttgctatctagcacattttttgtagtctctgcataaaattacaattttcctgcttactacatctgcttttggtgcatttaacaatgcctcctctcatttttggtcttttattttttgatcaatgtaagtgtttaagactatgaaacaagtgtaacaaatttaatactcatacgttaaagaaaaattstttaaaatgagtattcattttcatttttctacttaattcagaatgctattggaagactcttgtttcatacctgttacctagaattaatctttctgggttttggcattcttcaagaaaaatgacacgagtaggcagttaggatgtgctgc

SEQ ID NO: 154392 - DNA, 586 bp, Homo sapiens
gattcccaaacatcttcttggataattttaaaatctcaaaatataagaaagaactttaaatgtcacttagtccagccagtattccacctcatacttaattttcagttctttccaaactccaaaaggagttctgtactctagctacgtgaattacatgaagattgcccagtcaagaagtttggctccattgttgtgaaagagtggcgttttccactaaaatagccttgaaatgttaccagtgtccatacatttgctatctagcacattttttgtagtctctgcataaaattacaattttcctgcttactacatctgcttttggtgcatttaacaatgcctcctctcatttttggtcttttattttttgatcaatgtaagtgtttaagactatgaaacaagtgtaacaaatttaatactcatacgttaaagaaaaattgtttaaaatgagtattsattttcatttttctacttaattcagaatgctattggaagactcttgtttcatacctgttacctagaattaatctttctgggttttggcattcttcaagaaaaatgacacgagtaggcagttaggatgtgctgc

SEQ ID NO: 154393 - DNA, 573 bp, Homo sapiens
caaaagtcattgtatggttcttgccttttccttcatggatttcatgaggcaaactctttgtagaaatataaatatggaaactgttcttataaattccaaaataattcagtgtaggcacttggtttgttgtttgaggttaattcctcttcactgtgagaatttcaattcagtgcttataatatgaacaatataatgatrataatagtgtatttgagaataaatctcaagcaacatagtgatgtgacaggcaagtagtgtcctgctgctagggaagtatcaacgcagaattaaaataggcttagaaaataaatctgtaggtgaaactgacacatttcaaagctgacatcttttattctatcactacattcatatctagcatagaaatgtgactctatttttgtttagatctgttccttcttgaaaactaaatctcttccaacattaaaagcaacacacttgtatttcttaaagttgtatttggaagcatgaaatccatcttgtttaactgaagtttttcctcatattcatatttttattgaattatttaaatgattttatgattaagagaataaa

SEQ ID NO: 154394 - DNA, 573 bp, Homo sapiens
caaaagtcattgtatggttcttgccttttccttcatggatttcatgaggcaaactctttgtagaaatataaatatggaaactgttcttataaattccaaaataattcagtgtaggcacttggtttgttgtttgaggttaattcctcttcactgtgagaatttcaattcagtgcttataatatgaacaatataatgatgataatagtgtatttgagaataaatctcaagcaacatagtgatgtgacaggcragtagtgtcctgctgctagggaagtatcaacgcagaattaaaataggcttagaaaataaatctgtaggtgaaactgacacatttcaaagctgacatcttttattctatcactacattcatatctagcatagaaatgtgactctatttttgtttagatctgttccttcttgaaaactaaatctcttccaacattaaaagcaacacacttgtatttcttaaagttgtatttggaagcatgaaatccatcttgtttaactgaagtttttcctcatattcatatttttattgaattatttaaatgattttatgattaagagaataaa

SEQ ID NO: 154395 - DNA, 498 bp, Homo sapiens
aagataaacaaacaaggaaactatcggagtgtaatgtgctgataattaaaatgaagagatgagagtgcaactgcgtgctccatcaggggatggctttagattgggtggcttttgctgcagctcttgtggtgttgaggktgggggggagttgacaatttatgatccacaacaccattaatcaggttgagaaagtatcagatacaccgcagagttctgcaattttgactctaagttacacaaaaagtaagttttcttatctataccagacagagggtgtaaccaggccttgttagaaaatgaataaacagtgattccaagtgccatttcctttgtctgtttagagaatttttagttatcacaaagctttcttatgaggtctttgataaggcaatggcatggtattaaaagctattatctaagaaaacaaaaccaatagatgcatattttacctgatgctatctttaagtggcagacatcaagggacactggaaagtaact

SEQ ID NO: 154396 - DNA, 633 bp, Homo sapiens
ggcattttgatactagctcataagaacctcccctaagtatgtcctgcacaactacaaggaataacagctcaataattctccatggttaagattacaggctctggagccagtcttttcagattgaatatatgattgctacactcactagctgagtggccttagatgactttaattaaaccatctacacctccatctacatctccttatctatggactgtgaaaggtggtattttctacctcaaaggactgttatgagaattaaatggatcaacacttgtagcagctggcacataataagtgttagctatcaatattcactgttcaatcagtgttagctatcaatattcattagagtgtaagctcccaacggcagaaaccatatycattccatctttgtgactcgcacaacattttatacactttcctatacattatatatgttcaatcagtatatctagattaaaatcactcagtaagatcaagggaagacttggttcacaggatcttagaactcaggtccaagtctccacccattgccaaatctgtttgacacataagcccttctgcctctttttgaagattttcagtgatgttaagtccgctcgggattgtccaacaaagattggacagcca

SEQ ID NO: 154397 - DNA, 528 bp, Homo sapiens
ctattattggtgatttgcatttgtctctttttttgtcagtcstgttagaagtttactaacttttggttttttaaaagaaccagctctttgtctcaatggacttccctgttgtttttctattttcaatttaattgatttctgcacttcattatttccttccttcttgctttgagtgcattttgatctctttctaggttcttgaggtaggaacttaagttactgatttgagacctttcttcatttttaatgtgaatattttgtgctatacattttcctctcggaactgcattacctgaatctcctatattgtgatacgtgggttttcattttcatttagatatatgcatttttaaatttccattgactccgtttttgacccatggattattatgtgtgttattaaattcccaaatatttgaaaatttccctgctgtcattctgttattgatttctctcctctctcattccagcttttaaaaatttgtttagactattttcatggagcaagatgtggtctaccttgatgaa

SEQ ID NO: 154398 - DNA, 444 bp, Homo sapiens
gaattcctccagagtggtctcatctcaggtgagggctccagcttctgcatcctagcactgggcaactgttgccttcaggctactcctgagggatagtgtaatctccatggcatttctaagaggggtggctggggatggcaggagcattcctcaatggccggacaaggctgtaccctgttggctgcactgtggrcatcagcagtggatgggtccagagacccaaaatgggatctgggtgagaacccaagagcactcactggactgattttctgagtaaacctatttgttgagcagctatggtattgggagaagagaaatggacaggaactcttaacataaagtctgggagccctagggcattattcagaggagtttcagagggtctactcgtcttctgaagttcagctgagaagcttcccatgctgagaagtatagcatggctcc

SEQ ID NO: 154399 - DNA, 444 bp, Homo sapiens
gaattcctccagagtggtctcatctcaggtgagggctccagcttctgcatcctagcactgggcaactgttgccttcaggctactcctgagggatagtgtaatctccatggcatttctaagaggggtggctggggatggcaggagcattcctcaatggccggacaaggctgtaccctgttggctgcactgtggacatcagcagtggatgggtccagagacccaaaatgggatctgggtgagaacccaagagcactcactggactgattttctgagtaaacctatttgttgagcagctatggtattgggagaagagaaatggacaggaactcttaacataaagtctgggagccctagggcattattcagaggagtttcagagggtctactcrtcttctgaagttcagctgagaagcttcccatgctgagaagtatagcatggctcc

SEQ ID NO: 154400 - DNA, 525 bp, Homo sapiens
gagtaataacgtgttcaaatggaccaataacaatacaccagggtcaccattaattaaaaatcaaaccaacaaaaataaccagaacaatctgttttcctttgaagcaagggcagtatcagtcacttacacagcagtttctgagatggaaaatgtagttattaccctcagaaaactggcatgcaaacacttaggaagtgcacaatctcattaattctaggtattgaacacactatgtygacactgagcaaaccacaaatgcattttattgcctcctattaaatttaatgtcagaattctgcagattagattatgaaatactctttttcttctcccttagggtaattttgtacattggggaagataaatattacagtagacatatccttgtctctatgcacaaactggttttagccacagtgggttcacctgcatccatggacttaatgtctgtctttcctcaacttaaaaaaatgtgggtagccattgccttccttgccatttgtgcagcacctttgcctataacct

SEQ ID NO: 154401 - DNA, 547 bp, Homo sapiens
tgaaatgcttatttcagcttctgtaggtggcacaagaagaagcagggattccagaggggaagctgatgtaatgaactcagagagaggacaggggacctggatcagggtggcagtcgtgaaacggcgaagagtggtccatgttcagatacattctcatcatagggcctatgaatgtccctgatggattgggctggtgggagagagaaagcagcaccaagcatgacctcaagattgaagacctgaatacacggagaaggctgttggcagaacagatgagggtagtggtggaattggcagctrtaattgcaggatgggtgatgacgtaatgtttgaggtgagttcaggatggagaatctagctgggcatgtatgttcaggactcttcagagaaccggtgacatgtaaagtcatggaatactacaagccaccaaaaggacaaatatgggactggaagacaagtctgaggactgagcattgacccagtccacaagccagggacaccaagagcagtcagtcatgtcgaatgaatgagagagggctctcagtgg

SEQ ID NO: 154402 - DNA, 408 bp, Homo sapiens
tgatgaacgtgcttgaatttctaccctgcaattactcattgtcatattcaccatctttcttgcactcatgcattccacatgtgttaatgagcacctcccacgtggcaggctctgtgcaatgtacagtggacaccttgacaaataaaggatacctggtccctccctggcctcrggcaagggctgtaacccaggcctggcagattggagctgatggccaaatgcaactctaagtatgctgaattttctttacataatttcttttctattatcttcattttattttattttcctttcttttgtcttcattctcttttactgtggcaaattgtggtaccacattttaaactttaaaaggtaccagagtaaaacctaattttctggactttcttgaagaataggacgatctgg

SEQ ID NO: 154403 - DNA, 386 bp, Homo sapiens
ctttttaccttcatacttccaagttaatagaattaaatcagaatactccattctttcaaagcctctagtaaggcaaagttttactgtattacttcttgctatcaatggctataaagcagagtcctggtaggcacattttgtatgcctgcaaagatgcagaacttaacagttccatctgttcaatattaccgcaaaagtcctttaaacctyggatggtgagtgtaatacttcagcactagcaccaaagcctcaaatataaaaagataccaagaacaccactagcaaacaaaatgagctcttggctgggagcagtagttcacacctgtaattccagcactttgacaagccaaggtgggaggattacttgaagtcagaagttcaagaac

SEQ ID NO: 154404 - DNA, 530 bp, Homo sapiens
tccccccctcttgaggtaaatcagcccatttccgtctctatccacttgccttttttggacatttcaaatcaatggaattatacaataagtgtctggcttttttacttagctaatgtttttgaggttggtccatgacatataacaggttttggtmgtttgttcctttcattactgagtagaagtccattgatggatatataccacattttgtcagcagagaacatttaaactttactttcaacttcctatggtctaaatgaaaccgctggaacacaggacttacagtgaaagctgctgtgcatgtcaaaagaactacttatcagaaccagctttgtcatcaggagcctgaactgctgcagaaatttttatcattttgcaacttctttttttacaagcagcttttgtgctactacacatcaggacttttgaagcatctgatacatccatctaataagtatgagcatgtgtctgaatggacaagtaaaaccatctatgctacactgtatattttttcctcccccagactggac

SEQ ID NO: 154405 - DNA, 505 bp, Homo sapiens
ccatttccgtctctatccacttgccttttttggacatttcaaatcaatggaattatacaataagtgtctggcttttttacttagctaatgtttttgaggttggtccatgacatataacaggttttggtagtttgttcctttcattactgagtagaagtccattgatggatatataccacattttgtcagcagagaacatttaaactttrctttcaacttcctatggtctaaatgaaaccgctggaacacaggacttacagtgaaagctgctgtgcatgtcaaaagaactacttatcagaaccagctttgtcatcaggagcctgaactgctgcagaaatttttatcattttgcaacttctttttttacaagcagcttttgtgctactacacatcaggacttttgaagcatctgatacatccatctaataagtatgagcatgtgtctgaatggacaagtaaaaccatctatgctacactgtatattttttcctcccccagactggac

SEQ ID NO: 154406 - DNA, 530 bp, Homo sapiens
tccccccctcttgaggtaaatcagcccatttccgtctctatccacttgccttttttggacatttcaaatcaatggaattatacaataagtgtctggcttttttacttagctaatgtttttgaggttggtccatgacatataacaggttttggtagtttgttcctttcattactgagtagaagtccattgatggatatataccacattttgtcagcagagaacatttaaactttactttcaacttcctatggtctaaatgaaaccgctggaacacaggacttacagtgaaasctgctgtgcatgtcaaaagaactacttatcagaaccagctttgtcatcaggagcctgaactgctgcagaaatttttatcattttgcaacttctttttttacaagcagcttttgtgctactacacatcaggacttttgaagcatctgatacatccatctaataagtatgagcatgtgtctgaatggacaagtaaaaccatctatgctacactgtatattttttcctcccccagactggac

SEQ ID NO: 154407 - DNA, 505 bp, Homo sapiens
ccatttccgtctctatccacttgccttttttggacatttcaaatcaatggaattatacaataagtgtctggcttttttacttagctaatgtttttgaggttggtccatgacatataacaggttttggtagtttgttcctttcattactgagtagaagtccattgatggatatataccacattttgtcagcagagaacatttaaactttactttcaacttcctatggtctaaatgaaaccgctggaacacaggacttacagtgaaagctgctgtgcatgtcaaaakaactacttatcagaaccagctttgtcatcaggagcctgaactgctgcagaaatttttatcattttgcaacttctttttttacaagcagcttttgtgctactacacatcaggacttttgaagcatctgatacatccatctaataagtatgagcatgtgtctgaatggacaagtaaaaccatctatgctacactgtatattttttcctcccccagactggac

SEQ ID NO: 154408 - DNA, 376 bp, Homo sapiens
gaattctagattttgtgtgccagatggtctccattgcaactatttaattctgccatggtaatgtgaacgcagccatacattataaaatgaatgggtgtggctgtgttctaatataactgtttataaaaaactatttataggcctcagtttgctaacccgttgtctaaacaatcagcataataatatatcaagccctgccaccactagatctgaggacccattcctccttcctttttcttctcttcccccctcasaggtaaccactattctgaaattgttgtgtattattcccatttatacttttgtacttttacatattatcacagtaaaatagactgcactcagctgccttagttttgtttagaatgatgggaaa

SEQ ID NO: 154409 - DNA, 608 bp, Homo sapiens
ttacttaacctctttgttccttggtttcctcattagtcaactaggaacacttaaacctgcttcataagttgctgggaggattatattaactaatataaacaagttgtttagaataatgcttggctcctaataagtactcaatatattgtagctattattgttgtttttaggaaaactgtggaatgaattttgaccaaactgctagctgctaaaggcagttcccaaactagacaagtgcttcagatgttcattgatctgtaaaatgatgggactgccagagtccttatctggagacagggcgggatctttgcactactaggtagactgatgctccccacagcattaagctgcagtatgaatcccaagaaccacagacaataaggataaggaagggagcaggagtgagtgctgattttaggaagcagagccagttctgggaacatttttaaattgctaaaaatttctcacttgtctcttttttttgarcaactacctttgtcaaaaatccaaggtgcccaaatcaatgttaggtcacctgagttccagaagattctcaaaactcagccgagtttggattttgctgggtatgcccaggatgatggaaacaa

SEQ ID NO: 154410 - DNA, 608 bp, Homo sapiens
ttacttaacctctttgttccttggtttcctcattagtcaactaggaacacttaaacctgcttcataagttgctgggaggattatattaactaatataaacaagttgtttagaataatgcttggctcctaataagtactcaatatattgtagctattattgttgtttttaggaaaactgtggaatgaattttgaccaaactgctagctgctaaaggcagttcccaaactagacaagtgcttcagatgttcattgatctgtaaaatgatgggactgccagagtccttatctggagacagggcgggatctttgcactactaggtagactgatgctccccacagcattaagctgcagtatgaatcccaagaaccacagacaataaggataaggaagggagcaggagtgagtgctgattttaggaagcagagccagttctgggaacatttttaaattgctaaaaatttctcacttgtctcttttttttgaacaactacctttgtcaaaaatccaaggtgcccaaatcaatgttagktcacctgagttccagaagattctcaaaactcagccgagtttggattttgctgggtatgcccaggatgatggaaacaa

SEQ ID NO: 154411 - DNA, 522 bp, Homo sapiens
ctaacaggaattgaggagggtaaatactcctcccataggacaatgtgttctgtacagcctccccaagctcccagtgggaaatgagccctatttggccacagagttaacccactcattaatgtaccctatattgtcttctttctctgtctcatttccctgttcccttactgctatttcagggtatcatctcccaaatcaataccatctaaaatccttttatcaggctctgcttctgaggaatccagtmtaagatagattgaggtggtgaaggaaggatttactgagtaaagtcttgacggacatgaagtagcaagctatgaagttattttggggaagagcattcaaggcaaagaaaacagcaagaacaaagagcttgaaacagcagtgctcctggtttgttcaagaaagagtgaagaggtcagaaggtaaaaatagatgacatcagtgagaatgagggccagcccctgtaggaccttgtaggtcatcatgagtatattaggttttaatcagagtgagagggga

SEQ ID NO: 154412 - DNA, 565 bp, Homo sapiens
gacattttattttatttttaaacttcttaatattgtttatctacaaagcttttgattaaataggcagcagagttctttggaatccccacaaaatccaacattctgtgccttagggttgctatgctccaactcagtctagygtgtataacaatatgctggggcagatttttttttaaatgcagtttccaaggaggcgtcaccagatattttattttgtatatcatctggctaggacccagatgattccaaagtagaaggttcaagaatcacactgtgagaaatattgcccaattctactttcctataagcaagacttttccatgctgttttcttttgctggaatatactgctgttcgtttcctgccttgcaaaatcctgtttatttttaaggactagttcaaatgtcacccattctataaatcctcccttttctcctattcttcccactgtagaaaattaattgctctctcctatgtgctctcataaccctggttaatgatttaagtgattctctccactgatggatttcggttgtttcagattaactattgttgttttaatgaaa

SEQ ID NO: 154413 - DNA, 548 bp, Homo sapiens
ctactatgcctttggaatctctttgtgacagatatgttgtctttaccctagttaatatggggagttaaagaaacttacccacggtatagtaggatcaggattcaaccccaagcagtctgaattcagaacctatacctgttcatctttgtagtcccaatctctaacatggtgctgggtacaagagagttcaatatatgtatgatgaattgaatagaatcttcctcttcggtaatagctttataccctaactctaccaatatttcacctgagctgctgacaagtgcaaaattgattgatttgagatttatctcttttcccrtccagcctatgcagctgattttctgattaacagtaaaatgcttcattgctgacaggacatcctctcaaaagattaaggggaaaaatctaattaatatcccttcaggctactttaactacaattcacttttagttcacaattgagaaatataagaagttgatgataaatgtcttaaagaatataacagcttattcaaaagccagcccagaattagaggctgcctactatt

SEQ ID NO: 154414 - DNA, 553 bp, Homo sapiens
tgaggcaggagaatcacttggtcccaggaggtggaggttgcagtgagctgaaatggcaccattgcactccagcctggggaaaaagggagaaacttcatctcaaaaaaaaaaaaaattcagtcagtcagcaaatatttattaagcacttactatgggacaggcactgtaagaatacagcaatgaamaacagtaagaagatccctagcttcagaaagaatcattctggaagagaaaaagttgaaatcctactggtctgtcagcattttatctagtaaaacactttcatcttggcttcctgacttcactccttttgcttgttttcacccgccgctgcagcctcttctactttaccagttccctttattgacttctttttttatgttactgctaaatgctgaggtttgatgtgggttcttctctcttccccgtaccttctctttgttagtgataacattcagtcccatcacttcaagtaacatctatactgtgccaggaagtgcaggcactggggtaacgtaaaacctagactgcatttcactttcaagttccgttt

SEQ ID NO: 154415 - DNA, 552 bp, Homo sapiens
gaattcttttcttcatgatcgatggaaatgggggagtggggtaaagagaaagtgggtatagggagagatcaactgaggccaacacttaaggttaatggaaaagatgaaattctgatttactcacacagagcaacctgcacacrtctcccatctttatctcacggagagagcactagatggggaatcaggaggtctggaattttacctccatcttcaccttcctgtgcaaccgtgagcaagtcagcaaactctgtgaacttcagttccatgataataatgggaaagaggactgtccatagcctcttatttcatagatgtgacagaggaaatatgatcagcacagaaagcaacctaaaatctttggaagacagaccttcagaatgatcacatggataaaagcattggtcctttagaagtcacataaagtagagcagtactcacactaacacactaagtactgggttggaaaataattagttaaacctactgtctttgaactgctgtgctgggattttaaaatgagtttcttggggaaaaccctccagtttaatg

SEQ ID NO: 154416 - DNA, 552 bp, Homo sapiens
gaattcttttcttcatgatcgatggaaatgggggagtggggtaaagagaaagtgggtatagggagagatcaactgaggccaacacttaaggttaatggaaaagatgaaattctgatttactcacacagagcaacctgcacacgtctcccatctttatctcacggagagagcactagatggggaatcaggaggtctggaattttacctccatcttcaccttcctgtgcaaccktgagcaagtcagcaaactctgtgaacttcagttccatgataataatgggaaagaggactgtccatagcctcttatttcatagatgtgacagaggaaatatgatcagcacagaaagcaacctaaaatctttggaagacagaccttcagaatgatcacatggataaaagcattggtcctttagaagtcacataaagtagagcagtactcacactaacacactaagtactgggttggaaaataattagttaaacctactgtctttgaactgctgtgctgggattttaaaatgagtttcttggggaaaaccctccagtttaatg

SEQ ID NO: 154417 - DNA, 521 bp, Homo sapiens
actggctgtctctgagacatattttctgggttttcccacaccagcttgctgcttttgctgtgtctacagacccctctactccctacccactcctaatctaccctcccttgcagtgtaatctgggagtggctgcagatgtgacgtgggatgcagtcctcacatgccatataaagagaagacccaacagwaacacccttgagccaaaatttcagtctctcactcaagaaaagaattttcaatgtgtctcctggttaatgtgaaaattggagtaatggactcagcttctggttcattcttggtgccctggccaaaactttccctctatgtgatttaggatttctggaagatggggccaagtgttcttcagaattcagcttgggttgagatgttcccttcttcctcctcagcttggtgagtctccagactttcctgcagagaagtaaatgggaaagaagatcatattctcagaaaagctctccatggaatgtgagattaattaaaataaaattccagcccctctt

SEQ ID NO: 154418 - DNA, 498 bp, Homo sapiens
gtgctaggcaaatgcaggttggcaaatggagtaaaggcctcctgcctagcttgttgagagctttcaaatgtgtttctagttccctgtgtaagtaacttgccaaaatgttaatctgaatcaaatcatgaggaaataatcagacaaatccagattgtgggacattgtacagaacaactggcctggactctttaaaaatatcagtgtcataagagacaagagggagggggtcctcagagacatacaacacaacagctgttgtagattgatgggaaaacaactatgaacgatattgaggtgaytgataaagtttgaatttggattaagtacaaaataatattgtaaagaggttacatttcttgagtataataatggtgttgttatataggacattgttcttgtttttaagtaatactgcagaaatatttagggatgattcacatgattgaatcattgatgtccacaacttactttcaaatggccccacaaaaatagaaataa

SEQ ID NO: 154419 - DNA, 588 bp, Homo sapiens
atgtgccttgtggttaaacaatgattgtttggggggctttaaggaaattgcttatttttcccttgcagcttatatgcttttccttgcccaaagatttgaacagtttttaatgaactccagactttatttctctaaagctttgtaaagtcagaatacattttcctgctttccccttcacccaagcagaggtgacctggctcctcgggaacctrgtgtcaatggtggctctctcatggtggcatcaagatctaccctacattataatgatgtgtgaacatgtcttattttctcttctggatttttagctttttgaagtcaggggctgtatctaaatgatgttcctactcctaatgcttctgaatatcatgctgaatgcaagaaaaaaatcagccaatcattactgctaactgataaaatagaattaagaagtgatgtattgtttcataaagaacctgaataaatagggggaaaaatgaacaaaatactgtttcattattattaatgggtagaagcagaaattagaagtaatatgctgtttcagaggggatgctaggtccttggtttagtaaatagacaatcttccattaa

SEQ ID NO: 154420 - DNA, 607 bp, Homo sapiens
tgccttgtggttaaacaatgattgtttggggggctttaaggaaattgcttatttttcccttgcagcttatatgcttttccttgcccaaagatttgaacagtttttaatgaactccagactttatttctctaaagctttgtaaagtcagaatacattttcctgctttccccttcacccaagcagaggtgacctggctcctcgggaacctggtgtcaatggtggctctctcatggtggcatcaagatctaccctacattataatgatgtgtgaacatgtcttattttctcttctggatttttagctttttgaagtcaggggctgtatctaaatgatgttccyactcctaatgcttctgaatatcatgctgaatgcaagaaaaaaatcagccaatcattactgctaactgataaaatagaattaagaagtgatgtattgtttcataaagaacctgaataaatagggggaaaaatgaacaaaatactgtttcattattattaatgggtagaagcagaaattagaagtaatatgctgtttcagaggggatgctaggtccttggtttagtaaatagacaatcttccattaacatgacaattatttccaaatta

SEQ ID NO: 154421 - DNA, 399 bp, Homo sapiens
ttggctccaaagccttcgccgtggtctgggtctgagtatttgtggtccccgcaaaattcctatgttgaaacctaattcccagggtgacagtattaggtggtggggccttygggaagtgattagggcatgaaggcagagtcctcattaatgagattagggtccttataaaagaggcctcagtgggctcccttaacgtttcaccatgtgaggacacagctagaaggtgccaccccgagcctgaaagtaggccctcaccagacactgaatctgctccactttggtcttggacttctcaacctccagaaccgtgagaaagaaatttctgttatttaaaaggtacccagtttatggtattttatgacagcagcccagatggacaaaggcagccttttctcattt

SEQ ID NO: 154422 - DNA, 610 bp, Homo sapiens
gaattcagttctctgtgattgcaggaatgaagtcatctgttccaggctactaagcaactctsaactccaagaggctgctcacagtttcctgccatgggacttcttttgggtctttttacaatattgcaaggaaaagcaagtttcctcatgtagagttttcttcatacttcagatttccctgcttcttcttctgctgtgagttggagaaattatctgcttttaaaagctcctaaaattaaactaggcccactaataatttttccatcttaaggtcaactgattagcaactttaattacatctgtaaaatctttttatgccatgtaatgtaaaaataagaatcacagaataaaaacagggggcagagatcatattcatagtgtaggattagggtgagaaatttttggggggtcatcttagaattttgccttccacagtaattacagtccaagtaaattcaattctacctaaaaaaaaaatcttcacaactttacacaattctaagacaaattttttgaatgattgcccaacatgctagatttaaggaaaattttagtttctaggactactgtccgatagacttattcaagaaccaaaaaactgcctgtcaat

SEQ ID NO: 154423 - DNA, 407 bp, Homo sapiens
gaattcctgacctcaggtgatcacaccgcctcagcctcccaaagtactgggattacaggtgcgagccactgcgcccagccgggagcctcaatttcatattaccttttcctctgttccctgagtatgtattttgggcacatgtggcactatgtgaaacatcacagaagagctaagagtagcctcagagcagtctgatattagtggaacacaggtaaattccacagatgcgaaggaatttccraacctctaatgctttgaaatatttataaaaacagacaagccagtagctataaaacatggtggtttgaagagaaaaaaagtaataataatgagtacagttggctctctgtatgtgtgggttctgaaccagtggattcagccaaccacagatggaaaatattttaaaa

SEQ ID NO: 154424 - DNA, 622 bp, Homo sapiens
atttttcctaatgtatattatgttggagattgtgactgcaagattttattttggatcttggttaatattactgttttaaccttagtgtttcaatagtacctcatgtaatagattctcaaggaatgtttttaaaaggtaaatggatgaagcaaatggtgtttatacagtagatacatgaaaattcaggttaatgtacaattaatatgaataaataattaaatatgtggatatacaaataaatgtttttagtctttgaaaaataatacaatttttgcatttaagctgattgagtaattcaaatttgtctgacaatacacactctgattagttgagagtagtgccacaacaatgcattaaactgtaaaagattttgtgtattactttatctatcagaatgtattcctcatgtaaattccatatattatagtggtaggggaaaaagtaagatgagaacaactagtaagtaartgcccttaatgacctactctcatgagaaaataaagatatatatatatatacacaaaaatataggtacactcaaagtgttttacaataacatatttttaaattaacgtagcatatcctcactgtagtgatattctttatagttatttatgaacaa

SEQ ID NO: 154425 - DNA, 354 bp, Homo sapiens
ttaattaatcattttcaactctctcctatcttggtttctgtgacaccattatctcttagtttcttttcctacatatttggttatttaaagaacaatgcttccttaacccatttcatatatgttggagtttcctaactttctattttcagcctttacatcttataattctacacatgcattcccatagtttcaaccttaatttcyaatgttttttaaacaaatatttattgagtatctgtctttaccagacattttgttgatgaatcccaaaatcatcatttctatttcaccttttcctcctgagctctagatcccagatgtccatctgcctacttgagttaatctcctgactgt

SEQ ID NO: 154426 - DNA, 431 bp, Homo sapiens
caaaaccacaggataacaggcacttttagttagtgaaaggagaatcctttttttttagttggtgggtatttttttcaagtttttcctcctctagtggcccatgtgaaagtcttattattagagtctctgtgattcccaaatacaatttcaaattttgatgcataaaattgccacctttggaatttttaaatttatttttgacaattaagggmaataaaaaagaacttccatctgctctatgaaaaaaagcaaggaagacaaaatataagaatttaaaaaatggattttccaaaacagcacattttgcaattatgttaatacctgagtttaaatttatatactcatatatatatatgcatacacatatgatattataatacagtaaaatatgtgtgtgtgtgtatatatatgtatgtgtatatatatattta

SEQ ID NO: 154427 - DNA, 431 bp, Homo sapiens
caaaaccacaggataacaggcacttttagttagtgaaaggagaatcctttttttttagttggtgggtatttttttcaagtttttcctcctctagtggcccatgtgaaagtcttattattagagtctctgtgattcccaaatacaatttcaaattttgatgcataaaattgccacctttggaatttttaaatttatttttgacaattaagggcaataaaaaagaacttccatctgctctatgaaaaaaagcaagraagacaaaatataagaatttaaaaaatggattttccaaaacagcacattttgcaattatgttaatacctgagtttaaatttatatactcatatatatatatgcatacacatatgatattataatacagtaaaatatgtgtgtgtgtgtatatatatgtatgtgtatatatatattta

SEQ ID NO: 154428 - DNA, 431 bp, Homo sapiens
caaaaccacaggataacaggcacttttagttagtgaaaggagaatcctttttttttagttggtgggtatttttttcaagtttttcctcctctagtggcccatgtgaaagtcttattattagagtctctgtgattcccaaatacaatttcaaattttgatgcataaaattgccacctttggaatttttaaatttatttttgacaattaagggcaataaaaaagaacttccatctgctctatgaaaaaaagcaaggaagacaaaatataagaatttaaaaaatggattttccaaaacagcacattttgcaattatgttaatacctgagtttaaatttatatactcatatatatatatgcatayacatatgatattataatacagtaaaatatgtgtgtgtgtgtatatatatgtatgtgtatatatatattta

SEQ ID NO: 154429 - DNA, 555 bp, Homo sapiens
catgaaactgaaaagcttttgcacagcaaaggaacaatcagttaaatgaaaaggcaacctgtggaataagagaaaataattgcaaactatatatctgataargggttactatagaaaatatatgaggaacttgcataatttaatggcaaaaaaatcaaaaataattaaaaaatggtcaaaggacctgaatagacatttttccaaagaaagcatagaaatggctggcggatttatgaaaagttgcttatgtggattcttatgacccaccgctgccctccagtaggatagctttctcactgactatttcttgatgtaagtgatgttttgacctatggttctttttttttttttttttttttttgtagtctctaggaatccagggtggcttttaacttctctctactgtaaccagttcattctttaggtagccttcatgggatgggccctaataaaactcaacatactgagtcacccctacctgtggcccgcatctggtccatagaaacctttaagtttgttttgctttattgaattctgggaatacaggctcattcc

SEQ ID NO: 154430 - DNA, 555 bp, Homo sapiens
catgaaactgaaaagcttttgcacagcaaaggaacaatcagttaaatgaaaaggcaacctgtggaataagagaaaataattgcaaactatatatctgataaagggttactatagaaaatatatgaggaacttgcataatttaatggcaaaaaaatmaaaaataattaaaaaatggtcaaaggacctgaatagacatttttccaaagaaagcatagaaatggctggcggatttatgaaaagttgcttatgtggattcttatgacccaccgctgccctccagtaggatagctttctcactgactatttcttgatgtaagtgatgttttgacctatggttctttttttttttttttttttttttgtagtctctaggaatccagggtggcttttaacttctctctactgtaaccagttcattctttaggtagccttcatgggatgggccctaataaaactcaacatactgagtcacccctacctgtggcccgcatctggtccatagaaacctttaagtttgttttgctttattgaattctgggaatacaggctcattcc

SEQ ID NO: 154431 - DNA, 555 bp, Homo sapiens
catgaaactgaaaagcttttgcacagcaaaggaacaatcagttaaatgaaaaggcaacctgtggaataagagaaaataattgcaaactatatatctgataaagggttactatagaaaatatatgaggaacttgcataatttaatggcaaaaaaatcaaaaataattaaaaaatggtcaaaggacctgaatagacatttttccaaagaaagcatagaaatggctggcggatttatgaaaagttgcttatgtggattyttatgacccaccgctgccctccagtaggatagctttctcactgactatttcttgatgtaagtgatgttttgacctatggttctttttttttttttttttttttttgtagtctctaggaatccagggtggcttttaacttctctctactgtaaccagttcattctttaggtagccttcatgggatgggccctaataaaactcaacatactgagtcacccctacctgtggcccgcatctggtccatagaaacctttaagtttgttttgctttattgaattctgggaatacaggctcattcc

SEQ ID NO: 154432 - DNA, 555 bp, Homo sapiens
catgaaactgaaaagcttttgcacagcaaaggaacaatcagttaaatgaaaaggcaacctgtggaataagagaaaataattgcaaactatatatctgataaagggttactatagaaaatatatgaggaacttgcataatttaatggcaaaaaaatcaaaaataattaaaaaatggtcaaaggacctgaatagacatttttccaaagaaagcatagaaatggctggcggatttatgaaaagttgcttatgtggattcttatgacccaccgctgccctccagtaggatagctttctcactgactatttcttgatgtaagtgatgttttgacctatggttctttttttttttttttttttttttgtagtctctaggaatccagggtggcttttaacttctctctactgtaaccagttcattctttaggtagccttcatgggatgggccctaatawaactcaacatactgagtcacccctacctgtggcccgcatctggtccatagaaacctttaagtttgttttgctttattgaattctgggaatacaggctcattcc

SEQ ID NO: 154433 - DNA, 593 bp, Homo sapiens
tgttgtctgaaattttgtggccaaataaatttgaactatgcaaagaaactaattcaataggttcttatgttttcaggacaggattcctcagtgtgtttattatgctaatgagcattatgaatctctgcaaggaggatataagttacagtgtttaacatgattgatcattggtatttggaagaaactttcctttatggagaaggactgtttataaaagccattctggaaatacagcaaacagaacgttatgatactttaatttgttgacattgtagtcacttttatgtcaaattaaaaaggagcaggaaaaaagttacaattccattatctagagccaattattgttgatgtttttgtacatttcctcttatactttaaaaatayacctttttgtatagttgaactgtttatgtaaggttgtacccttacttaattcttgatttttaagtttttgagttttctcatttgttcattttctccttatgaatatatttttgatgactgaataatatcagctagacaattcattgtcatatttgcataaacagtattttattattgggcatgcaatttttttagtttttactattgtg

SEQ ID NO: 154434 - DNA, 552 bp, Homo sapiens
ctcagtgccttctctaatgactgataattgaaaacagagattgggactatcaaatgtggtgggtgacagataagtagtagattaatgccaatacttggttacaagacactaaaaggtcagaagtcacatgaattagctattgtgctactgtgaaaagacagacatcaaaagtctattatcccctttaayagctcttagcctagcttgaaatccattctcacttccttagattataatttacaagtaatctccatgccattttacatatgatgtcaaagtgaagccactcaccctaagtatatcaatagttggagtttgcatattttatttacataataaagaaagtttgtttttaaaaaatcacatttttagtgtattcaatgtttatcttggtatattttaggaacattttatttagaaaaaaataattatactcaatgaaaaaaacacttgaaaaaataaagaagttgacaagtatattttatttgctcaatatttctctatgggggaaatggagtgggtttaagacacagtttgtatagtttaaaggat

SEQ ID NO: 154435 - DNA, 596 bp, Homo sapiens
aggctaatatctttaatgaacatatacaaaaatcctcaacaaaatacgcacaaaccaaattcagcaggaccttagaaagatcatacaccatgattaagtgtggtgtatcccttggatggaaggatggttcaacatttgtaaatcagtaagtatgatacatcacattaacagaatgaagaatcaaaattatatgatcatagtatgttatctatgattaatcccataaaacatggactttgttgctagaccttaagtctaaatakcactacgtaaatagcatatgtctctcattatccatgattatttatgttctatccatttttttttgaagaatgatcactgtaagtctaacattcagttcatatacctacagcaaagcatgtagttgcattgactctctgactcctagtgataaacttatgtgacactttatagaaatggggtagcaaaagaagaagctgaccaacaaagatgaaagtatagcaaagaaataaatgtgacaattctggtagtgaaattgaatgtgattagaagatttgtaaatggcaacaacaaagcaaatataggaattgaccctggccttcatgaagttaaga

SEQ ID NO: 154436 - DNA, 596 bp, Homo sapiens
aggctaatatctttaatgaacatatacaaaaatcctcaacaaaatacgcacaaaccaaattcagcaggaccttagaaagatcatacaccatgattaagtgtggtgtatcccttggatggaaggatggttcaacatttgtaaatcagtaagtatgatacatcacattaacagaatgaagaatcaaaattatatgatcatagtatgttatctatgattaatcccataaaacatggactttgttgctagaccttaagtctaaatagcactacgtaaatarcatatgtctctcattatccatgattatttatgttctatccatttttttttgaagaatgatcactgtaagtctaacattcagttcatatacctacagcaaagcatgtagttgcattgactctctgactcctagtgataaacttatgtgacactttatagaaatggggtagcaaaagaagaagctgaccaacaaagatgaaagtatagcaaagaaataaatgtgacaattctggtagtgaaattgaatgtgattagaagatttgtaaatggcaacaacaaagcaaatataggaattgaccctggccttcatgaagttaaga

SEQ ID NO: 154437 - DNA, 648 bp, Homo sapiens
tcaattacctcccaccaggtctctctcacaacacatgggaattcaagatgagatttagctgggggcacagccaaactatatcagattaagaagagaatktctttggcctgtttttctgattattgcctaatatttatgttgcatattctagtagattaacatgcaaacatgtaactttaaactttatgaaataaaaagtagaaaagtaacgggaaaatctaaatatgacatcagagctttcttagtgacacctcaagtcaacgttagaaatatgagtacactgtaatagtgaacggaagggtttcaaatgcatttaatttatttaaaatattatttaaaaataaaatcatttggtgataaaaacaccagggtttttttggttgtttgagtggtttgttttgttttgttcactcacagtacattccttacaaagtactcagaccctagagtctatcttacaagactgtacaaaaatagaagattttaaaactaccagtgataggtgcagtgcattctagaaaagaaataatataaagtttagttccatatctcactatcttgccataaagacaaactaaaataaaatatattttttaagaaaatacaaaaatgtgaggcttttaaacaatgtataaaaggcattatagc

SEQ ID NO: 154438 - DNA, 648 bp, Homo sapiens
tcaattacctcccaccaggtctctctcacaacacatgggaattcaagatgagatttagctgggggcacagccaaactatatcagattaagaagagaatgtctttggcctgtttttctgattattgcctaatatttatgttgcatattctagtagattaacatgcaaacatgtaactttaaactttatgaaataaaaagtagaaaagtaaygggaaaatctaaatatgacatcagagctttcttagtgacacctcaagtcaacgttagaaatatgagtacactgtaatagtgaacggaagggtttcaaatgcatttaatttatttaaaatattatttaaaaataaaatcatttggtgataaaaacaccagggtttttttggttgtttgagtggtttgttttgttttgttcactcacagtacattccttacaaagtactcagaccctagagtctatcttacaagactgtacaaaaatagaagattttaaaactaccagtgataggtgcagtgcattctagaaaagaaataatataaagtttagttccatatctcactatcttgccataaagacaaactaaaataaaatatattttttaagaaaatacaaaaatgtgaggcttttaaacaatgtataaaaggcattatagc

SEQ ID NO: 154439 - DNA, 648 bp, Homo sapiens
tcaattacctcccaccaggtctctctcacaacacatgggaattcaagatgagatttagctgggggcacagccaaactatatcagattaagaagagaatgtctttggcctgtttttctgattattgcctaatatttatgttgcatattctagtagattaacatgcaaacatgtaactttaaactttatgaaataaaaagtagaaaagtaacgggaaaatctaaatatgacatcagagctttcttagtgacacctcaagtcaacgttagaaatatgagtacactgtaatagtgaayggaagggtttcaaatgcatttaatttatttaaaatattatttaaaaataaaatcatttggtgataaaaacaccagggtttttttggttgtttgagtggtttgttttgttttgttcactcacagtacattccttacaaagtactcagaccctagagtctatcttacaagactgtacaaaaatagaagattttaaaactaccagtgataggtgcagtgcattctagaaaagaaataatataaagtttagttccatatctcactatcttgccataaagacaaactaaaataaaatatattttttaagaaaatacaaaaatgtgaggcttttaaacaatgtataaaaggcattatagc

SEQ ID NO: 154440 - DNA, 648 bp, Homo sapiens
tcaattacctcccaccaggtctctctcacaacacatgggaattcaagatgagatttagctgggggcacagccaaactatatcagattaagaagagaatgtctttggcctgtttttctgattattgcctaatatttatgttgcatattctagtagattaacatgcaaacatgtaactttaaactttatgaaataaaaagtagaaaagtaacgggaaaatctaaatatgacatcagagctttcttagtgacacctcaagtcaacgttagaaatatgagtacactgtaatagtgaacggaagggtttcaaatgcatttaatttatttaaaatattatttaaaaataaaatcatttggtgataaaaacaccagggtttttttggttgtttgagtggtttgttttgttttgttcactcacagtacattcyttacaaagtactcagaccctagagtctatcttacaagactgtacaaaaatagaagattttaaaactaccagtgataggtgcagtgcattctagaaaagaaataatataaagtttagttccatatctcactatcttgccataaagacaaactaaaataaaatatattttttaagaaaatacaaaaatgtgaggcttttaaacaatgtataaaaggcattatagc

SEQ ID NO: 154441 - DNA, 529 bp, Homo sapiens
tatcttgccataaagacaaactaaaataaaatatattttttaagaaaatacaaaaatgtgaggcttttaaacaatgtataaaaggcattatagcacagtgtacatcacttcttattttaaaaaacataagctttaattttaatattttaaattatgtaaataccacttattttattgaaggaaatagtgtagattactaaaaattagagaaacagtatacaaattttattgctacaagaaatgggtatataaaaatgtacttaaaagaaatgcaaaatcaataaaatagtccatagttaaagttcatatatcaatgcatatttaacatcctttccacttatatactgaggattatttaccagcaactatcgaagataacacayctcatattatcctatctacaaaatacaatcattaatatttttattgtgcacagtgtgagcacaagtcaagatcctccaatcagtagccttacattgtaaatagagtttgtaaaacctttcaatcattcaaagttcatttaagtaat

SEQ ID NO: 154442 - DNA, 602 bp, Homo sapiens
ttattgaaggaaatagtgtagattactaaaaattagagaaacagtatacaaattttattgctacaagaaatgggtatataaaaatgtacttaaaagaaatgcaaaatcaataaaatagtccatagttaaagttcatatatcaatgcatatttaacatcctttccacttatatactgaggattatttaccagcaactatcgaagataacacatctcatattatcctatctacaaaatacaatcattaatatttttattgtgcacagtgtgagcacaagtcaagatcctccaatcagtagccttacattgtaaatagagtttgtaaaacctttcaatcattcaaagttcatttaagtaattatttctattctagaccatttttagcatgayactactaaatacaagcaaattttatgacaatgttaatgtatttttaaaatttgaatataagcaaatgcacaaaatgaatgtacagagctatgcattttaataagataaatatttctgtatttagctaccacaaatgtcaggaaatagcacattactagcatgcagacacattaccacgttgtaccaaaatgcatgagaagtttgggaaagctt

SEQ ID NO: 154443 - DNA, 589 bp, Homo sapiens
atggtgcaagccccaagccttggcagcttacacatggtgttgggcctgtgggtgcacagaagtcaagaattgaggtttgagaacctctgactacatttctgctacctggatgtccaggcagyggtgtgctacaggggtcgggccctcatggagaatctctgctagggcagtgcagaaggaaaatgttgggttggagcccctacacagagttattattgtgacactgcctagtggagctgtaagaagaaagccaccctcccccagaacccagaatggtagatccaccaatgtcttggaccgggcacctggaaaagtgcagacattcaatgccaacacatgaaagcagccaagaggggagctgtacccaacaaagccacaggggaggagctgcccaagagcatgggagcccacctcttgcatcaatgtgacctggatgtgagacatggagtcaaaagagatcattttgggactttaagatttaatgactgctctattggatttcagacttgcatggtgcctgtaaccccttggttttggccattttctcccatttggaatgggtgtacttacctgatgcctatacctccat

SEQ ID NO: 154444 - DNA, 589 bp, Homo sapiens
atggtgcaagccccaagccttggcagcttacacatggtgttgggcctgtgggtgcacagaagtcaagaattgaggtttgagaacctctgactacatttctgctacctggatgtccaggcagtrgtgtgctacaggggtcgggccctcatggagaatctctgctagggcagtgcagaaggaaaatgttgggttggagcccctacacagagttattattgtgacactgcctagtggagctgtaagaagaaagccaccctcccccagaacccagaatggtagatccaccaatgtcttggaccgggcacctggaaaagtgcagacattcaatgccaacacatgaaagcagccaagaggggagctgtacccaacaaagccacaggggaggagctgcccaagagcatgggagcccacctcttgcatcaatgtgacctggatgtgagacatggagtcaaaagagatcattttgggactttaagatttaatgactgctctattggatttcagacttgcatggtgcctgtaaccccttggttttggccattttctcccatttggaatgggtgtacttacctgatgcctatacctccat

SEQ ID NO: 154445 - DNA, 589 bp, Homo sapiens
atggtgcaagccccaagccttggcagcttacacatggtgttgggcctgtgggtgcacagaagtcaagaattgaggtttgagaacctctgactacatttctgctacctggatgtccaggcagtggtgtgctacaggggtcgggccctcatggagaatctctgctagggcagtgcagaaggaaaatgttgggttggagcccctacacagagttattattgtgacactgcctagtggagctgtaagaagaaagccaccctcccccagaacccagaatggtagatccaccaatgtcttggaccgggcacctggaaaagtgcagacattcaatgccaacacatgaaagcagccaagaggggagctgtacccaacaaagccacaggggaggagctgcccaagagcatgggagcccacctcttgcatcartgtgacctggatgtgagacatggagtcaaaagagatcattttgggactttaagatttaatgactgctctattggatttcagacttgcatggtgcctgtaaccccttggttttggccattttctcccatttggaatgggtgtacttacctgatgcctatacctccat

SEQ ID NO: 154446 - DNA, 588 bp, Homo sapiens
ataagatttacactttcccagatctkaactataaaatgtagaatatagcagtattttttcaatgctgaccacttttattaaatcgtcataattaattgttctttaaaggtgttttgtcatacctttaatgtcaagtccacatattaaaaataacttgaatatagtaaaacactattctgcccacatattaaaagtccacaagctgaaaggacttttagttttttaactataataataaagttaaaaagagtctatttagatcttatttaaaataattatatttttaagcatgattgttttctatagcatttagctttcatttgaagaaactcaggttatcatgtttctagtacattatcaactaatttatttcaaaaggaaaaaataaaatattctaaataagatcaaaatcacaaatcttgactcctcttggaaccttgatttaaacttatgaaacattaatatggtagattttttcctcagaaaaacaattataaaagtaaataatcatttaattttaatatataatgttacaaacattttttgaaattgataaaatacttctaattcagggtagaatgtagtagt

SEQ ID NO: 154447 - DNA, 588 bp, Homo sapiens
ataagatttacactttcccagatctgaactataaaatgtagaatatagcagtattttttcaatgctgaccacttttattaaatygtcataattaattgttctttaaaggtgttttgtcatacctttaatgtcaagtccacatattaaaaataacttgaatatagtaaaacactattctgcccacatattaaaagtccacaagctgaaaggacttttagttttttaactataataataaagttaaaaagagtctatttagatcttatttaaaataattatatttttaagcatgattgttttctatagcatttagctttcatttgaagaaactcaggttatcatgtttctagtacattatcaactaatttatttcaaaaggaaaaaataaaatattctaaataagatcaaaatcacaaatcttgactcctcttggaaccttgatttaaacttatgaaacattaatatggtagattttttcctcagaaaaacaattataaaagtaaataatcatttaattttaatatataatgttacaaacattttttgaaattgataaaatacttctaattcagggtagaatgtagtagt

SEQ ID NO: 154448 - DNA, 588 bp, Homo sapiens
ataagatttacactttcccagatctgaactataaaatgtagaatatagcagtattttttcaatgctgaccacttttattaaatcgtcataattaattgttctttaaaggtgttttgtcatacctttaatgtcaagtccacatattaaaaataacttgaatatagtaaaacactattctgcccacatattaaaagtccacaagctgaaaggacttttagttttttaactataataataaagttaaaaagagtctatttagatcttatttaaaataattatatttttaagcatgattgttttctatagcatttagctttcatttgaagaaactcaggttatcatgtttctagtacattatcaactaatttatttcaaaaggaaaaaataaaatattctaaataagatcaaaatcacaaatcttgactcctcttggaaccttgatttaaacttatgaaacattaatatggtagawtttttcctcagaaaaacaattataaaagtaaataatcatttaattttaatatataatgttacaaacattttttgaaattgataaaatacttctaattcagggtagaatgtagtagt

SEQ ID NO: 154449 - DNA, 626 bp, Homo sapiens
cagccaaacctttccatggtgggtgggtgtgtgggggttctcaggaagtgccaggtcctcaggaagcagcctgtggggccaggctactgctcacggctgactgcagggtaccaccagcctcgactgtccacagcaagtccctccatgcccaatctgacccagagggaggcacatcagagcccagaagcccaagcagcccaagggcaaccatatcccagaagcagacattcgtgaaagtgttgctggagaagcgttctcaggagaaatggggagaaggaaggaaataaggatgtggtctgggcccgagatcagcttcagtctcaatccaccgggagcttaggagcacaaatgataccacaaggtcaggctcaccttgaggcaaggggcccggtcttttttccctactgtctgttagtcggtcatcagctgttggcttagggcaagggaactgagaaggcatgtagctagcctctgatggcaggcagctyctactcagctcaggtgaattatccagagaaggggcagctgggggctttagtggccaacacacacaggggctgggggatgggctgcacccatccagcaaaggggacttgggggggtaccaacatccctgcaccatgccc

SEQ ID NO: 154450 - DNA, 467 bp, Homo sapiens
ttgtgtcgactcggcgacatgctaacagtggttatcttgtgcgaagcaggagtgcagattggctgggaatgacatcataggagtccctggggccgttggaaggaaaagcaataaatgtggtcctgggaagtgaaaaggttagggccatgatgatgggggatggagctctgggctcagaattaggagacatgagaggcgggcgtggcatcagttcagtgagccacccaacttctctggaaagtgggaataatcacatctaccttgaggatcaaattaggtcaaaacgtctccaaaatggtgcagaaccaagcgagggacaggcttacgcctagcctgggmggtcctgaaggggtacacgggcagcggtggaaggagatgacgtgtctggagaaataagctgtttgctgaggttggagggggctatatggagagaagaagagttgggtgggagttggggcagttggggc

SEQ ID NO: 154451 - DNA, 681 bp, Homo sapiens
tctagtgggtgatatgagaaatttagcccttaaatatcagcctggctgtaatcatctcctaggtatagaaaggcatcttacccaatttgcaaatgtcccaaagctgccaggctggctaaagtacaggctgacaaactacaacttcaaaaagatcctaaaagtagtggaataataggctgagaacgtattttttacttaactattaaagtagcctacagcagtttatgttaaaaatgggctgagccygggcaacatagcaaggccccatctctaaaaaaaaattttttttaattacttgggtgtggtggcatgcacctgtagtcccagctattcaggaggctggggcgggaggacctcctgagcccaagattctgaggctacagtgagctatgattgcaccactgcactcccgcctgggagacagaccaaataaaaccccgcagtttctttaaaatggtctatgatgtcatgttgctgcccaaaaggccaatggcatcttaggttcacactcgaagtgtaatgtccaaacaaagcaggtgatatcccactgggaatccttttgggggcccatatttgaaaatggctatcaaaggagagggggcaaaggaacagagggaagcctctgcaaagctccagagctgggacctgggatcagtcagtgaaagttacagagaagcagag

SEQ ID NO: 154452 - DNA, 628 bp, Homo sapiens
gaattcaaatagctgatgacatygggcgacccaatgtcagtcagtctccgagggatatcaatggctcacaatcaggaagagtttaatacacgacattttataaatgtgttggcagggtgtaggcagaagcagggctgttaacacctcaaggtccgaaggaagggagtggttaccagaacccagaaagagaggccaccacgtgagtagcactgacctccagtcaatggacctggccagcctgaggtgaccacaggagagggatatgggggaagaaatgctttgacttctcctccaacctttggatcccctgctggggcttcccattggcagaacccagtgggaatccagagacacagggtctggtggactcagtcctagcagatcagctccctggggcagagaccagggacagaggatggccatggatctgggggttaacagaagttccctggcacctataacaatcctgaccccgaggttcttcctctgaaagtgggacagcatgatcacagtcctaagaccttaccagagttcgtgaaaggatcatgtgagatagaaatggccaaaggctttgcacaaaagtaatctgtgctccttacagcaggcctgcgaggcatccttcagtgcc

SEQ ID NO: 154453 - DNA, 593 bp, Homo sapiens
tcacagtgtttttctatgacaatacctttgttttctttatcagcttcatttgtgattatagcaccagaactcactgtttgagatgctctcagccctcctgagccaccttactttyagagctcctatctgtgggattgcaatggtctttttctgaatctaggcaatgctaccttctgaaattcgactatccaatccagctaggcccagcttgccctccttgtcccttatgaatgctaaaatgacttcttccaaagcttcctgtctcatgtatctattgctgcatgaaaaaccactccaagacttggtggctgaaaacggcagctatccatttgttcatgattctgcaatttcttctaggcttctgctcacctcatcacgggcacctttgcagctgccgtcagtgggtgactgggggccaggcttcagccaggtacatcactggcatgcctggagcctcagtgggatggctgggaggctcagtctgcctccacgtgtctcttaccctacaggaggttagtgtggaactccttccatggtagtcacagagcagccagaggccaagaacagaagctgcaaagtcccttaaggcctgg

SEQ ID NO: 154454 - DNA, 543 bp, Homo sapiens
cctgtccttgcataccaggcccagctcttccctactcaggaggggagggaagctggaaccaaaccctgcacaggcaagcattccacaggacatctgcctcatttaacagtttaaaataatctacawaatggggggatccttttttttttctaattaggaggatttggccatttgatcccaaaagtttcaggagaatctcaagagacattacccagatatccctattgcaaggttcccattccttccttttcagggttctgatattggacaattgctaaaaatgagacttcattattttctcaatttctgccactcttaggatcgggtcctgagtctggttcacacattggtagcacttaggctatagtatatgaagattgcttcctttacaggccatctgctgtcttttaattggcatttacttacttaaaatagtaatattttctcttcaaagcatcaatagtgtgcaacaataggcacccgattaacagtccttataattattatttgccagttacctctctaatgtcagagacaagccag

SEQ ID NO: 154455 - DNA, 465 bp, Homo sapiens
tgaactgaaaatggaagggaactgtgaatattcaacagacttgtygtagaaatgtaagaaaacacccatgacattacatttttaaagatttgtggtgacaaagcatcggctgattatgaagcagtggagaagttctttgatgagtttgccaaggtcatcgctaatgaaaatcggatgccaggacaaatctataatttcaatgcatgaaatgtcactgttttggcattgttgtcccagcaagacactcatgagatagcgcttacaggaattaaggatgtcaaggacaggataagtgtgctgagatgtgctaatgcagcagacagacataagtgtaaagtttttgtgataagcaaaagcttgagtcctcacttttttcagagggaatttcttaccagttaattattatgttaacaaaaagatatggctcatcagggacatcttttcctgatttgtctcttaaacatt

SEQ ID NO: 154456 - DNA, 454 bp, Homo sapiens
gatgaactgaaaatggaagggaactgtgaatattcaacagacttgttgtagaaatgtaagaaaacacccatgacattacatttttaaagatttgtggtgacaaagcatcggctgattatgaagcagtggagaagttctttgatgagtttgccaaggtcatcgctaatgaaaatmggatgccaggacaaatctataatttcaatgcatgaaatgtcactgttttggcattgttgtcccagcaagacactcatgagatagcgcttacaggaattaaggatgtcaaggacaggataagtgtgctgagatgtgctaatgcagcagacagacataagtgtaaagtttttgtgataagcaaaagcttgagtcctcacttttttcagagggaatttcttaccagttaattattatgttaacaaaaagatatggctcatcagggacatcttttcctgatttg

SEQ ID NO: 154457 - DNA, 501 bp, Homo sapiens
ggcaatcttctgcaaacactttcaggaaatacagaagagagagcggcttcccaacttattttgtaaagctgagagtgctgagaattattttataaaatcttttcttttacaaaaattgaaaagacagtattcctcatgaaactagacacacaaatcttttataaaaaactagtaaattgaatccagcaatwtatatataatgctttggtatatttaatcccagaaaagcaaggttgattaacagttgaaaatcaattaatgtaattcaccgactgacgcggaatggtctgtctactgcactagctccatgacactcacagcctctgcgggaatagtgagtgcaaatggacaaggtggaggtccagcctgttatcaaggaagtcattggtttaacgaaaagactctatagaaaaaccttgtaggtataaataggtgatcaacaaaatataaagtacatatttggcacattagattctaataaaactggatacatgggtttta

SEQ ID NO: 154458 - DNA, 502 bp, Homo sapiens
ggcaatcttctgcaaacactttcaggaaatacagaagagagagcggcttcccaacttattttgtaaagctgagagtgctgagaattattttataaaatcttttcttttacaaaaattgaaaagacagtattcctcatgaaactagacacacaaatcttttataaaaaactagtaaattgaatccagcaatttatatataatgctttggtatatttaatcccagaaaagcaaggttgattaacagttgaaaatcaattaatgtaattcaccractgacgcggaatggtctgtctactgcactagctccatgacactcacagcctctgcgggaatagtgagtgcaaatggacaaggtggaggtccagcctgttatcaaggaagtcattggtttaacgaaaagactctatagaaaaaccttgtaggtataaataggtgatcaacaaaatataaagtacatatttggcacattagattctaataaaactggatacatgggttttat

SEQ ID NO: 154459 - DNA, 502 bp, Homo sapiens
ggcaatcttctgcaaacactttcaggaaatacagaagagagagcggcttcccaacttattttgtaaagctgagagtgctgagaattattttataaaatcttttcttttacaaaaattgaaaagacagtattcctcatgaaactagacacacaaatcttttataaaaaactagtaaattgaatccagcaatttatatataatgctttggtatatttaatcccagaaaagcaaggttgattaacagttgaaaatcaattaatgtaattcaccgactgacrcggaatggtctgtctactgcactagctccatgacactcacagcctctgcgggaatagtgagtgcaaatggacaaggtggaggtccagcctgttatcaaggaagtcattggtttaacgaaaagactctatagaaaaaccttgtaggtataaataggtgatcaacaaaatataaagtacatatttggcacattagattctaataaaactggatacatgggttttat

SEQ ID NO: 154460 - DNA, 502 bp, Homo sapiens
ggcaatcttctgcaaacactttcaggaaatacagaagagagagcggcttcccaacttattttgtaaagctgagagtgctgagaattattttataaaatcttttcttttacaaaaattgaaaagacagtattcctcatgaaactagacacacaaatcttttataaaaaactagtaaattgaatccagcaatttatatataatgctttggtatatttaatcccagaaaagcaaggttgattaacagttgaaaatcaattaatgtaattcaccgactgacgcggaatggtctgtctactscactagctccatgacactcacagcctctgcgggaatagtgagtgcaaatggacaaggtggaggtccagcctgttatcaaggaagtcattggtttaacgaaaagactctatagaaaaaccttgtaggtataaataggtgatcaacaaaatataaagtacatatttggcacattagattctaataaaactggatacatgggttttat

SEQ ID NO: 154461 - DNA, 574 bp, Homo sapiens
actgggtatatatccagaggaatataaacaattctaccacaaagacacatgcacatgactgttcattgcagcactattcacaatagcaaatacatggaatcaacctaaatgcccatcaatgacagatttgatgaagaaaatgtagtatatacacaccatggaatactatgcagccataaaaaagaaagaattttttttgtgtgggaacatggttggagctggaggctattatccttagcaaactaagtcaggatcagaaaaccaaataccacatgttctcacttataagtgggagctagataataacycatgaacacaaagaaggaaacaacagatactgtggtttacttgagggtagagggtgggagaagggagaggagcagaaaatatgactattgggtactgggcttaatactcaggtgctaaaatagtctgtataacaaaccaccatgacgtgagtttacctgtgcaacaaagcttcacatgtattgcaaacctaaaataaaagttaaaaaagtaatagccattctcactgggctaagatgataatacactgtggttttggtttgcattt

SEQ ID NO: 154462 - DNA, 361 bp, Homo sapiens
gagggttctttatactactcttgcaagtttttttttggtaagtttgaaattatttcaaattaacaaaataaacaaaattctatcttttcccctactgaactcagatgctgcttgtatcawattctccatacccatttgcagtgagctttattctgtctcattctctgtgagcaaacactacactactttaattatggcaactttataatatgttttgtatattttaactaagttttaaataatatctgaaagaatttatccttctcattgttcttctttttcagagttttcctgtatattcttccttctttgttcctttttacacaaccttatgatacttttattggaataatattacatt

SEQ ID NO: 154463 - DNA, 456 bp, Homo sapiens
ggtacaaataaactatggaatactatacagccataaatagagacaagatcatgtcctttagagcaacatgaatagagctgcaagctgttatcctaagcaaactaatgcaggaacagaaaaccaaataccacaggttttcacttataaatgggatctaaacattgagaacatggacacaaagaagagcacaacagacactgaggcctacctgagggtggagggtgaagggtgagaggagggagaagattaaaaaaccacctgtcaggtactatgcttatcacctgagtgatgaaatagtctgtacaccaaacccctgtgacacacaatttacccatataacaaacccgcacatgtacccctaaacagaaataaaagttaaaaaaaaaaaaagaaagaaagaaaaggaaaggaaaggaaaggggraaaaaaatgtagacagtttatctgggccaagct

SEQ ID NO: 154464 - DNA, 490 bp, Homo sapiens
tgtttgccagaaagaatagagttttacccacccttcattaagtatgttttcaaatgttactctttccctctctgctgggtatgagtgaatcacatcctcaggaaataccactgggtatgtaaattagcactctggaatgtcttaagacatgaagttagttcagctgactccctggttgtatgtggctttgaaatgaacacttaaagcctttaaacaggtatgaccttgtttatgaattatgttatgaattagtattcaaggtgggtaatgttggtgctcaggtgtttgtccaggtaaaaggcaaatcagcttaatgtaaagcccttactccacggttttgacacacgtgctrttgcctaaatgaatgaatcttgcggaccacttctaaggctggtgaatgaagtcaaagaagtcaaagcagggggggacccagctttaggaaatagcatggcttatgttacccttaaaccacttttgttttaaaagaaag

SEQ ID NO: 154465 - DNA, 533 bp, Homo sapiens
aacttcaacaaggtggtatctgtcttctactctgttgtcacgcccatgctcaatcctctcatctacagtcttaggaacaaggaagtgaagggagctctgggtcgagtcttttctctcaacttttggaaggsacagtgaggaggcaggtgggaacccagtttccttgccttggatatttaaaaacaggttagtcaataacatttaagctgagaccaaatcaagaatgcagttccatttataacagccacaaaaaatacaatacctaggaatacaactaaccaaggaagtgaaagatatttataaggggaaccacaaaacactgctaaaagaaatcagagatgacacaaacaaatgaaaaaacatcccatgctcacagattggaagaatcaatatcattaaaatggtcacactgcccaaagcaatccgcagattcaatgctattcctatcaaactatcaatgtcatttttcacagaattagaaaaaacaattctaaaattcatatgaaagcaaaaaaggagcccaaattgccaaa

SEQ ID NO: 154466 - DNA, 544 bp, Homo sapiens
ttctggagtgaggccgggcacggtggctcatgcctgtaatcccagcacttctggaggccgaggcgggcagatcactcgaggtcaggaattcaagaccagcctggccaacatggtgaaactccgtctctactaaaactacaaaaataagctgggcgtggtggcacatgcctgtagtcctagctactagggaggcagaggtgagagaatcgcttgaacccgggaagtggagttgcagtgagccaagatcatgccattgcactccagcctgggcgacagagcaagactctggtgaaatgcttaacaataacaataacaatattaaagataacaatagtaatgattatgttayacatcaaagcactctagatcccccaatgtgtcaaaaggaaggaaggtaatatctactgtatagtcaccccattctacaagttccccaggggatgttgaatggaatattcttattactggcatattccttcaccctgtcccaattaccactctaccttctataccattccaggaagtattagaatacactacatat

SEQ ID NO: 154467 - DNA, 405 bp, Homo sapiens
agttcaaaacctcttcctggcaggtcccagtggaattagaccttaggtgaaagrgaagtaaaaaaagggatcccatggaagccagaggacctgcctgttatccccaagtctgcaaatagctaattatttgacttttggacaagtcattaacctctgtcagttgtctcaatgccaaaataatgacaatatcaatcaagtcaactttacaggggtgtggaggcaatcacagacatttatggatataaaatgtatgaaagaaggtagaaagaggtattatgatgagtttttactactatggattttatcaaaaatagcaatccccatgttgccacagcaaagaaaattcccagttgtgctacaaggaaaagagtttcttaacaatctaatttctatattcatggcttc

SEQ ID NO: 154468 - DNA, 363 bp, Homo sapiens
ttcctggcaggtcccagtggaattagaccttaggtgaaagagaagtaaaaaaagggatcccatggaagccagaggacctgcctgttatccccaagtctgcaaatagctaattatttgacttttggacaagtcattaacctctgtcagttgtctcaatgccaaaataatgwcaatatcaatcaagtcaactttacaggggtgtggaggcaatcacagacatttatggatataaaatgtatgaaagaaggtagaaagaggtattatgatgagtttttactactatggattttatcaaaaatagcaatccccatgttgccacagcaaagaaaattcccagttgtgctacaaggaaaagagtttctt

SEQ ID NO: 154469 - DNA, 585 bp, Homo sapiens
aatgggaattgttactgtttcccaatccaacattattttgttgcatctttataactattattggagagggttaaatgcacagcccaagagagatggctttccttcatttagtacagtggggtgactatagttaatagaaattaatcatacatttcaaaataactagaagagaagatctgaaacattcccaacacaaagaaatgacaaatatttgaggtgatgactattgtaattacactgatttgatcattacacattgtatgcatacaccaaagtatcacatgtaccccattaatgtgtacaattattatrtatcaataggaaaatttaaaaagaaagtttcccaaggtcacataacatagtcagcagctgagctaggattgaatgttggcagtttgtctttagaggtgcattcagccattgtgaagttcacctcccactacactgggcttttccatcagggtgagctgttaggtgcttgcttctcattgcttagatgatagtgattttaaggtcctgtatcagccaagttctctaaagaaacaatggaaaatatgtttttatctatatacagcatttatattt

SEQ ID NO: 154470 - DNA, 540 bp, Homo sapiens
agaagaaaactgattctttgcaggacattgtgggtgagtttctgccaaaaataaattatcaatattttccttgcacaatacagatagattgattgagcaataaatatatatccgtatctacatatatgtatatataccagatcaaaaatctgagcaatctctgggcaaattaataaaatagatggggctgtctggaccctctggcattttcttcaattctgcccttttcagctttgcagcattcacttctgccatacggtgagaaaagcatgccaggtgacctggaatgctggtttctttaagtcaccacactcacacccagtaatgacatktacctgtgcagaggattttgctgccttcatcaaaaaaggataaatctcccaccagagaccttcacactttagagctttagaggaactagactttctatccttttgtgttgattcttctttttatcccaacacttaacgtgtgaatacatcctgactcgaaggtttagatggtgatggcctgaacaccatcttaggattttccacctga

SEQ ID NO: 154471 - DNA, 360 bp, Homo sapiens
ttcaactaatcaacatctttatccatttggttggttgtttttggttttttgtttgttgttttgttttgttttgtttcactggatgaacagaatggttactaggcctactatggggtatgaaaaggcctttggctaaaaagccttcaactataggcttgtgtctttattttctctctctctctctcgctctctcttgcttcaagggatgttagggaagtttgggtaacagtttggcagaactttaataggtctgtccaattattttccttatgtcagtggcattttcattcacagagygtcaagatctctgcatggggtatatacatcaacaataatgaagaaagcaaaggtatacccaga

SEQ ID NO: 154472 - DNA, 560 bp, Homo sapiens
tccaaccaacatgagtacaagtggatataaatcagttaactctattgagtgcatacgaggtatatgcactcaaaacaattctaaattcttctatgaatagctgctgatcatgcctggattaagagaacttcataattatagttcttaattcagcttggctccaaggttttaattctactgtagctttcatctggctcatgggcaagatgatagatgtttagaggcaattgacattttgaggcctttaaacaagtctttaggaaaaggtagggcatctggacaaggtgagtaggtaagatgagtccatgggtgtgcagaagaggaaagatttgaaaaatagagaaaaaaagtagagctggacatagggaagtacctggaggacaaggaggaagayaatttactagggaaaataaatacagtatattgttacctaagtgtgtcaaattgttcacttgctttggccaaaaaaaataaaatctcttagtaaagcaatgttttctcagagttttgttttgaggcctctgaatactaattaaattttttaaatgctaccaattggg

SEQ ID NO: 154473 - DNA, 480 bp, Homo sapiens
ataaggatgcagcttctctggcctctcaaataggctggctccagattaagtaaattatagcccaagaaatactgactgggtcttcagcaacacaggccactggaaacgtagggaaaatagaaataagtgggaggagatacggaataacaataatagcattaactattatttttaagccattgagtcttcacaacaacacttttaaaggtgaatctttattatttctactttacagatgaggaaactgaaccagagaggttaagtaacttacccaagatgtacaactagtaagtgacagagtaacaagctcttragcatgatgtttttagctaatgtaacaagggaaaccatgcttgagggcagacaaagcaagatcctgtcatgattaagacaaccagattgggagtccttcagacctgagttcaaatcccagctccagcacatattggcagtgtggcctttaacaagcccattaacctg

SEQ ID NO: 154474 - DNA, 503 bp, Homo sapiens
tgcctctctgctctcttctcccttcccctctcttaccctccccttccgtctcctcccttctcctctcctatcctccctttctccccacctcaatgtctgaggttgcaatgtcagaccctgacacagtcaagcaatgctgggggatcagggagcactttgctcatcagatcattcctctccagccctcacctcacacctgctctgcagctttccaaccgttctgtgagctgcccgataccatctaataaatttcttctctcctttatcagcctgagccagtctctgctgcttacagaccaaagccataagaggcccaggacacaaatgggaagactgggagataggcatgcttattcttccttagaagctctcctgaaatccaagctgaaaactggctccaackgggctgcaaaaaaaaaaaaaaaaaaaaagcactgaaaagtttccagtagcgtcaccagggaagagtcccaggttttctctttcaatacacagctttaaaa

SEQ ID NO: 154475 - DNA, 501 bp, Homo sapiens
acccagttaatttttgtattttaatagagacagggtttcaccatatcggctaggctggtctcgaactcctgaccctgtgatccgcccgcctcagcttcctaaagtgctgggattacaggtatgagccactgcacctggtcagcaaagttttattgaacacagatgtgctcatttgtttactattttctatgaccactttagttgttacagagatcacatagtctgcaaagcctaaaatatttactaccgggttttttatagaaaaagttttccgacccctgacctaagctactcaagtccaatctacacacttaaagctttcaaaacataaaattaagacaatttaataatttgcctaaggtcacaagggtacttggcaagtgaakggcaagctaatgaatgccccctactgggcagtagaggcgatgttatgcgacatggttaacagctcagactaaacatcgttcaaatccaggctctgccacttactagctatgcaac

SEQ ID NO: 154476 - DNA, 573 bp, Homo sapiens
gaattcaaatttatattacctaagttccaatcaatagattgtaacaatgtactccttttctgggggaaagaaggacactggcaaagttayaggttggttcattttagtacatttgtccttgtaggtgcaaatggaaatgcaatcagtagttcctcatggcttcatttggtgagactgaaattgccctaagatatcatgggggtccattgattaatggcatatccaaaagttggtaaagttgaaggcagggctatggtttggaataatcaaagaatgagtttgaatgagaatgttccaacctaatagttatcataaagatgaatgaaaataaaaaagaagccattatgggtggacaacaatcagggatctatagaacatgagaagaaaagtgtttataagcaagcagatgaaaaacaaaacaggaattatacaggggtcttggtctggaggggaagctgtccattatctgaggtcataagattgttctcatggtctcaggtcagaagactacttccaaagatcacctgcttctagagaatctctgaaaatcttgtttgagggtccatattaaca

SEQ ID NO: 154477 - DNA, 430 bp, Homo sapiens
cagtcccaagtgagtcagtgaggcccagatggctcagtggctgtttggactgtgtttttctatttctttgaagaacctgtagatgtctaatgtttgatctgcttttctgccttgaagccaacagatacagcacaggcgatggagaatgggctggtgartctccatgcctacactgtgactggggctgagcaggtaaggctggctgctggcctgtccagctctcccctggcctctgccccagtgttcttgttcctctcaataggggccagaatcacatgaaagcccaagaaagatgaaatgaggatatatcacccttgcctctgtggtgacatgcaccatggacagcctcagctccttctgttcaagcagaagttctgactcccagtgtcctcctttctgagaacccaccagagatgttgctgtcctgttg

SEQ ID NO: 154478 - DNA, 442 bp, Homo sapiens
caggccatataccagtcccaagtgagtcagtgaggcccagatggctcagtggctgtttggactgtgtttttctatttctttgaagaacctgtagatgtctaatgtttgatctgcttttctgccttgaagccaacagatacagcacaggcgatggagaatgggctggtgagtctccatgcctacactgtgactggggctgagcaggtaaggctggctgctggcctgtccagctctcccctggcctctgccccagtgttcttgttcctctcaataggggccagaatcacatgaaagcccaagaaagatgaaatgaggatatatcrcccttgcctctgtggtgacatgcaccatggacagcctcagctccttctgttcaagcagaagttctgactcccagtgtcctcctttctgagaacccaccagagatgttgctgtcctgttg

SEQ ID NO: 154479 - DNA, 608 bp, Homo sapiens
agggctctacataagtaacataatagtaaaaaggctaggataaaacattaaaaagaaaaaaagtctaaagctttttcagaagacacacacacacatacacacacacagttgtcatcctttgccacatagcattcattttcctcatttgtactcagttctcaaaacctcttcctctatagtttttgataggaaaatgacaaacatttgtaaagcagaaacacatttatacatacttgcaaggagtatttccttgaaatgggctgatcactgcaaggcttattayataatgtaagagatacttaaatacatcctgcaatctcatggaaataattccagtgttatgatgaggccatgtggagcttcctataacctaagatatagtaatacactttgactttagtatttttcacttggtttattaagcataacttaatttaaaatctgatacgaattttaaaaagtcaagacatttagcaactataaggtttattatgagctgttattaattaatgtagtgatataaaacttgtattttaaacaagtttatctattatcattagactccacaagaacttcataaagttgggttggctaaaaaacaggaacag

SEQ ID NO: 154480 - DNA, 608 bp, Homo sapiens
agggctctacataagtaacataatagtaaaaaggctaggataaaacattaaaaagaaaaaaagtctaaagctttttcagaagacacacacacacatacacacacacagttgtcatcctttgccacatagcattcattttcctcatttgtactcagttctcaaaacctcttcctctatagtttttgataggaaaatgacaaacatttgtaaagcagaaacacatttatacatacttgcaaggagtatttccttgaaatgggctgatcactgcaaggcttattatataatgtaagagatacttaaatacatcctgcaatctcatggaaataattccagtgttatgatgaggccatktggagcttcctataacctaagatatagtaatacactttgactttagtatttttcacttggtttattaagcataacttaatttaaaatctgatacgaattttaaaaagtcaagacatttagcaactataaggtttattatgagctgttattaattaatgtagtgatataaaacttgtattttaaacaagtttatctattatcattagactccacaagaacttcataaagttgggttggctaaaaaacaggaacag

SEQ ID NO: 154481 - DNA, 420 bp, Homo sapiens
ataaagctacaccccttcttctttttcagtgtaaattgagagatcatatatacaaataaactatagatgtatactgtaaaataatagttagaaagtgagtatccatataatggcttttcatatcaagaaatggtcattgccaacagcccagaagtcccaatataccctctggaactaaaaactgtcctgactttgggtataactgtcatcgtcttcataattttaccatctgcgtgtatatttmtaaacaatgtggtttccaattctgaccttttcataaatgaaaccatgcactatattttcctttgcaactttcttcttccagtcaacattttgttgatgagagccatttatgttgttagacaacatttgttcctgtccactgatgtattagtattacattacataaatagttcacag

SEQ ID NO: 154482 - DNA, 401 bp, Homo sapiens
atccattaagagacaattagaactaataagttcagcaaaatttkcaggatataaaatcaatacacagaaactgactttatacactagaaatgaggaacctaaaatgaaatttaaagaacaattctattcataatagcataaaaaagaataaaatacttaggaataactttaacaaaagaaatgtagcatttgagagcgtgaggcaggcagatcacctgagcccaggggttcaagaccagcctgggcaacgtggcaagaccccatctctacaaaaaataaaaaatagccaggctatgctctcagctacttgggaggctgaggtgggaggatcacctaaacctgggaggtcaaggctgctgggagccataatctcaccactgcactccaggctaggtgatgga

SEQ ID NO: 154483 - DNA, 631 bp, Homo sapiens
agcaatagcagtgatcagagcatctgcattaccacactggctccccaagccccagtttgcttagggttatgtgacaagggtcagacaacacctgcacatgcagtaaattatgttaaaggacagaaccctgagcttagggaacccgaatctcttagagtggtcagtaaccatgcctatcttttactccagaaggagatacaaatatctttgaaaagataatctagagcaaaggacagtcagtgcctttgctcacaagatgaaatctgtggaaaattatctcccaacacacatgtgtcaacttccaattcttccctctcatcctttgtgctactgctgacacacatcttacttttatatgttataaaccccacaatacattgttactatctttattttagacaaaatgggttggcaacctatagcctgtgggccaartctggcctgttgtctgtttttgtaaataaagttttattggaacatagccatacccacttgtttacacatagtctatggctgccattgaattacaattgttgagtagaataattgtgatagggactatgtggcctgtgaagactaaaatatttacaatctgctcacttacagaaaaagtttgaggacctcttcttcc

SEQ ID NO: 154484 - DNA, 554 bp, Homo sapiens
cattctttcctttataaattacccagtctattgtagtctgttatarcaacactaaatggactgatattttcttaacctcaaaaagggtcagatctgaggacattagctgacagggtgaggatacatgcaccggaagattttttaaaatgagtgtttgaggattttattatctcaccaatccaacaaattctggaacctccttcccagtactcttgttacatgaaggcttaacgttcttactgtttaagcaattttgagttgggtgtggtgctaccttagctgaaaaggttctaattaatattttcctgcattgaaaagccatgtgtatttcttacctgttttcactttagagccaaggtcgtggaactttgagaagaaatgttgaatccctgccctcagagagaccacactttcctccaaataactgttgttgaggctgctaaagagcacattctgaaagaatatggacattcttaggtaataaatttgaaatcaggaattcccatcaaactttgttaactatacagttatttttaaatgttacagagtgacta

SEQ ID NO: 154485 - DNA, 445 bp, Homo sapiens
ctaactccttaattttggtgacaacaatgtaaaaaagacataattttgcccttaagaaactcataatctggtaaataacaaaatgatgcaaacataatgttaatatagaggaaataaggatcacaaactgatgccatgcatcaatttcatagtttataagatatatttattaaattacttggccttgtactaagtagaccacttatgaaagaaaaaaaaactttttttttttttttttttttccagagagagatgggacaaagattcaragcataagatgttctctgagggcgcaaaaactgagaaactggaagagggagagtagtactggactgttttgtgttgttagaaagtcagtgaagaaaagaggtagaagaaacatcggtgaggctagtcctggttaagccaaaaaagagcaaactttggattccaaggtgatatgcca

SEQ ID NO: 154486 - DNA, 445 bp, Homo sapiens
ctaactccttaattttggtgacaacaatgtaaaaaagacataattttgcccttaagaaactcataatctggtaaataacaaaatgatgcaaacataatgttaatatagaggaaataaggatcacaaactgatgccatgcatcaatttcatagtttataagatatatttattaaattacttggccttgtactaagtagaccacttatgaaagaaaaaaaaactttttttttttttttttttttccagagagagatgggacaaagattcagagcataaratgttctctgagggcgcaaaaactgagaaactggaagagggagagtagtactggactgttttgtgttgttagaaagtcagtgaagaaaagaggtagaagaaacatcggtgaggctagtcctggttaagccaaaaaagagcaaactttggattccaaggtgatatgcca

SEQ ID NO: 154487 - DNA, 445 bp, Homo sapiens
ctaactccttaattttggtgacaacaatgtaaaaaagacataattttgcccttaagaaactcataatctggtaaataacaaaatgatgcaaacataatgttaatatagaggaaataaggatcacaaactgatgccatgcatcaatttcatagtttataagatatatttattaaattacttggccttgtactaagtagaccacttatgaaagaaaaaaaaactttttttttttttttttttttccagagagagatgggacaaagattcagagcataagatgttctctgagggcgcaaaaactgaraaactggaagagggagagtagtactggactgttttgtgttgttagaaagtcagtgaagaaaagaggtagaagaaacatcggtgaggctagtcctggttaagccaaaaaagagcaaactttggattccaaggtgatatgcca

SEQ ID NO: 154488 - DNA, 445 bp, Homo sapiens
ctaactccttaattttggtgacaacaatgtaaaaaagacataattttgcccttaagaaactcataatctggtaaataacaaaatgatgcaaacataatgttaatatagaggaaataaggatcacaaactgatgccatgcatcaatttcatagtttataagatatatttattaaattacttggccttgtactaagtagaccacttatgaaagaaaaaaaaactttttttttttttttttttttccagagagagatgggacaaagattcagagcataagatgttctctgagggcgcaaaaactgagaaactggaagagggagagtagtactggactgttttgtgttgttaraaagtcagtgaagaaaagaggtagaagaaacatcggtgaggctagtcctggttaagccaaaaaagagcaaactttggattccaaggtgatatgcca

SEQ ID NO: 154489 - DNA, 640 bp, Homo sapiens
ttatgaaagttatttttcttctctttcccttttttttcttttcytttttttttttttttgagacagagtttcactttgttgcacaggctggagtgcagtggcacggtctcagctcactgcaacctccgcctcccaggttcaagcaattctcatgcctcagcctcctgtataactgggattacaggcgctcgtcaccacacccggctgatttttttttttttttttttttgtatttttggtagagacggggtttcaccatgttgcccaggctgatcttgaactcctgagctcaggtaatccacccatctcggcctcccaagtgctaggattagaggtatgagccaccttgcctagccaaaagttatttttgcatctttaattgtgaattctttattctttatcaaaatggaatgtaagctttattattaccccatactacacagatacacttgcttattgaccctatttcaaaaaagtcagaaaatgtattcagattacatatagtgttgcaagaaaacaatttcaatcaactgcttcacattgtgaggaattactgcaattgtggtagtttatcacaataaattcacacccatgattgtgaactaaagaaaaaagattccaaagtaaaatcaaagaggaa

SEQ ID NO: 154490 - DNA, 640 bp, Homo sapiens
ttatgaaagttatttttcttctctttcccttttttttcttttcctttttttttttttttgagacagagtttcactttgttgcacaggctggagtgcagtggcacggtctcagctcactgcaacctccgcctcccaggttcaagcaattytcatgcctcagcctcctgtataactgggattacaggcgctcgtcaccacacccggctgatttttttttttttttttttttgtatttttggtagagacggggtttcaccatgttgcccaggctgatcttgaactcctgagctcaggtaatccacccatctcggcctcccaagtgctaggattagaggtatgagccaccttgcctagccaaaagttatttttgcatctttaattgtgaattctttattctttatcaaaatggaatgtaagctttattattaccccatactacacagatacacttgcttattgaccctatttcaaaaaagtcagaaaatgtattcagattacatatagtgttgcaagaaaacaatttcaatcaactgcttcacattgtgaggaattactgcaattgtggtagtttatcacaataaattcacacccatgattgtgaactaaagaaaaaagattccaaagtaaaatcaaagaggaa

SEQ ID NO: 154491 - DNA, 582 bp, Homo sapiens
catatattctcagttgtacacaatacctgaagtttctggcatttgaaaatccaataaatatttattcaataaatatatatttagcgaatgaatacataaataaatatttgaagtgtctgtggtatcagaaatgtctctgacatccagtgaagaaacaggaaataaactacccccagagagttttctggaatgcaaagggagctaaaagatcacagaagaaagaagggtgtcctctctcctgttaataccagaacatattcctttttagagtatttgggtatgcatttaagagaggttactattttcctaaactctgtgatttcccaaaaatgtgtttacctaggatgaggacagctctgccctctgactttttccagccaaagaagaaaactgcagaggccagctctaggggaattatttgatcagtgaccctcatgcactacaatcttatttaataaagcaaatcaactgatggacttactgctgcartggtggattcaattcctgcctgatgtaaaagtaaataacacatcaaggagaaaggaatggggaagtgggacatgccatttttcacaatatttt

SEQ ID NO: 154492 - DNA, 496 bp, Homo sapiens
tatggcataggcataagattgtaggctttaataaatacttttaaaaataaaacaaaatttgtgatgataaaatctcttgcatgaaaaaaaaaaaaggttatctccttttctagacatttagaaatctttgtctaaaaaggtctttttttcttsatgttatctgcttgggcctgtttccttaatgcttttatccatttttttacacagaatgactttaggctccagttttctcatttgtaaaattatgatagtaatatttatctcccttagttgtcatgaggattaaatgagatgaatgtcaaagttcttagcttagttctgaaccacagcagcttaatagattatttgacactggctgactaaatgtcttctgatgtactactcataccattttgcaacttaacattcacacactcaggagctcacactcacactcagaagctgtttccttacacatactgatgcaggatttttcttcttggtcactttgcaagcc

SEQ ID NO: 154493 - DNA, 525 bp, Homo sapiens
aagtagactcatgttaagacacatcatcatgacatttcagaaccctgaggctaaaagatgctaaaaacgtcatagagaaaaagcaatttttgcataaaaggccaaaataacattggcatcagacttctcaacagaaatcctagaagataatggagcaattccctgaaaattctgagacattatcacagaaataatgccgctcccttctagatatgtcacataagtacaactatggtgacttgtccaagtgctggtcatgttaaccttgatggcctggtcagattggtatctgccaggtttctccactataaaaatcaccatttcccctttgtatttggttagtgttttgttgggagatattctgakgttacatcaagatgctgtccctcttcatcaaactcctacccaccagccttgggatccactgacaagtactacctagatcaactatctttatgatgtttgccaaatgatgtcactattagctgacattctgctggctggaagagctttctttctcctcca

SEQ ID NO: 154494 - DNA, 595 bp, Homo sapiens
tataccagtattgattgggggtttatattttattcagtaagttgtaacccaatactctcattgtttattttagtgctcatactgccctaagtttggctagtgggagccctttcaagctggcccctttttgtcctttttgtcaaaaggccccttaattttttgagcactaccttactttctaacatagtaagatattccagactcatcctgtaattctcttgccccagcctgaattcagccatttctccaagaagatccatacatacacatctgtaatcatctgtatatttggttggagattctctatacacccatgagttcatgatgttacttccaattccaatccaacgccccagagttcttttagcttccccctttccatacttacaaatccctgctcatctctttcttcctgtatttctgctttattcrtctctttttctctctctgggtcagccttctctaatttacatgatagaaaacatagctgccaacaattcctacattttatgctacagcttcagctaaccagagagaaacagagctctccttctctttctaacttaaacattcctaggaaagaggaaatggcctg

SEQ ID NO: 154495 - DNA, 590 bp, Homo sapiens
tctctccccagggactggccttcagcaaagccaggtctactgcaaagccagcaggatttggagtccaaagatctgtgcttcctgacctgcgactggcctccaccacagtgctttggtggctggactgctagtcagggtcccactaccctgagcttctgtatcttcttctgtcaaatgaaagtaatgaacttctcagccagctcagaagcttttggtgaggcccaaatgccataatgcatgcagagagcaaatcggaaaagactgcagcaaggcatcttcctatgcgacaggggattctgccttcgcccaggtgagtaatgccccttaaatggcagatggcagatgtgttattcaggctgagagagactgtggggaggaggcttgcctggatggagacttggaggcgaggctyccccagctgaggttaccagttcttgggagcagggaaggctttcctgccaggcaggagtgtgatgatgggcactcccccgttcctctcgctagcacctcatttatatccggcttgctccaggctcaatcccccaatgaaggctatgcaccgtctggctccactgccttgaagggttagg

SEQ ID NO: 154496 - DNA, 570 bp, Homo sapiens
taattttgatttgcatttctctcatgattagtgatgttgagcattttttcatatgcttgttggctgcatgtatgtcttcttttgaaaagtgtctgttgatgctatttgcttactttttaaaggagttgtttggttttatttcttgtaaatttgtttaagttccttatagatgctggatattatatctctgacagatacatagcttgyaaaaattttctcccattcttccatttgtctattttccctgttgatagttttttttccccttgtgcagaagtctttagttttattagatcccaatagtcaatttttggttttgttgcaattgtttttagcatctttgtcctgaaatatttgtgagttcctatgtccagtataatattccctaggttatctttcagggctttcatagtttttggttttacactgaagtctttaacgtgtcttgagctgattttcatatatggtataaggaaagggtccagtttcaatctactgcatatggctacccagttatcccaacaccatttactgactagagaattctttcccccttgcttgtttttgtca

SEQ ID NO: 154497 - DNA, 570 bp, Homo sapiens
taattttgatttgcatttctctcatgattagtgatgttgagcattttttcatatgcttgttggctgcatgtatgtcttcttttgaaaagtgtctgttgatgctatttgcttactttttaaaggagttgtttggttttatttcttgtaaatttgtttaagttccttatagatgctggatattatatctctgacagatacatagcttgcaaaaattttctcccattcttccatttgtctattttccctgttgatagttttttttccccttgtgcagaagtctttagttttattagatcccaatagtcaatttttggttttgttgcaattgtttttagcatctttgtcctgaaatatttgtgagttcctatgtccagtataatattccctaggttatctttcagggctttcatagtttttggttttacactgaagtctttaacgtgtcttgagctgattttcatatatggtatraggaaagggtccagtttcaatctactgcatatggctacccagttatcccaacaccatttactgactagagaattctttcccccttgcttgtttttgtca

SEQ ID NO: 154498 - DNA, 377 bp, Homo sapiens
  misc_feature (1)...(377): n = A,T,C or G
ataagaactgagggtattaacaaatgycactaatgtatacacttgccagttctggttgcactgtatgttacttactaatatccaacatttaaggatatttaaatacaagtaatccccagatcccaaacatgtttataatattttagatggtctatatcttacttttttctattttgtaatccataaatttccagtattattttaatgtagtttttaaagcaatacaaatgtttgcattttcaataaaatgtaatctaaaacaaagaatgaatttccaatagtcatgacaaaatttgcacatggtactgaaggcaccttccnagttctcatttccaggagaaactcttgaaaatatggtttgccagttagagtcagag

SEQ ID NO: 154499 - DNA, 596 bp, Homo sapiens
ttgtagcagcagcagagattcaaatagaacagagatagcaagataaaaacctcatggactacaactttactagaaccagttgaaagggaattccatttctagtaaggatgcaaaaaggtatggacaaccttcattcctgtagtaacacaaagggaaacccagataaaacacaaaacagtactattctatgaaattattaaagaccagtcgatgcaagaaagtcttcatgagttgattcccaaagacagaaatgactcatatgcaaccagcaagtctcagagcagttctgaggcaacttctgggttgggtctaggtaaaggataaaggctgccaaaaaaaaacataagaaattgacatgctaagtaaaggccagctaagctactrgtcaagattggggcaggcaggaataactgtagttttgaagatgctcaaataacaaaatagtttgcttggcctaacaataatctctactgcatcaccaccatcacctgttttgctgagaatagtgccacaaaagtagggctgaaaagccagacaaggaaacaacacaaattaaatcaaaaaatcaatctaatgtcaatcagtcaactattaca

SEQ ID NO: 154500 - DNA, 596 bp, Homo sapiens
ttgtagcagcagcagagattcaaatagaacagagatagcaagataaaaacctcatggactacaactttactagaaccagttgaaagggaattccatttctagtaaggatgcaaaaaggtatggacaaccttcattcctgtagtaacacaaagggaaacccagataaaacacaaaacagtactattctatgaaattattaaagaccagtcgatgcaagaaagtcttcatgagttgattcccaaagacagaaatgactcatatgcaaccagcaagtctcagagcagttctgaggcaacttctgggttgggtctaggtaaaggataaaggctgccaaaaaaaaacataagaaattgacatgctaagtaaaggccagctaagctactagtcaagattggggcaggcaggaataactgtarttttgaagatgctcaaataacaaaatagtttgcttggcctaacaataatctctactgcatcaccaccatcacctgttttgctgagaatagtgccacaaaagtagggctgaaaagccagacaaggaaacaacacaaattaaatcaaaaaatcaatctaatgtcaatcagtcaactattaca

SEQ ID NO: 154501 - DNA, 572 bp, Homo sapiens
catggctttcctttaagtcaaaggagacttcattaaaaacacgtgagccaggcatggtgactcacacctgtaacctcagctacttgggaggatgaagcaggaagatcacctgatcctaggagttcaaggttgyagtgattgcaccatggcactccagctctggcaacagaaggagacctcagccctatatgtgtgtgtctgtgtgtgtgtgtctgtgtgtgtatttgacttggtaataggttaatatgttagcatccattaacacatcttccagaaaacagattctcagaagaagtaaaacaaaatcagatacacttttgatgagaataagcattattacaaagtatggaaaatctgtcctaaaagaagtgatatagctgaagtctgaccattgtattccctatttattcacagggtagagtgagggcctagtaactggaaaaaatatatatacgttaaatagcaatcagagtgctggaaacacatacgtaatttaacattgtgttgaggagtagagcaaaaacattaaaacattattgtgatacttccattaagaccaaggataagaggaa

SEQ ID NO: 154502 - DNA, 614 bp, Homo sapiens
attgcatcatttagtctttctaattactttagacatatgtactatacattattatctttttttacagatgacttaatataggcaacaattcttgagtctccaaagctcataattttagctattcactcctacagcctatcagtcaaaaacaaataaacatatatctgagtgtctaaaacactgagacctagtggtaagaaagagatacattctctgtctccttgagtgtcacactctgggaagaaggtacaattaaacaaatagtgacaaaactaataacttaattataaatggaatatgaaagcccataacttggccagctaactcagtctggtaggatgcagcaaaggattccttaagggcttaaaaaatggacaaacaattgaaaagaaaatacagctagaggcaaaatarcttgagatacttttggagacgtccctgactcatgattaagtaataattaattcttcatgcttttgtataaacagaagaaacacattagtatgttgaagaaaaatcctaatttctttgtttgtaaacattctagaataatggatttagatgatcagtttttttaatcccagctggtatttgttgtgcagacagatgctgtt

SEQ ID NO: 154503 - DNA, 537 bp, Homo sapiens
aaaataaatgttttcctgtgaaattggtgggaaatgtcatgagggatggatctcaaagggcaaaaggaaacttggagatagaagaatttattattttgactatggtaatagtaacttggggttgtacaaatgtcacaactttatcaaattttatagttaaatatgtacagtttattatacatcaattatatcttcataaggctgcaaaagtayttttaatgagccaaaccctcagcaaaagataactgaaattttgagcactgcagatataagaaagtacactacacttctagcctccaatgagaaaatgtattccctttgtttttcttttataattcttttcttgggtgaacctaagtaccatcataatgtgtataccatctatatttaaaatacaacataattatgctaatacaaaaattaatcatatcaaacattaatcagtggcaataactagagttgatgagtatttgaagaaatggctactctcatccaatgctgatggtaataacctagtagaaaaaataatgacaacac

SEQ ID NO: 154504 - DNA, 602 bp, Homo sapiens
tttccccatgagacaccaaagacctgttcatattttcttcaatttttttctccctgtttttaaattaaatttttcaaaatttgtttttattgatatataatgctttcagagtacatgtggtaatttaatacattcayaatttgtaaagctcaaatcagtgtaattagcatgtttatcaccttaaatatttgttttttctttacggtagaaacactcaaattattcttttctagctattttgaaatacacaatcaattattgtaaactatagccaccctactgatctatcatactgtatgttctatttcttctttcaaactgtatattttatccattagtcaacctctcttcatcccctacttcctggcttccggtaaccaccaatctactttctattctcattagatccactttttaagctcccacatatgagtgagaaagtgcaatatttgtctttctgtgcttggcttatttcacttaacataatgccctccagttccatccatgttgctgcaaatgacaggattttattctttttttaacttcttaattatacttaattatgaatatataccactctttaaaccattcatctattgata

SEQ ID NO: 154505 - DNA, 602 bp, Homo sapiens
tttccccatgagacaccaaagacctgttcatattttcttcaatttttttctccctgtttttaaattaaatttttcaaaatttgtttttattgatatataatgctttcagagtacatgtggtaatttaatacattcacaatttgtaaagctcaaatcagtgtaattagcatgtttatcaccttaaatatttgttttttctttacggtagaaacactcaaattattcttttctagctattttgaaatacacaatcaattattgtaaactatagccaccctactgatctatcatactgtatgttctatttcttctttcaaactgtatattttatccattagtcaacctctcttcatcccctacttcctggcttcyggtaaccaccaatctactttctattctcattagatccactttttaagctcccacatatgagtgagaaagtgcaatatttgtctttctgtgcttggcttatttcacttaacataatgccctccagttccatccatgttgctgcaaatgacaggattttattctttttttaacttcttaattatacttaattatgaatatataccactctttaaaccattcatctattgata

SEQ ID NO: 154506 - DNA, 579 bp, Homo sapiens
tcacctgtgttttatagttttgcttgtatagatctttcactccttcaggtaaattaattcctagctattttatattatttgtaacagttgtaaattaatttgctctctttctttttagattgttcactgttggcatatacaaatgctattgattcttgtatgttgatttttttatcctgaaactttactgagtttgttaatgagttttaacaggttttttttggtggcatctttaggttttgctaaatataaatgttatctrtgaacaaagctagtttgacttctttctttccaatttagataccctttatttctcttgattaattgttctggctaggatttccagtattatgcaaaataaaagttgtgaaaatgggcatccttttcttattctagatcttaggggacaagctttccattttaccctgttcaatagatattagctgtaggtttgttgtatatggttatcattattttgaggtgtgttccttctatactcagtttgttgagggtttttatcataaagaaatgttgagttttatcaaaagatttttcatcatctacagaaatgaccatata

SEQ ID NO: 154507 - DNA, 579 bp, Homo sapiens
tcacctgtgttttatagttttgcttgtatagatctttcactccttcaggtaaattaattcctagctattttatattatttgtaacagttgtaaattaatttgctctctttctttttagattgttcactgttggcatatacaaatgctattgattcttgtatgttgatttttttatcctgaaactttactgagtttgttaatgagttttaacaggttttttttggtggcatctttaggttttgctaaatataaatgttatctgtgaacaaagctagtttgacttctttctttccaatttagataccctttatttctcttgattaattgttctggctaggatttccagtattatgcaaaataaaagttgtgaaaatgggcatccttttcttattctagatcttaggggacaagctttccattttaccctgttcaatagatattagctgtaggtttgttgtatatggttatcattattttgaggtgtgttccttctatactcagtttgttgagggtttttatcataaagaaatgttgagttttatcaaawgatttttcatcatctacagaaatgaccatata

SEQ ID NO: 154508 - DNA, 404 bp, Homo sapiens
tcagctattatgtctgtgaaaattttcagttctcctctctctcttctcaccttctggaattgtaatggcacaaaagttaactctctttttatagtatgacrggccagtgagacttcattttctttcttctcatagttttcaattattattatcttcatttttgtggactatttcttctctgtccattctgctgttgagcccatcagctaaggttattgtattggttattgtaattttcagttctaaaatttatacttgattattgtttacatcttatgtttatctactgagactttccactccttttcagagactccttatttcaagtgtttttgtaattactcattgaagttttttgtgatggctccactaaaatccttgtcagatatgtctaatatgtctgt

SEQ ID NO: 154509 - DNA, 441 bp, Homo sapiens
atccaggcgtttcaatacatcctctgaaatctatgtggaggcttcccaaactttaacacctgccttctgcacacctcaggcccaaccacatgtggaagctgccaaggtttggggcttgcatgctctgaagcaatrgtccaacatgtaatttgtcctcttttagtcattgctggagctggagcagctgggatgcaaagcaccatgtcctgagatggcatggagcagcagggccctgtgcctggcccactaaaccagttctctctcctaggcctccaggcctgtgatggaaggggctgctatgaaggactctgaaatgccttgggggcattttccccattatcttggctattaacattcaattctcctttacttatgcaaatttctgcacccttgaaatccttcctagaaaattgagttttcttttctaccacatggtcacgc

SEQ ID NO: 154510 - DNA, 441 bp, Homo sapiens
atccaggcgtttcaatacatcctctgaaatctatgtggaggcttcccaaactttaacacctgccttctgcacacctcaggcccaaccacatgtggaagctgccaaggtttggggcttgcatgctctgaagcaatagyccaacatgtaatttgtcctcttttagtcattgctggagctggagcagctgggatgcaaagcaccatgtcctgagatggcatggagcagcagggccctgtgcctggcccactaaaccagttctctctcctaggcctccaggcctgtgatggaaggggctgctatgaaggactctgaaatgccttgggggcattttccccattatcttggctattaacattcaattctcctttacttatgcaaatttctgcacccttgaaatccttcctagaaaattgagttttcttttctaccacatggtcacgc

SEQ ID NO: 154511 - DNA, 609 bp, Homo sapiens
tttggggcttgcatgctctgaagcaatagtccaacatgtaatttgtcctcttttagtcattgctggagctggagcagctgggatgcaaagcaccatgtcctgagatggcatggagcagcagggccctgtgcctggcccactaaaccagttytctctcctaggcctccaggcctgtgatggaaggggctgctatgaaggactctgaaatgccttgggggcattttccccattatcttggctattaacattcaattctcctttacttatgcaaatttctgcacccttgaaatccttcctagaaaattgagttttcttttctaccacatggtcacgctacacattttccaaagttttatgctctggtttccttttaaatataagttatctttgcttatgcaaatgacagtaggctttgagaagcagccaggtctgaatgctttgctgcttagaaatttcttctaccaggtaacctaaataatttctcttaatttcaaagttccacagatccctagggaaggggcacaatgctgccagtttcttttctaaagcatagcaacactgatctttgctccagttcccagtaagttcctcatctccgtctgagatcac

SEQ ID NO: 154512 - DNA, 609 bp, Homo sapiens
tttggggcttgcatgctctgaagcaatagtccaacatgtaatttgtcctcttttagtcattgctggagctggagcagctgggatgcaaagcaccatgtcctgagatggcatggagcagcagggccctgtgcctggcccactaaaccagttctctctcctaggcctccaggcctgtgatggaaggggctgctatgaaggactctgaaatgccttgggggcattttccccattatcttggctattaacattcaattctcctttacttatgcaaatttctgcacccttgaaatccttcctagaaaattgagttttcttttctaccacatggtcaygctacacattttccaaagttttatgctctggtttccttttaaatataagttatctttgcttatgcaaatgacagtaggctttgagaagcagccaggtctgaatgctttgctgcttagaaatttcttctaccaggtaacctaaataatttctcttaatttcaaagttccacagatccctagggaaggggcacaatgctgccagtttcttttctaaagcatagcaacactgatctttgctccagttcccagtaagttcctcatctccgtctgagatcac

SEQ ID NO: 154513 - DNA, 564 bp, Homo sapiens
tacactaattccttctccagaataggaggtaaagttcttcagtgatctttactctttccatsatatgccataacaaatacaatgtaaaattgacagtagttaatattgatctaaagataatacatcttatgttacataagggaatgagagaaaataaaagtatttgctcaatatatgtatatgcacacatacttgtaacaaggaggaaatactcatgacaattacaattttcattattgtaactagttttgtggtcttgtatttgtgattatcttctacttcccattctgtattccctttgccttcagcaagaacctctgctggttgtggcttttgactttgtggagtaaaatcttcattcctgaatctgggtatttgtagtcccaccaggattgggttgttgtagtgttccactaacattaatttacagggcatgataacactaagtgatgcactaagccatcacctatatttcagacatactcatccttacctccattgtagagtggcagtccagttttctcttagtagtctggatcactcaatccagccaatatatgtaac

SEQ ID NO: 154514 - DNA, 564 bp, Homo sapiens
tacactaattccttctccagaataggaggtaaagttcttcagtgatctttactctttccatgatatgccataacaaatacaatgtaaaattgacagtagttaatattgatctaaagataatacatcttatgttacataagggaatgagagaaaataaaagtatttgctcaatatatgtatatgcacacatacttgtaacaaggaggaaatactcatgacaattacaattttcattattgtaactagttttgtggtcttgtatttgtgattatcttctacttcccattctgtattccctttgccttcagcaagaacctctgctggttgtggcttttgactttgtggagtaaaatcttcattcctgaatctgggtatttgtagtcccrccaggattgggttgttgtagtgttccactaacattaatttacagggcatgataacactaagtgatgcactaagccatcacctatatttcagacatactcatccttacctccattgtagagtggcagtccagttttctcttagtagtctggatcactcaatccagccaatatatgtaac

SEQ ID NO: 154515 - DNA, 564 bp, Homo sapiens
tacactaattccttctccagaataggaggtaaagttcttcagtgatctttactctttccatgatatgccataacaaatacaatgtaaaattgacagtagttaatattgatctaaagataatacatcttatgttacataagggaatgagagaaaataaaagtatttgctcaatatatgtatatgcacacatacttgtaacaaggaggaaatactcatgacaattacaattttcattattgtaactagttttgtggtcttgtatttgtgattatcttctacttcccattctgtattccctttgccttcagcaagaacctctgctggttgtggcttttgactttgtggagtaaaatcttcattcctgaatctgggtatttgtagtcccaccaggattgggttgttgtagtgttccactaacattaattkacagggcatgataacactaagtgatgcactaagccatcacctatatttcagacatactcatccttacctccattgtagagtggcagtccagttttctcttagtagtctggatcactcaatccagccaatatatgtaac

SEQ ID NO: 154516 - DNA, 416 bp, Homo sapiens
caaaatagaccatgatatattggttttccaacagtactttatcttattaataggaatttaactgtgcagtgtagataatggttagaaccctttgagctctcaaattcaagtgacttgtatacataaaatccatggcaacacctgggattgaaaaacaaaattatgttacctttttttttttttttttgcgacaaaaggatctgtttaggaaacagcaacataagtagtaaaaagctattagaaattttctttagttgaagtgataacatttctcctttcaagttttgagatataaaagtgcaaagttcaatttctagyagaaattaatttttcacatgctggcatcaagaatacacgtcgtcttgataactgtctgtgattagagggaaagccacaagacaaaggcaagctctaga

SEQ ID NO: 154517 - DNA, 497 bp, Homo sapiens
catgccatcttgtccccactggaagcacctggatatcatttttaatagactgatgcaaagaggaaactccttagtgtgagtaaataaatgtaaagaagtttataacttaaagtgtttctatcctataaaataaaatgtaatgttttgtgtatgttaggatactctttctaaaatacatttattaccactttctacttattgaaagctttatggggtttaaaaatggcttttatgtcaagatttcccaacatgatgatgatgtaggcttaagcagttagatctcctcctcgggatctgttttgctacttagcacaggaaatgctgctaccctcatgccagtataggaattttaagcgcctcagtgatackaaacaggaatgaaatttaaataagggaataatgggatgacctttggtcaagaattgcaaatctattacaatagtcaagaaggacaacgaagatacacaaatatccctaattggagggtgaaatcaagt

SEQ ID NO: 154518 - DNA, 554 bp, Homo sapiens
agatgctgtattttatcaaatgcttttctgcacctattgagatgatcatatggtttgttttcaattttgcttttgtgatatatcacatttattgacttgcatatgttaaaccatccctgcatctctgggatcaaacccacttgatcatggtgtattatctttttgatgtgctgttggatttcattagctggtattttattgaggtttctttttttgtttgtttgtttgttttaatctatgttcatcagggatattggtctgtggttttctttttttgttgttatgttaattcatggttttagtatcagggtgaaattagcttacaaggatgatttagaaaggattccctcttaatcttttggaatagtttcagtagaattggtaccaattggacatctggtagaattgagctccgaatccatctggtcttggggttttttggtggtggcggtaggttttttttttttttttttttctgattcaatctttatgtttattgatccattgaragtttctctttttcctgattaaatctgggaggattatatgtttcc

SEQ ID NO: 154519 - DNA, 582 bp, Homo sapiens
aattaatatagacttgtacctctggccatttctccctccaagcaagataaaccaaagttttgcacactgggagaatttcccttcaccattgtttttcaggaaagtcccaaaaaggagctatggttcttcagctgcttactcccaggtggtgcctgtatatcatgcagagtgatctgtaaaccaggccaaagctttctcttcttcagttaactgattatagagagttcccaaggaaatgagaggtgtgggatggatgaaagaaggtaatgcagcaggagtaggagccctgggcccgcttctcatgtaacttacctgagcctttagggcctactaggggccaatctcatgaatactgcttccatttgaagatagagtgctgcttccagacacccaactttatagcttgatgagtcagacaaccactagttcacaatgggtagtacaggttacrtggtaacttggtggccaatgattgcgttcagtctctactaaggttcagtagcaaataaaaatcttctactaaaaaagagatgagttattcactgaatatgatgcagatttgctccaaaatcgtaaggatct

SEQ ID NO: 154520 - DNA, 474 bp, Homo sapiens
agtactgggaggatttattatattttaactgtttattacaagattatgtcattgagtaggacatagtgagatagtcttttaaagcattggccaagaagaggaagggaatttgcctcacttacaattttcagtactaagtcatagagactaagcatgtgattgtcawgtgctgctcttgaacattaggaactgtacttgatacatggttgtaaatatctctactggtacagagcaagtacagaaaacaaaccaccaattgatgttggatggaaatactgttctatgtggtagtcagatgttccagttggatctatcctacaaaatatacacaatgtgtcttcatatatgagcagggctagccttgccatgtcctgggccatccatggcaatggtcatcctatagttacagttaattaagatggacaactgacccattcaggctaatttctttcttgcaagcatgtggaactggga

SEQ ID NO: 154521 - DNA, 414 bp, Homo sapiens
gaatcacttttatattatttaacaagtcttaatttatattttattttattttattattatttttttagatgaagtcttactctgttgcccagcctagagtgcagtgacacaatcttggctcactgtaactcaawacaatctccgcttcctgagttcaagtgattctcctgccacagcctcctgagtagctgggtttacaggcacacacaagcactcccagataatttttgtatttttagtagaggtggcatttcaccatgttggccaggctggtctcgaactcctgacctcaggtgatatgcccaccttggcctcccaaagtgctgggattacaggcgtgagctgccgcgcccggcccataccttatattttagacatctgcgtatgtaccttgtttcctttagtagttgagaa

SEQ ID NO: 154522 - DNA, 414 bp, Homo sapiens
gaatcacttttatattatttaacaagtcttaatttatattttattttattttattattatttttttagatgaagtcttactctgttgcccagcctagagtgcagtgacacaatcttggctcactgtaactcaatacaatctccgcttcctgagttcaagtgattctcctgccwcagcctcctgagtagctgggtttacaggcacacacaagcactcccagataatttttgtatttttagtagaggtggcatttcaccatgttggccaggctggtctcgaactcctgacctcaggtgatatgcccaccttggcctcccaaagtgctgggattacaggcgtgagctgccgcgcccggcccataccttatattttagacatctgcgtatgtaccttgtttcctttagtagttgagaa

SEQ ID NO: 154523 - DNA, 414 bp, Homo sapiens
gaatcacttttatattatttaacaagtcttaatttatattttattttattttattattatttttttagatgaagtcttactctgttgcccagcctagagtgcagtgacacaatcttggctcactgtaactcaatacaatctccgcttcctgagttcaagtgattctcctgccacagcctcctgagtagctgggtttacaggcacacacaagcactcccagataatttttgtatttttagtagaggtggcrtttcaccatgttggccaggctggtctcgaactcctgacctcaggtgatatgcccaccttggcctcccaaagtgctgggattacaggcgtgagctgccgcgcccggcccataccttatattttagacatctgcgtatgtaccttgtttcctttagtagttgagaa

SEQ ID NO: 154524 - DNA, 441 bp, Homo sapiens
gaggctgaggcaggagaatcgcttgaacccaggaggtggaggttgcagtgagccgagatgttgccattgcactccagccctgggcaacaagagcaaaactccacctcaaaaaaaaaaaaaaagtgagctctatatatatgtgtgtgtgcatatatatatgtgtgtgtgtatgtgtgtatatatacgtgtgtgtatatatgtgtgtatrtgtgtgtgtgtgtgtgtgtgtgtgtgtgtatatatatatatatgtatccatcccatggaatactactcagccataaaaggaataaaatattggcattcacagcaacctggatggaattgtagactactattcctaagtgaagtaactcaggaatggaaaaccaaacatcgaatattcttgcttatatgtgggagctaagctatgaggatgcaaaggcataagaataatacatt

SEQ ID NO: 154525 - DNA, 441 bp, Homo sapiens
gaggctgaggcaggagaatcgcttgaacccaggaggtggaggttgcagtgagccgagatgttgccattgcactccagccctgggcaacaagagcaaaactccacctcaaaaaaaaaaaaaaagtgagctctatatatatgtgtgtgtgcatatatatatgtgtgtgtgtatgtgtgtatatatacgtgtgtgtatatatgtgtgtatgtgtgtgtgtgtgtgtgtgtgtgtgtgtgtrtatatatatatatgtatccatcccatggaatactactcagccataaaaggaataaaatattggcattcacagcaacctggatggaattgtagactactattcctaagtgaagtaactcaggaatggaaaaccaaacatcgaatattcttgcttatatgtgggagctaagctatgaggatgcaaaggcataagaataatacatt

SEQ ID NO: 154526 - DNA, 503 bp, Homo sapiens
gctcttgttgcccaggctggagtgcaatggtgtgatctcagctcactgcaacttctgcctcctgggttcaagcaattgtcctgtctcagcctcccaagtagctgggattacaggtgcttgtcaccatgcctggctaatttttttgtatttttagtagagacggggtttcaccatgttggccaggcgggtctcaagctcctgacctcaggtgatctacccacctgggcttcccaaagtgctgggattacaggtgtgagmcactgcacccagccaacacttttagtttcttaagccaattaattagagctctttcatacattttcagtagtgaaacagtgtgtacacaacatgtaaatacatagatatattgggcatgctgatagaaaagtacatcttatagatttatagaaacctttttttccccttagactttcagattcctgataaactgtttcacaaccctaggcagttgtcagctaaatagccttaaatttgcatactaa

SEQ ID NO: 154527 - DNA, 529 bp, Homo sapiens
catcaggctaacaatagatttcttagaagaaaccttataaaccaagagagattgggggcctgtgttcagtagtctgaaagaaaagaaattccaaccaagaatttcatatctcatcaaactaagcttcataagaaaagggaaatataatcttttccagacaagcaagtgctaagggaattttttttcccactagaacagcttacaagaaatccttaagggacttctaaacatggaaacaaaagagcaatacctgctaccacaaaaacagagttaagtacgtaaccaacagactcgataaagcaattgcacaatagaagctacaaagcaaccaggtatcaacttcacagtagggtcaaaacctcacatatcaatattaaccttgaatgtaaatggcctaaacaccccacttaaaaggcacagagcggcaaattrgatacaaaaaaaaaaaaaccctatctgtctgctgtcttcaagggacccatttcacacatcgtgacacccctatgggtgcaaagtaaagggttggaga

SEQ ID NO: 154528 - DNA, 487 bp, Homo sapiens
tcttatatcagataaaacaaattttaaaccaacaacaataaaaaagacaaagaagggcactacacaatgataaagaattcaatacaacaagaagacttaactatactaaatatatacacacccaacattggagcacctagattcataaaaatgtacttctagacctatgraaagactcatacaaccacacaataatagtcggggacttcaataacacactgacagcattagatagatcattgaggcaaaaagctaataaagaaattctggatttaaacttgatacttgagcaattggccctaatagacatctacagaatcctccactgatcaatgacagaatacacattcttctcatctgcacacagaacatatttcaaaatcgaccatatgcttggccataaagcaagtctcaataaattttttaaaaatcaaaattataccatactctcagatcacagtggaataaaaatataaatcaataccaa

SEQ ID NO: 154529 - DNA, 573 bp, Homo sapiens
agctcatagggcaacaaaaattttaaatatggacgaatatgattttattaacatgagatttctgcttaatgaaggagaccatggacaaaattgaaagacataatgacaatttgagagttttttgcaatgtttataatcaacaagggattaatatcaagcatagagtaggaagtaatgcaaattgacaagaaaaagacagaaaaataaaaagggaagaaagagtatgaactagcattttaccgaataaacccaaaggctattaaacatatgaagatacttactaagtagtaatcagaaaactgcaagtgaagcaagcaagtttcactttacatcatttagagtagtaaaaagctagaagctaagatgatgccaaacgtcagagacrtagaagtcctcatccatgtgatgggagtgtggctgttgcagccattctgaagagtaatctggcagtaactagccagatgagttttttgtttgttgttcttgtttctttttattttgttttgtttttagagccagggacttgctatgttgcccaggttggacttgaactcttgggctcaagtgatcctt

SEQ ID NO: 154530 - DNA, 448 bp, Homo sapiens
gatagtttcaagaaaaaaaagttacatagcatagataataaggtagcttgtgttgggtgaaaaaaaccaacaagcaataaaaaaaaaaaaagaaacaggaatgaacttgaaatatctcaggtcatcaaagctgaatcattytgaatctccacaccctttattgctcattgctgtcagcagaggtggttatcagtgacaagttacattatagaagaaaaaattgagaaatatagtatccatataacacactaataaaggcaaacacaaataaacccctaaaatacaaaagtcattcctgtttgcaatgtgttatatggtttcatcaattgtttaaatctttccttattataataatattaaaatcactttggtaataagaaagacaacccattatgccaatacttttctttttttttttttttttttttttttttagagacggagtttc

SEQ ID NO: 154531 - DNA, 588 bp, Homo sapiens
actacctccggggactcgcctcccttctcctcagccttccactgcctctgcggggcggggaccttttgcatttgaacttcccgcactgttggccgtttttcgccagagcctggaggagtagggagcttggctctgctcagggtgcgtgcaccctggccctggagtagcaaggacgcctggggaacccagaggaggattgcgtgtactaggccgagtcgagggtgcggagacaagggcaaaagrctaagaattttatcttttaaaacagcgcgtcagcgcccgtgctctcagcagggctgaggtgggaaagcgcagccgcgggctgcagtccgcagccggcgggaagggccgcagcgccccctggaggcaccggccgagctctgcgtggcgcgggctgagggggcggccacaccggtggtgggctccgctgcgtgagggcttggccaacagctgccccgccggcccagcggctccctgtacctgggcccgagcccctttgctgcagagaaagagtcgcgtgtgcggtaggggtcctgtggagagggcctgggcctattctcagggccaataagcttctccacacccacc

SEQ ID NO: 154532 - DNA, 598 bp, Homo sapiens
tggatttctaaggattttctatatacgagattacatcatctttaaaaatagttttaggcccggcatggtggctcatgcctgtaatctcggcattttgggaggcagagttgggcagatcacttgaggtcaggagttcgagatcagcctggccaacatggtgaaaccccatctctattaaaaatataaaaattagctggacattgtggtgggcacctgtaatcccagctacttaggaggctgaggcaggaggatcacttgaacccgggaggcagaggttgcagtgagccgagatcatgccattgcactccagcctgggtgacagaacaagcctccatctcaaaaataaataaataaataaataaatatagttttacttcttcctttccaatctcaatgtcttttatttctttttcttgcctagttacattcatattcataagagatattggtctatagttttcttgtggtatgttggtgtgattttgatatctaggtaatattgatctcacagaatgatttgggaagtgttcctgcctcttctayttttggaagagtttgtgaaaaattggtattcctcatggaatgtttggtagaattc

SEQ ID NO: 154533 - DNA, 466 bp, Homo sapiens
cttgccagaaaattataattttagagtacttttgggcaaagagcccaacttaagaggaaatggtatgatagagttgaaaaacaagactttcatataattaaaaaagctcttctgtctattgcagagcatttattttcttaggtggtttcaggtctttatggtgccaataattaattaaacccccataaatttaatactgttttataaaagtaaatacactatgagatcatcagattacatctattttgctatcaaaacaatgatagaaagtgaagcaattaagagctggtgctttagagtccgatagatgttggctctaatctcasctctgccatttactgaaatgcagtggtgggcaagttatttagcttttctgtctgaatttactcgtaaaatggaagttatatactaccttctccttgagttttgtgaagattaaatgaaatattgattgtaaagcatttgt

SEQ ID NO: 154534 - DNA, 580 bp, Homo sapiens
gaacaggaaactttgtagcttttctactttactactttggaatcacttttagatatctaattatttagatgtttggcaaaaaagtcagaatatttataattccataagaattatgtaacaagatgtttgtcaagacgttagattttaaaggagtacatttgctttcttaatttaatttgtttttattaaaataatgcacaaaaaagcaaatacttgcctctttctcaattccaactccccagaatcagccaccttcaatatttctgtctgtttcttctggtgtttacttccatatttctaaatcatttatttatatttttcctttatgattttaaaaatttaattgagatctattaatttctaatatataagatgagaatctgactcttacaaccctgcccctcgcccttttacacacaaataaatgtattaactcaccttttcctagtcttctaaaattacwacatcaccgtttttggtttaatcaatgtttactgttcacattttatcaatatgtagaaataatgtgagtaaatcaatatagtgtattgtagcttcattttcttttttctataacatc

SEQ ID NO: 154535 - DNA, 567 bp, Homo sapiens
atggaagatgattattaaaagcattaggaaaagtaaggaaaaggtttttaggagctctctttctacagacacacacacacacacacacacacacacacacacacacacacacacacattaccaaggacgcacaactcggaaagaaccaaaattaatttacattttggtttcatcatttctagtctttgrtttatgaaaaagtgtatgtgtgcatatattgtgtataatacatattatatttcatacatagttacatatatatatatatatacagtggataagtataagtgcagctaatagaatgagggatcaaataaggcctccttaaatgttgctctttacccatactgagggtaacacttaagctgaatcctgcaagatgagtacaagctagcaaaataaaaggggggagaaggaggaaggagcattctagatacagagaatagcacaagcgaaagtcccaagacaaagggaacatggagccttaaatggaagtaagaggaaataagagtagaacagaatgactggagcacagaatgctgagggcgagaggagtgcaaggaagag

SEQ ID NO: 154536 - DNA, 507 bp, Homo sapiens
tgaggtgcatgatgtcctggcattctttacacatcagtcccccactagtctctgttcccactgtgactcatcccaaatcttccttctttctctcctatctgttccttcagtctccactccaagctctgagtcctttgaatcctccttttctatggacccatctgacctctcccctcctccccagactgctcctcacaaggctgagctatgtcccaattattcctcagcctccactcccccaccctataatccttctatcacctccccttctcacacccggtctggcttacagtttcgttccgcaacctgctctccccaacctgcccaacaatttcctcttagagaggcggctggagctaaaggcaaagtcaaggttaatgctccttttttctttatccaacctttcccaaatcggttaggattttcatcaaatataaaaacccagccccgtccatggcccgtttggcarcaacacttagacgctttatcaccctagatctagaggtg

SEQ ID NO: 154537 - DNA, 589 bp, Homo sapiens
ataggagtaagtgacaagttatacatttatttatttattttggttgaagtggtataattctgagcataaagaaaggttgctgtatgttgcatgatggtgagacttttctcaggcagattcacttatgagtgaatacatattgaaaagatttgaagattggtgaacttaaaagtgtcatacacttgtgctcccttgctgcactccaagggcctatagtaatagaatgagtactgctgaacaagaatagaggacttcattaggacttttttcattcttaccatcctcaacaaatttcactcttgaaacaattcctggacttataaaactatcggtattttgtaaaacccatcttctgtgatcttttagttaaattgttgatttattttctaaactccaagcagaatcccaattctcattcatacacacctcttgttgcactgacagtactgaagactagctgtgccattgatgttcttaatcacaaaagscagaaatctggaagtcatcttaaagcctccatcagttaggtccactacagctaataaatcatcacactgtatctgtattactatcaattaagttagtagac

SEQ ID NO: 154538 - DNA, 572 bp, Homo sapiens
aaactacaatataagtaaagtaaaattttaatgtgtgttcagaatgagcaaacctgtgatcaggtacttcaatacagtcaacttttgaaatagccttatatatgaataaaaacataaaccatataattgacttcattaccaaatgaatcttcttagacatgggaaatcataacattgcataattgctagtatttcttagaattatatttcaagaatcagacagctacttaataatattatacatcatctatgaccaaccatatcttgaaggccaagatatccactcaggatgaaagggtgcacaggttataagtttctgattttatctatcaagcaaggccagtcccaatctttcattgctttctagataacccactcgactatacacaccagccgaaagctgrccaagtaaggtgattgctatgacaatagtcattatataaagaaattgtcaaactcatagtctaaacttagggaatggctcagaggatttccttgtaatggccatgttcttaatcagataaaacaggtgactgaatccgaaatggtcaatcaacacaagataaagaatc

SEQ ID NO: 154539 - DNA, 503 bp, Homo sapiens
tcacatttattgacttgtatatgttaaatcaaccttgtattcttgatgtgaaacccatttgatcatggggtattatctttttgatatgctgttgcattctgttagctggttttatttgttgagactttttgtatctatgtttattaktgatattggtctgtagttttctttttttgttatgtcctttcctggctttggtatttgggtaatactggcttcacagaatgatataagaagcagttcctctttctatcttttggaatagtttcggtgggattggtacaaattgttctttgaatgtatgatagaattcagctgtgaatccatctggtcctggacttttgttttgtaggcaatatttttattactgtttcaatcttgctacttgttattggtctgttcagagtttctatttcttcctactttaggagagttttataaattcaggaatttatcaatctcctctaggttttctagtttgtgcacctaaaggtgttcatagt

SEQ ID NO: 154540 - DNA, 503 bp, Homo sapiens
tcacatttattgacttgtatatgttaaatcaaccttgtattcttgatgtgaaacccatttgatcatggggtattatctttttgatatgctgttgcattctgttagctggttttatttgttgagactttttgtatctatgtttattattgatattggtctgtagttttctttttttgttatgtcctttcctggctttggtatttgggtaatactrgcttcacagaatgatataagaagcagttcctctttctatcttttggaatagtttcggtgggattggtacaaattgttctttgaatgtatgatagaattcagctgtgaatccatctggtcctggacttttgttttgtaggcaatatttttattactgtttcaatcttgctacttgttattggtctgttcagagtttctatttcttcctactttaggagagttttataaattcaggaatttatcaatctcctctaggttttctagtttgtgcacctaaaggtgttcatagt

SEQ ID NO: 154541 - DNA, 406 bp, Homo sapiens
gtgattaaaaagagaaattgaaaagatccttatgctgttagatttatttaataccttgactgtggtagcagatacacgagcctgaacaagtgataaaattgtataaaatgtagttctcatctacacatacccacacacacagacacaagtacagctaaaagcrgggaaacaggtttagcactgatgaattgtatcaatgtcaatatgttggttgagatattatactacaaatgcttgcaaaaatgtttggagggaaaccaggcaaagtgtacagagacctctctgtattgtttcttacaactgcatgtgaatctataattatctcaataaagattttaattaaaaatataatgaagcctcactgtagaacttggaacaagaaggacttcaaaagttcttcttatat

SEQ ID NO: 154542 - DNA, 599 bp, Homo sapiens
ctatctttgcttgtttaatgagaaagcattaaagctgtgtggtagaaaaacgcagaacctaacttttcatattctcctagataggcatctagattacttatagttcgtttcagaatataacatcatttacctcagggagaaaccttttgagttaatacaaaatgtaatattatttttctttaaagtaaatttcgagcttcatggaattgtcagagagataacagaggacacaaataattcaagaaaatataatgatgtgatccacaatttcttataaatgtgcatatttcttggaaaactctgagcaaaaacataaatcaaagccagtgttcattagcaaggattttcttgtatcatcctattattgtttctttgaacattattctactaattaacagcacttctacctagakgttaataatgtgtgaaaaaagtcttaggcctattgtttaacttcttagaaacacgttatttaaaattttatttcagctagttatttccactaattacaatctctcaacattctgatacaatttatatttgcttacaaacatgtaaaggcattcattgaatattctccaagactgctagtaatttgc

SEQ ID NO: 154543 - DNA, 576 bp, Homo sapiens
acagcaattctagatgtaaagtctgtaagaactagaactttaaaatgtgtatttaaatttaattgatattgctaagtataatgatgatagagttttttatgaagacaaacattaggttcaaattatagtttcctgaatagttaagtcctctacgaggatcatagaacrcagttcttggtttaatatattaaggctatgaagaaaactgaaaatacaaggtagataatttatgacaaaaaaatacaaattttttaaaatatggcagtctctaccaacaccaaacattatataacagcaggtgaattactcatttacttgccatttactttatttccatatcattattacagataatcttactgttacagaattttttgcaaatgctgatttctgtccacaggattggttatttgaagtatgcagtataaggaccataattttgcaaacaaataacaagaggtaatacaataacaaagaattatgaatataggaatccatacaaagggcgtgcagtctctactatgtaaatattttgtattttgtgattttagtcaagtcctttgattgggaagcatt

SEQ ID NO: 154544 - DNA, 576 bp, Homo sapiens
acagcaattctagatgtaaagtctgtaagaactagaactttaaaatgtgtatttaaatttaattgatattgctaagtataatgatgatagagttttttatgaagacaaacattaggttcaaattatagtttcctgaatagttaagtcctctacgaggatcatagaacacagttcttggtttaatatattaaggctatgaagaaaactgaaaatacaaggtagataatttatgacaaaaaaatacarattttttaaaatatggcagtctctaccaacaccaaacattatataacagcaggtgaattactcatttacttgccatttactttatttccatatcattattacagataatcttactgttacagaattttttgcaaatgctgatttctgtccacaggattggttatttgaagtatgcagtataaggaccataattttgcaaacaaataacaagaggtaatacaataacaaagaattatgaatataggaatccatacaaagggcgtgcagtctctactatgtaaatattttgtattttgtgattttagtcaagtcctttgattgggaagcatt

SEQ ID NO: 154545 - DNA, 576 bp, Homo sapiens
acagcaattctagatgtaaagtctgtaagaactagaactttaaaatgtgtatttaaatttaattgatattgctaagtataatgatgatagagttttttatgaagacaaacattaggttcaaattatagtttcctgaatagttaagtcctctacgaggatcatagaacacagttcttggtttaatatattaaggctatgaagaaaactgaaaatacaaggtagataatttatgacaaaaaaatacaaattttttaaaatatggcagtctctaccaacaccaaacattatrtaacagcaggtgaattactcatttacttgccatttactttatttccatatcattattacagataatcttactgttacagaattttttgcaaatgctgatttctgtccacaggattggttatttgaagtatgcagtataaggaccataattttgcaaacaaataacaagaggtaatacaataacaaagaattatgaatataggaatccatacaaagggcgtgcagtctctactatgtaaatattttgtattttgtgattttagtcaagtcctttgattgggaagcatt

SEQ ID NO: 154546 - DNA, 578 bp, Homo sapiens
caaatattttcatccacatgtccaatttgtcctgagaagttttgtaaccatttgctatcccaccatgagcaagcrgaggttagatgcctgattagaattagcttgttttgtatcatatgaacaaaaggagaattgtgcaacttattcccaagaaaggccaccaacgtggttggaacagccatctgaaaccttcaaggacaacattccagtagcagttgtttctacaatcatcaggactgtaggtgcagcccttacccatttgaagtagttaaaaatcatccacactattctcagtgggcagaatgagaggatttccatctactgaaacacgacatggctgatttctgatttaactatcaatggtcttcaagcatttaacctacaaaaaatctaagagttcctaaggtttaccaaactgatcaccaatttcaataggaaattgacaatttatgagaaaaatcactgagacttcagacttcaaaggaacagccattgctaaatctaccagcttctgcttttcaatgactatctcaacaaaacattcagggcagtcactatttctgccaggaaaaaaaaaa

SEQ ID NO: 154547 - DNA, 578 bp, Homo sapiens
caaatattttcatccacatgtccaatttgtcctgagaagttttgtaaccatttgctatcccaccatgagcaagcagaggttagatgcctgattagaattagcttgttttgtatcatatgaacaaaaggagaattgtgcaacttattcccaagaaaggccaccaacgtggttggaacagccatctgaaaccttcaaggacaacattccagtagcagttgtttctacaatcatcaggactgtaggtgcagcccttacccatttgaagtagttaaaaatcatccacactattctcagtgggcagaatgagaggatttccatctactgaaacacgacatggctgatttctgatttaactatcaatggtcttcaagcatttaacctasaaaaaatctaagagttcctaaggtttaccaaactgatcaccaatttcaataggaaattgacaatttatgagaaaaatcactgagacttcagacttcaaaggaacagccattgctaaatctaccagcttctgcttttcaatgactatctcaacaaaacattcagggcagtcactatttctgccaggaaaaaaaaaa

SEQ ID NO: 154548 - DNA, 510 bp, Homo sapiens
atgccttcccattttgattggaggagaagtggttcccgctctgtaacttatcaactaaccttgcctcttgggtatttacataaagaatgggaatttatttgaaaagaaactgtgggaataaattgcccttaactattctcccacaactatgtgctatgaatttgcatcattcatttctatctctctgcaggctgatacacagtttgtttataaaaagtgagatcttgtgtgtcttgactagtaagatcatgaactctgctgaagaaatgctattatttctgctattaaattggtttatttaatggatttttatttacatgcattgttaagctaaaacaaacaaagaaaacaagaaagcaacaycctgatttcccaacatgataattagagcatagagaaattcaaagatcctcctttcctctctcttgtcttttttgctgtgtggttattaggcctatagcatagtcaagatgttactctaaagcagacttcatcaggaaataaggaatt

SEQ ID NO: 154549 - DNA, 622 bp, Homo sapiens
aattttgtcaacacaatagagagtatatgtgaaaaacttctggcaaacaatacttagtgctgaaactttagaaatattatctttaaagtgagaaacaaaaggaggataccattatatctgataaacacactaaaatatagttacatattatatatatgtacttgtatacatatatgatatacaaatatagacaaataaattatagcatattcattcatttagtgatatgytatcgatcaattaaaatgttcaatgaatgcactagatctttacctatcaacactgatatatgtcaaacatatatcaaaatactgagtagccaaaggatatataccgtatattgccactgaggtaaatttgaaaaccttgaaactactactatatattatttattaacacctgaatttgtaataaacatagaagtcataccaccacttcatctagaaaaagaaggaaggaaagaagatagatgagggatacaagaaggcgtctactgtttagaaattcttatcttaaaaaaaaagagactaaagcaaatatatcaaaatgtcagaatgtgtccaatctgattatgggtacatgattctgttttgtgttcttttttgcacactctaaaatgttt

SEQ ID NO: 154550 - DNA, 622 bp, Homo sapiens
aattttgtcaacacaatagagagtatatgtgaaaaacttctggcaaacaatacttagtgctgaaactttagaaatattatctttaaagtgagaaacaaaaggaggataccattatatctgataaacacactaaaatatagttacatattatatatatgtacttgtatacatatatgatatacaaatatagacaaataaattatagcatattcattcatttagtgatatgctatcgatcaattaaaatgttcaatgaatgcactagatctttacctatcaacactgatatatgtcaaacatatatcaaaatactgagtagccaaaggatatataccgtatattgccactgaggtaaatttgaaaaccttgaaactactactatatattatttattaacacctgaatttgtaataaacatagaagtcataccmccacttcatctagaaaaagaaggaaggaaagaagatagatgagggatacaagaaggcgtctactgtttagaaattcttatcttaaaaaaaaagagactaaagcaaatatatcaaaatgtcagaatgtgtccaatctgattatgggtacatgattctgttttgtgttcttttttgcacactctaaaatgttt

SEQ ID NO: 154551 - DNA, 597 bp, Homo sapiens
tttatctatattttcaatcttaagaagttagaagaaaaagaaaatttaatctaaatgaagtargaaaaagcaaatgtaaagagaagaaatcaataaaattgaaaacaatgaataaaatcaacaaaattaacaatttagttccttgaaagtattaagacaaaaatttaaacctagaaagattgatcatgaaaaaatacgaaataccaatatcaataataaaaaagattccactatagaccattcagacatcaaaatgaaaataagggcatactattaacaatattatatgaatacatttgacatctttaataaaatcaactaattatttgaaaagacacaacttagaagcaaacatgataaaatgggatatttggacactcgtatttctatctaagaaaataatctgttatcaaaatcttcctcaaatacacacaaaaataaacaagcaaaaacactccagtctcaacattttcattggtaaatgctatcaaatatttaagaaagaaataatgcttatcttccacaaactatttcagaaaatagagaaagaagaaacatctctaaatttattctaggaagcaatagtaatcctgatat

SEQ ID NO: 154552 - DNA, 597 bp, Homo sapiens
tttatctatattttcaatcttaagaagttagaagaaaaagaaaatttaatctaaatgaagtaagaaaaagcaaatgtaaagagaagaaatcaataaaattgaaaacaatgaataaaatcaacaaaattaacaatttagttccttgaaagtattaagacaaaaatttaaacctagaaagattgatcatgaaaaaatacraaataccaatatcaataataaaaaagattccactatagaccattcagacatcaaaatgaaaataagggcatactattaacaatattatatgaatacatttgacatctttaataaaatcaactaattatttgaaaagacacaacttagaagcaaacatgataaaatgggatatttggacactcgtatttctatctaagaaaataatctgttatcaaaatcttcctcaaatacacacaaaaataaacaagcaaaaacactccagtctcaacattttcattggtaaatgctatcaaatatttaagaaagaaataatgcttatcttccacaaactatttcagaaaatagagaaagaagaaacatctctaaatttattctaggaagcaatagtaatcctgatat

SEQ ID NO: 154553 - DNA, 588 bp, Homo sapiens
gtaaactttctgttgctgatcttagccagggtcagattctattacttataactaaagaatcccaatctaatagaataaggatctgttttattaaacccttgacaattaattgccactttaatgttggatatttcattaacatcaccatcgagaggttggtacttattcattaattaattaattactagacatacctgcgtgackaggaagaagactttgcttcactggtgaacgactgcaactgctttgtcaagtttcactccattgctgcaaaataggcacgattataagcaaagagctgaggcagagaaaggttatttggtttatcacagatggcaatggggagtgcattgcttccagaaacagacccagaagttttcattccctgggccaggctggaactattaaatcacatagaaataccaggaaaagataagctacatgaaccagtgattgctaaactaaacactctagtgacttcaaagagcccttagggcctgctgtttatttggaataccaaaaaaaaaaagtggtgagagaatggtagaatagaagcccagtttatgattttatcttaaccaggctagt

SEQ ID NO: 154554 - DNA, 570 bp, Homo sapiens
ttgcttccccttttgctatgattccttaagtttcctgaggcctccccagccctgcagaactgtgagtccattaaacctctttcctttataaattacccagtgttgggtatgtgtttattagcagcatgagaatggactaatacatttgggaaatgctaactggttaatctgatataatcaaagtataccgtgaggaaatgtaaaggagttgaagctgtggagatargatagggtcagatgattaatactaatagtttgcatttactgactatttattatgggtcagatacttttattcccatcatttcatttaattttcacaacaactccatgatgtaagtgctactattttctctccaatttacgtatggagaagctaagtaactagctgaaggctgcataactaataagtggtagagctagggttgaacctgatatacactctggtgttctggaatcagactgcctggagtccacactccctctacccgtcatttacaccccaatccctacacccaaggaaatgtgtggtagccactgaataccaatttaaaatcactgtggtagaga

SEQ ID NO: 154555 - DNA, 570 bp, Homo sapiens
ttgcttccccttttgctatgattccttaagtttcctgaggcctccccagccctgcagaactgtgagtccattaaacctctttcctttataaattacccagtgttgggtatgtgtttattagcagcatgagaatggactaatacatttgggaaatgctaactggttaatctgatataatcaaagtataccgtgaggaaatgtaaaggagttgaagctgtggagataagatagggtcagatgattaatactaatagtttgcatttactgactatttattatgggtcagatacttttattcccatcatttcatttaattttcacaacaactccatgmtgtaagtgctactattttctctccaatttacgtatggagaagctaagtaactagctgaaggctgcataactaataagtggtagagctagggttgaacctgatatacactctggtgttctggaatcagactgcctggagtccacactccctctacccgtcatttacaccccaatccctacacccaaggaaatgtgtggtagccactgaataccaatttaaaatcactgtggtagaga

SEQ ID NO: 154556 - DNA, 570 bp, Homo sapiens
ttgcttccccttttgctatgattccttaagtttcctgaggcctccccagccctgcagaactgtgagtccattaaacctctttcctttataaattacccagtgttgggtatgtgtttattagcagcatgagaatggactaatacatttgggaaatgctaactggttaatctgatataatcaaagtataccgtgaggaaatgtaaaggagttgaagctgtggagataagatagggtcagatgattaatactaatagtttgcatttactgactatttattatgggtcagatacttttattcccatcatttcatttaattttcacaacaactccatgatgtaagtgctactattttctctccaatttacgtatggagaagctaagtaactagctgaaggctgcataactaataagtggtagagctagggttgaacctgatatacactctggtgttctggaatcagactgcctggagtccacactccctctacccstcatttacaccccaatccctacacccaaggaaatgtgtggtagccactgaataccaatttaaaatcactgtggtagaga

SEQ ID NO: 154557 - DNA, 570 bp, Homo sapiens
ttgcttccccttttgctatgattccttaagtttcctgaggcctccccagccctgcagaactgtgagtccattaaacctctttcctttataaattacccagtgttgggtatgtgtttattagcagcatgagaatggactaatacatttgggaaatgctaactggttaatctgatataatcaaagtataccgtgaggaaatgtaaaggagttgaagctgtggagataagatagggtcagatgattaatactaatagtttgcatttactgactatttattatgggtcagatacttttattcccatcatttcatttaattttcacaacaactccatgatgtaagtgctactattttctctccaatttacgtatggagaagctaagtaactagctgaaggctgcataactaataagtggtagagctagggttgaacctgatatacactctggtgttctggaatcagactgcctggagtccacactccctctacccgtcatttacaccccaatccctacacscaaggaaatgtgtggtagccactgaataccaatttaaaatcactgtggtagaga

SEQ ID NO: 154558 - DNA, 580 bp, Homo sapiens
aatacacaatccttgatatacacataagcctttccttgtaaatatgctagcttgcaccaagcataagatattaactttttttctgtttctctgaaaaatgcttagataggtgaacagagttttaattcactcttccattccacattgctgtagtctgactgctgtttattgaaaaacatagataacttaaagaaaaatttaaaaaattaagtgtaaagtaggatatggtagaaaaaataatgggagagggaaaaaaacccattctgaaaaaggtgagaattgcagatcagtagtgttatagagtttcagaaagttctgtctccttgatttgtgggttcatggtttggaaaattgwtttatagattcgaaaatgatcctttagaattttcttatggacagtattccctccatgagtgggaagttaaaacagataatccagaaagttcataccgttgctgaagtttcagaaaacttctatgattggatctaccaagctccagcattaaagacgtgaatgagtttaaattattctagcctatagcacttctttatgtattgtgacaatgctacacagtagcct

SEQ ID NO: 154559 - DNA, 631 bp, Homo sapiens
aacaggatgtagaagtatagaggggtggagcatgggatggaaagataaatagagaatgtccaatacaacatacaagaccaaaagcaaatgcaatttctttacttatttttttcctacaaacatatttctgcatcctttcacataactcgtcatcagttttgattagcattctaaggaattttatggcacaagaattgtgaataaaatataaaaaaatgtgttcatgcaggtaataaaactagtattacccaaaaattaaccccatcaaatttcactgtgtgtattcaaaacacccaaaacactttgtcttggattctccttgtaagaatgatgatgatgatgmtgattgcaacaattatttattaactgcttactatgttatgagtgttttaaatgtatgctttcatttaaccttgtatccactttagaaggaaggcattattaccttattttataggtacttatataaagagggagtaacaggttaagagagattacatgatttgagacagttcatatggctcaaatagcagcctttaggcaacatgacccaccccttcaaacttaacagttagaaatacagactgggcccaaagcaactagaaagaaggaggtggtaccaagagagaca

SEQ ID NO: 154560 - DNA, 642 bp, Homo sapiens
attatttttctcctttgttttctgtctttccaagtcttccacatggagcattaattttatttgcgaagagggcaaagagtgtatttttaaaagtgttaaaatgacacaaaaaagtgtgacaatcagattttcatagaattcaactatatattcaatattggtttattcaatattgttcaggaataaaattcataacgtatcttaccttacatttcttcaacctttggtgtcatcaggagtggcaaagttattcaagacaggttaataagcttttaaaacaacaacaacaacaacaaataagtgtcccccctgctgtacaattttccaacacaatggataatttggaaagtgccacattctgtcagtacaaagaggagaagtggagatgatctttgagggaagaattggtcttgtgttttgagactacttttgttttcaaagctagatttrggttctggtttcagaaaaatccaatgaaatcttgaaaaaaaaaacaactctcattatatcttcaaaattgatttacaacatgacatatatggaaaaggaaaaaaagctcataaaattgaatgttggttccttgaaatctatatatctgataatgtggtggttagacatgtcaaaaatgaaatttcccgttca

SEQ ID NO: 154561 - DNA, 599 bp, Homo sapiens
tatttatgcatcaggcactgtactatgcattggggataaaacgagaagcaaaacaamcaggatccctgcatcccatgctacttctaataaatacttattgatttactgtaacattttcaatgacacccagcttcccccagacatcccactctccttgctcatttcctccctccctgtcctatagatcagcagtccccagcccttttggcaccagggacaggtgtggtgaaagacagtttttccacagatgggggtatgagggggtacgtttcaagatgaaactggtccacctcagatcatcaggcattagattctcataaggagtaagcaacgtagatccctcgtatgcacagtttacaatagggtttgggctcctatcagaatctaatgtcgcagctgatctgacaggaggtggaagtcaggcagtaatgctggcgcagctcacctctacagaatacccaaggtagcctcaatcacttagtgccaaaaaatgagagctcccaacaaaccattcttaaggtattgataagtaagtgacaggagatagtaggggcaatttcagcaaactgtaaggagggacactgaagcaagcatgatag

SEQ ID NO: 154562 - DNA, 508 bp, Homo sapiens
tgtgattggtataaattaatgggaaaggacattagaaagtctttgggatattttaacctgtctatgaaaaactagtaaatgagtaactacttgagagttagatggagttcttaacctagtatccacagacactgagaagtcatctatggggcttctggtggatctaactagcaatatagattgtctgcagacctgtgtatgcttgtaaatatgcaaagtttctggctactgtggtcacatatggagctaggagtgcatataacccaaaggaaataacagagatgagagcaaacattttgctccctggaatcagcatccttakgtctgctcatcttggcttagggaaggaagatttacttcagcaaccggatgctgcccacctcatgatgctgcccaccttccccagccctgcctacttaactccctggacttcattcattgctcatccagatctgtggcaccaattacatttcacaggaacagctggtctgccaatcctagacactcc

SEQ ID NO: 154563 - DNA, 621 bp, Homo sapiens
gagcttctattgatagctcattttaataaatggtacttccttgcaaaattctctatctttctttttcataagagctaggaaagttccgtatcaattccttgtttggacttccacttcctcccccaaagggcaaaattatgatctaatttatttaaatgagcattacccaataaggttggctctgtttagcatgactgcctgcagtctcaaagtattcacagacctgctcagttttagccttagggatagatggagtcagggctatgactgcagaaatcacggtagatgttgccttccctgatcatagatttccactattaatagttcattactgtagctttaaactagataacccacaatttaaaggttgcttttcctcttaaatttwaaaaaaaaattaagatgaaaaatagtgtgattcttttctttacaatttttaaattaggtcccaagaaaaatgtgctagagatgggtgtcattgttgggaaatgggaaatggaaaagcatgggagaagtagaactatgaagctaaaaagtttgtgtaatttcccaagtttaccttgagctggctttgaccttagggtaaattacccatggttgtcgccataaacctgcaaccca

SEQ ID NO: 154564 - DNA, 570 bp, Homo sapiens
tcatctgctctttatgagaaaatctgtaaagggttatagaaggtttataaaaatcttatcttatggtcaaactgattaagattggatagatttatgtataaagttttattaaaaattggagtttaacattagtagtatactaatgtaaaggtgaaatttggcttatttggtataaaagtcatacaggaagcagtgtcaaatatgaaatgatgtttgcttttctttgggctgtatttgtataaatgtgttattggtctgtgttccaaaattatgagaaactcctataaatctgatatggcttaatgtatgttattaataattataattgttatataaaattgttatatgccacagaagtaaccaatatttccttttcagttgtggctttaatagcggctctcctaagacrttttatcatccatagacaactgttgtcttgttttgatcctttttaaaagctggtttataatcagccataggactctaacaggtgttattaagtgcaggtttctgataactttggtgattgtgacattagaatagagaaaaaaactttcagggctctcatgg

SEQ ID NO: 154565 - DNA, 570 bp, Homo sapiens
tcatctgctctttatgagaaaatctgtaaagggttatagaaggtttataaaaatcttatcttatggtcaaactgattaagattggatagatttatgtataaagttttattaaaaattggagtttaacattagtagtatactaatgtaaaggtgaaatttggcttatttggtataaaagtcatacaggaagcagtgtcaaatatgaaatgatgtttgcttttctttgggctgtatttgtataaatgtgttattggtctgtgttccaaaattatgagaaactcctataaatctgatatggcttaatgtatgttattaataattataattgttatataaaattgttatatgccacagaagtaaccaatatttccttttcagttgtggctttaatagcggctctcctaagacgttttatcatccatagacaactgttgtcttgttttgatcctttttaaaagctggtttataatcagccataggactctaacaggtgttattaartgcaggtttctgataactttggtgattgtgacattagaatagagaaaaaaactttcagggctctcatgg

SEQ ID NO: 154566 - DNA, 402 bp, Homo sapiens
aagattcaaatacaatatcaatattttttaaatgggtggcagaaaaaatattcaaatcaaaaagtggacagtgagtgcaagactgaggcggggtggaagaatgggtgtttttttgagatggagagtttgaactcttttaggatgtccaaaaatgtctcttaggtagttggaaatagaaagttgggagcacaggccggtggcgcaatggataatgcatctgactatggattagaggattctaggaaatagaaagttggctttggggtgagaggataatatagtcayacgtctgcctggaagacaagaggtgaaatagtgcctcaagacaatactctgagataaaggcaaggaaaacaaacttcatatgcgtagacacttcctgcatctcctctatcctcttcc

SEQ ID NO: 154567 - DNA, 612 bp, Homo sapiens
ctccaaatctcatgttgaaatgtaatccctaatattggaggtggggtctggtgggaggttcttgggtcatgggagcagattcctcatgaatggcttggtgcccttcccatggtaatgagtgcattctcattgtgagttcacccaagatttggttgcttaaaagtgtgtggcgcctcatccttccctcttttgtgtatcctttctgaccatgtgacacactggttcctcttcatcttttagccataattgtaagcttcctgaggcctcaccaggagcagatgctggcaccacacttcctgtacaacctgcaaaaccgtragccaattaaacctcttttctttataaattatacaactgcagtattcctttatagcaatgcaaaaatggtctagtccaccatggttctaaacactattcccatgctaaagcttcctaatgttatcttcagccccgacctctcctctaagacacaatgtcacatatccaagtggtaacacagcatccacactccacacagttttaatgtgtcctgaactgaatgttggttttcccatctaaatctgtgctgaatcaagtctttctcatccaccccgtggcttaagctggatagct

SEQ ID NO: 154568 - DNA, 624 bp, Homo sapiens
atactttgtcaaaccaaaataataaataaagcttaccccattgtagcaatgctatgctaactaaacatttggctcttatttgtttacactgcattaaatttattctctttcagttggggatttttcccctwctaatggtccaactttggttgtaccacttgtttggataattttaccatctcttcactctcagatttccaacttcctgaagtaaagttatgttctttaaaattctcagaaacctgtgtcccttccagatagatatctcctcttgtgcataaaggtgagacaaactttgcctagttgctgatttacacagaaagaatgagaagaattttagactccatggcagcatctactagaattctcttgtacactattgagtactgaatcacaaactgctgtggtttctcaattagggtaggacattataaatgagagttaattgactacaatagtgcaaacttctggcatctaggtgagatatagatagatgtaaactagattgaaaatattaaagaatctataaataagttttaatatatttttaaaagcggtcaggaggaggcaataattctgcttctagttatgaaggggaaagtgttatcagatttacattcccaa

SEQ ID NO: 154569 - DNA, 370 bp, Homo sapiens
tgcatcatatatatcttacatagtctgaaagtaattttatatataatgtcttgggtaattttgtgcatgaaacaaagttttggctgtgttttcacttcgactcattacgtgaggtcaggtgtgggattttccacttgtggcctcatggcagcactcaaacagtttccgagtttggatgtcccacctgtattgcggttgccaatatcatcttgagtttcctcaaatgaaaaatgaaagaataatagctctggtatagttttcattgtcttctgrgtggtctaatttctttttttgccttctgattacttttttttccccaaagcatggtcttcatggagaggtctttttcttaatttgggtacttacttgt

SEQ ID NO: 154570 - DNA, 592 bp, Homo sapiens
tccttccggaagagaaagaatgagtgtcttgyaggcctggtttgggaatctgagaataccctctatgatccaatagaaaatgccctcacccatgtatgaagtaatggtcgtccattatcctacctgttgctgcatgtttggaggctgagctcaaggagtagaattaaaacaaccctcttgaatagtgatttcagttttgcctgctctctaaatggcagagcaggaggtgacatttatcataacaatgtggcagcaagtcctgagaccccagacaaacggcaatgtgactatagctactgaatcaaggagtccccaaagcagaaataaatgatgtcagcaacgagaatgaagagctttgggtggatcaaaaacatcatctgagccataaacagcctctacaagacggaaagtcaatgtgcctgctgtagtggcatggagctgcttcctgcctctctacctccaatccctccctctccttctacccaatttcaaatgctttaagagaaagatgattagggtgtggctgaagattgtttcccaacggcactaaagctagatgcaaacagctgaacatacatgaaaattctgtgaa

SEQ ID NO: 154571 - DNA, 502 bp, Homo sapiens
taacagtagggtgggtgaagagggagagatatcggaagacttatgtgtcagraaatagagtttacatttcttttttttctttcttttgagacagggtcctgctctgtcacctgtgctggagtgcagtgtcacaatcacagctcactgcagcctcaaaatcacaggttcaagtaatcctcccacctcagtctttcaggtagctgggaccacaggcatgtgccaccatgcctggctaatttttttgtattttttgtagagatggggtgttgctatgttgcccaagctgttctcaaatacttaggctaaagtgatcttcctaccctggtctcccagagtgctgggattataggtgagagccactgtgcccagcctagagcttacgatttcttgaatggggcaaccagtggtcaaaattctgaagacagtgaaaggaagaatagtgtgcaagagagtaactccatgaaattgctttatcccctcaactgaactgaattgataatga

SEQ ID NO: 154572 - DNA, 502 bp, Homo sapiens
taacagtagggtgggtgaagagggagagatatcggaagacttatgtgtcaggaaatagagtttacatttcttttttttctttcttttgagacagggtcctgctctgtcacctgtgctggagtgcagtgtcacaatcacagctcactgcagcctcaaaatcacaggttcaagtaatcctcccacctcagtctttcaggtagctgggaccacaggcatgtgccaccatgcctggctaatttttttgtattttttgtagagatggggtsttgctatgttgcccaagctgttctcaaatacttaggctaaagtgatcttcctaccctggtctcccagagtgctgggattataggtgagagccactgtgcccagcctagagcttacgatttcttgaatggggcaaccagtggtcaaaattctgaagacagtgaaaggaagaatagtgtgcaagagagtaactccatgaaattgctttatcccctcaactgaactgaattgataatga

SEQ ID NO: 154573 - DNA, 442 bp, Homo sapiens
cttacctctcttctcctctgctctaataaaacagaggtcacaggtgtgttgtgraaagtaaatgagatcacacatgagaaggctaacaggctttgatcagagccccacacatactaagtgatcaataaaaggcaggagggaggatggtgaaaaggtgaaatgacatgaggatgaggagattgatgatggtggtggtggtggtggtaatcatagttgtcatggatcaaattgtatccccccaaaactcatgtgctgaatcctaacccccagtacctcagaatgtgactggatttgcttatgtggtctttaaggaggtaattaaggttaaatgggtcaaaaaggtggggccctaatccaatatgactggagtccttgtaaaaagaggtgataagaacacagatgcacccagggtggccacgtggaggacacagagggaaggtgg

SEQ ID NO: 154574 - DNA, 442 bp, Homo sapiens
cttacctctcttctcctctgctctaataaaacagaggtcacaggtgtgttgtgaaaagtaaatgagatcacacatgagaaggctaacaggctttgatcrgagccccacacatactaagtgatcaataaaaggcaggagggaggatggtgaaaaggtgaaatgacatgaggatgaggagattgatgatggtggtggtggtggtggtaatcatagttgtcatggatcaaattgtatccccccaaaactcatgtgctgaatcctaacccccagtacctcagaatgtgactggatttgcttatgtggtctttaaggaggtaattaaggttaaatgggtcaaaaaggtggggccctaatccaatatgactggagtccttgtaaaaagaggtgataagaacacagatgcacccagggtggccacgtggaggacacagagggaaggtgg

SEQ ID NO: 154575 - DNA, 545 bp, Homo sapiens
gtataattaaatagaaataatgaatatattgctattaggtgtaagattttgctgttaaaaattaggaggaaaatagtttttgatatttattcatatttttaaggaaaatctaggtttctctctggtatcatttccattcagcctgaggaatttcctttagtattttatgtggggcatgtctcctcttaatttattctctttattttattttatctgaaatatatttatttctccttctttcttgaagaatatttctactggatacagatttttaggttgacaggtgtttttccttccattactttaaagattttgtcttgttgtcatctaactttcasaatttctgatgagaagtcattaaactttgaatcattattgtccagtatgtaatgtgtcacttttgtctccctcctttcaaaaagtcccttaaaatttgacttttagaagttttcctatggtatgcataggtggaaactcttgacttaaaaaaatagtttttcttgctttgtttaggtttcctatcttttcctttatttcagtcatat

SEQ ID NO: 154576 - DNA, 511 bp, Homo sapiens
gagaaggagggttctagaaagagccaaagagaaaagagttcacatgtacagcaaactgtttcacatgagtttactcttgtctccttggtgcttttgactctctgcaaatgattattcagaaatcatgttgtatatctgacaggtgccactttggatcctggtgagcctcccatgcctgcttttattctggagcccacgcatcacaccagcccctcacttcctccttctcacacttccttgtgggtcaggaagggaggatgttcagttctcaaggcttggattgtatgggtgaagagttgaagtttcccttgtatggtgagaggagccacatggtcctgcagactgataaacagatctcaggaccagttcacagacacacctctcagcccttcctctcgcctccactgtctttccacaggcccttgctcctagcctgctgttctctctgcctggcactcamactatcccttagaattccctccctccaaactggccagcatgaggacccgga

SEQ ID NO: 154577 - DNA, 496 bp, Homo sapiens
gatactggttgtgaaagtaaattttgggaaataaaccaaaaaaattagaggctaacagagccattaagcttgtacagtgacaccatataaatcctcaataacataattaacctaatgtaaataaattaagccccactttgctaatatattgggtttctcagcttacaaartgttttctaaacactttgagtctcaaggtattactttgatgtaggttttattattttcatttcatatgataaggaaaaaaagacttcaagatgtaaagtcaagaaacaatgtggtaggaacttgaattgagggctttatatgcattttcttagtggtcttttcactatcacactcccaagtttgaatactagaaccactttccaatcaatgcagaaccattacaactggcaggtagactataaaataagctggtgtgaagcagtttacaccacccacccacaattcctgagaatgttcagggcattcggggagtcagtgttacatg

SEQ ID NO: 154578 - DNA, 496 bp, Homo sapiens
gatactggttgtgaaagtaaattttgggaaataaaccaaaaaaattagaggctaacagagccattaagcttgtacagtgacaccatataaatcctcaataacataattaacctaatgtaaataaattaagccccactttgctaatatattgggtttctcagcttacaaaatgttttctaaacactttgagtctcaaggtattactttgatgtaggttttattattttcatttcatrtgataaggaaaaaaagacttcaagatgtaaagtcaagaaacaatgtggtaggaacttgaattgagggctttatatgcattttcttagtggtcttttcactatcacactcccaagtttgaatactagaaccactttccaatcaatgcagaaccattacaactggcaggtagactataaaataagctggtgtgaagcagtttacaccacccacccacaattcctgagaatgttcagggcattcggggagtcagtgttacatg

SEQ ID NO: 154579 - DNA, 519 bp, Homo sapiens
tattgacatctgtcagtgccttgtcattgtaacgtttgctaacactagtacagtaaaatcaaaccggtccacaacaatgcttgccagcagaaagggagaagtggcagattaccttacttctgccttccctttctcacaagaatgcatatgatttgctgaaccttagckgcagaggtgtctggaaaatgtagtttttaacttgccaacctatgtaatagaggaatacacactagaaggtggagtggacagtgtctctgactccctggtagagaaatggcacggtgagtattcttgaatatgtcctcttatggaactgtgtgagaatttctttgggatcgttatccagaagtagaatcataagacagacataaatgagtttcacaagcacagtttatactccttccagtaggctaagcattcctgtttccttatttccacctccagtttggaatgatatgcctttataaaaagttttgccatattgacgtcaggtggtagctcattggtttaatttgtgta

SEQ ID NO: 154580 - DNA, 369 bp, Homo sapiens
attgcctgcatgcctgtgcgcatgcagttccctctgtcctttcttaccttctctgatggaaaacacaatcacctgtcaggacagttcagcttttcagtaaaacagcttccaacaactttagggaaattgtcacttcctcttctgtgcttttataagtctttgttcatamccctattataatacctatcacattatattataattatgtgttaaatttcaaggcattgattatgtctcaattatccagtgattaatacagcccctggcagatagtattcaacgcatttttttgagtgaacaaatgagtgaccactgtctgaactatttgctttatttttctgtaaaactagtttaataatgtggttgcct

SEQ ID NO: 154581 - DNA, 447 bp, Homo sapiens
gtatcaaattctaaggaaattgtttatatttatttagctatacaaggcacaaaacttggagagggagaatttctcaggtctagagtaaataataactcagtgcattgcccacaatttactgtcaatgaacctctaagaacttctgtcaggtattgtttaccataacgattttaaacaatagtgaccattgaaataatggctcttctttgccaggtgctgtccaggcatttggcacccagggtcaccaatgtgggtcatacatccactggacaagattccaataaaggccaatgtgacaaacctttttccaaaacaaaaaacaaaacracaaaggacatagactcaacatcataaaattgtgctccagcatttttttcaaagacaaaacaataataaacatacttgtgctaataataatatctggacataatgtgcaattcaaaaagc

SEQ ID NO: 154582 - DNA, 565 bp, Homo sapiens
gatagtattaaatctataggtcaatttggaaaaaattggtatctatacaacatgagtcttctaatgcatgaatatggtattttcctccacttacgtaggtactcatttgcttgataatttttgccagttttgtacatttggatcttacacatttttaaaagtgttttgtgtttaactctagaaatttaataatttgatactattgtaaagtgtcacagaaattaagaatttaaaattttatttttccaaatgtttggtactggtatgtagaagtacaattcatttttttatgtaggtatataaccggcaaacttactaagctcattaattctaatattgaatgtagatttatttctatgtacacaactatgtaatctgtgataatgaagwttttaattatttttaatcaagcttggtattagttttgtaaatgctttggtcattatcccttcaaatatttcaactgttccattttctttatctttctcttcttggagtatggttacttatattagactttctctctatattctcttatgtctcatatcatttcttttctgatttc

SEQ ID NO: 154583 - DNA, 552 bp, Homo sapiens
atgcagtgtttataatttttagataccctgtatctctaaaacagtcaaacagtagggtgaagcccttcctttcattgtacctgctcagctacctggttctatttcagaaattaaagtatccaaaagacaccgattaggttcagaaagtcagctcaaacagacttgaaaagtgaaagagaaactaattaattctgtaactaaaaaaattcctcccagactccaataaatcgctgactataagcttcagtttctaatactatgagatttcattctttttctgcaaccatgaatttttaaattgagagttacgggaggcatttttcaggaactggatataatagcctgaaaccattttatccctgatggtcgcacaagatttaatagctaattagtcaactcttggtgaccaagtgagtgtaaggggtcactgaagtgatgtttcttctaaactagcacgatgctagcaggactgctgcttcacctggactgggtggagggagagttaaycattggatcaacagctagggtaaatcaagacttttaatgccttcc

SEQ ID NO: 154584 - DNA, 438 bp, Homo sapiens
gatttcggagttacaaataaatattagtgaagaggtgaaktcacagatatggactcggtgaatgatgaagattgactaataaatatcatatcataatcgtatggtaccatatcgtatcatatcataggaatgacctttcccctacatctggtctcttggacaagggaagcaagaccaggtttgtgataacagggctgaggcaccaataggcaacagtggcttttgccagttttctacttctacatttagtcctcttccagtctgctggctagacagacatagttacttctggctttcatggtccttgtaacacttgtgggcactgaaccaatgtaaaaagagagggggagatgtatttcacacaaaggactcagttttctcttactctgccttcagcacagggaaagagagaccattgccaacagggtgggagtgtga

SEQ ID NO: 154585 - DNA, 510 bp, Homo sapiens
atgactgtgaaagcaccagcaatattgatttcggagttacaaataaatattagtgaagaggtgaagtcacagatatggactcggtgaatgatgaagattgactaataaatatcatatcataatcgtatggtaccatatcgtatcatatcataggaatgacctttcccctacatctggtctcttggacaagggaagcaagaccaggtttgtgataacagggctgaggcaccaataggcaacagtggcttttgccagttttctacttctacatttagtcctyttccagtctgctggctagacagacatagttacttctggctttcatggtccttgtaacacttgtgggcactgaaccaatgtaaaaagagagggggagatgtatttcacacaaaggactcagttttctcttactctgccttcagcacagggaaagagagaccattgccaacagggtgggagtgtgagatgcagtgaggaagccatagcaagccagagaatgcagaggcaaga

SEQ ID NO: 154586 - DNA, 246 bp, Homo sapiens
ctggggagacagatcctgaaggagataaacaataagtaacctaattattagaacattactactgaataacaatatgtaaaacagcattgacttaatgtgtttcactgttatatttcagtagaagtgaaaaattagatttaaggttttccttaactttacttgcttccttctctataagataytgtttgcctcaaatttgacttttacagtgaaggtgtattcaatagagtaatacccacccagatc

SEQ ID NO: 154587 - DNA, 439 bp, Homo sapiens
acgtacaaattagctggatgtagtggtgcgagcctgtagtgccagctacccaggaggctgagaggcaggaggattgcttccgctgaggagttcagggctgcagtgagctatgattgagttatsattgtggacaacagagcaagaccctccaaagaatctcttaaaaaaaacaaagggtttttctttttaaagaatgaaaacaccctgaaggaactggagtggggctgggaagagagtgtccaaggatgagatgcggagtggtttgacagggatatggaaaagcccagaatcagggaaagaccacaaaatatgacaacttgacagcagaattgcataccgaaagaacacaggccccagaggcagccccacctggctcctccatgttgatgggatgaaatgctggccttacatgggtcatcactattctaacaccctattt

SEQ ID NO: 154588 - DNA, 570 bp, Homo sapiens
tctaattattgatttatttcattcacaaatgcagtatatccccccttgattcccaatggatgcctgaaactgtggatagtactaaaccctatgacctatgcatattgtgctatgtgttttcctatacatacatgcctatgacaacgtttaatttataaattaggcacagtgagaataataacagtatctaataataaaatataataattataacaatatgctataataaaaactctgtgaatgtggtcacctgcccatcagtttcctagtagctgagagatagcaagagcatgagatttcagcatgctactcagaatggcacgcaatttgaaacttacaaattgtttctggaattttaccttcaatattttcaggctggggttgatcacgggtaactgaatcctcagaatgcaaaactgtggataaggggaggctaccgtattcatttaccgcatactaggaagggactaacatgagttgagcacttagcatgccagaaagttcgaaarcaaaggctctggaatcagaaatgtctgaatgttagtcctaactgctatttcttagctgtga

SEQ ID NO: 154589 - DNA, 560 bp, Homo sapiens
gccacctaaaaagataaaagctttgacctatgctcttggagagctattcaggttgtttgattggatgtatagtctatgagggtctctgttttttgagccaagaatcaaragaaaaaaacaggtgcttcctccctccatttctttttttgttttctctgagtaaataaagatgcgacaaataatctttaaaaattaaatctgtgattttagttttagttcctgggcagccctaaggtaaaagaaaataattttttaaaacctttaggtattataaattcagatccaaaagcgattctatcttataggcaagcataaaatgggagtgctagtagtacttgttttacaaggctatctggtgaattaagtgaaataactttcgagcaactgagctataaccttgtaaccagtctctactttgccacgcattcatgaggaaagtaaatgtgagtccacacaaaatacctgaaaaatcatgaatgttttctctatatatcttttgggagcactagggaggagcttagacagtatgccacacagaaaaccaaatctttacccatttg

SEQ ID NO: 154590 - DNA, 560 bp, Homo sapiens
gccacctaaaaagataaaagctttgacctatgctcttggagagctattcaggttgtttgattggatgtatagtctatgagggtctctgttttttgagccaagaatcaagagaaaaaaacaggtgcttcctccctccatttctttttttgttttctctgagtaaataaagatgcgacaaataatctttaaaaattaaatctgtgattttagttttagttcctgggcagccctaaggtaaaagaaaataattttttaaaacctttaggtattataaattcagatccaaaagygattctatcttataggcaagcataaaatgggagtgctagtagtacttgttttacaaggctatctggtgaattaagtgaaataactttcgagcaactgagctataaccttgtaaccagtctctactttgccacgcattcatgaggaaagtaaatgtgagtccacacaaaatacctgaaaaatcatgaatgttttctctatatatcttttgggagcactagggaggagcttagacagtatgccacacagaaaaccaaatctttacccatttg

SEQ ID NO: 154591 - DNA, 560 bp, Homo sapiens
gccacctaaaaagataaaagctttgacctatgctcttggagagctattcaggttgtttgattggatgtatagtctatgagggtctctgttttttgagccaagaatcaagagaaaaaaacaggtgcttcctccctccatttctttttttgttttctctgagtaaataaagatgcgacaaataatctttaaaaattaaatctgtgattttagttttagttcctgggcagccctaaggtaaaagaaaataattttttaaaacctttaggtattataaattcagatccaaaagcgatkctatcttataggcaagcataaaatgggagtgctagtagtacttgttttacaaggctatctggtgaattaagtgaaataactttcgagcaactgagctataaccttgtaaccagtctctactttgccacgcattcatgaggaaagtaaatgtgagtccacacaaaatacctgaaaaatcatgaatgttttctctatatatcttttgggagcactagggaggagcttagacagtatgccacacagaaaaccaaatctttacccatttg

SEQ ID NO: 154592 - DNA, 530 bp, Homo sapiens
gctttttaggtgaaaaccatgaggtgaataatcagatttagttgacaatgcacttcctctgtgatgscctccctgatcactaggcagggtgccctctctcttctctatagagtatcctcctatttctttctacaattccctttatgtgctgcttttttattattttttaattttttttcctgggtctctgtcacctgccagactatattgccctccagggaagggtcggtgtcccgcctggtacagtgcttggcatgaaacacatgccctccagcaggtgtaggtgaatggggacattgaaaaagctgatcagtctgttgtgacgtatgaaagcagtggaaagaaggaacagaacagtgcccagagatctttggggcttgagagctgattagagctggaggctttcatgagatggggaaccagtgaaggacgcttatgagtagtttgacataactatttttccatttcaaaaagtcactttgtaagtaatgcagaggatggtctgtgaaagggaagaatatagcaaaata

SEQ ID NO: 154593 - DNA, 530 bp, Homo sapiens
gctttttaggtgaaaaccatgaggtgaataatcagatttagttgacaatgcacttcctctgtgatgccctccctgatcactaggcagggtrccctctctcttctctatagagtatcctcctatttctttctacaattccctttatgtgctgcttttttattattttttaattttttttcctgggtctctgtcacctgccagactatattgccctccagggaagggtcggtgtcccgcctggtacagtgcttggcatgaaacacatgccctccagcaggtgtaggtgaatggggacattgaaaaagctgatcagtctgttgtgacgtatgaaagcagtggaaagaaggaacagaacagtgcccagagatctttggggcttgagagctgattagagctggaggctttcatgagatggggaaccagtgaaggacgcttatgagtagtttgacataactatttttccatttcaaaaagtcactttgtaagtaatgcagaggatggtctgtgaaagggaagaatatagcaaaata

SEQ ID NO: 154594 - DNA, 530 bp, Homo sapiens
gctttttaggtgaaaaccatgaggtgaataatcagatttagttgacaatgcacttcctctgtgatgccctccctgatcactaggcagggtgccctctctcttctctatagagtatcctcctatttctttctacaattccctttatgtgctgcttttttattattttttaattttttttcctgggtctctgtcacctgccagactatattgccctccagggaagggtcggtgtccygcctggtacagtgcttggcatgaaacacatgccctccagcaggtgtaggtgaatggggacattgaaaaagctgatcagtctgttgtgacgtatgaaagcagtggaaagaaggaacagaacagtgcccagagatctttggggcttgagagctgattagagctggaggctttcatgagatggggaaccagtgaaggacgcttatgagtagtttgacataactatttttccatttcaaaaagtcactttgtaagtaatgcagaggatggtctgtgaaagggaagaatatagcaaaata

SEQ ID NO: 154595 - DNA, 518 bp, Homo sapiens
ttccctaccgtattagtcccttctcatgctgctatgaagaaatattcgaggctaggtaatttataaggaaaagaggtttaattgactcacagttccacatggctggggaggcctcaggaaacttacaatcatggcggaaggcrcctcttccaagggtggcagcagaaagaatgagtggcagcaggggaaatgccagacacttataaaaccatcagatttcatgagaactcactatcacgagaacagcatgggggaaactgcccccatgattcagttacctcccactgggtccctcccatgacacatggggattataggtattaaaattcaacatgaaatttgggtggggacacagccaaaccatatcacctattaaaaagaaaaaaaaaaaaaaaactcagagcacagcttgtgagtgttactcaaagcatggtggaaaaccccaaagatttatttagggatagtcccaactacccacagaggcagagcaaacaaagacaagcaaatcagtagattta

SEQ ID NO: 154596 - DNA, 605 bp, Homo sapiens
agttgacttagctttagctcaggtgtggatacaaccaccttgttttgttattttgtaagtttgtgatcttatatcttgtaactttgagggataaaaaagcaaagggggattgatggaaaaagaaaccccagtgttctcaccaccaaccaacagatgagcccacccaaaccagcttaatgtttctggtgaactagccccttcatggatgatcacagtctctcagcatcaaatgaccttatttgttggctcagtrgtttaaaagaagcattctatttcccatggttgtgcttcaatatgctctaatccatagggattactgtggcagaatgtttcaacccactggagctttctggcacaagtaattttcatcagagcaaaactcatagtcaatttaggaccaacaaagatactaaaatcttaaagttacatggtaggagccaaaatcaaattatctcagtaacttagttttcttttttaaaaaaaaatttacatttttgaaaagtattttaacaccacaaaaaagctgcaactcaaaccttggtggaatcaaaaaggaatttgcgttttgattttatgtacagctggtggccaatgtgtttatcttg

SEQ ID NO: 154597 - DNA, 632 bp, Homo sapiens
ccatctgtggtgcctcttctgaacaacatgctgggtttctcagactctagatttttcatccacttcaaagtattgactgttctggttacaaactcatcttttgtaaccaaacctaaaaggagagtaactaattataaaataggattgtggaagctttaaaaagttcagccttcttgacttagctatatgtcataggttggcatcataccatgtaccatattgtatggtgtgtttaggtttaggtcaaacaatgtcctttcaaaaaaaaatcggtgcagacaatatacactttcaattacacaagtagcctccttagaccaaaattttaaaggggggtctctgtccttaaattgtttatttaatttcattttaagagaaaaagaaaagatcccaggtaaatttaggggtaacataagatgtagagggatgaaattgwatattccacttccaatgttaaagattcaggaaagcatcacaaaaaaaaaggttgaactatattctgctctcgatttgagaattaagaatttccaaaagttcatagtgagacaacccccacctccactgtcctaaggattgtgagagtgaacaaagaccaggcattaatctgttaactggagtgaggctgtgcctga

SEQ ID NO: 154598 - DNA, 600 bp, Homo sapiens
tattgacctatttatatatcacctctgcaagactgtaagcacttcacaaacaaggactgggtctttgcatgttaagaggtgagtcttgaattgttgtgtccaacgttaacatctgctcccaatcagacctttcctgttaacaatggttaacattcattagtgcttatcatgagytgatctctagtttaagccttttaaatgtactaatccatttgccttttcaaaaaccccagaaaatacatgttctaattatcattcccattttacagatgaggctagtgggacacagagagggaaagaaagttaaggaggcagaaccagaactagaaacatgtagtcctgccccactcttcaccactatactgcaatcccttatttgtaatgatattggtgactagaaaaagtaggtggaaatttggaagtctgaactaaaacctctgtgcttatgcttcagatgattctaacacagatggtatgagaaccacatgttgaaaaacagatgtaggtagtagtagtagcaatgttaagaactggtgtttgtttatcattacacttcaccaaacatttccatatacatgatctcatttcactcttataaca

SEQ ID NO: 154599 - DNA, 405 bp, Homo sapiens
caagtagcaacatttcactctgtttcactacattaaactgctcaaataaagcaaacggatattgaaaagagttggccatctgcctttattttcttttacttttgtttaaaaaaaaaactctcaaaagrgaaagaacacagccatgaaactgatagtgacaaaaagcactctctttttttctttatcaggtcagactctcatctaaatgcagttctgatgaatagtttaaaaaataaaaaagaagcccgctttgtggatttggagtgggtctcaagaccagccatgaaacctaatgattatttaacggcgctgcactcgaggctggcttctgtaagcctcctttcccccctttaagagtttgatgaataggtcttgtgacagccatttaggaataaacaagaattc

SEQ ID NO: 154600 - DNA, 576 bp, Homo sapiens
ctgttctagatcctcaagatacagttgtgaaaaaggtaaggtgtgttcaagaacagctgataccttgtacacataaacgcatctcccagttaacattagaaattcagatcttgtccatgatatggctaaacagaagcctatttctcattattttaagtgagaaaaatgcctttcagtttggccaaacccctaaaccagtttcccatattaactaaaaataataaaatacctataaaggaataaaagctatcatattggaatgcaaagtactgaaaacattacttcatcatcaagtaattagcatggttgctaatgaacaatttctttataagcagtaatagcctttattcacacaccaactggggaaacacacaacacacaaccctttggttgacrtggtgcacatttcaaaagccaacaaatgattgtgcttccagctagcatcaaactactttttcaccataaagaatgagtgattggataaaatatatgaaacaactatttcagacattagataatatgtaactgttattgcaaagagaaaggaaacaaatgagatgaaactaccgtccccac

SEQ ID NO: 154601 - DNA, 537 bp, Homo sapiens
aggaagtacaggtctgagccgtaaaccaccaagggagaaaggaacatttctgtcattcttctgcaaatcagtcctgttgcttaaaataaacctgatcacacacacacgaacttagaaaacaatgatttgaacccccttcttcttgcaataactgattacattaacttcatggattctgcaaggcaaacacaagaattggagttctagtttcctgtattcattcaaaatccccagaatcttctctattttccctcagatattagttctctgcaggaaaccacagggttctgaactgaaaaagaactttggaygaatgtttataggagtggatgatctcagtctgttcactcgtgggtcaatcaaaattctgtctttacttgaattagtcagataatcatatttctgatgctccatctgatcaaatttgtgctgaagtttagaagaaagtgttagtccctgacctagcccagctgattgtagccagcacccaggcacctaggcaccctggcaagatctggggagctctgatacttcttt

SEQ ID NO: 154602 - DNA, 445 bp, Homo sapiens
cctgtgagctcactgggtcccctagcaaaccatttctgcctggtctcacaggggtcctttgggagggcaccagaggccctgggaaaaggccacagggagaaggaaagctccagctgaactttgtaacaatttgagctsatcaagaagtcttcttgccagaactcagggtaggggagtgaatccagtgtgcagactccacaggcgggtgtagaaggaaagccatacttgctttcgcagctgggaggcgggtagcctggggcaagttctcagcactgctcacctaccccttgaaacagactcggtgctatacagggtggcacggtgggagtgagaccagcccttcggattgcacgggagctgggtgaggcctgtgactgctgggtttccctccacttccctgacaacctgcatgacacagtagaggcagccataatcctcctaggaa

SEQ ID NO: 154603 - DNA, 445 bp, Homo sapiens
cctgtgagctcactgggtcccctagcaaaccatttctgcctggtctcacaggggtcctttgggagggcaccagaggccctgggaaaaggccacagggagaaggaaagctccagctgaactttgtaacaatttgagctgatcaagaagtcttcttgccagaactcagggtaggggagtgaatccagtgtgcagactccacaggcgggwgtagaaggaaagccatacttgctttcgcagctgggaggcgggtagcctggggcaagttctcagcactgctcacctaccccttgaaacagactcggtgctatacagggtggcacggtgggagtgagaccagcccttcggattgcacgggagctgggtgaggcctgtgactgctgggtttccctccacttccctgacaacctgcatgacacagtagaggcagccataatcctcctaggaa

SEQ ID NO: 154604 - DNA, 574 bp, Homo sapiens
aaattttattcttgaatttcttctgtggtcaagaagcctatgccattttaagtgctggaggttagaaagagagaagaaaattatcctaattaattttataaatcaatatgatcaatgacactaaaattggaaaaatctatatgattattgaaaaaggcatttagtggccagcatggtgactcacgcctgtaattccagcactttgggaggcccaggtgggaggttcacgaggtcaggggttcaagacaagcctggtcaacatagtgacaccctatctctattaaaaatacaaaaattagccgggggtggtggcaagtgcctgtagtcctagctactcgggaggctgaggcaggagaatcacttgaacctgggaggtggacagtgtagtgagccgagatggtgccactgcactctaggttgrcaacagagtgagaatccatctaaaaaaaaaaggcatttagttaactttaatgtctatttttaataaaaactttatttttattgaattattaggcaaacgaattagaaaataaaaagaattcagaggtataaaaattggaaataagaatacaat

SEQ ID NO: 154605 - DNA, 449 bp, Homo sapiens
gaattcttctttaaaaagcagcaataagattaagccacattatgcaacctctgggcaaatgctgatctcataataataaagtatttgcctattttttgtgtgagttaaataccattgaaaccgctgaacttgataacacctcaggctatcatcatgttaggtttctatatataataaagagtgggagacatataggggggaaaccgcagaaatgagaaaacaatwtagaatggttttttaaaaaattgtttttgtttttttcctgagaccattaacctgtcaatggcactatcatatgaattagtttattcctaactagatgatgttcttaggactaattgtcactcatttctaagcctgcccaattttacacccacattagatagtacagtcaaaggcgcttagatcatatgaaatacacttcccaaagaaatatatcctccagcttt

SEQ ID NO: 154606 - DNA, 633 bp, Homo sapiens
gaaatttgaacagatacatagatttatgacctactaataatctatagattattagtaggtcagagtagatcaccggtgatgaatgagattatctaggaacattgtatagaagaaaagagaggaaacttaaagtgaaacccatgggaacacctacatttaagaaataaaagaatagaaaactgaaaatatgcytgagaataattagtttgaggactgttaagaagaccagagagagagagagtggtgtttaacaggccaaatgagttgtttaagaagtgagtgattaaccagttagacaatgcagaggtataaagaaaaatgagagtaatttgtcaatttagaggtagtagaaggatttcagtagaatggaagggtcatagaagggtcagaaaccagactttagcagtttagaaattactgggaggtctggaagtggagacaatgagaacagatggatcatcattttaaaaatataaaggcagcacacataattgttggaaaaggtcatggaggaggtaagaggaaagggaatctaaaggacaggtagatgaaacagtttttggaactttcaaaatgttacgatggcctggttgatgtcttgctacactctttgcaataaagcagtcaataaaa

SEQ ID NO: 154607 - DNA, 422 bp, Homo sapiens
agtagagaatggaatctgattttgtgaaacagattccatttagaattatattattgaaatttgaattcgcatagagtgaaccagtaagagaaaaatggcattattaagaaaataaatcaaacacagatttattaggatatgaaaatttttaggaataatagaaaagaaagagctatgttttaaggaaaaggcctagattgtccatattacttttgtcttgtttgtattatttatgatatataaaatatttaaatatttgttrgaaattccaaggcttacacatgatatgcacataataatttccagaaacacagaaccatgtttactttaggggaacacttaaattgaaatatatacatcaattcagtacttgtgttgtgaaatatgtatgtatacacacacacacacacacacacacacat

SEQ ID NO: 154608 - DNA, 422 bp, Homo sapiens
agtagagaatggaatctgattttgtgaaacagattccatttagaattatattattgaaatttgaattcgcatagagtgaaccagtaagagaaaaatggcattattaagaaaataaatcaaacacagatttattaggatatgaaaatttttaggaataatagaaaagaaagagctatgttttaaggaaaaggcctagattgtccatattacttttgtcttgtttgtattatttatgatatataaaatatttaaatatttgttagaaattccaaggcttacacatgatatgcacataataatttccagaaacacagaaccatgtttactttaggkgaacacttaaattgaaatatatacatcaattcagtacttgtgttgtgaaatatgtatgtatacacacacacacacacacacacacacat

SEQ ID NO: 154609 - DNA, 454 bp, Homo sapiens
aatgtaagttgagaaacatactaaatggctacactctatgtactatgttctgtatatatagcatttattctcacttttaattctcgttgcctgttttgaacttgttcatgatagtaatgatgtaatatttgtgttacttgagtttatatggacaaagcaaggctatttattttttgtgttataggatttgtgtcaattatattaaaygaaacgtctctgtcttacagttaacaacacttgctataaaaatctaatattgatataatcgaatgtatttatttgaaactctttaatgatttataatttgcctttgtccatgcagctgctataacaaaatactatagcctgggtagattctaaacagtagaaatttatttctcatagttctggaggctgagaagtccaagatcaaagtaccagttgattcaattcctggtgagggcatgtttcctga

SEQ ID NO: 154610 - DNA, 572 bp, Homo sapiens
aattttcatctcatagacctaaagctgtaagatgataatatttaaatgcaagtcacaagcttcaattaggtacaatcagaaatcatgcggtgacttcattaagtatcattaagaatgatcaaaatattgctcttaggaaaaatacatcaaaagcattgcatttacacattgattaaacaggatctgcaatttctaaaatctggtatgagaaaaaagaatggagtaaattaagtgctcatatcccacttagcaacaagggagtgcttagcaactggcaaaggaagaaataaagggagatggtagaaaacaaaatatgatcagcctctgaaaagggtgagaaatcaagaaatgacaatgtaactaattggggatggaggagaggttgctgtcccagaagcagagggccacrgagtcaccctgctttttgaaagtttttaaaattatttctatttcctttttaaccataggaaattaggctcgtaattaggaatcaagggcacagggaggactctctcaaaaaccatgactgtgatcggagtcgtgtttgttgagatccatgcagccctttataa

SEQ ID NO: 154611 - DNA, 574 bp, Homo sapiens
ggctattatcctatgccccttaaaatgtagacacatcgttgcctctgcagtaaagttattccctatccccatgtgctgagttacttagaccttcccttgatattgcgcatgctgctattgaacaactatcacaccaaatttgaatttatattttaatatctgcctctctcataagaaatgtgaattgtgtttattcatattttgactgatatcgtttggttgtgaccccatccaaatctcaccttaaaaagtaataattcccacctgtcaagggcaggaccaggtggggataattgaatcatgggggtggtttcccccatactgttctcatagtagtgaataagtttcatgagagctgatgattttataaaggggagttcccctacacaagctctgtcttgtctgccaccatgtaagscatgattttgctcctcctttgccttctgcagtgattgtgaggcctcccaaccatgtggaactgtgagtccatcaaacctctttttctttatgaattacccagtcttgggtatgtctttattagtagcatgagaacagactaacacactgaccttct

SEQ ID NO: 154612 - DNA, 654 bp, Homo sapiens
agttctctgactgtgggacctaggagaatggatgcaggaggagaatacaagtaagggaataataaatacaaacagtgcttaaatatctacaattttatattattccttatcatcaagtgcacaattaaaccctatctcataagtccaggaactgcctaattttatttcttctgcattcttttaacagctaagcattgagctaaaaactcaatggattcacacatgtttttcaatagtttgaatgattagtgttgagaggtaggacatttaggtttgactcagagatatcactatggagtgtattttccccaattataaaataacaattgaatataacatgtgtatagatagctttaccttcatgcacctggtctcaaaataaaatttctaaaatctgctttatagaaaaatatgcgatcacaaagtgaaggtggatggggaaaaatcagttgtcagaagctgggagatgagggtatattcaaaatattcctktggaattgggggagatagaaaaacataacaaagctggccaagcttctttctgtagaaattcagtcaggcatcacagctcttttcccctgggtttgtgcttttcctctcttcatgactatctatcactgcttgtaaaactcctccactaaaagatcttaaagt

SEQ ID NO: 154613 - DNA, 606 bp, Homo sapiens
tgagggctcagtccccatgactgttctcccaccttcagacaacagttataagtttgggcctttggaacttctgtacaaccggcttcaggttggggttcatatgaccccttacttgggtttgattactttgctggagcaacttacaaaactcagggaaacacatttactagtttattataaaggatattacaaagcattcagataaagatatgtgtagggtgtggcatggggaaaagtgttaggagcttccaagcccatttatggaggcttcattacataagcataattaaaaactatatagaaatgtgactacacaaaaagtacatgatctaaacccagcaaggcctgtctgttcagacctttcttggtgtctcagggtagtattcctccctagagggcaagcttgtcaaacttatggcctgcagaccgcatgcagcacaggatggctttgaatatagcccaacacaaatttgtaggctttctgaaaacattatgaggttttgttttttcaygatttttttttttatagttcatcagctatcattagtgttagtgtattttacgtgtggcccaagacaatgcttcctccagtgtggcccggggaat

SEQ ID NO: 154614 - DNA, 614 bp, Homo sapiens
aacctaaaactgaaagctgacatctggaaaatggaagaggggatatgaaaccttggtaattggctctgaaaaatcaagcttccagaattcttagaatacaagatttaaaaacattcttatgtttctattccagtcctaatttgatttctgttactttagctgggaatagcctaattgacataaatatctaccatagaatatacatatatgtaatatatgtatatttattctatggtagtattttacacacacatgcgcacacatacattgttttcattgatgctttgagtaaacttaactggtagttagaaaaaaacatggagtcaaaggcagaatgaagataagatactcttgaactgaaatataaatgggaaagatttagggcaatgggagagaggcamatttttgattgagtaattccttagaggaaatctgtcataatgagactgagcacagagatagagcaattgatactgaagaaatggaataatattttatcttctgcaatgaaaagaaagaaggctaaacattaccaccgagctatattcacagttgggaggcaagaagttgatgcatttttttcaataattcaactgaatttttctgttaaaatg

SEQ ID NO: 154615 - DNA, 557 bp, Homo sapiens
gccatttacatttcttctctttccctctgtatcggccctcagccacttccattgtacactagtgctctaataatcacagttttaaatgaaactaagctaaagaataaacttaaatttagttattaggttaccagcacaatttaagataatttgtaataagatcagccttatcactagaattggtgattgcttatgtgttatcagtcaggaaccactatcatcactccacatgctattccatcattcaacgttatttctaacctaggaatggcagtccccatggatcttcactggttgctaaggtttagcagatgagacaatccgtatttcaatttgtctgaatattgtccagagtgamctcagtatgaacaatctatgtgcatcaccctagcttcatctgccgtcaatctcctaaggagcttgacctagacttcaaataaatacattgcatctatgtgcacctatagtattattctcatctggcatattctacatcagaaaatacacataccaatgcccccttctttaatctagtcttcaataaaagactgaaattc

SEQ ID NO: 154616 - DNA, 399 bp, Homo sapiens
attgttggcttctaacgccagatgtaagtggcatccccttccttccattatgacaatcaaaatttctccagatatttccaaatgtaccctgggaaacaacttcttccatttgagattagagaataccctactgggacagtaatatatatatatagacatacatacctttggtgcgttgmaatggttactgcaggtataaactagccagaattccaactttgttccacctttgttataatttatttctcaatttggtgttaagttgttaggaaatgacttaatgtgttatttcatggtgttgttctgatagaagttattgagataaggtattaagggcagacagcagtgttgctgactccattttcttctggtcatctaatactgaaaagggcctggcca

SEQ ID NO: 154617 - DNA, 442 bp, Homo sapiens
ctctgtgggtgaggggagcagaggcacatggcacagcgagaggctgcccagtgtagcagaagcttctccaacatccgcccaagtacccctcctgaccaaaggggctaatccatatctcagggacctgaggagatagtcctatgctgcaggaggaaaagcagaattgaagtctcatattttactataaaaaccaatatgagtgttgcattctgaggcactaatatatcactrtgcttaacataaaaatgatatttttacccaaatatctgaataaaataaattctgtagaaggatacaccacctttatgcagaacaccttatccattacccctgggcctaagagcctccattttgagaagcacagacctggttccaaacccaactctgtctgtggaatgctagcaaattaacttactgccctggaactcaattttcttatctg

SEQ ID NO: 154618 - DNA, 442 bp, Homo sapiens
ctctgtgggtgaggggagcagaggcacatggcacagcgagaggctgcccagtgtagcagaagcttctccaacatccgcccaagtacccctcctgaccaaaggggctaatccatatctcagggacctgaggagatagtcctatgctgcaggaggaaaagcagaattgaagtctcatattttactataaaaaccaatatgagtgttgcattctgaggcactaatatatcactatgcttaacataaaaatgatatttttacccaaatatctgaataaaataaattctgtagaaggatacaccacctttatgcagaacaccttatccattacccctgggcctaagagcctccattttgagaagcacagacctgrttccaaacccaactctgtctgtggaatgctagcaaattaacttactgccctggaactcaattttcttatctg

SEQ ID NO: 154619 - DNA, 589 bp, Homo sapiens
ttgtcttactgaagagtttggatttaatttaagaaacgcttcttcagacctttctgtacttaagtctggctccttaaatcattggtattaaaaaattaagtctgtaacaatgagaatacatatatttccaataaccaagatacatagcccatattgaggtcacagcatgtttcccaggagacaccagtatcctttacttgcctatcacaaacccagttcctctatggagcagatctgtatcattcctaacagtgccgctcctgatggcagggtgagtggttagattaattgtcttttttttttcagggatatcctatctgtagtgtctgttgctgcatgtggtgggttgacttcagagatagcaccagagaaaggcagacagggaggagtggaggcaaggtgggaggtagggtcagggcaccgacccaacttaaaaggtaaggccaagtgtgttcactctttgctacattctcagagtcttgcacagcccatggcactgggttggcayctcacgcctgtcagattgtgcttcccagggacttgccacacttttgactctactgagagccgttgagaactttccctcctg

SEQ ID NO: 154620 - DNA, 598 bp, Homo sapiens
tgctgggtgcaccttgtcctgggttagctggcaatgcccgagctgacctgaagagctccactgggatggggaggcacttcctcacacacacatgtcacaacacaattatgctgaggcccaacactagatacaatgtcacagcattrgattttttggggggacatcctggcaacttcctagtcaatatacaaaggcatattcctggtggaaaatggggctttataccttacctaattctctagaacacggttttgccatgttcctttagggaagcgaatcggggtaaaacattcctccatttgacaatgaacagaacaggaatccttaattttgtcagaattcttggaagtcctgattctattacataagcattattttgcagaacttctctgcttttttccccaaatgggaatgcaaagctccttcttgggtcaaaggtcatcctcacgttgaaaacggcaaattaaatcctctgtagctcaggtattgctgtcctttcccctactctgtttagacttcagcaataccacagcttgggcctgaaatcagttgtatcagctcaggcctcctgatgccatcgacctaaggattaaaccag

SEQ ID NO: 154621 - DNA, 598 bp, Homo sapiens
tgctgggtgcaccttgtcctgggttagctggcaatgcccgagctgacctgaagagctccactgggatggggaggcacttcctcacacacacatgtcacaacacaattatgctgaggcccaacactagatacaatgtcacagcattagattttttggggggacatcctggcaacttcctagtcaatatacaaaggcatattcctggtggaaaatggggctttataccttacctmattctctagaacacggttttgccatgttcctttagggaagcgaatcggggtaaaacattcctccatttgacaatgaacagaacaggaatccttaattttgtcagaattcttggaagtcctgattctattacataagcattattttgcagaacttctctgcttttttccccaaatgggaatgcaaagctccttcttgggtcaaaggtcatcctcacgttgaaaacggcaaattaaatcctctgtagctcaggtattgctgtcctttcccctactctgtttagacttcagcaataccacagcttgggcctgaaatcagttgtatcagctcaggcctcctgatgccatcgacctaaggattaaaccag

SEQ ID NO: 154622 - DNA, 561 bp, Homo sapiens
ctccaggaacaccatcacagacacactcaaaataatgctttgccggctatctgggtaccccttaacccagacaagttgacatctaaaattaaccatcacagttacaaaatatttatgtttgttctattttgttcactttatttacacaaatagtatcttccatactgtcgttctgtaccttctgcttttcctgaatcatatatcttagagataatttcatatccaatcataaggtggcttctcattctttcgtggtgccatttattctggtgcaggactgcatcaaagtctatttttccagttccctgtgacatacacttaagttatttccagtattttgctctcaaaaacagtgccgtcatcattaacttagcacaatttgcgccagggtgagtgtacctctaggacaacttcytaaaagaggaattgctagagtaaatgtaggtgcctttgtaatcatgagaaatttgccaaattatcttgagtaagggttcataccaatttacactccaatcagcagcacaggaaagggtttgttttcaacatgagtgtccatacaat

SEQ ID NO: 154623 - DNA, 561 bp, Homo sapiens
ctccaggaacaccatcacagacacactcaaaataatgctttgccggctatctgggtaccccttaacccagacaagttgacatctaaaattaaccatcacagttacaaaatatttatgtttgttctattttgttcactttatttacacaaatagtatcttccatactgtcgttctgtaccttctgcttttcctgaatcatatatcttagagataatttcatatccaatcataaggtggcttctcattctttcgtggtgccatttattctggtgcaggactgcatcaaagtctatttttccagttccctgtgacatacacttaagttatttccagtattttgctctcaaaaacagtgccgtcatcattaacttagcacaatttgcgccagggtgagtgtacctctaggacaacttcttaaaagaggaattgctagagtaaatgtaggtgcctttgtaatcatgagaaatttgccaaattatcytgagtaagggttcataccaatttacactccaatcagcagcacaggaaagggtttgttttcaacatgagtgtccatacaat

SEQ ID NO: 154624 - DNA, 591 bp, Homo sapiens
acacaaatgttctgtatttttttctaatactctcatagtttcattttatatgtttagttctgtaattcatatttatgtatgttattagtaaattatctttcactttttccaaaatagagagacagatatccaaggattatttattgaacactcttttctttcctcactgatttgtaataacagtttttaaatactaaatttccattgtatatggaattgtcccaatatgtatggaatatactgtctttgggcttgtttctgttccactgatctgcttgtgtattactgcagtgtgctttatgtgagcctgggattaaatagctcattctatgttaagaaagcatggttaacctttatttttatttgtattgtaaaataaaatttaaaggctgtcgatttggaccgaaytcctgcactaggtccaacagaccaaaccaaaatggagtcacatatgctgaagttccatgccaccaacactcagctggtttatctgaacttctgagaaaatgagatagtgcacgataatacccaaatccccaaacaagccagatttagctggcatgataaggaagtcccttctgctttaacctt

SEQ ID NO: 154625 - DNA, 532 bp, Homo sapiens
tactttaacattaaatagagccaagaaggaataaaaacaagcaagtaagcaagcaaacaaacaaacaagaaataaaaaaacctcattcttgtgaaatcgaaacaaaaaatcagccctcttatggacttatagttcaaattcacatcacaacacctgatggtactagcctggaaatgcctcttagatgccttacagaagaaaacacaaattcttcctagagaaaagatcttttatcctaaagaacaacacaaataatatttcaaggatggtgatcagcctacataacttttactaagtacacaaggaagcaaagcactttaattgggaatcagccaaacaaagcaacaacagcaacaacaaaaacaacaacaacaaacattggcagacagagagccaygaggacttcggatattagaattgtcagctgtgtatttttttaaaggcttattttgtttacataaatgaatacaaatttgaaagtaactgcagggaaggaggaaataattgaacatgatctgggagattacacaaa

SEQ ID NO: 154626 - DNA, 570 bp, Homo sapiens
aaaatgttgaacaagcactttgcaagaggatatccaaatgcacaaaamgcataagaaaaaaaaagtgttcaacattattaagcacaaggaaaatgaaaattaaggaggtaacattaaatatcctcctgactggtgaaactgaaacatcttacactaccatatggtggccaagatagggattgtaagttggtaccaccactttgaaaaacaactgggcattattcagcaaatttgaaaatacatatatcctaagactcaatgttccattcctaggaatattctgtagcaaaacaggtgcacatgtataccaggatatatgcatgtgcagagtatacaagaatacacactgtgtgatttctttatatcaaattgaaaaccaggcaaaacaaaatgatatgatttaggttgtatacagtggtcagaaatagaaatgaaaagcaagaaaatgatgatcacaaaattcaggatagcggttaactatttggggtaaagaggtttgtgatggggaaggggcacaagggggcttctgaggtgctggcaatattctttcttgactagagtaggagttac

SEQ ID NO: 154627 - DNA, 570 bp, Homo sapiens
aaaatgttgaacaagcactttgcaagaggatatccaaatgcacaaaacgcataagaaaaaaaaagtgttcaacattattaagcacaaggaaaatgaaaattaaggaggtaacattaaatatcctcctgactggtgaaactgaaacatcttacactaccatatggtggccaagatagggattgtaagttggtaccaccactttgaaaaacaactgggcattattcagcaaatttgaaaatacatatatcctaagactcaatgttccattcctaggaatattctgtagcaaaacaggtgcacatgtataccaggatatatgcatgtgcagagtatacaagaatacacactgtgtgatttctttatatcaaattgaaaaccaggcaaaacaaaatgatatgatttaggttgtatacagtggtcagaaatagaaatgaaaagcaagaaaatgatgatcacaaaattcaggatagcggttaactatttggggtaaagaggtttgtgatggggaaggggcacaaggrggcttctgaggtgctggcaatattctttcttgactagagtaggagttac

SEQ ID NO: 154628 - DNA, 346 bp, Homo sapiens
gttctgtcttccttttgactgtgattagaaagggaaaacattaatgttaataataaattataatcacaaccatcttctatgtaaagaagagaatctactctgaaggataaataacattcattgaggatgggctcctgcagtccagtttttccctggatacgttggcctctgttgaagtttctttgagcagggctggagaagctgccagtgttgatcttatttcccgctgtcccattagaataaatgtgaattctgtttacaaattacacagcccatttaattcagcctttargataagtcagaactgtatgaattgccaaagagggttttatatgaatgcaaacta

SEQ ID NO: 154629 - DNA, 573 bp, Homo sapiens
tgggaggctgggacaggaggattggttgagcccagggacttggaaccaggctggtcaacatagtgagacccctgtctctacaaaagtaaaataaaatcattatctgggtgtggtggcatgtacctgttgtcccagccactccagrggctgaggtcgaaagatcacttgagcccaggagcctgagatcatagtgagtcagccatgatggctcccagcctggaaaacagagtaagaccctgtctcaaataaaataatatttaaaaaaatagaatgatgataacaatatgccaatttcattactcttgggcaattgttaagtcaaataagggttccttgaacacaaacactgtggttccttgacagttgacctgataatcaagaaggacaattccttcctgatagaaatggcaaaggaagtaagatcattgtgtaatcacagaaacacacatttttttctttatttgaatgaataagaaagattttgtgttcaaattgtgatactagggttacatttttgaagtcatattgttttactaagtgtaattacaaaaactacaagaataatagccaagt

SEQ ID NO: 154630 - DNA, 388 bp, Homo sapiens
atagttggattcttttttctatgtgtwtttgttttgttttgttttgtcccacaggcctctgaagctttattcgtttttccttttaattttttatttttgagacagagtctttctccattgctccagggggctggagtgcagtggcacgatctgtgctcaatgcatcctccgcctcctgggttcaagcaattcttctgcctcaacctcctgagtagtagggactacaggtgtgtgccaccacacccagctaatttttttttgtattttaataaagatggggtttcaccgtgttgcccaggctggtcttgaactcctgagctcaggcaatccatccacctaggcctcccaaagtgctgagattacagatgtgagtcaccactcccggccc

SEQ ID NO: 154631 - DNA, 404 bp, Homo sapiens
ttttttctatgtgtatttgttttgttttgttttgtcccacaggcctctgaagctttattcgtttttccttttaattttttatttttgagacagagtctttctccattgctccagggggctggagtgcagtggcacgatctstgctcaatgcatcctccgcctcctgggttcaagcaattcttctgcctcaacctcctgagtagtagggactacaggtgtgtgccaccacacccagctaatttttttttgtattttaataaagatggggtttcaccgtgttgcccaggctggtcttgaactcctgagctcaggcaatccatccacctaggcctcccaaagtgctgagattacagatgtgagtcaccactcccggccccttttccatttgtagtctgttttgtctc

SEQ ID NO: 154632 - DNA, 404 bp, Homo sapiens
ttttttctatgtgtatttgttttgttttgttttgtcccacaggcctctgaagctttattcgtttttccttttaattttttatttttgagacagagtctttctccattgctccagggggctggagtgcagtggcacgatctgtgctcartgcatcctccgcctcctgggttcaagcaattcttctgcctcaacctcctgagtagtagggactacaggtgtgtgccaccacacccagctaatttttttttgtattttaataaagatggggtttcaccgtgttgcccaggctggtcttgaactcctgagctcaggcaatccatccacctaggcctcccaaagtgctgagattacagatgtgagtcaccactcccggccccttttccatttgtagtctgttttgtctc

SEQ ID NO: 154633 - DNA, 550 bp, Homo sapiens
agttattcaagagactatcatatcataacacccccatcaaattaatggcagggatagacaatctgaagatgaatcatttaatttgtccttagcaaaacggcaacgaagtctatttttactttatctattcaatttcccccaacaatgttaaactcttgtatgagcacaaaaccatctgcacttaattaatcacacaatccacccaaacattatcagatcccaagagaatgaaaaagtgtatatatagttaaatagagccttcatgtaacatatttaaatcagagtctatctaaatgatctagaaaaagcagcaccgctctacccaaccagtgaaatctctaatttcaatgcagcaacacagagagccaggcctaggttccccaccacaactttttatcctcatgacacttatttttcttccctaaaagacactgtttacactgaaggtcttcatacatatgatgggaaatttctagaagactttatccactatgagtygtggctcctgtaccctcacagaaaacaagaagcacatcaccttaaaaaagca

SEQ ID NO: 154634 - DNA, 446 bp, Homo sapiens
agccaatggtaaaaaattatgtggagctgtcaaaaccagaactcaaaatcaggtttatccagcccagggaaaaaaaaaaaaaaaaaaaaaaagaaggctctgtttgagaatttgattcggcttcactgaacagcagagaattccttgtctgtgctcccagtgtttatcggagatggcaaatgggtttcattctacctgctgcttcataaagattgattggtaatggctttctggagtgctaccttgagaagggctttacggtagatccatgttattgagaaagtgacatgattgattagagacacctgctttggwatgtgagggggatgggtgcttgccagtatttgccatttctggcttagaaagtgagaaatggggaagaatttctaaaagaaaaaactaggcctttggagtcagagagacataaatttgaatcctgatccatc

SEQ ID NO: 154635 - DNA, 495 bp, Homo sapiens
tctgtttcttttaaaatatatatatttccctgtctgtggttttgaagtttttcagggtcacagataaaggacaggtttattcctatgtgtgggtgtgcagtgtgttcttgtactgaggtctgagttcttttccaattctctgcataattcagttttcttctcctagcactagttacctattgttggccaagaaggtctagagaaggtaaacaatatagcttttatataagtgaacattttactgatttttttaagtaaagttctcarcttaatttagcctctggggtatgaaatggaagctgagtgagacacagagataacctggtagaagctgctcaaggaatgatgtggcttcatctgcatttgtttgtgtatgtgtgtgtgtgtgtgtatgtgtgagagacttgttgcctgagtgatagaacaaatccaggagaaaggttgaaaggcaaagacaaaggccatgtctatacaacttcagctgaattggacttg

SEQ ID NO: 154636 - DNA, 620 bp, Homo sapiens
ctgacaacaaagttaccatttcattcttatttgtatttgtaatataaagaaagcaaacaacactcccccagccctcttttgacatttcatagccttgaaaagcttaaactctgaaacacactaaatgcagtgtttcttataccatgcaaacatctcttgtcagagatagcatccctgagattagccagctgtattgatttagatgcctcagggttgttaattgtagtgaggactgttatgtctctatggcttctgaaagaggttatggctactgcaaatacatcttaaagaaggaaagaatactatcagccaagatgtgcagtccaagctttggaactaggctggcaaaaccctactcacatccctgtaaagcagacatatatttttgtattttttataggtggatacagtgcagaccatgaacccctctgrccacattgaggaatcgtgtaaaatgaatgtatgtgctcgtaagtgaaatatatgcagtgttccaactcaatatgttggatcctaatagacctggatttgtcttgtgtaaaaagaaatcgattcccaaggggcaggatcactaactgattaaaatgaagctttgagtttgaagaaaacaaaaaaggctt

SEQ ID NO: 154637 - DNA, 667 bp, Homo sapiens
tttgtatgggtgtgaaggtatgtgtatgcacttatgtgtgcgtgtacaagtggaaggaggtaaaatttaatgattagcatttgcactttggtttgttacctagaatgtaaagaggtagagtaaactgtcttaagccattctgttatcattattaaagattattattcacaaaggaagcaattttaaaatagaatgactacttcaacaatttgccaattaaatataatatttaatgcaattgagccrtttaaattaagatgataccaacgcctgaaaataatgagagtaggctcatgtgaaattagtctgcagacacttggaaactcatagtgtcctccttcaggctgtctcacatagcggcaggatgtgaatcatgggtgctattatagaaaaaaatagggaaatatctgtgttctaactataactttttaattctaccaataagttacatgtgctttcccccacttttcttcaacctaaattatataaccagtaatgatatatcaacatgaacaagatagtgaatatttaaagcagactgacatgtttttgtgtagtcaccatgtgccataataattttgaaactgttcttctccgctatttgtactcgtttctttttatcttgccgattgactttatagttaaaatttttacctcttctttctat

SEQ ID NO: 154638 - DNA, 608 bp, Homo sapiens
aacaacaaatattctatttttgagttctggttgcgtttttaaagatgtgatggagcaaagggctaacccagcacatactatcatagtcaaatctatttgtgraaaaaaaaaaggaaatttggtgatataggcacactttcaaaattctcattgatagagagggcccagagagaggctctgatcttaattatttcataaattctaaactgagatgcttaattagagcttaaatttatggagactctgatacatgagaggtgtccacccaggtttcgtttttcatgaaggagcaaaaagtatatgcagtcacagcgggctctctggagagtctacagtgacatgggcatcaccttttcttagctggtgtaggaggcaggggagggcttgtaggcacatctctgtgttggtgtgcagaagctgactgagatccaaacatgtactaaggttgtcagatggatagaagagatgaagagatgctagtattgactaaatgaacaaacagactgaaaacaggttaaattcaaagattaataattgattttggagagcacagtcgataaatttcaagtatgaccaaagagctgctataaattgactttcctagccta

SEQ ID NO: 154639 - DNA, 612 bp, Homo sapiens
ggtgtgaagcacaaagggaggcctgcaacacaactagtttgaatcagccctctaatgcagaaagctaacactactcatagtggattctcactcacacattccttgagctacagggtgtaaatctgcatctgtcttctgtcaatccaccacataaaaaagaggtaaaagcacaaaatctgatagtagcattataaattatgaataaagttaaaaccttttttaaaaaaatgcattcttttttttttacttatttatttatttattgacaagatctcactctgttgcctaggctggagtacagtggtatgatcatagctcactgcatccttgacctcctgggctcaagtgctcctcccacctcagcctcccaggtagctggaactycttgaacatgccaccatgcccagctaatttttaatttcttgtagaaatgaggtcttgtcatgttgcccaggctggtctccaacttctggcctcaagcaatccttctgtctcggccttccaaaatgctgagattatagtcatgagccactgcccctggctgcatcctgtctgttaaaagcctgatttctacacatagaactggaggctaaacatacctggacatatgca

SEQ ID NO: 154640 - DNA, 439 bp, Homo sapiens
  misc_feature (1)...(439): n = A,T,C or G
cacttgccaatggaaaataggccatatggagcacccaggcattctgtacacaactgaagtcgattatctctcctagcccccagccccagcatgatgaagaagatatttcgctacaatattttggaacttaacatgctcttgtggattgctaaggccaaattggaacagaattggtctcatataagacattaatggattcaaacacaataatgttatatatatatatataaaatatacataataaatatatatttttaaaataattgattatatatataaaatcaattatttttataaatgtactctgtttagtgtcttatattaragtttcatttataaaaacattaataatagaaagaaagttaatttgtaaaataaangtttccatctggcaaaactgttgccttcaacttacaaaacattgacttttcagagaatt

SEQ ID NO: 154641 - DNA, 575 bp, Homo sapiens
tggtgaaatatacataatggctgtgagcggcccaaagttacatgttttcaactgatagaatcatcattaaaatgtccaagccctgggcttgtgctcctactatgccctctcttccagtctttgccatacagtctctctgatgagacctccatatrattggatctctcagctcagcagtccccagcctttttggcatcagggacccagtttcctggaagacaatttttcctcgaacgaaggctggtgggtgggagatggcttttggatgaagctcttttacctcagatcatcaggcattagttagattctcagaaagaccatgccacctagatccttcacatgagcagttcacaataggtttcacactcctgtgaaaatctaatgccaccgctcgtctggcaggagacagagctcaggcagtaatgctcgcttgcctgtgctcacctcctgctgtgtggcccggttactaacaggccatgaacctggaccggttcgtggcccgggggttgggatccctgtctcaatctgctgactctgcgctcccgggaatgactttattattcttactaatacaa

SEQ ID NO: 154642 - DNA, 575 bp, Homo sapiens
tggtgaaatatacataatggctgtgagcggcccaaagttacatgttttcaactgatagaatcatcattaaaatgtccaagccctgggcttgtgctcctactatgccctctcttccagtctttgccatacagtctctctgatgagacctccatataattggatctctcagctcagcagtccccagcctttttggcatcagggacccrgtttcctggaagacaatttttcctcgaacgaaggctggtgggtgggagatggcttttggatgaagctcttttacctcagatcatcaggcattagttagattctcagaaagaccatgccacctagatccttcacatgagcagttcacaataggtttcacactcctgtgaaaatctaatgccaccgctcgtctggcaggagacagagctcaggcagtaatgctcgcttgcctgtgctcacctcctgctgtgtggcccggttactaacaggccatgaacctggaccggttcgtggcccgggggttgggatccctgtctcaatctgctgactctgcgctcccgggaatgactttattattcttactaatacaa

SEQ ID NO: 154643 - DNA, 575 bp, Homo sapiens
tggtgaaatatacataatggctgtgagcggcccaaagttacatgttttcaactgatagaatcatcattaaaatgtccaagccctgggcttgtgctcctactatgccctctcttccagtctttgccatacagtctctctgatgagacctccatataattggatctctcagctcagcagtccccagcctttttggcatcagggacccagtttcctggaagacaatttttcctcgaacgaaggctggtgggtgggagatggcttttggatgaagctcttttacctcagatcatcaggcattagttagattctcagaaagaccatgccacctagatccttcacatgagcagttcacaataggtttcacactcctgtgaaaatctaatgccaccgctcgtctggcaggagacagagctcaggcagtaatgctcgcttgcctgtgctcacctcctgctgtgtrgcccggttactaacaggccatgaacctggaccggttcgtggcccgggggttgggatccctgtctcaatctgctgactctgcgctcccgggaatgactttattattcttactaatacaa

SEQ ID NO: 154644 - DNA, 476 bp, Homo sapiens
tatggaaatacaaaagacaaagcataayaattacacaaggataaaatctgcaaaatccagatgggaaatcgtatgcactaagcaagccacggaacgagcagtttctgcaacaaataaaaagaaagaggggaacctagaaattacaacagacttaggaaaaaaattagctatgccgattcagaggtaactcctaggaagtgaggtttgaaaataaagagagaaaagaattatgtattgaaacagtaacaataaccaacagagatatcaatggctacaaactacagggcagccagaattcacagaattagtccacacaggtagccaacaaacaaaacacaaagagcaaaacaaaataataactttactcacactagaaacaaaccaaatttccattagagtggattgagtttaaaaataaaaaaaataaaataaataaaaaggatgcgctttgggaagaaaaggagggaggattgctt

SEQ ID NO: 154645 - DNA, 405 bp, Homo sapiens
agaactactaagctgagaagcaaattcaccaagttgcaaggaacaagatcaaaatgcaaaaatcagctatatttctatacactagaaatgaacaatccgaaaagaaaattaagaaagtaacacaattttcmaaagcatgtaaaagaatactcaggaacaaatctaaccaaagagggtaaagttttgtattctgaaaactacaaaacattgctaaaataaattaaaaacctaaataaagacaaagacattcatgttaacggataggaagacttattttgttaagatattaatactgcctccaaagtgatccacagagtcaatgcaatatctattcttttttacaaaactggaaaagctgatcttcaaattcatacagaattgcaagggactgtaaatagccagaac

SEQ ID NO: 154646 - DNA, 405 bp, Homo sapiens
agaactactaagctgagaagcaaattcaccaagttgcaaggaacaagatcaaaatgcaaaaatcagctatatttctatacactagaaatgaacaatccgaaaagaaaattaagaaagtaacacaattttcaaaagcatgtaaaagaatactcaggaacaaatctaaccaaagagggtaaagttttgtattctgaaaactacaaaacattgctaaaataaattaaaaacctaaataaagacaaagacattcatgttaacggayaggaagacttattttgttaagatattaatactgcctccaaagtgatccacagagtcaatgcaatatctattcttttttacaaaactggaaaagctgatcttcaaattcatacagaattgcaagggactgtaaatagccagaac

SEQ ID NO: 154647 - DNA, 590 bp, Homo sapiens
tcaggtggccatataggttttcacttcagaaaaaagcaggagtcaaatgtgaaacattgtctcacttccttacacttccgtttattaactagaccaaatggttcttttactgaactggactggtatttattcattaaaggaatatcaccacttggaagaaaccaatctgaaaattttcatgtatatccttccagaattttcaagacatatattaaaatatttataatcttttttacagtaatagaataatattatccctagccatttgtagattacrtctcccatttaacaatatattgggaaattagttaattgtgaataagtagagatatataacaattattagtggttttatggtgttgcattatatagacttatcctgattaactaatttctaccaatagtcatctaggtttttctgatttttttatactcaaaaattatgccataatacaaacacacacattgcacttatctgactattttttaataaatttctacaggtacaatggctggcttaaaaggtatgcatatgtaattgtttgatacaaaatgtcaaattctagaaatagtgtacaaatcacatagca

SEQ ID NO: 154648 - DNA, 647 bp, Homo sapiens
tgtggcagaagttccagctttagcacatagcttccaaagttgatctgggtatcaacatctccatcttctggtagtaggaaagagcatgaagctgtgagtgcagtgctttttatgagttatgcatgggagtggctaatgctactttcactcacattccattggctaatactcattcttaaggmcccaactcacattatgggagacaaagaaatgtggaataagtatattcccagcagaaaagttaacaattaatttggtggtccattggtagtatctgtcacacagagcttgaactgtgaaggggtaatatgatttgggggaaaagtagctatgaggaagctggagatacagagagcaaggaagacatcaagagttatgtcaaatagctgtgaaaaaatatgttgtcttaaagggctggtgatgtgagtcaatagattgttccttgattcatatggctttataagtattattattattatttacaaattagtttctccaactagactataaccttctagcacaatatctgacatatagtggatcttcaattaatgtttataaaattagaatgctaatctggattacttaaacacttagtttgaattagaataatgttcctattgagatataatttatctgtcgttttc

SEQ ID NO: 154649 - DNA, 644 bp, Homo sapiens
taggaaagagcatgaagctgtgagtgcagtgctttttatgagttatgcatgggagtggctaatgctactttcactcacattccattggctaatactcattcttaaggacccaactcacattatgggagacaaagaaatgtggaataagtatattcccagcagaaaagttaacaattaatttggtggtccattggtagtatctgtcacacagagcttgaactgtgaaggggtaatatgatttgggggaaaagtagctatgaggaagctggagatacagagagcaaggaagacatcaagagttatgtcaaatagctgtgaaaaaatatgttgtcttaaaggrctggtgatgtgagtcaatagattgttccttgattcatatggctttataagtattattattattatttacaaattagtttctccaactagactataaccttctagcacaatatctgacatatagtggatcttcaattaatgtttataaaattagaatgctaatctggattacttaaacacttagtttgaattagaataatgttcctattgagatataatttatctgtcgttttcaggacacacaatttataaaagagatctaattaaccactctaatgcatgcattcatttttttaagcagaggc

SEQ ID NO: 154650 - DNA, 599 bp, Homo sapiens
aaggaagattaggttagttcatacttaaagggttaaggcaatatttggagaatattcttacaatgggctgtaagagaaacagaaatatttttacttattttgggaaatgttattttctagtatgttcctgtgcaaatcaggattttagaaacatagacctgaaatttctaggtttcttgaggaagcaactgattgatggctattttctccattcttggcagcccaaatgaatgactccaatttatggaagatagraaagggcataaggagaaacataggagacatattcaaatattcatgtccatactctcacacatgtttaggaatacttcaggtttgtttttgatgatggcagaatctaggtaactttcaagatttgagaaagtagctaaataattgcttattttgtttctattcaaatattgaatgtacatcttcaaggtactcaaggtctttgctagagatgctggaagaactttgcgtctaatccagagaattgtagagtaacaacttgattctctctttgatgccatctcatcgaaagacttgtgaaatgtacaatcctagacacaagctatatgctcagtaactattttttt

SEQ ID NO: 154651 - DNA, 555 bp, Homo sapiens
aagatgagtaagaaggaaattctcttcaacctatcatgactgaagtatttaatgatgcctttaactatttaaatgctgcaatgtctaaattttcgaaggacaaaaataaattggagcatgcagtaaggttaacagcataatttaaaatatttctgcttgctacaaagaagctgaacaaacacaaatcatcagtaaaacttccctggacagtttttaagctgtctggctcattcctatcagtccccaaagcttgtctaaattattgtaggtagcatcttgatttttagccatgtctaacgtatgccattttcactacagtttttaagttctttccatttctgaatgacagaaaacatgcctttgcattatattgcctatagttcaaaaaatataacagctattggataaatgtttgaataaatacatggaaattagaaaacactaggctctcaacaaatacagagaaaacatttttctaattctatagcactaataaaataattttattrttaagtttatactgaagatttataattttatctttgtttttgtaat

SEQ ID NO: 154652 - DNA, 551 bp, Homo sapiens
gcttgcaaatgatgcccatgctgcaggatcccagcccatactttggtgacaaggagctggagcacttgtgctttgtcattctctcttcgagtacttccatagagaagatagcgggcctatcacctctaagcctgaaagtaacaatagcaatagcaataaaagtaatgatattactattaaaataataaaatcatatcaataacagcaagactttgatgtgtgtttcttcctgccaaacactgtgctcaagttacactttttaaaaatattcaacaagaagatgtaaaataattgctyattcttaccttgagttctttactactcaaagtgtcttacttatattagctttttagacttcacaacaacccttattgtcctgggtgctgctgttatcattccattttggggaagaaggagctgaaatacatagagatgaagttgcttgccaaggccaccaagtttacaagcacagagctgggtttagacacaggatgtatgctagtaatgaccctgctactctgtctctccaggcacttgggccttggagttgt

SEQ ID NO: 154653 - DNA, 551 bp, Homo sapiens
tctcaggtgggaaaaacttattgagtagacacttgatattcacaaggaatggatcctgagatctttgcaaattcctaatcctagcacttttctaaatattatccttatctggagccagggttttycagtgcatagccttaatcctccaaatctattgcctgtttgactctcatacctgatctcccacctagtagctgtttttccaggaaattcctacgcaggctctgatttgagattgctcataagcagctgaaatgactgttgttaacttagtgaatgccagggatctgctgtgactgctagagtccaatccaattagacagtagtatgaagtgcctggtaggagtcagatacatgtcatgttagctgacacagcagggaaccaaaaagtataattccttctctcataagatttgcatctggtaggaaagagagccattcacagggttggttgtgaattatgagtgctttcaagggctctgtggtccccaagttcctccaccccctgcttacctgaaacatcaaccactccaactgctcaggggtttctg

SEQ ID NO: 154654 - DNA, 551 bp, Homo sapiens
tctcaggtgggaaaaacttattgagtagacacttgatattcacaaggaatggatcctgagatctttgcaaattcctaatcctagcacttttctaaatattatccttatctggagccagggttttccagtgcatagccttaatmctccaaatctattgcctgtttgactctcatacctgatctcccacctagtagctgtttttccaggaaattcctacgcaggctctgatttgagattgctcataagcagctgaaatgactgttgttaacttagtgaatgccagggatctgctgtgactgctagagtccaatccaattagacagtagtatgaagtgcctggtaggagtcagatacatgtcatgttagctgacacagcagggaaccaaaaagtataattccttctctcataagatttgcatctggtaggaaagagagccattcacagggttggttgtgaattatgagtgctttcaagggctctgtggtccccaagttcctccaccccctgcttacctgaaacatcaaccactccaactgctcaggggtttctg

SEQ ID NO: 154655 - DNA, 551 bp, Homo sapiens
tctcaggtgggaaaaacttattgagtagacacttgatattcacaaggaatggatcctgagatctttgcaaattcctaatcctagcacttttctaaatattatccttatctggagccagggttttccagtgcatagccttaatcctccaaatctattgcctgtttgactctcatacctgatctcccacctagtagctgtttttccaggaaattcctacgcaggctctgatttgagattgctcataagcagctgaaatgactgttgttaacttagtgaatgccagggatctgctgtgactgctagagtccaatccaattagacagtagtatgaagtgcctggtaggagtcagatacatgtcatgttagctgacacagcagggaaccaaaaagtataattccttctctcataagatttgcatctggtaggaaagagagccattcacagggttggttgtgaattatgagygctttcaagggctctgtggtccccaagttcctccaccccctgcttacctgaaacatcaaccactccaactgctcaggggtttctg

SEQ ID NO: 154656 - DNA, 542 bp, Homo sapiens
ataaacctcacctcccttcgccacctgctggacgcgaggggctactacgatgccatgggtgtcctgattttttatttctcagacaggactgctcygtgtgtgtctttggattctacgtagatttatatttgtaaaatattacatttgtcatgaccagaagaaatgtcattatcgtaaaatttagattctggagtctatatatgaaagcaatactaactactaactgttataacaacaaaatgtgggatgtatatctacagaccacagccagcttgccagttcattcaagaatcgaaccctggatttagcagtttctgcacaaagggaatgaaatatttttaattgataattcagtcaaaaatattaatgaagatccatatgattgaaagaataaatttattcaattggctccaatgtaatcctattttcaccagatcattgacaccaaattgttatttttccctttgctagtaaaggtataagcagaaacaattgcaaaagaacacataacatctagtagggataatgatgaaagccaaaaa

SEQ ID NO: 154657 - DNA, 542 bp, Homo sapiens
ataaacctcacctcccttcgccacctgctggacgcgaggggctactacgatgccatgggtgtcctgattttttatttctcagacaggactgctccgtgtgtgtctttggattctacgtagatttatatttgtaaaatattacatttgtcatgaccagaagaaatgtcattatcgtaaaatttagattctggagtctatatatgaaagcaatactaactactaactgttataacaacaaaatgtgggatgtatatctacagaccacagccascttgccagttcattcaagaatcgaaccctggatttagcagtttctgcacaaagggaatgaaatatttttaattgataattcagtcaaaaatattaatgaagatccatatgattgaaagaataaatttattcaattggctccaatgtaatcctattttcaccagatcattgacaccaaattgttatttttccctttgctagtaaaggtataagcagaaacaattgcaaaagaacacataacatctagtagggataatgatgaaagccaaaaa

SEQ ID NO: 154658 - DNA, 542 bp, Homo sapiens
ataaacctcacctcccttcgccacctgctggacgcgaggggctactacgatgccatgggtgtcctgattttttatttctcagacaggactgctccgtgtgtgtctttggattctacgtagatttatatttgtaaaatattacatttgtcatgaccagaagaaatgtcattatcgtaaaatttagattctggagtctatatatgaaagcaatactaactactaactgttataacaacaaaatgtgggatgtatatctacagaccacagccagcttgccagttcattcaagaatcgaaccctggatttagcagtttctgcacaaagggaatgaaatatttttaattgataattcagtcaaaaatattaatgaagatccatatgattgaaagaataaatttattcaattggctccaatgtaatcctattktcaccagatcattgacaccaaattgttatttttccctttgctagtaaaggtataagcagaaacaattgcaaaagaacacataacatctagtagggataatgatgaaagccaaaaa

SEQ ID NO: 154659 - DNA, 538 bp, Homo sapiens
gtataagcagaaacaattgcaaaagaacacataacatctagtagggataatgatgaaagccaaaaatggattatttgaaaataattttggaagtaaaaaaaccataggtgtgaggaaaaaagagagaaactacaaataaactgcattgtgataaaacaataaagcacatagctaaaagcctattaaggattttttaaaaattatattttgagaaacacttggtgctaataattttctcaaaagtacaaatatycaaaagtcatacagaaaataaaacaacctactttccatcaaaagtttctaattttattctgagaaaagataacaccaagaaaacaattttaactacagaaacaatggttagcgtaaaaaattaataatcaaaaagataaaccatgttataagtacttaacaaacttataaactatttcttccataacattctccatattttaagttcatacatgttgatatgatcagatttacaatttttcagaaaagacgggggaaaaggtgtgattatcgtcagctagatgtg

SEQ ID NO: 154660 - DNA, 451 bp, Homo sapiens
  misc_feature (1)...(451): n = A,T,C or G
caatgaattaccagtgtgaaatatgcacacagcttggagcctgggagagaagagagtcagatgatgacacttttatcctagggctgctcatctttctcagcaacttgggtcctgctatttggctgagtgcaggctggtcctaccaagctatcctcaaagcataactgcaacccagtgctcccacacaaccagacagccagaacctcataaccatacgctgagctcactcaccaccacaaaatgtacccagcccataaaatattcataagtgttgcctganatgttctcacataactgtgaagaaaaatgcatggagaataacctcttcctgcaatgtttttgaaattacaatattaraaagaaagtcagattttacatgttggtgacctttaatatatttgtgaacaaatactggcgatatcacattgtaaatatctcaatgacttagaaa

SEQ ID NO: 154661 - DNA, 238 bp, Homo sapiens
catctatttttttctgagcttacagaggagggcactgaggcttagagaggttaactaccttgtccagagtcacacagccagtaactggacttgggtcttgacataccaragtcctgctccagaacccacagcaataaccaaatgagccttctcctacaagggaatgactctcagctcagtattttaataaatgacttaggtgctttttgcaggtattctcaatctcaaagcaggcaaa

SEQ ID NO: 154662 - DNA, 591 bp, Homo sapiens
attttccatggctacaaatgctttgggctctttctgtatattacttgcccaggtctagaaagtgttctttatcaatacttccacttatgtattttttctttaaaaaactatcagattttagttttattaatcaccttttagtatacattttcccttttatctttctatcattacttctatctttcattttcttctgcagaattttgttccattttgtttttactcactgcttgagttcaaagtgaagatcaataggattttagaaatgtgcatattaattttcaaataaatatggattcaaataaatttggattcaggttttgtattgttgactttcaatttcatttcattttggccagtatattcatttaatataatttttatttgatatttactttgtagtcctatattggtaaatttatctattataaacgttacctatgtaccgaaaagcatttcacatttgctttttaattgttacaatctctatcctcaaagttcttaagcttgtacatattactaaacattaattttytgctctaccttattggtttctgaaaggataatgttaaacacacacacacacacaca

SEQ ID NO: 154663 - DNA, 506 bp, Homo sapiens
caccagggagaggccattccctggtggtccacacctgttaacatcaaaatgttaactgaatgcaggctccagggagaagcaacttcctgagcatgcatattaagagacaaaaagggtgaactatgatcttggggcaggcgagggctctcccccaacactcatgcctaactaactacctgtaacaatataaagaccaacttttttttgtaagacacattcctgagaagtaatttatagaatataaaatmagcaatttaaagtgcaattcaaaaatgtttagtatattcgtggacttatgcaaacatccatagaatataaatatacaaaattttactcaactcataaaaacaccccaaatagggctgggcgcggtggctcataactgtaatcccaggactttgggaggctgaggcaggcagatcacctgaggtcgggagttcgagaccagtctgaccaacacggagaaaccctgtctctactaaaaatacaaaattagccgggtgcat

SEQ ID NO: 154664 - DNA, 334 bp, Homo sapiens
atcccagtacttctctgggagttggtttacattctacattttaagacgaggagccaggaatgtaagtacaactgtaaaaaggaaaagaaggcacgatggaaacagaggctgtgcaggagcgtccgtctgcctcgccgttatctctggggcaaggtgcattggctccctggggttctatgaccacaataactgactttcataaaacccgtggcaaagtgaatgatagaatctcaaagctgtaaatggcctaataaatcatcacattcaaacgtccacgcgctgcagatatytctaccgtaatgttcctgataaacacgcatccggtttctgttgg

SEQ ID NO: 154665 - DNA, 461 bp, Homo sapiens
aatggtttgtaattccattttttgttttctacataatttaagaaaataatacacttaaaggagtttattagtttatatttaggggtacatggtatataaatatataatattgtgacagcaacaacagaaaggggtagagacagaactgttaaaggatcagtgtttttttatgttcttgaagttaagctggtatgaattcaaattagagtcttataactttagggtgttaaatgtaattctcatgacaactacaargaaaatagttatagaattatacaaaagggaatgagggggtaatttaaatgtttcactacaaaaaaatcaactaacacaaaagaagacacaaatgcaagaagagcgacaaaatagctatatggcatatagggggaatatagcaaaatgacagaaataaatccctccttatcagtaattaccttaaatgtaaatggattaaactgtaa

SEQ ID NO: 154666 - DNA, 540 bp, Homo sapiens
gacatgagtataggtttcatccagtcacattctgttgaccaaagcaaatcacatgaccaatctgacaagggataaagaagtaaattctacctacaggaaggtactggaagtcacatgacaaagagtctagaggtataatcttctacaaaggagaaaacayggagctgggaacaataatgaaatctaccacacagtgtgggaacagtgggaacatcatgaatatataacattccaaagagattactttggaaattatcagaatgattagcctcataaattatggtaggggtataaaccaagtcagtttcatgccttataggctcctctcatatatttaagtgttctaaaaatatatacaacatctagggtatggatttaatcattttccgaacttgtttcctttgtgaatagttttatacttgagttgttacgaagtaatttattgataaacacatattgcagaatactgattggaatttgcattatctgcagacttgccccatataatgctctttatatgcaaaattcaacagttagtgc

SEQ ID NO: 154667 - DNA, 570 bp, Homo sapiens
gtacagtgctttgtttggtttttatttttagttgaatttgaggtcctttagaaagggcatgcatgccttagtttcccatttctccaacatgccctattgtctttagcccactstcttctcatgcctgaatacatcacctgcctgaccccaaagtcatccaagtgtgtaaccctgaattcaagaattcatttaatcaatagaagaaaattataacctgaaggaaaagtcaagttctttacattttcttaaatcctttttctaatgatttttcacaggaggtactgaagaaagaaattggcagactagaagagttctttcaagatgtaaatacttgtcatcttcctctgaaccctgccctatgtataaaagggattgatcacgatgtaagtcaacttattcctcagattaatggaatatttctgttttgtatagtttagttcattgtatatgtttgaaatggcaaaaagaattcgtaagttgacactgcaattattttaacgaaaaagtaactgaatccatttacattgtgttttccctttgatacactaagaccagttgggatcacattgg

SEQ ID NO: 154668 - DNA, 556 bp, Homo sapiens
taatatttctcctcctaagctctttcagtttctggaattcacagaacgttgttttctaggacagctaacttcttccatactaggttcattgtttgttcttattgttttttaggtacacaaaagtccttttacaagtcttataggtcctataagtaggacctttgtattcccctaggataaatgaamgtgcttatttgtcccacatttattatgttatggaccccctttgtagagagaaacctagcccacacctagtttctgtacacatactcagatgtattaacccacttatgctggaggttgcaaattttttttgtgaaaaatcagaccttagcaatgaccttgagcagtaggatataaataactcctacaagcttagcgttccagtaatggaacactagacataaatgagtttaataacaccccccataatatacaaaaccagatttataaatcatgccctaggactgtcataatgtctcatagtctgacaagatcataaaatgctccaataccaaacaacaataaccctaggtcatagtctttaattaaaatg

SEQ ID NO: 154669 - DNA, 601 bp, Homo sapiens
acaagcattcctatacaccagtaatagacagacaaacagccaaatcataagcaaactcccattcacaattgctacaaagagaataaaatgcctaggaatacaatttacaagggatgttaaggacctcttcaaggagaactacaaaccactgctcaaggaaataagagcgaacacaaacaaatggaaaaacattccacgctcttgaataggaagaatcartatcgtgaaaatggccatactgcccaaagtaatttacagattcaatgctattcacatcaagctaccattgactttcttcacagatcttcttaatctcagaaacttaaccaagactttagtcttaaaagtctagccttttcatttgttttaacttctaaagtaaacattacaagaaaaaattaatttcaagttttcatagaggtaggaaaaagcggggagaatctgttttccttcttacttaatccttcttccctcaggcatgatgctggagctaaatagagatgatatgtttcaaattgccaatcacattagtctctgtgtgggctccttaaaacatgcaaatggttctgaaaaaaaaatgtctctcattctacaaagataa

SEQ ID NO: 154670 - DNA, 601 bp, Homo sapiens
acaagcattcctatacaccagtaatagacagacaaacagccaaatcataagcaaactcccattcacaattgctacaaagagaataaaatgcctaggaatacaatttacaagggatgttaaggacctcttcaaggagaactacaaaccactgctcaaggaaataagagcgaacacaaacaaatggaaaaacattccacgctcttgaataggaagaatcagtatcgtgaaaatggccatactgcccaaagtaatttacagattcaatgctattcacatcaagctaccattgactttcttcacagatcttcttaatctcagaaacttaaccaagactttagtcttaaaagtctagccttttcatttgttttaacttctaaagtaaacattacaagaaaaaattaatttcaagttttcatagaggtaggaaaaagcggggagaatctgttttccttcttacttaayccttcttccctcaggcatgatgctggagctaaatagagatgatatgtttcaaattgccaatcacattagtctctgtgtgggctccttaaaacatgcaaatggttctgaaaaaaaaatgtctctcattctacaaagataa

SEQ ID NO: 154671 - DNA, 601 bp, Homo sapiens
acaagcattcctatacaccagtaatagacagacaaacagccaaatcataagcaaactcccattcacaattgctacaaagagaataaaatgcctaggaatacaatttacaagggatgttaaggacctcttcaaggagaactacaaaccactgctcaaggaaataagagcgaacacaaacaaatggaaaaacattccacgctcttgaataggaagaatcagtatcgtgaaaatggccatactgcccaaagtaatttacagattcaatgctattcacatcaagctaccattgactttcttcacagatcttcttaatctcagaaacttaaccaagactttagtcttaaaagtctagccttttcatttgttttaacttctaaagtaaacattacaagaaaaaattaatttcaagttttcatagaggtaggaaaaagcggggagaatctgttttccttcttacttaatccttcttccctcaggcatgatgctggagctaaatagagaygatatgtttcaaattgccaatcacattagtctctgtgtgggctccttaaaacatgcaaatggttctgaaaaaaaaatgtctctcattctacaaagataa

SEQ ID NO: 154672 - DNA, 464 bp, Homo sapiens
aggttgatgcaaaagtaattgcatttttaccattacttttaatggcaaaacacagttacttttgccacagcctaataacatatagcgatgattataactgacaagtagtaaaatataatttaaacttatttttgtttttgttttattttgagataaattttcaattaaatytcatttcattacttactatgaaattttagtccccatttaagtgaattctctttaatgagatagcacttttctttggtccttgtttatgtctcaaaatattctgtagttttctgctgatttgcacatcatcctgttgtgattctccttatcctaccaggtgcaattcaaattctacttcttctaaatatttttcatcaccttcttttataaaaagggaataatgtttctttcccctcaaaatttatatgttaaaaccaaatccaaagataatggtatttggaagtgtggccttt

SEQ ID NO: 154673 - DNA, 464 bp, Homo sapiens
aggttgatgcaaaagtaattgcatttttaccattacttttaatggcaaaacacagttacttttgccacagcctaataacatatagcgatgattataactgacaagtagtaaaatataatttaaacttatttttgtttttgttttattttgagataaattttcaattaaatctcatttcattacttactatgaaattttagtccccatttaagtgaattctctttaatgagatagcacttttctttggtccttgtttatgtctcaaaatattctgtagttttctgctgatttgcacatcatcctgttgtgattctccttatcctaccaggtgcaattcaaattcyacttcttctaaatatttttcatcaccttcttttataaaaagggaataatgtttctttcccctcaaaatttatatgttaaaaccaaatccaaagataatggtatttggaagtgtggccttt

SEQ ID NO: 154674 - DNA, 411 bp, Homo sapiens
aaatgaggctgttagagctggttccttctcattttgccattaacagtgaaagccccagagctcaagtcctgctcctcacatttaaatctcttgtctggcccactgccctaaaattcagactcctacacaactgcatctttgaaacctacacttggttgactaataagaattttaaatttaatrtatctgaaaactcttaacttcccatcccgggtatattagtttgttctcatgctgctaataaagatatacctgagactggataatttatataggaaagaggtttaacagactcacagtttcacatggctggggaggcctcacaatcatggtggaaggcaattgtggagcaaaggcacatcttatatggcggcaggcaagagagcttgtgcaggggaactgccctttata

SEQ ID NO: 154675 - DNA, 308 bp, Homo sapiens
tactcatggctcttgctgagaaacgtgatggccaactgttgtaggaaaagtataaattttggagtcagacaggtttggatgagaaacacaatggaccacattcacacttccatggctttagtaattcacttaaatttgccaagcctctgtttcctcatctgtaaaatgrtgatacaggttgagcatgctcattggagcatttcaaatttcagatttttggattagagatgctcaaccggtaagtataatgcaagtattccaaaatatggaaaaatctgagctctgaaacatttctggtcccaagtatt

SEQ ID NO: 154676 - DNA, 339 bp, Homo sapiens
ttcacctggggtagtcttatgaaaaagattgtggctaacagagtgagaatattggcaactgtaggcgtcagttcccctattagtaggaagatgatcccagtcaaaggctatccttggacctcagcaatttcctgtgtctgtgaaaaggcaaagagggatggggtggtgtatttatgggaagacgtgggcagcttgttgaattttagtggtttaaaagcatttkctttacattatttgaactaattgaaataaaagatttgaggctcctgagagttgactcattcccgtcatcctaatataaatgaatcaagttccatttggttgatggtctgtaccaaa

SEQ ID NO: 154677 - DNA, 439 bp, Homo sapiens
cttggcttttctttttttaagacacgtcttatgcatgtgatggttacgtggtgtctggtgttgcacagcactcttcttcacagtttaagatgatagaggaggcaagagattatgcttctctgttcatacaatgatgctcataaaagggactctgattttcccatgtgcccatctctttgaccatgcccatctttctatatgtgcatctctccaaccaatcacacaggaagataattggccagacctgggtcatgtgctttcccctgcgtgtakaagataggcaagtccttgggatttacagtttcatcagtaccaaatggagcaggagagggcagtcccccagtataaaatcaacagagatacatttcaatactttgattggatggaggtcattgttgttattatttgctgttgctatcattgctgctatttttattcc

SEQ ID NO: 154678 - DNA, 594 bp, Homo sapiens
actactagatatctacccaaaggaaaagaagtcattatatgaaaaagacacatgcacacacgtttatagtggcacaatttgcaattgtataaatgtggaaccaatctaagttcccatcggccaagtggataaagaaaatgttgtatatatacaccatggaatactactcagccataaaaagaaatggaataatgtcttttgcagcaacttggatggagctggaggccattattctaagtgaagtaactcaggaataaaaaactaaataccatatgttctaagtgggaggtaagctataaggatgcaaaggcataagaatgttataatggactttgaggacttaagggggaagggtaggaggtaggtgagggataaaagactacatattggagcaagaagcagcttctccactcctwctggaatttctgcctggttcagcccgctcagctcctcgaacttctcttaagtgggcagcagcagcttccgaggtggcctgggtggaggctatggtgggaccagcggtgtgggaggcatcaccaccgtcccggtcaaccaaagcctgctgagcccccttaacctggaggtggaccccaa

SEQ ID NO: 154679 - DNA, 539 bp, Homo sapiens
cttaacaaaatactagttaaccaaattgaacagtatagcaaaaatataacctgttcaagtgggtttcataccagggttgcagggatggcttaccatacgcaagtcaataaatgtgatgcaccatataaatagaattaaaaacaaaaatcrcatggtcatctaaatagacacagaaaaagcatttcacaaaatccaacaacagtttttgattaaaatcctcagcaaattggcatagaagagatataccttaatgcaataaaaggcatctatgacaaacccacagccaacctaatactgaacagggaaaagttaaaaacattccccctgagaagtggaacaagacaaggacactcaacctcaccacttctattcaacatagtactggaagccacagccagagcaatcagacaaaagaaagaaagaaagggcatccaaatcagtaaagaggaagtcaaactgccgctgtctgttgttgatatgattgtatacctagaaaaccctaaagacttgtcctaaaagctgctagaactgataaattc

SEQ ID NO: 154680 - DNA, 608 bp, Homo sapiens
cagagcaatcagacaaaagaaagaaagaaagggcatccaaatcagtaaagaggaagtcaaactgccgctgtctgttgttgatatgattgtatacctagaaaaccctaaagacttgtccwaaaagctgctagaactgataaattcagaaaagtttcaggatacaaaattaatgtacacaaatcagtagctctgctatatcccaacagtgctgataatgaaatcaagaactcaacccctttggcaatagctgcaaaaataataataataaaatacttacgacaatacctaaccaaggaggtgaaagacctctacatggaaaactacaaaacactgctggaagaaagcacagatgatacagacaaatagaaacacatcccatgctcatggatgggtagaatcaatattgtgaaagttaccatactgccaaaagcaatctacaaattcaatgcaattcccatcaaaataccaccatcattcttcatagaacttgaaaaaaaacaatcctaaaagtcatatggaaccaaaaaagagtctcactgttgttgcccaggctagagtgcagtagcgcaatgtcggctcactgcaacttccgcctcccaggttcaact

SEQ ID NO: 154681 - DNA, 481 bp, Homo sapiens
taataggactggaactagagtttaggtgccatctagatccaaaattctatccataaatcccttaagttcctttcaggtttttcaaaaatcccagtgtgtcagctactattacaaaaacaactttagcctgggagattaacctgaaaaagcatatcttcgggctggattcatcatgatccccatctctggctatcaggaatgactataattcattagatattgaarttgcctgacaagtccttagtcacactcttaagcttttgtctcagctggtggatgagaaatgagtacaaacctagggttcagggtgagtgcttaaatcagtgtaaccatagcatttttttgttctttttttttttttttttttttgagatgccactctgcggtttctaggtcctggtgggtggacaaccttatttaccgagaacccactaagaacagtttactcagtgctatctgacataccaaaataaatggagaa

SEQ ID NO: 154682 - DNA, 626 bp, Homo sapiens
ctatctttcaaatgacttctcagaaatggaagaaattacaccatttccatttcaaatcattctctagtgaagtgaagccaattctaaaaataaaaccagggtcactaggagaaacattctaaaagccatatatatgacacttccatgatcatcctaaagataattgatccaattctcccacattcctccaaagctgcagagttttgataattcagtttctaaagtaaaattgcaatatggcttatcctaaacaatatttttggctgcacacaggttttatattttatataaatggaatcatacagatatatttctgctactagttttcttacccaaaattatatttttgagattcaatcttgttgattcatataattgtagtttatatcactcgtgcctagttttcctttgtatgaattgactacaacttactagttattttckttttggtggacatttatattatgtctagctttttattatttcaagctatactggtaaaatctttcctgtacatacaagtgttaaaattatttttaaacaagagaatgaaaaccacaaaattcagaatagtgttttctcttggaggtgaggaagggaaactggcatcagggagaaggatgcag

SEQ ID NO: 154683 - DNA, 544 bp, Homo sapiens
gtttttgtaaaatctcctctgaatctcttgggtggcacagtaccaactgtcatggtgcccacatcaagcccatgcaggcagagctaaaagaaccagaccacttgctctgtaattcagtcagttgcaaagtaccaaaccacagaatgagaaggctcatctcttttgtgctttcttggtcagaattctgtctgtcttagttatatagttttttttttaaccaacaccagtatttcttcagttatagatgaaaatatcaaagcacaaaaagaataagcaatttatccagggtcactgtcagatggagatgattaatcatttaaaatacaaggagtttagcmcctgggaatgtaagccagaaaatgaaagcagcatctaatccagcacttttatattaaagacgaggaaactgcagcccagaaagagtaagaatattgtccaaggttgatttggatggagactggaagccctggtcctgaacagacagtacttttcccacaagaccaatgactgtcaactatggctacacattacaattaccaggggg

SEQ ID NO: 154684 - DNA, 608 bp, Homo sapiens
tcatccagtctaaaatgtcaatattgccaaggttggaaaaatcctgctttatagcctcagtttcctcatctgtaaaatggggattatgagttatctgcctcataaaatttatgtgaggattaaatgaaatatagcatttaaagaaactgacaccatgcctggcacatagaaaatgtttagtgagtgttagttattgaagtaattttttatgcatagtcaccagcctataatttaaaggccaaagattttgatgataaatgtggagamaacaacttctttaaatggagaaatggtcctgatggacctagtgttggggggctgggggaaacaggtgcagactgcccaggtgctggcactaagagggctgtgttgcctgtgagcaatttaaaaacaataatgaactggactaaaatcagcctatttgttatcatcgagcatcagaaattctaaacagtgttatcaatcaaatacttctctccacccctgggccatatcacatccacagcctctcccacccgtatgccactgcgtgtgatagcttgttaagaaccaggcacttgcataaatgctttacatatattaactcgtttactcattttagcaacaaa

SEQ ID NO: 154685 - DNA, 539 bp, Homo sapiens
aaaggcacagaaaataaaaagctatcatccttgccttcaagaagctaaacattttcttgtgaattaacttcagcctgtctcctgaccataacactcagctgtctacactgcagtggttagaagattatccctaattatgaagttatcactaattgtaagtgcaaacaaatagtcacataaccttcttgaataattgtagtactggtgcacaggacatgaccatattatggtcaaactctattgtaacaggtattaattgcctagaattatattgggttccatttgaccccaggaaaaacagagtgtgtacaataatgagctgagttactggcaccaggattctagaacctgcacaatgcttcagytgaatctgacataattaccattccacttccagtcctattctctgtcaacaccacatgctttcctgagcataattattataatcttttttcaagtctgtctttcgacagaagtatgagaaaattaggctttcttccctcccctttattatttcctctgcctctcttaacactctt

SEQ ID NO: 154686 - DNA, 568 bp, Homo sapiens
ggatagatccagaagctccaatgatatcattataaatttttctccatctcttattcttctttttcttttggttttattcttaaacaggcactcctcatctgatagagatggtcacaaccagctacaggcttatattctaccacttaagcaaaatcaacatacattcatcttcctttccctataaatttgaggaagtgtctcttttatgtcttatctggattaaactctaattgttctcagttggcttacagcccatttcattcacaccaatctcatggtgaggagggagataaaataaagtggttggccaggcctgagtcaggccttcasaagcaatgcagactgcatagaggagaagcttcccaaaagaacaccagagtgaagtatccaatggcaaagtagtggacactaggcaggaaaaacatcaggtgctgactacatcctcattttgcagatggataagcttgtagctggcaagactgattctcattccatttttatctgttccttccctctggctcccagtgttctattattgcatctgttcctctttccttagaggaaaaga

SEQ ID NO: 154687 - DNA, 553 bp, Homo sapiens
gactcatatctattaagcatgcactatttggcaggctcgtgctaggaaaccacagaagatacagaggtgaaataagacaggcatttaaggggtaccaacatgcagttagctagaagaagtaagttctagtatttgatagtacagtagataaatatagtaaaaccagtttattgtatatttcaaaattgctagaataaaagaattgtaatgttcccaatgcaaagaaaagacaaatatttgaagtgctggatatcccaattactctgatttgattatcacatgttgtatacaggtatcaaaatatcacccccaaaatatgtacaactattatacatcaataaaaatataaataaaaaataaagcaatgccttaaaaaggcatattttacaaatgtattaatattgtaatagaaaaaaacaagctatattttcatttaaaaaatgttaaggtcatcagggagggggaaaacatgycagtattttcacacttaaggagttcattaaaattgcttggagctgatttctgtcacctcactccaaatccagagttctat

SEQ ID NO: 154688 - DNA, 579 bp, Homo sapiens
gcagcttcaaggaatccaccaggccttgagttctgcctgcctttttgtcttgcttattgtggtgttggcttagtcctcaggatcttgcctctcacctgccagctccagacactccccttgtggtaccaaaacagctgtggaacttccatcttcacaccacactactcaagagaattattttctgccagctcccacacaaatcctcaattacttttggtcatttgtacaataggttaaggaccaacactgtggtcagtcaatcagctactctcttaatccagtggttctcaacttcagctctcatcagaatcactgggagggtttgttaaaatatacactgctagggtgtacttcagtaggtcttggatgtttttttctatgamggatcagatggtattattttaggcattgcaggccaaataagctctgttttccttctagtcttcctccttttcttctcatttgtggccccctcctccttctcttcctcctcctcctcattctttaagcaattctttacaaatgtaaaaacacattcttagaacataagctgcacaaacgccactggctgcatttgtc

SEQ ID NO: 154689 - DNA, 596 bp, Homo sapiens
aagacttttatgattatccacttccactttatgaatagtacatatattttctctttcttatgattttcttaataatattttcttttatctagcttattataagaatacagtatataatccatataacawacaaaatacgtgttaactggctatttatgttattggtaaggcttccagtcaacagaaggtaataattaagatttgggggagtcaaaaattatacatggattttcaactgtgtgatgggtcagcacccctaacttgtatgttgttcaagggtcaactgtatatatttttttaataatacaaattgaattatacctgagcagttacaaactgtttacacatagagcttacaaattgattcacccccacaaatatgtgcttggcttatatagttctttgggatttttttggttcattttaaagaatttggtgcgaatattttataaattacaatattattacataaagatccaaatttccttgtggcaacacagctggcattctgaggtagcaacgattaactggaagtaagtaactgctgtcacttgagtttttcatacttctcatcccactgtactgtaatccattca

SEQ ID NO: 154690 - DNA, 596 bp, Homo sapiens
aagacttttatgattatccacttccactttatgaatagtacatatattttctctttcttatgattttcttaataatattttcttttatctagcttattataagaatacagtatataatccatataacaaacaaaatacgtgttaactggctatttatgttattggtaaggcttccagtcaacasaaggtaataattaagatttgggggagtcaaaaattatacatggattttcaactgtgtgatgggtcagcacccctaacttgtatgttgttcaagggtcaactgtatatatttttttaataatacaaattgaattatacctgagcagttacaaactgtttacacatagagcttacaaattgattcacccccacaaatatgtgcttggcttatatagttctttgggatttttttggttcattttaaagaatttggtgcgaatattttataaattacaatattattacataaagatccaaatttccttgtggcaacacagctggcattctgaggtagcaacgattaactggaagtaagtaactgctgtcacttgagtttttcatacttctcatcccactgtactgtaatccattca

SEQ ID NO: 154691 - DNA, 596 bp, Homo sapiens
aagacttttatgattatccacttccactttatgaatagtacatatattttctctttcttatgattttcttaataatattttcttttatctagcttattataagaatacagtatataatccatataacaaacaaaatacgtgttaactggctatttatgttattggtaaggcttccagtcaacagaaggtaataattaagatttgggggagtcaaaaattatacatggattttcaactgtgtgatgggtcagcacccctaacttgtatgttgttcaagggtcaactgtatatatwtttttaataatacaaattgaattatacctgagcagttacaaactgtttacacatagagcttacaaattgattcacccccacaaatatgtgcttggcttatatagttctttgggatttttttggttcattttaaagaatttggtgcgaatattttataaattacaatattattacataaagatccaaatttccttgtggcaacacagctggcattctgaggtagcaacgattaactggaagtaagtaactgctgtcacttgagtttttcatacttctcatcccactgtactgtaatccattca

SEQ ID NO: 154692 - DNA, 596 bp, Homo sapiens
aagacttttatgattatccacttccactttatgaatagtacatatattttctctttcttatgattttcttaataatattttcttttatctagcttattataagaatacagtatataatccatataacaaacaaaatacgtgttaactggctatttatgttattggtaaggcttccagtcaacagaaggtaataattaagatttgggggagtcaaaaattatacatggattttcaactgtgtgatgggtcagcacccctaacttgtatgttgttcaagggtcaactgtatatatttttttaataatacaaattgaattatacctgagcagttacaaactgtttacacatagagcttacaaattgattcacccccacaaatatgtgcttggcttatrtagttctttgggatttttttggttcattttaaagaatttggtgcgaatattttataaattacaatattattacataaagatccaaatttccttgtggcaacacagctggcattctgaggtagcaacgattaactggaagtaagtaactgctgtcacttgagtttttcatacttctcatcccactgtactgtaatccattca

SEQ ID NO: 154693 - DNA, 450 bp, Homo sapiens
acccagtaactcagctcattattgtacacactctgtttttcctggggtcaaatggaacccaatataattctaggcaattaatacctgttacaatagagtttgaccataatatggtcatgtcctgtgcaccagtactacaattattcaagaaggttatgtgactatttgtttgcacttacaattagtgataacttcataattagggataatcttctaaccactgcagtgtagacagctgagtgttatggtcaggagacaggctgaagttaattsacaagaaaatgtttagcttcttgaaggcaaggatgatagctttttattttctgtgccttttgcacccagaacactggttggcactttggaggcagagaatttggaggcagagaatttggaagaggaaagcatggtgggcagggtgaagaaggaggaagaaaaggaaggaaggaagaa

SEQ ID NO: 154694 - DNA, 348 bp, Homo sapiens
ctggcacctcacaggcaattaataaataataaccactagctggctctgacttcaggcctctttccatagcattcctatgatctctccccctataaccatgggagaacttcactgtctgcatcctcaaagtgcagagaactcagactgaaaccagtggacacagactgaatgagcctcaggaaaccaagacaatcagatgagaccctgctcttttaatgttctaatgttttctgggcagygagttttgcccttaatgggctatttccaggagccctagatcatgcagagatattgctgcagtgcctgggatctggcccagggcaggaaacacctgaagaaggatgtgct

SEQ ID NO: 154695 - DNA, 348 bp, Homo sapiens
ctggcacctcacaggcaattaataaataataaccactagctggctctgacttcaggcctctttccatagcattcctatgatctctccccctataaccatgggagaacttcactgtctgcatcctcaaagtgcagagaactcagactgaaaccagtggacacagactgaatgagcctcaggaaaccaagacaatcagatgagaccctgctcttttaatgttctaatgttttctgggcagcgagttttgcccttaatgggctatttccaggagccctagatcatgcagagatattgctgcagtgcctgggatctggcccaggkcaggaaacacctgaagaaggatgtgct

SEQ ID NO: 154696 - DNA, 329 bp, Homo sapiens
agatcttttacctccttaaatttattcctaagtattttgtttttgatagtattgtaagtggggttgtttttaatttttttcaatagtgaattgttagtataaagaaacagctgattttttaatattgattttatatcctgcaactttactgaattaacttattagttacaacagttttttggtggagtcttatctgtgctctcttgtaccgcttttcattatcctatttgtacagaaggaggaacaacctcagaattggtttaggatttcccccargtcgtattaagtaatacagctagctgaacacatttaaaacaattattttgaat

SEQ ID NO: 154697 - DNA, 534 bp, Homo sapiens
ttcctgaccagcatagggatagaacctatggcctctatctcattagtactgtttgttagtattaagtaggcgaagccagtctggtacctaattaaagtataatgatctccatttatctgaggtatggctccagtcaccagctgataaccctgtcttttgggggatactgttgtcttcatatctacagaaataggccctagaagtcatgtttgaactgcatagccctatgggccatggctggttagtcaataggttaagactacccaagycaagccaaccagattgtttcccctgggattctcagatgttttacctctgttcttgcaagtggttaaaccagtaatacctaaacttgagggcaatgggatagcctttaatgtgtatgtgtcaaggagcaaagaaagcctgtctgtatctggaaagacaaatactgatgtgcaaagggaaacagccataagaaatgaagagaaagtcatgaaaatgtttggatttctggctctagtctgttttcataaattctggttacaagtcatt

SEQ ID NO: 154698 - DNA, 662 bp, Homo sapiens
ttggcaagtggctaaaatgttggtaaacacagcactagaattttagtcttttttttgttttgttttgttttgagacggagtctcgctctgttgccaggctggagtgcaatggcgcgatctcggctcactgcaacctccacctcctgggttcaagcgattctcctgcctcagcccctggggtagctgggactacagatgcacgctgccacactcagctaatttttgtatttttaatagagatggggattcaccatgttggccaggatggtcttgatctcctgaccttggcttcccaaagtgctgggatatacaggtgtgagccacccctccaaggcccgaattttagtttattaaagaaaacagtaatgagtaaagttctttgcctctagtagaggggtaggtagtaactacataataattcattcttagatggcctttaatgactccatattgcccacagcagtcactggcaattcatacacctacaggaaatggacaggtaatataaatgagggaagtttcctgagcacaacaatagggaagggtgggaactgcagtaagctatctaaaggggcagtggcttttcagccccagatgatrttgccatattgaagagaggatcaatatggccaaatagttccattttttaaagaaatgccaga

SEQ ID NO: 154699 - DNA, 474 bp, Homo sapiens
  misc_feature (1)...(474): n = A,T,C or G
gttctagaagtggcattagaagccctctttcctttgaaaacaagttggactcacagattatgggagaacaaaagcaatctctattgcctccccttgtcttcctgaggacctgtagggagaaagaaggaagatccctagcccagtagaggttacagttgctcacctccccaaatggagttcacatgaaagaaatctgaatatagatgtaagacagcccccagtactgaaggaaactgaaactgagtctttttgtgtccacttgctgaaggaatagcatttaagttaaaatgngcctaacagcaagttttctgttactttaaatgccttgaggacagttaagtatagtttttattctagtggaaaaggatcaggtgatgatgcatctggctgcctaagtatatcaaagttaaccaagctgrttgtatcaggagtggccaggcatttaagagcaggggctgcccaaacaaagtaacc

SEQ ID NO: 154700 - DNA, 452 bp, Homo sapiens
cgctacaaaaattacaaaaaaaattagctgggtgtggtggcttgtgcctgtagtcccggttacttgaggggctgaagtgggagaattgcttgagcccaggaggtcaaagctgcagtgagccgagattgcactactgcacttcagcctgggtgacaaattgagagcttacctcaaaaaaataaaaagaaataaaaataagatatcaaatactcatgtactatgtcagcatgtaccatccatgagaaatggcttgttgccaatatggtcgaagccttctatgtacttctacccarttagactcactccccttccctgggatgagtactgtacctaacttggctttatttttctcatacatttcttagacttgtaatacatacgtgtgtattctcaaacaatgtgtcaggttgctttatatatttaaaaactataaatacatactgtatgaattc

SEQ ID NO: 154701 - DNA, 472 bp, Homo sapiens
agtggctcatgcctgtaatcctagcactctgagaggccgaggtgggcagattgcctgagctcaggagtttgagaccagcctgggcaacatggcaaaaccctgtctctactaaaaatacaaaaaattagccgggtgtggtggtgcatgcctgtaatcccagctactcaggaggctgaggtccaagaatcgcttgaacccaggaggcagagattacagtgagccaagattgtgccactgcactccagtctgggcaacagaacaagactgtctcmaaaaaaaaaaaaaaaaaaaaaaggaaccttccggtttataatataaaatatacaaataattaatatgtaaaaaaaaaggcttatattcactaaaaagcaaggaagtgcacattaaaacaaggagatatattttatcattagatcagcaacaaacatggcaaagatgtaccacactgttggccaggcatatgtggctatga

SEQ ID NO: 154702 - DNA, 556 bp, Homo sapiens
accatttcagctccagtctacacagcaaagggatacgtcatgccctgtctcagtctccacctaactcacttctgaattcaaggctcatgcaatcacatctaatgagcagaaactaaagaacatggaaccccagcagcaagggagtctgggaagtgtagttgccagcctctgttctaccggaggacacactgggaggwggggagatggatggatgcctagtgagccacttcagcatccccatggacagtgatacaatttgttgaggtgggtggacagcctaggacctgggcagacaagcaagaaagctgcctaactcctgcagaagtgggaacattctgtggcagggacggagctcctgaaattagatgatcacatttttctactctcatgacatatccataagcaacccgaaatatttgtgaattctgtcactgcaattatgaaaactgagattgagtgccatctggcaagggggagctaaactggcctgtccagaagggcaagaagacggcttggagttaaatctgctctggcaactggcaagcatttctccctg

SEQ ID NO: 154703 - DNA, 564 bp, Homo sapiens
ttaactgcctcttctccagggatgatctctacagccctgccctccatcgagacctccaattttgcatctgtaactgacgacttcatctctaaatggctaaaactgagcataacacctccctccaaaactcactccccctctcggatctcctatttctgtctattgtttcatcaaccttctagtcactcaggcttaacactatgattcagttctgactcctcactctccttttccatcctcccatcccaaaattagtcatcaagtcccgtgcgtcctttgtcatttctcagatctttttcttcctttcctttttgcactgtcactactcaaattgaagtccctgtggctttattcttggagtattgcaggagccaacctgctaggttttctcttccaccaacttatcttacattaattcacactaagccattggatttagaracatctagacctgtattcaaatcctagcactatcatttataagctgcatgaccttggccaagttactttacctctctgaatcccattttctctcttgaatacaatgaataataattaagaaat

SEQ ID NO: 154704 - DNA, 576 bp, Homo sapiens
gcaacatagcacccctgagtaagggagaacatttgcttcctgttcagcctttagggtatggtgaacacctgccggcctgatctgcctaggaatgtttctcattcttttagctaagaatgctgtttttcccctgggaactctcccttccccactttacccccaattccatgaaatcttcctgggactctctagtggggattcaagctagccaatctctccttaaaatctgaactgtgagtagaattatgcaaggccagaaattgttggagctgatgcattttacagtaactccctgagaagattgcttattacttccagtgccactcctagccctttgtgatgcttaraaaagacatggagctcagggaattgaagcatctttcagcaaagaaaaagtcaccctttctccaggcagacaaaaccccctacagagaggcaagccttggtgagcagacagcaaactaaatccaccctaatttacctggtcagccaggtgccctgatgaccctgaaacccctataccctttcctctacttttggaaacctagttgttcagattgtctttcaattctctta

SEQ ID NO: 154705 - DNA, 587 bp, Homo sapiens
aaacaaagattaataaatttttgaagaagtgatgagacaaagaaaaagggtgttaaatttctaagtgtggtaatttgtgggaaaatgatgaggaaatatgtgggggaaaactaaagcaagagaaggattattttagtaggtttgtttgtacagatccatttcagcatttgactcctagtctctgggtaagagtaytctctatctgatgtaggagccaaggggttggccctctgaaggtttactgaaaaatcacctcacaaaaggcagattaattgggggaaaaaaaatacaaatctatgtaacgtgtacacatgggagcctgcagaatgaagatccaaagatgcaggggaaattgtccatttttatgtttaggttcaacaaagtatggacagccatgtagaaatatgattggacaaaaagggtctgatctaatgctaatagattgagtatggaaatccagcaaggtctgtctgtctagattcttcttgacatctctgagcatgcgttccttcctcctgggtgtaggacaggtctccctctggagtagaatcttacgacctacagttaaacaaagtagattggataat

SEQ ID NO: 154706 - DNA, 587 bp, Homo sapiens
aaacaaagattaataaatttttgaagaagtgatgagacaaagaaaaagggtgttaaatttctaagtgtggtaatttgtgggaaaatgatgaggaaatatgtgggggaaaactaaagcaagagaaggattattttagtaggtttgtttgtacagatccatttcagcatttgactcctagtctctgggtaagagtattctctatctgatgtaggagccaaggggttggccctctgaaggtttactgaaaaatcacctcacaaaaggcagattaattgggggaaaaaaaatacaaatctatgtaacgtgtacacatgggagcctgcagaatgaagatccaaagatgcaggggaaattgtccatttttatgtttaggttcaacaaagtatggacagycatgtagaaatatgattggacaaaaagggtctgatctaatgctaatagattgagtatggaaatccagcaaggtctgtctgtctagattcttcttgacatctctgagcatgcgttccttcctcctgggtgtaggacaggtctccctctggagtagaatcttacgacctacagttaaacaaagtagattggataat

SEQ ID NO: 154707 - DNA, 560 bp, Homo sapiens
tgctgcttctcaagtgccttcagctcaaaatatctcatatgccaaacgggcatattttgkggtggcatgttttgaactccctcctgtgctttgcctggggacaaaaaggagaccccctggctttctgcaaaataaatgagaagggaccgtgcttttgaaggcccaggacttgcctcaatagtaagggtggctactgccatgttaggctttgacctatcgatttcctacctgaggttttttatgggaggcaggatggctcttcttgttgttctttttctccctgtcctatatatagggcaagggacaggcatgagaactttttgcctcagcaatatttgaccctgattcagagagctaggtgctggggacttcatctctcttgaaagtcagaatcctcaactcaacctcaatgaaggcccaggtgctattggaagtatctgcagaatcacagtttcatttgccagaggtgtgggaagtaagaaggacaaaggaggtcatgagggaggaagtcaggtctgggaattcagatctatctgccaaataactgatcaattagtgtt

SEQ ID NO: 154708 - DNA, 560 bp, Homo sapiens
tgctgcttctcaagtgccttcagctcaaaatatctcatatgccaaacgggcatattttggggtggcatgttttgaactccctcctgtgctttgcctggggacaaaaaggagaccccctggctttcygcaaaataaatgagaagggaccgtgcttttgaaggcccaggacttgcctcaatagtaagggtggctactgccatgttaggctttgacctatcgatttcctacctgaggttttttatgggaggcaggatggctcttcttgttgttctttttctccctgtcctatatatagggcaagggacaggcatgagaactttttgcctcagcaatatttgaccctgattcagagagctaggtgctggggacttcatctctcttgaaagtcagaatcctcaactcaacctcaatgaaggcccaggtgctattggaagtatctgcagaatcacagtttcatttgccagaggtgtgggaagtaagaaggacaaaggaggtcatgagggaggaagtcaggtctgggaattcagatctatctgccaaataactgatcaattagtgtt

SEQ ID NO: 154709 - DNA, 560 bp, Homo sapiens
tgctgcttctcaagtgccttcagctcaaaatatctcatatgccaaacgggcatattttggggtggcatgttttgaactccctcctgtgctttgcctggggacaaaaaggagaccccctggctttctgcaaaataaatgagaagggaccgtgcttttgaaggcccaggacttgcctcaatagtaagggtggctactgccatgttaggctttgacctatcgatttcctacctgaggttttttatgggaggcaggatggytcttcttgttgttctttttctccctgtcctatatatagggcaagggacaggcatgagaactttttgcctcagcaatatttgaccctgattcagagagctaggtgctggggacttcatctctcttgaaagtcagaatcctcaactcaacctcaatgaaggcccaggtgctattggaagtatctgcagaatcacagtttcatttgccagaggtgtgggaagtaagaaggacaaaggaggtcatgagggaggaagtcaggtctgggaattcagatctatctgccaaataactgatcaattagtgtt

SEQ ID NO: 154710 - DNA, 643 bp, Homo sapiens
gagatgagggcaggagaaggtcagagaaacactttcacttccgaggccttcattttgcaatattgctttccaagcctcaacgtgggtacaaggaggacacctttctcgtagaaaatcttatgacctgcttttaggtagaaagggaaggtcagcgagcccttcctgcatctgctgcttctcaagtgccttcagctcaaaatatctcatatgccaaacgggcatattttggggtggcatgttttgaactccctcctgtgctttgcctggggacaaaaaggagaccccctggctttctgcaaaataaatgagaagggaccgtgcttttgaaggcccaggacttgcctcaatagtaagggtggctactgccatgttaggctttgacctatcgatttcctacctgaggttttttatgggaggcaggatggctcttcttgttgttctttttctccctgtcctatrtatagggcaagggacaggcatgagaactttttgcctcagcaatatttgaccctgattcagagagctaggtgctggggacttcatctctcttgaaagtcagaatcctcaactcaacctcaatgaaggcccaggtgctattggaagtatctgcagaatcacagtttcatttgccagaggtgtggga

SEQ ID NO: 154711 - DNA, 522 bp, Homo sapiens
atatgtgctcccctgctgccttcccccaacttccccaactcccaccacacacacttagggagtaaggaagatggggcgggagagagaggggaaaaaaaaaggcacgtgcacacgagagagagagagagagacagagagacccacctagggggmtagggtaagagtaaagacaaaggagatcagctttcagacaccaatctcctcatctgtatctgcagattactaaaaatgctgcaactgttgttcaaaatatgctctggatccttgtggcagcaaaatggctaggtctgcaccctccttaaaatctgttgtccaggaggaagtggggagaacgtgctccctaggttcaccaggctgaaccatggttgagcagctcagaggctcccaggatccagggacaaagacccaagcttcttgagattaggaggccagcctgtctctctgcgacacagcgaattctcagggcacaattgctttgtcaggctctcatcactgagaagtaatttccgctctccctgtcat

SEQ ID NO: 154712 - DNA, 599 bp, Homo sapiens
atacattaaagaagaaacaaataaatggaaaggtttcctgtgtttaatggattggaataattactattattaaaatgtccatactacccaaagatatggacagatccaatgccacctctatcaaaatttcaaggacatttttcacagaaatagaaaaaaamattccaaaatttataggaaaccagaaaagaccctgaatggtcaaagctatctgaagcaaaaagaacaaagcagaaggtgttacactacctgattgcaaaatctactacaaagctatattaatttaaacagcatagtacttgtgtaaaaacagacacatgggccaatagaacagaatagagagcctggaaataaatccatgaatttataatctatttatttttgactcagttgccaagaacacacaacgaggaaagttctcttcaacaaatggtactaagaaaactggatattcacatgcagaaggatgaaattatcatctcacaccatatacaaaaatcaactccagatggattaaagacttagatgtaagacctgaaaccttaaagcaactagaagaaaacatagagaaaaagcttcatgacatttgtctgggcaat

SEQ ID NO: 154713 - DNA, 599 bp, Homo sapiens
atacattaaagaagaaacaaataaatggaaaggtttcctgtgtttaatggattggaataattactattattaaaatgtccatactacccaaagatatggacagatccaatgccacctctatcaaaatttcaaggacatttttcacagaaatagaaaaaaacattccaaaatttataggaaaccagaaaagaccctgaatggtcaaagctatctgaagcaaaaagaacaaagcagaaggtgttacactacctgattgcaaaatctactacaaagctatatkaatttaaacagcatagtacttgtgtaaaaacagacacatgggccaatagaacagaatagagagcctggaaataaatccatgaatttataatctatttatttttgactcagttgccaagaacacacaacgaggaaagttctcttcaacaaatggtactaagaaaactggatattcacatgcagaaggatgaaattatcatctcacaccatatacaaaaatcaactccagatggattaaagacttagatgtaagacctgaaaccttaaagcaactagaagaaaacatagagaaaaagcttcatgacatttgtctgggcaat

SEQ ID NO: 154714 - DNA, 599 bp, Homo sapiens
atacattaaagaagaaacaaataaatggaaaggtttcctgtgtttaatggattggaataattactattattaaaatgtccatactacccaaagatatggacagatccaatgccacctctatcaaaatttcaaggacatttttcacagaaatagaaaaaaacattccaaaatttataggaaaccagaaaagaccctgaatggtcaaagctatctgaagcaaaaagaacaaagcagaaggtgttacactacctgattgcaaaatctactacaaagctatattaatttaaacagcatagtactygtgtaaaaacagacacatgggccaatagaacagaatagagagcctggaaataaatccatgaatttataatctatttatttttgactcagttgccaagaacacacaacgaggaaagttctcttcaacaaatggtactaagaaaactggatattcacatgcagaaggatgaaattatcatctcacaccatatacaaaaatcaactccagatggattaaagacttagatgtaagacctgaaaccttaaagcaactagaagaaaacatagagaaaaagcttcatgacatttgtctgggcaat

SEQ ID NO: 154715 - DNA, 613 bp, Homo sapiens
aatacattaaagaagaaacaaataaatggaaaggtttcctgtgtttaatggattggaataattactattattaaaatgtccatactacccaaagatatggacagatccaatgccacctctatcaaaatttcaaggacatttttcacagaaatagaaaaaaacattccaaaatttataggaaaccagaaaagaccctgaatggtcaaagctatctgaagcaaaaagaacaaagcagaaggtgttacactacctgattgcaaaatctactacaaagctatattaatttaaacagcatagtacttgtgtaaaaacagacacatgggccaatagaacagaatagagagcctggaaataaatccatgaatttataatctatttatttttgactcagttgccaagaacacacaacgaggaaagttctcttcaacaaatggtactaagaaaactggatattcacatgcagaaggatgaaattatcatctcacaccatatacaaaaatcaactccagatggattaaagacttagatgtaagacctgaaaccttaaagcaactrgaagaaaacatagagaaaaagcttcatgacatttgtctgggcaatgattgtttagatc

SEQ ID NO: 154716 - DNA, 554 bp, Homo sapiens
tggttttttgctcatgacttagccctaaaccatgagaaatgtcccactccttaattttcccctgctctggctataaatgccaatacaacagttgcctggctataaatgccagtactccttttaagcttgcaaaaacccagttctgctttgaatatggtgagctattgactgacttaagtatctcctcttttctttcacaggaatgccttttgtgcctagctgataagtctaaaaggacatatgctcagcaggtgccaagagcaagccatatttggggatgtagagcrtttgtggaaattagagctcaataatatatatgaagaactgttgtgtaacaagcacaatgaaatattcatctcattcataaggttcagaaaaatataataaaagtcccccagggacaacctgcgatattggagaaatgttaatgttgtcttctgatctcagaatgcacacatcggtcttaaaatagaacaccctgaaggtgacagtgatcttataggaaaaggcaaaaggaaaaggacatggggcagggattcctaatacctgacaac

SEQ ID NO: 154717 - DNA, 523 bp, Homo sapiens
aggtaatgaatgactgcccgtatctgaaaaatgtgaagcagcgtgctttgtgcccaaaacactggtcacaccatgtaaggcatgtgtaatgtatcagtgtaacatgaagctgcattgctgaagtggcaactccatgttagcattaagcctgttttttgttgttgtttgtttgtttacctctcttgtgagacgtgtaaaaatacacccaccaaagaaatggcagatgacacattttttacaactttagagaagtttcagaattctcaaccgtgcttataatgaggactttctatttccctgggaatcattgggctacgcaggtaatttgaagtttatcaaaaacattacctcttgttttagcaacttggttgttcaatgtgtcgtggagtgcgggaggaggcggcaacaggacttgcgggaggaggggacaactggstgatgtttatctgaaaggattctgctggaagagctgtaatcactggacatattagtgggaaaacaactggctcctcccactcataat

SEQ ID NO: 154718 - DNA, 501 bp, Homo sapiens
atctataacttacttcaagtcctattggaagagaaatgatcagaaatcttaaatgcctactgaggaatgtaattgacctgayattaaattttagaaggggaaatacatttggtaattaaaacaagagtctaaaattcagttccttttgagggacaaggcaaatcattgaggggaggaaagtagagactgagagaaaaacggaaggaaaaaagagtgattgtgggcaaagtgagaaggtcattgtcactggtggaggggaaaagatagtgagggaccagtgaagagaagaatggagatgagagtaaagatccaatcaagatgttctgaattaactgatataagcagctcagcaaaactggctctgaaacaagacagagatagagccaatcccagtcccactatgcaccagtgtgtgactagcttccttcccttccctgagcttaattattccatctataaaacaaagatgatattgtttatccagtggggatgttgtagggc

SEQ ID NO: 154719 - DNA, 563 bp, Homo sapiens
gataaccatactatcttggcatctytaattgcaaggagccatttgtcataggagaagctgagtgaaagcctagagatggttcagaaaatctgttcactgttatggagaaataatttggaccaactgaaatgtcaactatacaatacttgatataatagggatactagggatacatcagtagagaagaatcctgggactccctttcttactttgctcttttttgagttctgtcctttattgcatgaattagtcctcaaagaactttttgtctagactgtatctactaatgacttttttaaaaagaggtaagcatcaatgtcttactttttctctaacactctatattgtgtttgtgtcagaaatgcatacagtatagtgactttcatcaagttgttcctggatccacttggctgatgtttatttcataaggtaatattttagatcataatactttaaccctgaaacagagatatttaacttttttagaattaaaacatttctttttatatattttgttgtctctagtcacgctttcaggagtgctgatcaattatcccacacct

SEQ ID NO: 154720 - DNA, 570 bp, Homo sapiens
catgaagaaataaattcagtaaataattacattaaaaccccaatctttgttgagattagagaaataagaattaactcattcaataaatgtctcaaattagcaaaaatgaataaatatgaagaagctgaatttcatcagggctatgagaaggcaggctcacgtccaatggctgttgccgtaaaaaattgactaaagctttctggagaaccatttggaagtaggttatgagagcttctgaacaagagtttatttttctttcatgcaggaattccagtttaggaaaaaaatgcctcaaagagaataacccaaggatgacataaatgagtgctatcttacaaagatgtttgtatcattgatgtatacaatggcaggattttatagtgcctgagatgcactacaaaaggggaagagctagacaagmtgtggtatgttaagaattcagaacgtcattcttattaaaatagtaaaataaaaatttgtgagatttatccatatgtagaaatatataagtgaaaaaaatgaatctgaagatgaaatacacacactgatggcaactatggaaaaacacat

SEQ ID NO: 154721 - DNA, 516 bp, Homo sapiens
aagaaaggctctcctggcaagatgtcactgcagctatacagacattcctctgtttcgagagactgactgacactcaaagaatagctgtcaaggacaaaatttattggaaaaaaaggaaaatgttttctctctaacaagaagtaaacaccacaggattttccagttaataagaaagtgttaagaaacgaacataacatactttcactcagcgtttgctttgtgccgccaagattctatgcactttacatgtattattgactcttttgatcctcacggcaaacctaaggggaagatactattagtatccaatttttctaataagaaaatcgaagcagagggaagttaagtgacctgtctgagatcacmcagttgggaaggttgtatttggctctatagtctatattctgaaactactaagctacactcacttatattttgaaaaggagcttggagccaaggttgaagcctgaggaagtccattggatgagataaaactttatcacaacataatttagt

SEQ ID NO: 154722 - DNA, 391 bp, Homo sapiens
actttgccttttagataggccatgttctccctggttcagcttggcccccaatactccaacctcttaaaagtggctttttcctgcaaktatgttacctgtctgtcccctgaaggcatttgagtttgcagccttttctttacaggtattaaacttcaaatcatactaaaccctatattttattgtagcagaacctgttctggaattactccacctgcaatttccacttgaactaattatgctgtcacagcttatccacatggtgggttctgcaatcaatggaaacacagaagttatgattccaaactgcatgtgggtagataaatgatgggctgaaaatgatgggataggatagaaccacaaaataatgggataaatatctggagtttgataa

SEQ ID NO: 154723 - DNA, 611 bp, Homo sapiens
cttctctcagtttgtagtaggttctggttttaatggaaagcacagcctctcagggctgtcagcatccccacttcttcagctacagatgtaacagccttcctttgcactcattttgagtctcactaaatttccatgcatcatgagtctaccagaattccttgctcctgacatatcatgaatgctacatgcaaatggggcaaggaccagggagcatgcatattgtacatatctcttctgctcatgcacgggttccattgtcccattggayttcacttataaaatacaagttcaaagataaaacaattaagcatttcaagatggccataaagggcattacaccaagtatggggtcttatgtgactgcataagcctcacatccatgaagctggcccagtgaggcagatgctgttaaatgccttcctacccagtttccctttcttattgatggaaaagacaaacttactatttgcttatggtatcactgtgctcatttaagaacctacctgtcctatcccttttattccattttttaattgacaaatacaaattgcatatatttatcatatataccatgtcattttgaaatatgtatacattgtggcatggctaaa

SEQ ID NO: 154724 - DNA, 396 bp, Homo sapiens
atatataactattttaaccaattgaatatgatgaaagtgatattgtgccagttctagttccagcccttccttgacctaaaaktttctcttttctccatcttgatattctcactcttggaatactgcttttgaacccaaccaccatgctgggaggcagtccaagcagccatgtggagaaacccatatggaataggactgaaaccccccaccaatagcactgagttccagtagaccctccagatgactacaaccatctgacaccacaaagaatagaattacccagacaacctgcagaattgtgtgttattttgagcttctaggttttggggtgatttttaatgtaacagtacttaaccagaataccaggacaaccatatgtgtgcagcacagggacac

SEQ ID NO: 154725 - DNA, 331 bp, Homo sapiens
aaacacaaggtactcttattccctaagtaagagagtaatcaaagaagaatcaatttgtaattcaccaagacattttttaacatcccctttcctcactgctccaattttcttataagccaaagctacttaagatcatcattgtcttgtaaactttcaaaactcccttgaaacttacagtctgctttgtctgagttccatataytcagctctcattctagtaagtctaccttccacagtccttccaccattgctgaattatgtagacccatttagctttccaaaccagtggttatacatcctggtttatagggacagttcgggcttaagcctg

SEQ ID NO: 154726 - DNA, 637 bp, Homo sapiens
taaaacctctagagtgtgccttcccagagcagtactcacaaaatggcggccatgattatgattattactgttgttgtgatgatgatgatgatgatgatgatgatgatgatttcctttcatatccycgcccccagactctcctaaagtggccacacttttgcctaagctggttctcaaccgggacaactcaagtttctcctaaaacgagatccagttcaaagaccacacgcttcctgacaactctccctctcctggttcccctcagtacacaggaggaatcatctcttccatactcccatcatcccaagtctacagcttgactgtgatattttcctgccctattagctgaatgactctcatcttcccagattatgacctctctcacggaataaacatcccaaaacttcccatagtagagtgcatagttcaagattttaaccgtgatctccggaaacatccacaaacagcaacgtatcaggacaaaggtgacacttttaactgctcaggggaataggccggacttcaaagacaccatttgaatttttatcacctgtgtagttcttaaggttttgcatcattggagatggggatgataaatcaggcacccaaatattacatcattataataaactagttt

SEQ ID NO: 154727 - DNA, 524 bp, Homo sapiens
ttacccacctacaaaataataatgataatagtaaatgtttcctggaattgttgtgaggattaaatagattaacatatgcaaagtgtttagaaagtgcctggcacatattaagcacacattaaacactaggtattcctatcatcatatcatttaactttctatgcccaaggttcctcatctgccatgtagtatgaatagtgccacacaatattataaatatttgttagctctagcctgcagtacaaagatatgtaaataagttattttgatttctctggtagagttaaaaacaatacactctgatcaatttacgaaacccaactatcccatccccccccaagaaaaataatttttttcaagttttatttcaaattcaaayactatcatggtagaattatgaagtcaatgccctagcttagtgcaagagaaaaatatccattaaaaacacggcacggtttctgattgtgcagtggattcacagtaattgctcagtatatgttattatggttgtattccatattgtt

SEQ ID NO: 154728 - DNA, 517 bp, Homo sapiens
tttctcattcattccaaccccagaacacactatacatcctcattactagacaagcctttcccttattcacttcatcctcagtgaatacacacacacacacacacacacacacacacacacacagtcagccctccgcatccatgcattccgcatctgcggattcaaccaaaccccagatcaaaaatatttagaaaaaaaactacgtgtactgaacacacacacacaattttcttgtcactattccctaaacagtatagtataacaactgtttaaatagcttttacattgtattaggtattataaataatctagagatgacttaaagtatacaggaggatgtgtgtagattacatgcaaacactgcagcattttatatcaggaacttgagcatctgcagattttggtatccgagggaagtcctggaatcaatcccctrtggatactaagggacaactgtctatataaaatgaatgttcactttaagcaattatttgagcaccttctataggaagaattc

SEQ ID NO: 154729 - DNA, 577 bp, Homo sapiens
cataatcattaaacactggactaaacaaaggtacagtgatttctttgatgcaggatatatttacatattcagtgactcttccagagacaaatatttcytaaattatctttccataaaacatgtttccaaagatctcttcataataccaagggtctataaaggcatcctctgcaaaaagctgacttggagtatttccattcattcactcattcattcaattaccaagtgcctataatgtaccaggctctactctggacagcaacacatgctaataacagaagacttgagttctggtcccagctcactattgactggcccacttaagagcatttacttaagagtaaaaaagggtcaacatcacctgctccccagcccttctgagatgttcaagaactgaaataagtttgcaaagcacattcacacatgttagcagtagaatattatgcaaacaattgccttttctccatattctaggctacattgacacttaaactggcttcctgtagttcccatcacattacctggacaggcaagaaaatttaaaaagcattttcaggggcactctcagcagtaaaca

SEQ ID NO: 154730 - DNA, 580 bp, Homo sapiens
agaatcctaacccaggaagggctggctaatgagcttccagattcagttccaatcaagagattagagaggagctgcagtcaaagcctggcaattagcatgtttgaagctgtggcaaagacaataacattagcaaagctaagagaagaaagggttaacagaaatctctgagtggtagagtgagggaaaagaggatgggaccaagaagttagcctgtctagtccctaggaggtgtcctcaccagaagacttcatcatctcgctggctgatgctctcctcggtgggggaagaatatgtttcaagcactcttagctgaagaacccttcattaagaaaacctaattcctctttgtttgtacttaatattcmccaagtaatcttgactgtaggttacatttccatctgtttgcctcagggagaaaatgtgtgatccaaatactacttcatgaatgtcttgtctaagtaccaccttgaagactggcacaggctactgaactggatgtctgggtcccgagctgggctctgccacctactacctgtgggattctggacaagtgactcaccctttctgtgtctcagtttcc

SEQ ID NO: 154731 - DNA, 590 bp, Homo sapiens
atcctttccctgccatcttctggacaggccagaccatggctaaaaactcagttctgttctgcggaccctattttaagaagcacgtgaacagccaaagcaccacccaggattgtgagagactggaaaccacgcccagtgaagcatcatttgggaatctggggttctttsgttctgaaacagctagacgaatcgatataattttgctgtcttcaactttttaaagagttatagcacatatgtggaggagaacttgttctgtgttgctccatggtgcagaaatagaattactggaagccagttctaggaggcccctggtgctgtcagtgctggagtgtccaggaagagatagtgttaattttcaacgaagctctagagaaaaggatgaccccctgcctgagaggttagactgcaaaacccaggaaccctttacatctgtaattcagtggcattaggacccaatttggatgttggtgtgggtggcagcagttacactggtagcctggactgttcatatagctcattcatgtcccgaacttgatcccagaaggaatcattgtttcttataccatgaataagggatgcaggagagg

SEQ ID NO: 154732 - DNA, 599 bp, Homo sapiens
atactgccactcttcacgtgactgcagtgagaaaaagcagcactgtgagaactgactccccatgatttaaacgcctaacatcttctctgaatgcaccaccactgagttttcataaaacactatatttgggaaaaatccataycctgattatgtaaagcaaaaactatataacacttctgtaatactattacttttattatttaatgttttaaatctaaaagtttagaaataaaattacaaatatatctatggcctgctgatttttaaaatattcataatctctttttttccattgatttacttatctttttattccatttcctttgtttctttacttgtagtaaaccagaattttaaagctctgcatacacatataagtacaaatagctgatgataatattgttccttggacaactgcagaggagtctgaattgaggtttacaaacaaagctcagaagacatctgcttgagtattttaataagctagagacaaaaggggtttttatcacatcaggggtattagaattattaaaaagggttgagaaacatattggttattggttagggaaatggactttcttggaattcttaaaaagata

SEQ ID NO: 154733 - DNA, 543 bp, Homo sapiens
aacatcatattataaattaattatttctttgtttattacatgtctctctttcctaactacagctctatggacaggatatttctgtttagtttgctgatatatcaataccactcagaacaataactaaaatgtagctggtgctcagtaagcatttattgagtaatggatcagtttgtctctctttactaataagtctaaccttttgcttatttctgacctcattcaatcaataaccaaggttacctgtctgcccaatttatacagcacattgtgctatctatgagttaccatgtccttggctgaccacatctctttctgtcctttcaccttctctgatcaatgtttgtagtgatcctcstttgatctggcattgcagttctcgtcactgagttggtgtattactgtattagtattagcattaaaactcatttgtgtattaatgatacactataatagcctccctgttggcatttcctgtattgaaatttacccccaccacaggacctttagagagaggataccagagtatccatattttgacca

SEQ ID NO: 154734 - DNA, 585 bp, Homo sapiens
ataccccactttgagcaatggaaagatcatctaaaaagaaaatcaatcagraaacactgggcttaaacaatactttagaccaatggatctaacagacatatatagaacctttcattcaacaacagcagaagatgcattcttctcaagcacacatagaacattcttcaggaacaagtactaagaaatttaagaagattaagatcatatcaagtatcttttctgaccacaatggtataaaactagaagtcaataacagaaaggatttggtaaaaatttacaaatgcgcagaaattaaacaacatgcttgtgagcaaccagtgggccaaagaagaaattaaaagccaaattttaagatatcttgagagaaacaaaaacagagacacagctcactaaaacttatagggatgcagcaaaagcagctctatgaggaaagtttactagcaataaatgcctacatcaaaaagggagaaagatttcaaacaattaacctcacattacacctaaaaaactagaaaaacaagaacaaactaagcccaagagtagtagaaggaaggagataataagaatcagaacataaataaatga

SEQ ID NO: 154735 - DNA, 585 bp, Homo sapiens
ataccccactttgagcaatggaaagatcatctaaaaagaaaatcaatcagamaacactgggcttaaacaatactttagaccaatggatctaacagacatatatagaacctttcattcaacaacagcagaagatgcattcttctcaagcacacatagaacattcttcaggaacaagtactaagaaatttaagaagattaagatcatatcaagtatcttttctgaccacaatggtataaaactagaagtcaataacagaaaggatttggtaaaaatttacaaatgcgcagaaattaaacaacatgcttgtgagcaaccagtgggccaaagaagaaattaaaagccaaattttaagatatcttgagagaaacaaaaacagagacacagctcactaaaacttatagggatgcagcaaaagcagctctatgaggaaagtttactagcaataaatgcctacatcaaaaagggagaaagatttcaaacaattaacctcacattacacctaaaaaactagaaaaacaagaacaaactaagcccaagagtagtagaaggaaggagataataagaatcagaacataaataaatga

SEQ ID NO: 154736 - DNA, 580 bp, Homo sapiens
caacagaagcataagcattcattcattagctcatttatttattcagtgtttattgtgtaatttctacaggttgagcatcgcaagtctaaaaatccaaagtctgaaatgctccaaaatcaaaaaccttttgagtacatgatggttaaagaaaatgtttactggaatattttggatttgggatgctcaatcagtaagtacaacgtaaacattccaaaattgaaaaaaacctgaaatctgaaacacttatggtctcaagcactttggataagggatactcaayctctgtatagaaagtactaagtgctttcatttgagacagggtaagttttagtaagccaacaagggagcacttcagatactggtgagtctaaagaagtaaaaagtattaatttcactgggggtgagatttggtgcttttacattttatggtcaagaaagacctcatttagaaaaatgaagttttacctaaaaactcaaaggataaaagaatcatcataaaaagaacctgaaaaataatatttcataaaaaaagagagaatgtgtctctttaagtgaaaagaccctgaaaaataagtcttaa

SEQ ID NO: 154737 - DNA, 639 bp, Homo sapiens
taagggtattgactctcctattttcttaatatgtggatatactctgtatttgacctcaaaagagccaaagaggtttcaagtttttgagctattcagtggtcttcttggcttttggggacttatcatgagtaatcacttgacacatgatcaaaatgatcaaaaccttcctaaagatcattcatgtcaatcacatacaagtgtgcttattattttaaggttttgcaaggctaggataaatgtttttgagcttataattgatttattcttcatagaaactccaggtaattagatttttgcctcatccttcttttagcttttctgggtcatagtctagatcgtatgtcttcctatctgatccacgtcttgttcagaaatagcagcaaagcacaaccagccaacactgttcttctcctcccctaaataggaagctcaaaaggaatggatgtctattctcatttggcttgcccctataatctgacctttgaaagtgctggttaatcctagcactgacccgctgatatgccattttsaagggcctgaatatgttacatataagcataggctgatataatatattaaattatatatatatgtgtatgtgtgtatatatatatatacttgttttaaaaaatgaaaaaa

SEQ ID NO: 154738 - DNA, 504 bp, Homo sapiens
atgagtacacttatttcaaagataataaaaatgtcagaagacagaaatgtctgcattatagtattatgttagcataagaaatgactccagaatactattaaaagtaaaagaacttttccctgttgggcaaagatcctttcattcataccaggatcatctttcctaagaactttattctttacatggtaaagtacttcatcaaaagcaatagaaaaatatctcaccttataccttaaaaaattgttggcggattaaagggaagattatggtattctgataatgttctatttattgaactccctgtttatgtttagtttataaaaattaagcaagctgattgtttactattagtgtttttttctgtacatatgctatatttaaatatattttaaagaaaaacagatttaaaagactttgcaataagttgcaatgtgtgattcttgatcaaattcagattcaaaacaaacagctwaaaataaatttgaatataggttagatattaga

SEQ ID NO: 154739 - DNA, 567 bp, Homo sapiens
gtaatgggaattttatcttccattctgaattcatacagaattgattgaaatgcatcagcctcttagtctgtgcctcaatagtccatctaaagtatctcatgggaaatgaccagaaaagaaaattcacagtcttttttaaatcaataactgtctcagtgtccttccactttatccttcaatactcacycatgcccccaccctcaaaaacacacctctttttcaactagtctcctctcagatattgctaaactactgtagatcacctttgtaagacttaactcatgaggttgtacattccccaagccgtcccattattttttctcttggagaattgggtccaggtctccacttctttaaactccatggtgctagcacaatgcttttcatatggcatgttctcaggaatgagcatccaattctttttgtgcaaagactctcaactgagggtaattataacttcctcttctgaggtatatgtaggtgataacagatctttcttctatgaatatttatttcaagcagtttatcatttatttcttctctagcttttaatagggacagactgct

SEQ ID NO: 154740 - DNA, 586 bp, Homo sapiens
gccaagagatgtagccaggagcccttctctcttgagtggctgtctccacacacctcagtttatcttcctcagttccaccacaacagtggtggcaaaactttccaaagtgagactcttttacacctagagggaaaggaatctgtccccaatatcacatgcaaaggaaatctcattctattcttaagtgatcaatatagagaagcttatttgaatgggtacatgatgctcataagtggaagattggttttgctgttttgtctttactgtttttgaaaaagagatcataataggaaatatacgtctttcaaacaacttgtaaaaatctctgattttgtgtttattaaaagtcttctaaggtaaaattctatgtagcatttgtagtactagttggacattcaccatgttaataataggggtatcaggctgattaaatttttatcatttttataatttttttcttactaatgtgcaatattgttataacatgaaaagaaaatgttatacatgtttaaaaaccattttcacacaaggcttcaactgyattttgcaatgttttgttatattttcaaaatgaagcaaaatgtca

SEQ ID NO: 154741 - DNA, 380 bp, Homo sapiens
ggtctttgctaatttgcatttcttcacctcatttccaccatcctgtccttccatctarcaaatacttaatgaccaccctctgtgtgcaaggcatggccattgccggcatttcttgtctttgggggcctcacagaccccataggcgagatgaaacgggattgtcctatagagcaaggaaggagcacgaactgctatgagttacgagtactctatggaaggggagctttcctcagtctagggagcccctggaggctttatgcaggaaggaggtggggtgagattggaggctggagatgtgggtgggattttccaaggaaattgggtggacacagtgacttaggatttcttgaaggttactgtacaggatgaagctaaatgta

SEQ ID NO: 154742 - DNA, 576 bp, Homo sapiens
tttgaattctcttgctggtgtctggaagcaaaggcctcctttatttttgctggtttggcatgattttgtctcctgacatggctctggtagtttcttgtgagggtggaggcacctgaaacactttatcaggcacatgatagacattgcctatcaaatggctcaacatcagttccacaaaaaacctaaatggccattcaagacctgtttctgcctgtttcaagttccatataggaattagatcagtagttggcaaatgacggcctgtgcgccaaaatctagcccagtctgtaaataaagtcatgctggaacacagctgtgctcctttgttgatgtgttgccgtgttgcctgtggctgctttcacatcacaatatcagaaattgagtagttgatacagagactacgtggrcagcaaatctagaatatttaccatctagctctttaaaaaaaaaaaaaaaattcaacccctgaagtagatgtttgtttgtttggtgcttgataccatgtaagtatttgcaaaggcttatggaaattgatggttcattgttcttatgaataaaaactaataagcatgaatg

SEQ ID NO: 154743 - DNA, 576 bp, Homo sapiens
tttgaattctcttgctggtgtctggaagcaaaggcctcctttatttttgctggtttggcatgattttgtctcctgacatggctctggtagtttcttgtgagggtggaggcacctgaaacactttatcaggcacatgatagacattgcctatcaaatggctcaacatcagttccacaaaaaacctaaatggccattcaagacctgtttctgcctgtttcaagttccatataggaattagatcagtagttggcaaatgacggcctgtgcgccaaaatctagcccagtctgtaaataaagtcatgctggaacacagctgtgctcctttgttgatgtgttgccgtgttgcctgtggctgctttcacatcacaatatcagaaattgagtagttgatacagagactacgtggacagcaaatctagaatatttaccatctagctctttaaaaaaaaaaaaaaaattcaacccctgaagtaratgtttgtttgtttggtgcttgataccatgtaagtatttgcaaaggcttatggaaattgatggttcattgttcttatgaataaaaactaataagcatgaatg

SEQ ID NO: 154744 - DNA, 378 bp, Homo sapiens
tttcagtgttctcgcacctcaaaaagcttcctcctactcctttgcagttggtcccctcccccacccctaacctagtccctgacatgcactgacgtctgctttctgtcgctatgatgttttgccttttctagaactttagaaaaatggaatcccgtggtgtatggtctttgtgtttgactgctttcacttgacctaatccccactaccgatgtgtgcaaaaacaatctcatttttcatgccaggctctgcatgtgatggcccctccattcaccccgacmtcaaagccagaaagctaaggttcaccctcccaaggccccttcctctcactgcccccctccaattacaccccatgccatgagtaattagtcaggaagtcct

SEQ ID NO: 154745 - DNA, 553 bp, Homo sapiens
caacttttccctcttcgcctgggacttttctgcttttaggattgaaagtccttggtcgtaggcagtcccctcagtcccaggtaaaaaccagaatggttggtcaccgctctacactgggagagggtagagaaatgttttttaattctcatctatacatcagtttctttagctgcttaatgtatgcagcctgtccgattttgtgacaaactgtcacaacattcccagaaatggcggcggatggaaccacattcagggatcccactggagtgcacttgtccgacctagttgacttgttgcagacctgcacttccgctgttgaacactagatggtggccttgcacccttgtttagagaaagtgcgacactgaacctggccttcaggaagtgctgggcatttgggaagaacatgggccagagagaagtgaaaaaatayatgcttatgggacagcctagaagaagcagaccagtgtgcaatggcaagcgctaaaaaggaaaaatatcagatttggcttaaaattccttaagcatttagacattgggatggaaagaaagg

SEQ ID NO: 154746 - DNA, 524 bp, Homo sapiens
aatgaaggagaaatcaagacactctcagataaaagaaaactaagggaatttcttgctagcaggccaggtctttttttgggaggggggtggggaggtggggagacagggtcttrctctgtcacccagactggagttcactgactggcatgatcacagctcctgcagccttgacttccagggttcaagtgatattcccacctcagcctctcaagtaactgggaccacaggtgcacactgccatgcctggctcatttttattttttgtagagatggggtctcactatcttgcccaggctggtcttgaactcctaggctcaagcaatcctcccacctcagcctccgaaagtgctggaattacagacatgagccatggtgcccagcctaaaggaagttcttttaaaaaaattttaaaggcagtgtttttgttttaaaaggaatttaaaacatcacaatggcaaaaagaacaacagaaagagcaaacacagtggtaaattcaatagactttccttctcctcttgagttgt

SEQ ID NO: 154747 - DNA, 542 bp, Homo sapiens
aactctctgtaatcttaagatactaacatttctataaattaaattccctatagctgtcatttaataacagatctcattaaaatccatatgggttgttaaaactgcatgttatgcttaaatcttgacagtacacatttttataaaatgaagtgggatgaaatatatgtaaacgactacaggcaaattttggaaatattgcagtttcagttccagaccaccctaataaaacaaatattgcaataaagtgagtcacacaaatttttcattttcccagtgttaaacaggttctgtttagacataattgtacacttagtagccacaatrttgcacacaatattgaaattaggccaattgataaccctacaatggcctcaaagtgttcatatgaaatgaacagttataggtctctcactttaaattaaaagctagaaatgattgaagtcagtgagaaaggctattaagtgtgcgacagcattatgtctataaagcaacatacaaaccttaatttaaaaacacattattgctaaaaatgctaacaatct

SEQ ID NO: 154748 - DNA, 645 bp, Homo sapiens
aaattcccttttttgatgaccacatcaatattatttttcatctgcctgaattttctaggatttagagaaacagaaaaaaaataayaataattgcacacttacaattttccaaactctgtgctgtaatactcaaacacagtgatttaatactcaaacaatcccataagatataataatctattagaatctccattttatagataagcaaattgaagttgagagagaataagaagatcatctaaagtcatacagaaatagggggagaaaagtgggatcctatattccagcacactttgactccaataaccaagatctttccaaagccccaaatgaaccctccacttataattcccatcccttggacgtgcaggctggacactgtctactgactggagatcagttctaaaatgaatgaatctactggatccataatgtggtttctcatccgaacttaactacaaccagcaaacacacttatgctcatacacaaacacactatttctctccaccggacttgaatgctttcctcaatcaagactggatttgtcacagttcgatattaagttcattagatcaatgattaaccccttaaagaccattgctgatttgtgattttgttcctgagcttcaaccccacaaaatctt

SEQ ID NO: 154749 - DNA, 550 bp, Homo sapiens
ctgacctgtgtccagtttatttccaccaagatagccactgtctagaagaaccctgaataagaaagaaattagattcaggtggtgttgctcaggtgaggcacagaggaggcagcacaacaaaatacatgaaatagcmgaagtcatttgttacttacaggtcaataagagaagagggggtagtggtgagggctgatgaacagactgagggagcatcatggtaaaccagcagctgggagccagaaagagacagacctgttggccaaggcctatattggggttcaggctgttacccaaggaggtttcccatgggtagttctaatcggggagtttagaacaagcagacatgggtcctgtggggccacactataacttattagtggtcactgtagcatatccacacagtctatgctgggtgtaggggtcagtggggttagtctggtatgttgtagctatatgtcccatagagaagcagttaccaggaagcaattgtatagagaagatgatttggaccacattgagatactgggaggaggcagagagccagaagctg

SEQ ID NO: 154750 - DNA, 550 bp, Homo sapiens
ctgacctgtgtccagtttatttccaccaagatagccactgtctagaagaaccctgaataagaaagaaattagattcaggtggtgttgctcaggtgaggcacagaggaggcagcacaacaaaatacatgaaatagccgaagtcatttgttacttacaggtcaataagagaagagggggtagtggtgagggctgatgaacagactgagggagcatcatggtaaaccagcagctgggagccagaaagagacagacctgttggccaaggcctatattggggttcaggctgttacccaaggaggtttcccatgggtagttctaatcggggagtttagaacaagcagacatgrgtcctgtggggccacactataacttattagtggtcactgtagcatatccacacagtctatgctgggtgtaggggtcagtggggttagtctggtatgttgtagctatatgtcccatagagaagcagttaccaggaagcaattgtatagagaagatgatttggaccacattgagatactgggaggaggcagagagccagaagctg

SEQ ID NO: 154751 - DNA, 574 bp, Homo sapiens
tatttgttctaaactgtggactgcctgaaggattgacacaaaggacttgttttgttttgcttaacttggaactcagttaatggcagaaaagccaggttcactgcacaaaaaacattatatggcaaatgaaaaacctgtcacaacctgggacaatacattattgttgagatataaaatctatagcctgaagtctgggagtaaaatctgagaagagagtttcttyggaaaattagggcatttaaatgtatccatgtgtattggagaatgtacaaagccacatacctgcctaggattggatgcttggtcagaaaggacctgagaaaaccctcagctttcatctttggttgatctctaggctcaatacaagcagaaagctatggctaaagcagagttgtaaatggactaagtactgatgttcaagggaatctctgccaaaacatttcctgaatacaagctaaagaaaaaggccttttactgatgacacatgagaaggaatggagcctttgcaaaaaatagatttaaaacattgctaatcaaatggacaactgggcatttgtgagaaatccatagctaa

SEQ ID NO: 154752 - DNA, 563 bp, Homo sapiens
acacttcagctcagtagttataaaaattaattttttaaagaactagagttgcataaatgactaaacactttagttaaaatggagaaattatcaggttagrtaaaaagcaagcgttaaccttatactatacataagaaatgtcatttagatataaagatggagataggttaaaaggaagaaaaagacatgatggagataggttaaaaggaagaaaaagacatgtatgatacactataaaaaattaggggtggctattttatctgatagtgtagacttcaagacaatgagtattaaccgagagaaaaagggagatttcataattagaaaatgttaattcctcaaagacataaaaatactaaaagtataggtaaaaaacagagcttcaaaatagataaagcaaaaactgttagagctaaagcgataaataaacaaatcaattattctagttggagattccagcattcatctctcaatacagaatagaagttggtatggatatagaagaactaaactgtaccatcaaccaaattgatctaattgatatctgtaaaacattccaccta

SEQ ID NO: 154753 - DNA, 563 bp, Homo sapiens
acacttcagctcagtagttataaaaattaattttttaaagaactagagttgcataaatgactaaacactttagttaaaatggagaaattatcaggttaggtaaaaagcaagcgttaaccttatactatacataagaaatgtcatttagatataaagatggagataggttaaaaggaagaaaaagacatgatggagataggttaaaaggaagaaaaagacatgtatgatacactataaaaaattaggggtggctattttatctgatagtgtagacttcaagacaatgagtattaaccgagagaaaaagggagatttcataattagaaaatgttaattcctcaaagacataaaaatactaaaagtataggtaaaaaayagagcttcaaaatagataaagcaaaaactgttagagctaaagcgataaataaacaaatcaattattctagttggagattccagcattcatctctcaatacagaatagaagttggtatggatatagaagaactaaactgtaccatcaaccaaattgatctaattgatatctgtaaaacattccaccta

SEQ ID NO: 154754 - DNA, 563 bp, Homo sapiens
acacttcagctcagtagttataaaaattaattttttaaagaactagagttgcataaatgactaaacactttagttaaaatggagaaattatcaggttaggtaaaaagcaagcgttaaccttatactatacataagaaatgtcatttagatataaagatggagataggttaaaaggaagaaaaagacatgatggagataggttaaaaggaagaaaaagacatgtatgatacactataaaaaattaggggtggctattttatctgatagtgtagacttcaagacaatgagtattaaccgagagaaaaagggagatttcataattagaaaatgttaattcctcaaagacataaaaatactaaaagtataggtaaaaaacagagcttcaaaatagataaagcaaaaactgttagagctaaagcgayaaataaacaaatcaattattctagttggagattccagcattcatctctcaatacagaatagaagttggtatggatatagaagaactaaactgtaccatcaaccaaattgatctaattgatatctgtaaaacattccaccta

SEQ ID NO: 154755 - DNA, 580 bp, Homo sapiens
tcatcatcttttttcatcagagaattctcagaccaagtgaggcagataactatagaggtcctaaagccagtaaaacttggtgtcagaaggtacacgcaagtgtgtagaaaattcaaagcccatgctatgtttaccagctcacattgcatactaagtaaagacacatttctgtatttcatgtgaatgggccaatgggactccaagggaagtcatttccgctccatcttaactgccatgtacttaactgccagcctcctgaggatcagctccctctagtaggaggtatctgggacaaaagaggaatttctgtaatgatctttccatttttatggraagaagatgttgtcactaaacacaacgaaacccaacaattctgcataaggaccaaggggtccagaatagtaatcagaatggcagagtgagacagggaagccttttaaaaagaagtgaattttgtacaaggaatgtgctaattggccctggagtgtgactgaccaataacagcaattgacttggaaagacctgagggcctcacccttcaatcctgcaagagctttaacattcatcttcttgacagact

SEQ ID NO: 154756 - DNA, 458 bp, Homo sapiens
gactcttttatcctcaggttaaatatctgtggtttctgtctcctctattatttcctattaatagatttctgtaattctcaccaccacctgctagactgatgagatgggtcatgatccaatggttttgacttattaggacttcatattttctagttccaattgctcctctcccaggagttcctttggttagaagaatacttttttcttcttcttcaaggaactatttcagctactcattttttcagggggactttatatccggagcaagacacttgttcatcttctggcttagaaaaatatattcaaagtggcaattaaaaacacaccctgtagattaaagcataactatcayctctttatgttatatcaaaaatacaaagcaggcccttgagttataactctgatgttatatgacatttagcaagacaacttgtttgtgtactacaaatagtgaattc

SEQ ID NO: 154757 - DNA, 458 bp, Homo sapiens
gactcttttatcctcaggttaaatatctgtggtttctgtctcctctattatttcctattaatagatttctgtaattctcaccaccacctgctagactgatgagatgggtcatgatccaatggttttgacttattaggacttcatattttctagttccaattgctcctctcccaggagttcctttggttagaagaatacttttttcttcttcttcaaggaactatttcagctactcattttttcagggggactttatatccggagcaagacacttgttcatcttctggcttagaaaaatatattcaaagtggcaattaaaaacacaccctgtagattaaagcataactatcatctctttatgttatatcaaaartacaaagcaggcccttgagttataactctgatgttatatgacatttagcaagacaacttgtttgtgtactacaaatagtgaattc

SEQ ID NO: 154758 - DNA, 528 bp, Homo sapiens
attatttacctcctttgtaccagtcactgttctaagaattgggaaatacagaatttaaccaaaaaggaaaaaaaaatcctgcttacatcaaacttgctttcaagtgggaaagagacatataaaacaaatacataaaatacataagataatagatggtaaattagagcattctagactgggtatgggtgcatattcttcaggccctcctcatcctcagtctcttgggagaatgtctgaattcaagttactgggtatagtaaacactgccagttgctatctgatattcctactcccctgttcattactaatagaatcctgattttcctgtggrtaatcccatacttatttcccagatttccttgcagctacaggaggcaatgtaattcagttctagccgtgcaatataggcaaacaattcctggacaggttgtccttccccagtcccaaagtcaaagactttagaggaaaagcctctctattgattgcccttctgctatattactattgacgatgtggacagagttcctg

SEQ ID NO: 154759 - DNA, 528 bp, Homo sapiens
attatttacctcctttgtaccagtcactgttctaagaattgggaaatacagaatttaaccaaaaaggaaaaaaaaatcctgcttacatcaaacttgctttcaagtgggaaagagacatataaaacaaatacataaaatacataagataatagatggtaaattagagcattctagactgggtatgggtgcatattcttcaggccctcctcatcctcagtctcttgggagaatgtctgaattcaagttactgggtatagtaaacactgccagttgctatctgatattcctactcccctgttcattactaatagaatcctgattttcctgtgggtaatcccatacttatttcccagatttccttgcagctacaggaggcaatgtaattcagttctagccgtgcaatataggcaaacaattcctggacaggttgtccttccccagycccaaagtcaaagactttagaggaaaagcctctctattgattgcccttctgctatattactattgacgatgtggacagagttcctg

SEQ ID NO: 154760 - DNA, 607 bp, Homo sapiens
ataataggtaataaaacaaacatttataattaatctagttctatacatctgtggtttatgttaaaaagaaaaataaaaagcttagaggcctagttggtgtttcctgccacaaatggggaagaatgaggctataaagtaaatttaatgagggaaaagaagaataaatgttccctttgcttctgtctaagatatccagcttgtccagacttgtctttgccctagctcatgacatgtaaggggagaagctttggctggctgttcaaaatatagtaatgttctgtcaaagtctaagggcaaggtggagatggaaactaaaatgccagggctgtatttgtataaaccaagcagaagtggtctgaaagactaaaaggaagtttttagcatcaacttaattatggatcttgatgttcatgctgacgtttgtagtttttctctttttcaagtaaaggttattctgtcaatgaataaagaatagagggtgacctgccaaagataaggctctgaggtggttctaaatgacctaattagataaaactagaggccacaaaawacagaataaagaataaattcgagagctccttaaagaagacagtcctctcaatttgac

SEQ ID NO: 154761 - DNA, 519 bp, Homo sapiens
tatgctgctgctgggaatgtaaatcagttcagccagtgtggaaagcagtttggatatatctcaaagaactcaaagcaaaattaccattcaacccaacaattccattacagatatctatccaaaggaatataaattcttctgccataaagacacatccacgcatatgttcactgcagcactattcacaatagcaaagacatggaaccaacctaaatgcccatcaatgttacaatggataaagaaaaagtaatacatatccaccatggaataccatgcagccctagaaaagaatgagatcatgctctttgcagcaacatggaggctaagtaaactaacaggaacagaaaaccaaatactgcatgttctcacttatgagcgggacctaagcattgagtccttatggacacaaagaagggaataactaacactggggcctacttgagggtggagagagggaggaaagtgaggattmaaaaaactacttcttggttactatgcttattacctgagtgttgaaat

SEQ ID NO: 154762 - DNA, 341 bp, Homo sapiens
gaattcgcaaacccaccctgcaaaattaggtgaagaacgaagattctttctttttagcacctctttttctgttgagagtggctgtctttctctgggcagcaaggtttgctgaagaaaagattctgcctggctggcgtcagatgtaccgatgtctgcatattttcttcccccatttttctctggctccaagatgacacagcattctaatgagatttagaattggataaataggtctcagcccaatgacaatgaaaaaaaaaatkttcacacgttgctcctgaaaggtgagggcaatgactatgacatatcaattactgacacattcacaaggcagctgcatg

SEQ ID NO: 154763 - DNA, 641 bp, Homo sapiens
ctggcagttataatgtatttattgaatttgtctatatatgactaggagatcctcttcaatatgtgctttattacaattcaaaaagtaccctcaaagttcaacaattggattttcactaaaccctgaaataagagtttcttcccatatattttccttgaatgtgttaatgcaacaaaatgtcgggtcacttaagccccaggagtctgatgttcccctttgatctggagaaagcagaaacaatatctttgccagactcatggggggaagaaaatttcttcccaggttctacagaaggtcagacaactggccaattttaccagagcaatcaagcagttagttgaactaattgcctccatgaaatgactttctcagactgaatatactaggtgtttgagtccagagggctgatctcacrttacttgcctgaccaggtaacatctaaaacctcaggcaatatgtttaaaacaaacaaaacaaaaataattagaaagtggcggtaggagatattttatgtattgactgtctctattgttacagctttgtttatttcccctcattggatcaaaaaactctggttttgaatataggattgccaagaagactgtatcacgccatcgcaggaagatgaaatatttatttca

SEQ ID NO: 154764 - DNA, 605 bp, Homo sapiens
atttaaattctgcctggtttatggcagaattaaaggagaacgtacttaactagaagggcaacctgatgatctgttgaaacaaatgctattaggtaccttgggatgataaaaaaaattaggaatacactcaactgggctttcagaaatagatggggaagataaaaargatgaattcagaaggccataaaaatgaacagaaaataaaacagaaacaaattgtctgaagaaaaatggtgagagaatctagcttctgctaaacaaagattccatggcaggattgcttcacaggaaagagacatgtcagagacaaggtaaggaaatgagaaggccaagacattcagtaatactatttaagatgaagagaagagaagtcaacaaatcatactgtctattatattatagtagattaattatattgttatactaattatctcccaaaaatatttccaaaatacagaaatcaattaataggagtgactttaattcttgttttaaacaagagcagagagagtgaagggaaagagaagcagaaaaggcgtaatttgcaaacattcaggatccacattaatttataagtatggttaaatcacaactgactatcagaa

SEQ ID NO: 154765 - DNA, 504 bp, Homo sapiens
ttgcagcatcaattgactcttcctttcacagaacatttttctatagcaagcaatgctgtttgatagcattttacctacagtggaacttcttccagaattggagtcagtcttctcaaaccctgccaatgctttatcaactaagtttatgtaatatgctgaaatcttygttgtcatttcaacagtgttcacagactcttcaccaggagcagatttcatctcaagaaatgactttctttgctcatccataagaagcaactcatctgttcaagttttaccaggttggagcaattcagtcacatcctcaagctctgcttctaattctaactctcttgccatttctgccacatctgtaattacttcctccactaaaggcttgaccccttaaaagttatccattggggttggaatcaaattcttccaaactcccgttaatgtttatattttgaccttttcccatgaatcacaaatgttcttaatggcatctagaattgtgatcctttccac

SEQ ID NO: 154766 - DNA, 611 bp, Homo sapiens
ttgacttaccaaaattaattaggaactataacacacccatttgagacaaaacaaatagttgtaattgcttcatttcatatttgcccctttatttagcatcttgtaagatgctaaaatatttttgcccgagggaagaatatgacatagatcacaacagtgatgaatgaacacaggcaattgtgactacatgatatagaactacaatggtttctttcatcaataattatttttttaaccagaaaatgtttgtatacactttgctgggaaatggcagaaatatgagtcaggagtattttgattgcaagtaataaaaattacctcaaattgccttaaaaggagataacggaatttgtcgactcatgaaaatgtaacatccagtgttatcaagtctcaggaattgctagacccaggtttcaggccatgagaccaggaatcatcttaccttattcttagctgtgcttctccctggtttatcttattctcaggcaggatctctccagatagtaaaaagggtcacctaggaacaccagatttctgtgttgccagttcwgccgccccagtggaaagaatgtcattccagccaacatcccagggctcactctcattggata

SEQ ID NO: 154767 - DNA, 505 bp, Homo sapiens
tgattaattagaaaatgtaattagtgaaagacattaatagtaacaagcactctatgaaatgcctattaacaaatctacttgagagctttactatagaatgatacaatgtccatgcatgggaagactcaataatttaaagataatattccaaaaattaaaaatattaaatcaaaatcccatcatgctattttacagattttgacaagaactggaagaaaatttttgcaaaagaaagcatgaagggggacttgcctaccaaatttcaaaacaaattataaagcyacaaccaacacagtatgatatggctcaatagtagaacaataaatgaaagaaggaaaatatcttcacaatgtttaaatgggagttttgtttatgatagagatattattttaaatcaatagatgaaacaatagggattcatcaatgtatttctaaaaaattcattatagctgtaacaagataagcacaagtaaattccctgatggattaatatattacatataaa

SEQ ID NO: 154768 - DNA, 505 bp, Homo sapiens
tgattaattagaaaatgtaattagtgaaagacattaatagtaacaagcactctatgaaatgcctattaacaaatctacttgagagctttactatagaatgatacaatgtccatgcatgggaagactcaataatttaaagataatattccaaaaattaaaaatattaaatcaaaatcccatcatgctattttacagattttgacaagaactggaagaaaatttttgcaaaagaaagcatgaagggggacttgcctaccaaatttcaaaacaaattataaagctacaaccaacacagtatgatatggctcaatagtagaacaataaatgaaagaaggaaaatatcttcacaatgtttaaatgggagttttgtttatgatagagatattaytttaaatcaatagatgaaacaatagggattcatcaatgtatttctaaaaaattcattatagctgtaacaagataagcacaagtaaattccctgatggattaatatattacatataaa

SEQ ID NO: 154769 - DNA, 537 bp, Homo sapiens
tacaaatggccaacaaacacataaaaagatgcttaatgccactggattatccatttaaaagggatggaaatggtaaattttgtgttgtacatatattttgtcacaagaaaaaaataatgctcttttttaaattaaaaaaatatatatcacatctaaggagtgaggtcaggcctgtcatacagtaaatgctcagtcattttaastgttgcagttgtaattttttccatgactatatctatacactccatctccatctgaatgacagacactcatgacatttaccaccatgcagtcttctgctccccatgaaaagcagcctcttttcttcccttttcacgtatcagtgcctctgtcgatacctagagtgtcagtttgcctctaagtaccaatactttctcttcccccacctctgctctcgccttgtctttcatgccttgcccagcacccatcgcactgcagatgcttgcagagggtttgttaaacttacagtgaacttctactatcaatggtctgttaatgaaaatgtagcaaaaagaa

SEQ ID NO: 154770 - DNA, 537 bp, Homo sapiens
tacaaatggccaacaaacacataaaaagatgcttaatgccactggattatccatttaaaagggatggaaatggtaaattttgtgttgtacatatattttgtcacaagaaaaaaataatgctcttttttaaattaaaaaaatatatatcacatctaaggagtgaggtcaggcctgtcatacagtaaatgctcagtcattttaactgttgcagttgtaattttttccatgactatatctatacactccatctccatctgaatgacagacactcatgacatttaccaccatgcagtcttctgctccccatgaaaagcagcctcttttcttcccttttcacgtatcagtgcctctgtcgatacctagagtgtcagtttgcctctaagtaccaatactttctcttcccccacctctgctctcgccttgtctttcatgccttgcccagcacccatcgcaytgcagatgcttgcagagggtttgttaaacttacagtgaacttctactatcaatggtctgttaatgaaaatgtagcaaaaagaa

SEQ ID NO: 154771 - DNA, 515 bp, Homo sapiens
aaaacaaggattaatcttagagtttggaggtttscatgttagaatcaggtttcttagtctagctgtttgacagacacttagtggtgagcaatgacttgctatttattcacagtattgccttggccacagtttctttcatacctactattcccatgtaaagaagtaaaataagtaaaataacatccaaaaccactgcatggcacttcaatggattccgttgtatcctgcaaacctttactggatgtcagcctcacccaggccctgagttcacggcactcccagcctggcaggagaagtgcaagggatggacagtcatagagtagggaggtgagagaaagtcacagagcaaatgagctgcactgaggactttggaaacacagaatgcagtcaccagagggcaggaggagcagcgggtaggtgagcagaggagggggcagaattggaaagggtatcttcagcagaagaagctgcagcaggtgaggtctcagatccagaacagcaagtgcttctcctct

SEQ ID NO: 154772 - DNA, 574 bp, Homo sapiens
cttgaaatacttaaatggggacacctttaaattaaaaaaataattggatgtataaaaatgtagcaaaatattgcaaagaattcccccacaccattcaagagactccccaaaggttaactattttaccacatttgcttatcatttaatactatctatacctggagacaactttttaaaaacacttgagagtaagatgaagacacaatgcaatgtccttttacctcttaatacttcggcatgtacttcctaaaaatacattttctatataaccactgtgtagttatcacattcaggaaattaacattgatggcaatagcctaatctactctacaggccttgttcagatttttccagttgtccctcaggtgtccctgtctagtccaggatccaatccaggttcacagagctgcatttagttaaaatttctctttagcgtcctctcatatggaacagttcctgaggtgttgtctttcatgatcttgatacttttcaaaagtataggccagttattttgtagaatgtccttcaatttgaattygcctgatgtttcttcatagattttaatatttatggc

SEQ ID NO: 154773 - DNA, 612 bp, Homo sapiens
tattacatttatcaactcaatattacatatctgagctcaagatacaacacgtattttccaattatgagagaagctgaaattttagggactccaaaatttctttgtaaaaacaacctttaaaccttaaaacatattccatcccccaccaccagatgtgctttcagagatacaaatctatgactttcaagctagggtggactagagtggatttttcggttttagaagcctcacagagaaatttcatggagctaaaaaatgtaaaacaatctgatcactctgttgagtagagaatatttgtggcattaaccaccaggtattttagaagttaaactatgcaaaactcattgactgatttgcagaaaagaatatcaattaatatattgactttattacctcatttaattgaaggcccccaaactctgaggyagataggatcagctccattttacagatgaagaaaataagagactatcaatataaatcctttgtgttgcagagatagtttatttatatacacagtccttattccttactaaggacttaatacagtactttgaagaaaaaaatataaatgacaatagcctgataaatgcctaaataccagcgtgtttg

SEQ ID NO: 154774 - DNA, 570 bp, Homo sapiens
caaaatttctttgtaaaaacaacctttaaaccttaaaacatattccatcccccaccaccagatgtgctttcagagatacaaatctatgactttcaagctagggtggactagagtggatttttcggttttagaagcctcacagagaaatttcatggagctaaaaaatgtaaaacaatctgatcactctgttgagtagagaatatttgtggcattaaccaccaggtattttagaagttaaactatgcaaaactcattgactgatttgcagaaaagaatatcaattaatatattgactttattacctcatttaattgaaggcccccaaactctgaggtagataggatcagctccattttacagatgaagaaaataagagactatcaatataaatcctttgtgttgcagagatagtttatttatatacacagtccttattccttactaaggacttaatacagtactttgaagaaaaaaatataaatgacaatagcctgataaatgcctaaataccagygtgtttgaaccctctctaccaagaagcaggtaattcaggtcaggaaaaagactgag

SEQ ID NO: 154775 - DNA, 416 bp, Homo sapiens
tgaattcttctttcaggtgatacctataaaactcaggctcttcgtgtcatacgatttcaatacatggcctccattgttgctattgaaggagaagaaagattacgaaaaatcacacagttttmtagccagtcctagaactgttgtacatcatttccatccacttccaattggccaggacttaatcacatggcccatcctgaaggagcctggaaaatggagtctccctgtgtgccccagaagaggaaatgggattggtgagcatccagacaaccagtcttcgagtacacagccaggcttgggaattttattattctttgtaaatctggtagcaatagtcacttctttaaaaatttggagggagaactactttgttatatttcaatgggttctctaaaccatataattcttcattcttt

SEQ ID NO: 154776 - DNA, 586 bp, Homo sapiens
atttattaatactttttatttctcctcagttttaatcattttaaactttaggtatcttataatccacctttggtagttctattatctcaaattccttgggggtatgattctgctgtttttattcttttctaagtctctcaaggtggattgtttmcctgtctgttttgtaattttgaatggtgagctcatctttaataggcttcatctggaggaatcatgtgtggcctgggatgatgttttatcacaccagatttgttctccatttgcttctgctgggaaaatgttgacatctgaacatgagatttttcggggcatgaaatctggacactgagctcgtaggaggtacatgtctgtgattacaaattctctggagaggcttattttccactctctacccagacctagatagacaagcttccttgttttctctttgtgcttgtgtatatattattttaatcttaccaattcactgaagggatagcccttaaatgatcctggatttacataagaggttcaggctcaacaccccaccccacctccctccagaatttccaaggccttgtcttctgtctctgtgagtttgaaa

SEQ ID NO: 154777 - DNA, 608 bp, Homo sapiens
caatcattcaatctactataactatagtaaaccgtatgtacacagttttttattttgtttacttacaatagattattcaattatgtttactatacgatataccactttcttccatagtctgagcaaagtcttatagagcttcaagtatcttcttaggcacttttgatcatcaacagttatgcacatcatcctagtgacctgtccttcctcaaaccaaggcttatgaccttgacctctttaayacctcagaaccaatacgtattttttaggcatatgaaataataccagggttctatttgcactcccactctggttaaactcagacatgtccccccgcccccgccataactgactctcttatccttggaaatgaaaaacgtttcacagaaatccacaactagtttttaacagatacttgacacctgaactatagtccacaatgcactaagtgctcataccgacctctgtagcttagaaattctacaatctctttttaatgtctctaattgtactgtttggtatgtaacagggaattattttgagcatgtctcattaacaaaagatttatctcctactaagcatcttcccttcttaggaagtctgcaaag

SEQ ID NO: 154778 - DNA, 525 bp, Homo sapiens
gaattcatttttcctttcctggttacaaattttaggaagtgcttccctcctgactaatcttggtaagcagagagggagttatttaaaaacttaagacttatccttctccagttcacagaaaagcccgaagagatttattttctttcctttctttttcccttcagctcctcctcttttccttcttctccccacccaatacaaagatggtaattgtaatgtattcacatactcacaatccaaatgaagagcaaagtatgaaacccagtctaaggggaaggagcacactgggtgccatgtgctatcacctgtagtcccagttctgcaatgtcctagcagtatrattttgagttgctccttctgacatttgtgacgaaagctatggtttatctatgtcacaagggcgttctaaagactaaatcagaggacagatgaagaagcgcatcttaaattataaagagctacccaagtataatagagtgaataccagatggcagattccatcagtagaaggtccaagagaacgag

SEQ ID NO: 154779 - DNA, 518 bp, Homo sapiens
atctgaacatctgaaggaacaaactctagacacaccatcttttagaackgtaacactcaccactagggttggcagcttcattcttgaagtcagtgagaccaacaacccatcaattccagacgcattttggcaatcacaaaggtactatcgcctatcaccaagcagtgagactatcagcaagtggtaagaccatcgcctattggtgagatcatcacctactgccaagtggtgagtaccatcagacccctttctcttgctattatgtgctatttttccctagaattctggggctaaatattgggcacctttcggccagttaaaagcaactagcgtggctgctggactaaagacacgggtgtcagcctttctgaaaagggctctctaacaacccccgactctttggagttgggagcgttggtttgcctcaaaccagcttccacttttcctgtaattctgggccaagccaagggttgacagagaggaaagccattcggctccagggtcctgacaacaagttg

SEQ ID NO: 154780 - DNA, 519 bp, Homo sapiens
tttacaacactaattcatattgtataaactcctttggtggtacagagagttttataacaagaaacataaaaaaattaagattgtgactctaaattacacagccaggtggaagtaaatattgtcacaagcacacatttacaaagcccactgttaaggtactaagtctaacaaagaaaaacagtacaaagtgggaatcatgacactcacatgtgggtctagccaatggtgcgattatgactcatttttggtcccagctcatagaaataaaaatagktctcattcctgaactcagcctaaatgagagatgttgactatcatacctgggtttagggcaatatataacactgggagtccatatgagcatgtgggcctcagagaagtttgcaactctcatacatgccatatacatccctcggatgttgcagagggttctatataatggcccagcacacacatgacattgtgactcatatacacaccaagcttacacttaaaggtaccatcctcaaagatgagcag

SEQ ID NO: 154781 - DNA, 519 bp, Homo sapiens
tttacaacactaattcatattgtataaactcctttggtggtacagagagttttataacaagaaacataaaaaaattaagattgtgactctaaattacacagccaggtggaagtaaatattgtcacaagcacacatttacaaagcccactgttaaggtactaagtctaacaaagaaaaacagtacaaagtgggaatcatgacactcacatgtgggtctagccaatggtgcgattatgactcatttttggtcccagctcatagaaataaaaataggtctcattcctgaactcagcctaaatgagagatgttgactatcatacctgggtttagggcaatayataacactgggagtccatatgagcatgtgggcctcagagaagtttgcaactctcatacatgccatatacatccctcggatgttgcagagggttctatataatggcccagcacacacatgacattgtgactcatatacacaccaagcttacacttaaaggtaccatcctcaaagatgagcag

SEQ ID NO: 154782 - DNA, 509 bp, Homo sapiens
ggatggtgattcatttttggctccaggtaacaggcataattgtggtctcattcctgagtccagtgtataggaaatctgtattctgtcatgcctgggtttatggctatatataagatcatgagtccatataaacatgtaagcctcagaaagtttagcaactctgatgcatgctgaacaaagttccctgatgttatagagagtgccatacaatgrccagtacatatgtgagactgtggctctcatatacacaactagctaacagttaatattttcgcccttaaaaatgaaaagatgtgtcatatccatttgcttagtacccaggtgttgagactttttggtttaaattcctttctataagcactttgttacatatcactggttcagaatcatgataatgtgattcttctggctggaccttttaatcagggaatatttttagatatctctgggcctattggctacctgatatgtctccctgccagtgtcctgcccacaggggcactatgaca

SEQ ID NO: 154783 - DNA, 574 bp, Homo sapiens
acttgtaaagcaaaagggagcattttgctttctactctgggcagccctcaatgtctgccatcactttctggtttcagtaatggtttttaagctccatcgtggctctggagaaaccttaggcactaggtggtaaacaccttcacttagtcctggagcaacaaagctttctcttgtcaaatatgacctctgtgatcatgagctactaagccatctagacaatrcaccaccagaaaacctatgaaagggagatgagtagacatgagggaaacaatttcccacttttttcagtggcaagttcaaacaactgtgacagtagatcacagagcaaaagaaaacagcatagtagaactcctcatcatgtaagattacaaccaagacttttctatcctcagtgtgagagcaccaaatgaaaaccagaaattacttcactgtgtatctatcagtaattaattgcacaatattttctctatcatactgaaaagtattcactgaggattttctaattgaacatgtagagataaagacaggagaatgtaaaatagcaattccataaaatcattaaagaaattgaagg

SEQ ID NO: 154784 - DNA, 568 bp, Homo sapiens
taatgtccttccatctatttcagttcattcacccttcatatgtaattggtatgattttaaaaataaatacttaagatatgtgtactgctttcaataaaggaatctaaaatgaaatgtattctgatccagagtaaaaaattttatgttttgtrgctgatgctgtctctgctgccaactggctctgtaacctctgccaagtcatttaatatctctgggcatccattttctccagaaaatgaggagactcgactaaattattgctgaggtctattttgatttctgaagtctttcattcatgggagtgctaaaataaggactgctgaaacaatcattattagattggcattaatcatgaaacaatgttaatatgtgtacaaccgtttagtgagtccaggccacttgcctggcacaaagtcagtcattttatataggtgatttctaatcatctaaacaacctcatgagaaagtagaaattcagagagtttttaatttgctgcatgctacctagttggtaactggcatagccagacttctaacccatgtttttgtttctgaagtttctaaatta

SEQ ID NO: 154785 - DNA, 568 bp, Homo sapiens
taatgtccttccatctatttcagttcattcacccttcatatgtaattggtatgattttaaaaataaatacttaagatatgtgtactgctttcaataaaggaatctaaaatgaaatgtattctgatccagagtaaaaaattttatgttttgtggctgatgctgtctctgctgccaactggctctgtaacctctgccaagtcatttaatatctctgggcatccattttctccagaaaatgaggagactcgactaaattattgctgaggtctattttgatttctgaagtctttcattcatgggagtgctaaaataaggactgctgaaacratcattattagattggcattaatcatgaaacaatgttaatatgtgtacaaccgtttagtgagtccaggccacttgcctggcacaaagtcagtcattttatataggtgatttctaatcatctaaacaacctcatgagaaagtagaaattcagagagtttttaatttgctgcatgctacctagttggtaactggcatagccagacttctaacccatgtttttgtttctgaagtttctaaatta

SEQ ID NO: 154786 - DNA, 568 bp, Homo sapiens
taatgtccttccatctatttcagttcattcacccttcatatgtaattggtatgattttaaaaataaatacttaagatatgtgtactgctttcaataaaggaatctaaaatgaaatgtattctgatccagagtaaaaaattttatgttttgtggctgatgctgtctctgctgccaactggctctgtaacctctgccaagtcatttaatatctctgggcatccattttctccagaaaatgaggagactcgactaaattattgctgaggtctattttgatttctgaagtctttcattcatgggagtgctaaaataaggactgctgaaacaatcattattagattggcattaatcatgaaacaatgttaatatgtgtacaaccgtttagtgagtccaggccacttgcctggcacaaagtcagtcattttatataggtgatttctaatcatctaaacaacctcatgagaaagtagaaattcagagagtttktaatttgctgcatgctacctagttggtaactggcatagccagacttctaacccatgtttttgtttctgaagtttctaaatta

SEQ ID NO: 154787 - DNA, 595 bp, Homo sapiens
cgaaatcattttagaagagattgtttcttctattattttcgaattcacattttaccacacagaacagtatgtggccagcttcttttatgaaattatattcttcagtatttctgctgcgccagtgcatctttattccccaaagcacaatattttgttctttatttttctctccttttttagagagcagatgttgctgtgtctttgtgacaaatagcccttcttccgcaaagtaatggttaattaatgtatgatgccctcccacagtccacttgccataacatctgacagggaacygcgatttctgtattgaaatgtaactgtgatgttttcagtattttagtgtttagttggggggggtctttccagaaaaacagagcatttcattatcttggaaataatttttaattcatatatattaaaaagatacataaaatcaatagaaggcaggggaccgataacaactagcatttaaattatgacatgttcaggagtaggagatggaagggggaagcagcaaagggatgggccaaggaatgaagaatctaggattccctgatcaatactataggcacttagaacatcattcctttaagga

SEQ ID NO: 154788 - DNA, 267 bp, Homo sapiens
tatctttgaaagtaggtaccagagatggtggtgtaggcaggatttagacacagacaagtgggattcagctggcactcttcattactttgttttacaaaaagtggaaaatggttctgaatcggkaggctgtttggcaactataaggaagtaagctatattgctggtcttggtgatttaatttttgctgagagagaggatatgatccaggttgagttaatccataaagtggacttgctcaccaagtccactgtaaggagattcgtacca

SEQ ID NO: 154789 - DNA, 556 bp, Homo sapiens
gttaagtgattcttcatggttctccacatttgccctttcctctgcccacttcccatcaaaaccagataccttacagaatgaagaaagggacactgaaatgacagccagtggtgtcatctgagctgcctattagagtataataaggcacatttctatgactatgatttaatatttcttcctctcagcacctccttgcctccctcgtttccttgaaatgtgaggcacaagtagaaagtgtccgagggcacctgaggtcacaggcaggacctgcagaaaagtgaaggtttaagcacagacgggttctgcctgcctggactccctctcacrtgctggttgacacagagacaaaggtggctctacctggggccacataattttcatgtttcatttatactgccttctactagaatgagcttgatgtagcaactggaggccccagttttcattcttgctctgtccctggacacctgtgtaggcatcgagcaaattgtctgcccgtcctggatgtctactccctcatctgcaaaaacttggggtgagccccttccagtggttc

SEQ ID NO: 154790 - DNA, 569 bp, Homo sapiens
agttctgctgggcctaaagcataaatatatcaggaaaagaaacaaaaagaaagagaaaagcaacagaaagtataaaatgtgaggcaaaatgaattaaatagggcaaagaagagtcatttggtattgataaaagtaatgatcaataatgaagtcagggtccagttcatgaacattaatgggccagagaacatagcatcaaaatacattaagcataaattcttagatgtgtgaggagcaattgacagaaactcaattatagtgggaaactagcatactcacctcaatccatttaagatcaagaaggcaaacttaaagcaataagagatacaarctatatcactaatagctgaattagtagatattgaacttatattctatagagaccgtatctttctgtcaagtgtttgggcaacacttgcaaaattgatcacataccaagccacaaataaaaccttattcaaaatcaggcagttccaaaaaaccaattgtaataaaattagaaacaaataatacaagcttattatttacatgaataaatttgttaaagcgattatttacaggttaaaaaa

SEQ ID NO: 154791 - DNA, 569 bp, Homo sapiens
agttctgctgggcctaaagcataaatatatcaggaaaagaaacaaaaagaaagagaaaagcaacagaaagtataaaatgtgaggcaaaatgaattaaatagggcaaagaagagtcatttggtattgataaaagtaatgatcaataatgaagtcagggtccagttcatgaacattaatgggccagagaacatagcatcaaaatacattaagcataaattcttagatgtgtgaggagcaattgacagaaactcaattatagtgggaaactagcatactcacctcaatccatttaagatcaagaaggcaaacttaaagcaataagagatacaagctatatcactaatagctgaattagtagatattgaacttatattctatagagaccgtatctttctgtcaagtgtttgggcaacacttgcaaaattgatcacataccaagccacaaataaaaccttattcaaaatcaggcagttccaaaaaaccaattgtaataaaatyagaaacaaataatacaagcttattatttacatgaataaatttgttaaagcgattatttacaggttaaaaaa

SEQ ID NO: 154792 - DNA, 633 bp, Homo sapiens
tacaggaacagtgaggagaccagggaggaggtgtcacatgcagcctctgcccctgtgtgtcttcatgtcccagaaggccctccccaggacctgaccatgtaagaaactgcccactctggatggatgtcactcgcatgcctcctgcttccacccagggagctggagcccttggcaggatatctatccccagccgcaggacagaacccaccttygggccagtgaccccaaacccaaagccctgctcttcactgttctctgtttgaataaggactctgggaaacgcacccaatgggagacacattggagagaggaacgtttccttgtggggagacggactgtctcgggatatttcatgtagtgacaattgaagttggagcttgacacatgagggtttgttctgttagtcccaaagatgccattgtcagcaaagagtgactctcccagaatcccccaggtagatcccaacccctgctccacctcccgaaagcatggcatccagacccccacccaaagaacccccacccaaagtgatcatgcttgctccagtgcctataagagtactgccttccactggacatctattagaccagatggtttacatgtattatctttaatgtgaacatcagcccctat

SEQ ID NO: 154793 - DNA, 484 bp, Homo sapiens
aggggatgggggtagggacagaaaaacatatttgaagaaaaaatggctaaaacttttctaaattattttttattttattttattgctgttttttttctgagacagaggctcgctgtgtagtgcagtagccctatcccagctcaccrcaaactccacctcccaggttcaagcgattatcctgtctcaatctcatgagtagctggaactacaggtgcatgccaccatacccagctttttttgtgtgtgtatttttagtagagacggggtttcatcatgtgggccaggctggtcttgaaatcttaacctcaagtgatctgcccacctcagcctcccaaagtgctaagatgacgggcaagagccaccatgcccagccaacttttctacagttgaagaaaactataaattcacaaatacaaaaagctcaacaaaccccaaacaggataaaaataaaggaaaaacacaccaaggcacatgataattaaaa

SEQ ID NO: 154794 - DNA, 469 bp, Homo sapiens
acaaacctaaacaggatactattatagtaaagtttacttgttcgtgagctgaaaatcccaaatacgtctgtcttattatgatacttttgctgtaactatgataattataatttcgtacccatataaaatgtgtttcactgcttaacaattaatgctgtcaatcaaaggaatgagttaagtgctggcagaaaatgcccagatgagtttcctgcactggatggagggtartcatttctaaagtgcacctagttacatgttctataaattatctgaatgttacctctcatccctcatttgttaatcccttatataaatttctaatttctaatttgttactcttttttttctttgttttctttatccttcacatacataaatttcttcattggaaaacattacagcaagtgggtcattagtcttatatctggccataagcaccttcttgcataaaacaattttggaaaccaga

SEQ ID NO: 154795 - DNA, 533 bp, Homo sapiens
aaaatgtgtattctgttgttgggtagagtgttctgtgtatctgttaggtccggttgtcttattttgttcattaaatcttctatcttcttatcttctgtttatagttgttctattgagagtgaagtattgaagtatccaactattgtgtagagatattttccccttcaattccatcagtttttactttatatttttacagtcaattactacgtgtaaatgtttaaactgctttgtcttctttctctattactcttgctcaacttttattaataaataatgcctttgtctcttgtaagctttataaatttaaagtttatttcatctgctattactatagctaccccagctttattcttgttaatatttrcatgaaatatatttttacatattttcattttcaacctattggtgttctggatccaaactgagtctcttgtgaacagcatattatgtgaattatggtgtgcgtgtgtgtgtttcttaatgcattttaccaatctgtgtctctgaattggagtggttaatctgtttac

SEQ ID NO: 154796 - DNA, 533 bp, Homo sapiens
aaaatgtgtattctgttgttgggtagagtgttctgtgtatctgttaggtccggttgtcttattttgttcattaaatcttctatcttcttatcttctgtttatagttgttctattgagagtgaagtattgaagtatccaactattgtgtagagatattttccccttcaattccatcagtttttactttatatttttacagtcaattactacgtgtaaatgtttaaactgctttgtcttctttctctattactcttgctcaacttttattaataaataatgcctttgtctcttgtaagctttataaatttaaagtttatttcatctgctattactatagctaccccagctttattcttgttaatatttacatgaaatatatttttacatattttcattttcaacctattggtgttctggatccaaactgagtctcttgtgaacagcatattatgtgaattatggtgtscgtgtgtgtgtttcttaatgcattttaccaatctgtgtctctgaattggagtggttaatctgtttac

SEQ ID NO: 154797 - DNA, 550 bp, Homo sapiens
gcaggctggacacagtagctcattccataatcccagcactttgggaggccaaagtgggtggattgcttgaactcaggagtctgaggcaagcctgggcaacatggccaaagcccatctccacaaaaatacaaaaataagccaggcatggtggcatgtgcctgtagtcttagctatttgggagggtggcgtgggaagattgtttgagcttggctcatcartggttcagtgagctgtcatcacaccactgcactccagcctgagtggcagagccagacattgtgtcaatcatcatcatcatcatcatcatcatcatcatcatcatcttgaagaactcacaaatatgtggaaattaaatatccttcttaatgacacataggacaaaggataaattaaaagaaaaaaaaatcttgagacaaggaaaaatggaaacacaatataccaaaacttatgggatacagcaaaaacaatccttagagggaattttataacaataaacacctacatcaaagaagaagaaagatttcaaacaacctaatgttatacctctagc

SEQ ID NO: 154798 - DNA, 470 bp, Homo sapiens
aatgattcttatgggtaagtgccagatgtggccartgtggctgcatatatacttaattcttgtttactgggagctctctgttccctcagacaatgggctgattcatggaatacacaatgttctgtgctcctaaggtgggggacaagatgggtggggccaggttgggcaggtccacctacagtttccctgctggcaggcgcaagcaccagtgccaagggagaatcaaatgggtagccaccaagcacccagaagtgtgcctaggcttgaagctgggaaacctccttggccccaagctctctgcatagtaggtggggtagcctcaactcctaatccaggagagtgagtgctccagatagctggaaatttgcatgggtgtgaggtgtagaagaccccagtgcagcacgatcgctccacaagaatggtggggtgcctcaggctgctgaaccaggcaagcggatactcctaatgcc

SEQ ID NO: 154799 - DNA, 584 bp, Homo sapiens
aagacaacagaagaggtgatttactgtatacctgtaacacttggccacaactgaacacagaaacagtccagaatatcacagatccaggaaaaaggataaataggaactgttttgatgcgagcaaggtgagactctcagaactttcctctcagaggcggtcttggtgatcagatggctatggaagttctaggtcagttgagagacaatctctagagagtagcatgcagtccaacaacttgtaccagcatccccagcctctggcgtcccatgtttctgttcctgtgaaatgcacctccacgggtgcacaaattgggagtttagttggacctcagtctcatctttcttcttttgcgcttcagcctatacattcgcttcttggctctcacagcggagaggcttccaagaagatggcgctaaaatggagagccttaccattgttgagtgccaaatcatccttgargacttaactcagtttacctcctctttgtttcctacctcctcccaggagaactgactactccatttcttcccttgaattgagactgaatactgcctgtatttctatgtggtctatcccactgccc

SEQ ID NO: 154800 - DNA, 584 bp, Homo sapiens
aagacaacagaagaggtgatttactgtatacctgtaacacttggccacaactgaacacagaaacagtccagaatatcacagatccaggaaaaaggataaataggaactgttttgatgcgagcaaggtgagactctcagaactttcctctcagaggcggtcttggtgatcagatggctatggaagttctaggtcagttgagagacaatctctagagagtagcatgcagtccaacaacttgtaccagcatccccagcctctggcgtcccatgtttctgttcctgtgaaatgcacctccacgggtgcacaaattgggagtttagttggacctcagtctcatctttcttcttttgcgcttcagcctatacattcgcttcttggctctcacagcggagaggcttccaagaagatggcgctaaaatggagagccttaccattgttgagtgccaaatcatccttgaagacttaactcagtttacctcctctttgtttcctmcctcctcccaggagaactgactactccatttcttcccttgaattgagactgaatactgcctgtatttctatgtggtctatcccactgccc

SEQ ID NO: 154801 - DNA, 566 bp, Homo sapiens
gccttcagtgttgtcctcgcggtggacgcactgccagtccgcccagcaggcctcgtttccgggaacaggggcaggcggctagcaaagcttcccccgggrgccaccaggaagcacccggagatttcctgaaaaggagtgcgcctttaaagtgtcggcttcccagacgttgctctggggagagcgaggaaggggagggacacaccttttcaaagggctgggaccctggagggacttttctacaactcgccgccggtgtttacgggaggctggtttctcctgggccggcgtaggtccacacagccccagagaccaccactgtttggggagggcagatgcgccaccgggtccccgacgcgtggatgtgcttgcttggcaggagtggagatggtggcgacacccaggttttctaactgcttttctgaaattcattagtaaatgaggacttgaactatggaagttctgagagcctgccccgggaaggcgcaccccaacctctcttccccctctcagcctctcgccccaccattagtggctgccttgagatctttgtatcaagaccaagccaa

SEQ ID NO: 154802 - DNA, 566 bp, Homo sapiens
gccttcagtgttgtcctcgcggtggacgcactgccagtccgcccagcaggcctcgtttccgggaacaggggcaggcggctagcaaagcttcccccgggggccaccaggaagcacccggagatttcctgaaaaggagtgcgcctttaaagtgtcggcttcccagacgttgctctggggagagcgaggaaggggagggacacaccttttcaaagggctgggaccctggagggacttttctacaactcgccgccggtgtttacgggaggctggtttctcctgggccggcgtaggtccacacagccccagagaccaccaytgtttggggagggcagatgcgccaccgggtccccgacgcgtggatgtgcttgcttggcaggagtggagatggtggcgacacccaggttttctaactgcttttctgaaattcattagtaaatgaggacttgaactatggaagttctgagagcctgccccgggaaggcgcaccccaacctctcttccccctctcagcctctcgccccaccattagtggctgccttgagatctttgtatcaagaccaagccaa

SEQ ID NO: 154803 - DNA, 480 bp, Homo sapiens
tctttctttccttctttttttttgacagagtttttctcttgttgcccagcctggagtgcaatggcactatcttggctcattgcaatcttcgcctcctgggttcaagcaattgtcctgcctcagccttctgagtagctgggattacaggtgcccaccaccatgcctggctaaatttttgtatttttagtagagatggggtttcacatgtttgtcaggctggtcttgaactcctgacctcaggtgatccacctgcctcagcctcccaaaatgctgggattacaggcgtgagccactgcactcrgcctaattatgtttttctttctttttcttttttctttttttagagatggagtcttgctctgtctcccaggctggagtgcagtagcacagtcatagcccactgcagccttgaactactgagctctagtgatactctcaccttggcctcccaagtagctgggactacaggtgcatgccacc

SEQ ID NO: 154804 - DNA, 604 bp, Homo sapiens
tttttctcttctctttctcatttttcccaaaactttttattatggaaaatttaaaacatatacaaaagtaggtagaatagtatgatgaacctccatgaatcattacccaaactgaacaattgtcaattatagctaatctagttttattctcactgactcactccctcaatattgaattgaattttgaagctaatctcaggcatcctgttacttaatttgtaaatacaatcatgcattgctcaacgacagggttatgttctgagaaatgtgtaattaggtgatttcatcattgtgtgaacatcatagagtgcactgacacaaacctagatggcatagyctactacacacctaggctatgtggtacagcctattgctcttaagttccaaacctgcacagccatgttactgtactaaattctagagataactgtaactcaatggtaagtatttgtgtagctacacatatataaacatagacaaatactgtattataatcatgtagggccactatcatataggcagcctgtcagtgacctaaatgtagttattgggtgcatgattgtaaatcagtatgtcaaaacttaaggtatcttttgaaaagtaa

SEQ ID NO: 154805 - DNA, 604 bp, Homo sapiens
tttttctcttctctttctcatttttcccaaaactttttattatggaaaatttaaaacatatacaaaagtaggtagaatagtatgatgaacctccatgaatcattacccaaactgaacaattgtcaattatagctaatctagttttattctcactgactcactccctcaatattgaattgaattttgaagctaatctcaggcatcctgttacttaatttgtaaatacaatcatgcattgctcaacgacagggttatgttctgagaaatgtgtaattaggtgatttcatcattgtgtgaacatcatagagtgcactgacacaaacctagatggcatagcctactacacacctaggctatgtggtacagcctattgctcttaagttccaaacctgcacagccatgttactgtactaaattctagagataactgtaactcaatggtaagtatttgtgtagctacacatatataaacatagacaaatactgtattataaycatgtagggccactatcatataggcagcctgtcagtgacctaaatgtagttattgggtgcatgattgtaaatcagtatgtcaaaacttaaggtatcttttgaaaagtaa

SEQ ID NO: 154806 - DNA, 458 bp, Homo sapiens
gggactctgtgggggtccaacgccacatttcccaactgcactgtcctagtaaargttctccatgaggattctgcacctctagcaaacttttgcctggacatccaggcatttctaaaacgtcctctgaaatctatgtggagattcccaaacctaaaccctttccttctgtgcatctacaggcccaacaccacttggaaactaccaatgcttgggggttgtaccctctgaagcaagggccttagctgtaccttggacccttttagtcatggctggtgttagagtgtctgggatgcagggcaccgtgtcctgagcctttacagagcaatgggtccctgggcccagcccacaaaatcattttatcctcctaggcctctgggcctgtaataagaggggctgctgtgaagatctctgacatgccctacagacatctttcccactgtcttgaaaattaaatctcc

SEQ ID NO: 154807 - DNA, 683 bp, Homo sapiens
atcattctcaagattgtcttggctattcaaggactttttaacccatttatgcctagtattccactattagaatgctaagtatgtgggagttatttatatcctattgctgaatgtcattgccaaggtctgattgcaaaaattcaaaaaattgcaacctcaggcataaatgggttaatttcatacaaattgtaggattgttttttctatttgtgtgaaaaatgccatgagaattttgatagagatygcactgaacctgtagatcactttgggtaaggtggacattttgacaatattaattgttctaatccataaatatggtatatcacttcatttgtttgtttcttgttcaatttatttcatcaatgtcttatacttttcggtgtacaaatctttccactccttggctacatttatttttaaatgttttattatttttgaagatattataaatgcaattattatcttagcctttttttaaaaaatatttgttgttagtgtatagaaatgcaactgattttcatatcctgcattgattttgtatcctgagactttactgaatctgtttattagttctaacagttttctggtagagtctttagggttttctatatatacaatcaggcaagccatgatggctcacatctgtaatgtcagcactttgggaggtggagggaggagaattc

SEQ ID NO: 154808 - DNA, 683 bp, Homo sapiens
atcattctcaagattgtcttggctattcaaggactttttaacccatttatgcctagtattccactattagaatgctaagtatgtgggagttatttatatcctattgctgaatgtcattgccaaggtctgattgcaaaaattcaaaaaattgcaacctcaggcataaatgggttaatttcatacaaattgtaggattgttttttctatttgtgtgaaaaatgccatgagaattttgatagagatcgcactgaacctgtagatcactttgggtaaggtggacattttgacaatattaattgttctaatccataaatatggtatatcacttcatttgtttgtttcttgttcaatttatttcatcaatgtcttatacttttcggtgtacaaatctttccactccttggctacatttatttttaaatgttttattatttttgaagatattataaatgcaattattatcttagcctttttttaaaaaatatttgttgttagtgtatagaaatgcaactgattttcatatcctgcattgattttgtatcctgagactttactgaatctgtttattagttctaacagttttctggtagagtctttagggttttcyatatatacaatcaggcaagccatgatggctcacatctgtaatgtcagcactttgggaggtggagggaggagaattc

SEQ ID NO: 154809 - DNA, 621 bp, Homo sapiens
attttgaagtcacttctgattactagtcatacttagtgacttattgtctaatattaatatgactacacttgccttctttccattactatttgtattgtacagattcttcatcattttgtaacctgtgaaacataatgtttttatttctatgtttatatgtttaagttggttaccaagtatttagattttgcattgttatccacacatacttcttctgttttaaacttgattatttaatccacttatactttatttaattactgatttatctgtatctaccatcttaccatttattttctatttaacttacrtttttattcccgtttctctaatttgtcctttcttttgtatttatattatatgctatttccattctaatttatatttaacatattaattatatgttttaagcattcctttagtaatcaccttgaagcagcactgtcaaatagaaatacaaggtaagccacattggccaggtgtggtggctcacacatataatcccggcactttgagaggctgaggcaggaggatcgtttgagcccaggtgtttgagatcatcctgggcaacatggctaaccccatctctagtgtatgcctgtagtcccagctacttggaag

SEQ ID NO: 154810 - DNA, 621 bp, Homo sapiens
attttgaagtcacttctgattactagtcatacttagtgacttattgtctaatattaatatgactacacttgccttctttccattactatttgtattgtacagattcttcatcattttgtaacctgtgaaacataatgtttttatttctatgtttatatgtttaagttggttaccaagtatttagattttgcattgttatccacacatacttcttctgttttaaacttgattatttaatccacttatactttatttaattactgatttatctgtatctaccatcttaccatttattttctatttaacttacgtttttattcccgtttctctaatttgtcctttcttttgtatttatattatatgctatttccattctaatttatatttaacatattaattatatgttttaagcattcctttagtaatcaccttgaagcagcactgtcaaatagaaatayaaggtaagccacattggccaggtgtggtggctcacacatataatcccggcactttgagaggctgaggcaggaggatcgtttgagcccaggtgtttgagatcatcctgggcaacatggctaaccccatctctagtgtatgcctgtagtcccagctacttggaag

SEQ ID NO: 154811 - DNA, 450 bp, Homo sapiens
tcaggatcagatacatttttaattttttttgtagagacaaagatctcactatattgtccagggtggtcttgaactcctgggctaaactgattctcccacctcggcctcccaaactgttgagattacaggaatgagcaccagggtccaactagaaaagcctttctaattaggattcaaaatccagagggaacaaaagattgctatatttgamtacataaatttttttaagtatttgaatgacaaaataaatataaaataaaataaatataatacaaaagtcaaaagacattgacaaactgggagaaaatctttgcaaaatatatcacaaatagataatatccctaatatagaaagaactcttaaaaactgagagacaaagaaccaagtatctgatggaaaaatgggggaaaggtaggaaaacaactcaaataaaaagtgaaaagtagtcct

SEQ ID NO: 154812 - DNA, 404 bp, Homo sapiens
tgaattcaaaggagaaagagttcaaggtccctggggttgggccctgtggtggaccaagaaaatagatatggtttactagatggagttaaggagatggcatatgtatacatatgtaacaaacctgcacactgtgcacatgtaccctaaaacttaaagtataataaaaaaaaawaaaagtacacagcatgggcaaagacactcaaaaataaagggctggcttttggaggaagtaaaccatcctggtgtgaggaaagacccatggcaatgatgtaaaggaaaattcaactcagattctggaagcctttggatatctatctaaaggatttggaccttattctgatagatgtaggaaaacaactaaatctttaaggaagaatatgcctgcttggttttttgttcataga

SEQ ID NO: 154813 - DNA, 577 bp, Homo sapiens
gcacacattttaatcagaagtcaaatcatgttaattttattttttatttcttcatttttattttttaagttgtaataaaagatgaggttgtaagatgatttcataacactgccttttggtttctcaccattttatttccacttccctctctgaacagtcattaaatgctaatttggaatatatttttctggattattttcagtgcatttacaaatgtgcccatytgcatacgcacagtcttagtttaataaatatgatcctattatatatatatttctttgacttttttcacataacaatatatcatagcagtatctccatggcactatgaatacatttatcacctttgtaacagctacatagtaataaataatctatatctaccatcaattatttaactttacccttattaatgagcatttagtgcacctccatttgtttttttttttttttttgctgcttacaacaatgacaaaatgaatatccttgtatataactttgtgcctaatgtaaatatttctctagcacaaagtttaaatgtaaagttgcttggtcaaaggtcatgtgtgttttacat

SEQ ID NO: 154814 - DNA, 577 bp, Homo sapiens
gcacacattttaatcagaagtcaaatcatgttaattttattttttatttcttcatttttattttttaagttgtaataaaagatgaggttgtaagatgatttcataacactgccttttggtttctcaccattttatttccacttccctctctgaacagtcattaaatgctaatttggaatatatttttctggattattttcagtgcatttacaaatgtgcccatctgcatacgcacagtyttagtttaataaatatgatcctattatatatatatttctttgacttttttcacataacaatatatcatagcagtatctccatggcactatgaatacatttatcacctttgtaacagctacatagtaataaataatctatatctaccatcaattatttaactttacccttattaatgagcatttagtgcacctccatttgtttttttttttttttttgctgcttacaacaatgacaaaatgaatatccttgtatataactttgtgcctaatgtaaatatttctctagcacaaagtttaaatgtaaagttgcttggtcaaaggtcatgtgtgttttacat

SEQ ID NO: 154815 - DNA, 369 bp, Homo sapiens
tattatagtcaatggcattttacaaggaaatatttatagtgagtcaggtccaggaagtagaacactatgtaagtctacatctaattacacctgatagaatgctgtcttaacaaaacatattaatatctgggagtrctatttattacagaaaacaatttaaatgaataagcaatattattttctaaaatcttgagtgttggtgtttaaaacaccaaattttaaactccttaagttcagtaattataatgttgcttgtcttactctgtgttttcttgcagtttcattgattcccatgacttcaactcccactataggtagtaatgattaccaaatcatgactttctggcccagaaatcttttctgagattc

SEQ ID NO: 154816 - DNA, 437 bp, Homo sapiens
tacatctaattacacctgatagaatgctgtcttaacaaaacatattaatatctgggagtgctatttattacagaaaacaatttaaatgaataagcaatattattttctaaaatcttgagtgttggtgtttaaaacaccaaattttaaactccttaagttcagtaattataatgttgcttgtcttactctgtgttttcttgcagtttcattgattcccatgacttcaactcccactataggtagtaatgattaccaaatcatgactttctggcccagaaatcttttctgagattcagagctatatatacaattttctatcatacattttgttcgtccacttacaaatttttaaaaataatctactgcgtcctatagcaaatcaaactttcagctaaaactaacaatgtrttttttaaagaaaacgtccagctctcttt

SEQ ID NO: 154817 - DNA, 408 bp, Homo sapiens
agtctgtcaccttaggataccatatattcatcctgtcttctctatctttattgcctctaccttgtttaaggttctcatcatcactcttatggacaatggtagtcactccctgactggtctacctgatcttttatttatgctgaatgtacttcaaaaamgcatggatttccttatgtccagacagtaatgccactatgattgtgtgccagtcaggctcacctatatataaactcactaaatgtacccaaatgtacccataatatgagggtatattaatagatataattcccaattttcagaagagaaaactgaaggctatgtgatttccatcactagtaagtagaaaatttaggattagaaaccaaatcttttttttaaccccaaatcccttctttttttatgctgcat

SEQ ID NO: 154818 - DNA, 578 bp, Homo sapiens
tgtccagacagtaatgccactatgattgtgtgccagtcaggctcacctatatataaactcactaaatgtacccaaatgtacccataatatgagggtatattaatagatataattcccaattttcagaagagaaaactgaaggctatgtgatttccatcactagtaagtagaaaatttaggattagaaaccaaatcttttttttaaccccaaatcccttctttttttatgctgcatagcttccttgctatgtccctggcaaacatatagaaaaaggaaaaggaagggggaggcaggggagtgaaagacattttctgtagtaatggcagggatttttaaaagggcagtttgagaagtggtgcatgtgcacttaacataattacttagacgtataatttagtaagttacctggaaaagggtgacagaaaaacatatgctggtggcatattccattgcaccagccacattatatgcaactgctcactgctatgactgatgggagaagaaaygacatctctaaatgggcatctctaaatgtattaatagaatgctctttaaatcaggtgctggtatagttggg

SEQ ID NO: 154819 - DNA, 463 bp, Homo sapiens
agacacccacagtctctcaggaggactgacccaagcgaggtaagcattgaaaccacagggtcctggaacccaggacaatagagaatagctttgtgccaaagtaaccctactcacactaagtctattatggaagatggcagtgatgccctcttcacagatagtctgtgatggctatgctstgtgagttgtggagcacctcaaaatatatttcagtaatgtgaggaaagataaataaatatatgaaaaaagaggaaagaaagaaagagagaaaggaaggaaaagagagaagaagggaacaagggaggaatgtagaaaacagagctatatacataaggaaagacataaagacaggcaaagaataaatgaaaggaagaaagatgagaaggagggaacgtattgagagtttattattatactaattatactttacatatatctactgcacattacatacatctaccct

SEQ ID NO: 154820 - DNA, 572 bp, Homo sapiens
cactgggtgtcatactcactaaagggatgtacgctaagttctccagttaaaaagggcacctcaccctgtcctcctggctacattcaggcactaccctccttatggtcatataattactgaccctctctgatgtccaccctaccagtttaccttggatgtgaagcaggtggaataaaatctgtattagagcaatatctgactaaaaagactaagaaaatccaagagagagcattacaagagtgacataatacagacagattggacaccacagtcccactcttgtatgtactgaaatctcagaaaggaggagaggtaagagtggttcttgtaaagaaagtggcaaaactgtgggcccattttgtattctcttattmtccaaaggaagcatccttggtttctgcacaagggccctgttttctctctctccaccctcccaccaaccacttccttggcataaaaatgagacagaacacgactcagttacacccccacttggccagcaccttgaccactttcggaagtttctttctgtcagataagccccagcctccccttctgcaccaaagaaggtg

SEQ ID NO: 154821 - DNA, 502 bp, Homo sapiens
gttattaaaaacaatacaaatcttaatggagagcaaccaagattatcatagttttataatactgattagaacaagtgcaatagccccaggaacaagaagtttaacagagataacaagaaaaatagccagaaagagttctcctgggattgaagtcaatcctcaggagtgagaactctgagcacacgcatgaagctataattactcagaaacagtgaaaataagatgtggggaagacttgaaaactttcccaagctgcacacagattcacaaacaaaagtgtgagcttcatgaacacaatgggcttaagcaaagatgttcatgcttgtatacattataatcaaaatattggaagccacagacaaaaagaaaatattgagagcaccaagagaaaaatgwcgcatcgtgtacaaaaggaaaaccaacaagattaacagcagactactcatcggaaacaatggggccagaaagcagtggaatgacattttcaaagtactgaaaagta

SEQ ID NO: 154822 - DNA, 632 bp, Homo sapiens
tttcttcttttttgatgtcggcatttatctctataaacttctctcttactactactttcattgaatccaccagtttttgtatattgtatctccattattatttctttcaagaaatttttcaatttccttcttaactgcttagtttaccctttggtcattctgtagcatattgtttaatttccatgtgtttgtataggtgcccaaatcttttttattgatttctaattttattccattgtaatcagagaaaatacttgatataatttcaatattttgaatgttttaagacttgttttgtgacttaacatatggtttacctttgagagtgatctacaggctgagcaaaagaaagtctgttctgcagctcttggataaaatgttctgtaaacatctattatgtccatttggtcagattaagtccaatgttactttgctaattttctgtctagatgrtctgtacgaaggtaaaagtgagggtgttgaagcctccagctattattgcattggggtctctctctctttctttagctctattaatatttgctctaggtacctgggagctccagtgttgagtgcatatatgtttaaaattgttatatcttcttgctgaatttactgctttattattatat

SEQ ID NO: 154823 - DNA, 619 bp, Homo sapiens
cactgtgggccttgggctctgagatgtgatggcttcaggagtgacccaacacattcccagctcttgtggctatggtgaaggactcctgttggagaaaagcaaagggaagagtmaagtggactttctcttgcaccttaggtaccagcttaaccatggtgggatagagaaacaagtaagctctcggagtcctgaagtccaggcatagacttttggacaacatttctggacctgccctgggccagatgggagcccactagcctgaagggtgaatcctaggccaggcagcattcaccaaaagctgacagaagagcccttgggctttgagtaaatattggcagtggcctcacagaacccctcattaaccaatggtgatgaaggcaatgggcagaggctcctctgcttgttataaaagaaggggagaactggaaggactatgttgcttgagtgccagcttagctacagtagaatagaacatcaggtaaactgctaaggtttttgactccaatccctggttcccagacagcatctttgcatatgcctgggacctgagggaaaccactgccctgaaaaggagggccctatgcaatgagtagaaagtttattcaaagggataatatta

SEQ ID NO: 154824 - DNA, 619 bp, Homo sapiens
cactgtgggccttgggctctgagatgtgatggcttcaggagtgacccaacacattcccagctcttgtggctatggtgaaggactcctgttggagaaaagcaaagggaagagtaaagtggactttctcttgcaccttaggtaccagcttaaccatggtgggatagagaaacaagtaagctctcggagtcctgaagtccaggcatagacttttggacaacatttctggacctgccctgggccagatgggagcccactagcctgaagggtgaatcctaggccaggcagcattcaccaaaagctgacagaagagcccttgggctttgagtaaatattggcagtggcctcacagaacccctcattaaccaatggtgatgawggcaatgggcagaggctcctctgcttgttataaaagaaggggagaactggaaggactatgttgcttgagtgccagcttagctacagtagaatagaacatcaggtaaactgctaaggtttttgactccaatccctggttcccagacagcatctttgcatatgcctgggacctgagggaaaccactgccctgaaaaggagggccctatgcaatgagtagaaagtttattcaaagggataatatta

SEQ ID NO: 154825 - DNA, 619 bp, Homo sapiens
cactgtgggccttgggctctgagatgtgatggcttcaggagtgacccaacacattcccagctcttgtggctatggtgaaggactcctgttggagaaaagcaaagggaagagtaaagtggactttctcttgcaccttaggtaccagcttaaccatggtgggatagagaaacaagtaagctctcggagtcctgaagtccaggcatagacttttggacaacatttctggacctgccctgggccagatgggagcccactagcctgaagggtgaatcctaggccaggcagcattcaccaaaagctgacagaagagcccttgggctttgagtaaatattggcagtggcctcacagaacccctcattaaccaatggtgatgaaggcaatgggcagaggctcctctgcttgttataaaagaaggggagaactggaaggactrtgttgcttgagtgccagcttagctacagtagaatagaacatcaggtaaactgctaaggtttttgactccaatccctggttcccagacagcatctttgcatatgcctgggacctgagggaaaccactgccctgaaaaggagggccctatgcaatgagtagaaagtttattcaaagggataatatta

SEQ ID NO: 154826 - DNA, 561 bp, Homo sapiens
agttagtctcctcccaagaactgccttaactgggtatactcctatttaggtgagctacagaatgcatttataaacaggctatctatgaaattcacatataaatcaattattaycctgttctgaagcttcactaatttagcaataaccaaatcaggaaagtcaaagtcatgctaataaatgatcaaaaatttctttggttaatgcaagcccttacaaagtgtaaaaggaagagaggaaataatttatctgattcagactcagcaacattaagatgagagttctgaatggagagggctggtcagaacaaaggtccactttaggtaaatcaagagaacccatgacctggagagcagcaacacactgctggtaagaagaaaggcatttcccatggaagaagcagctactaggcctggctaaccttattagattttgaatttcatgaaccctaaagttgctcccaaatcggttaaatgcatacataaataataagaaactggaaatgttgggccttggtaggataatcaatagttctcagatctggaggcaatgtttttagcaacc

SEQ ID NO: 154827 - DNA, 561 bp, Homo sapiens
agttagtctcctcccaagaactgccttaactgggtatactcctatttaggtgagctacagaatgcatttataaacaggctatctatgaaattcacatataaatcaattattatcctgttctgaagcttcactaatttagcaataaccaaatcaggaaagtcaaagtcatgctaataaatgatcaaaaatttctttggttaatgcaagcccttacaaagtgtaaaaggaagagaggaaataatttatctgattcagactcagcaacattaagatgagagttctgaatgsagagggctggtcagaacaaaggtccactttaggtaaatcaagagaacccatgacctggagagcagcaacacactgctggtaagaagaaaggcatttcccatggaagaagcagctactaggcctggctaaccttattagattttgaatttcatgaaccctaaagttgctcccaaatcggttaaatgcatacataaataataagaaactggaaatgttgggccttggtaggataatcaatagttctcagatctggaggcaatgtttttagcaacc

SEQ ID NO: 154828 - DNA, 378 bp, Homo sapiens
aaaccatcagacttcgtgagacttattcactatcacaagtacagtatgggagaaactacccctatgattcaaattatctcccactgagtttctcccacaacatgtgggagttatgagagtacaagtaaagatgagatttgggtggggacacagtcaaaccatatcatcctgctataatgctattaaggatggaaaagcaacccagtagcctatctgyctaatctcaggtagcaacaacaacaaataatctgccctaatcaaagccatcatttgagagacaaaagatggacacttttaaatgtattatgattataaaggaagcaaatgggtaataagtattttatatttctagatttctattggttgatataattttta

SEQ ID NO: 154829 - DNA, 446 bp, Homo sapiens
ttgactcctagcagtatgactacatttgtagcacaacagaaagtgacttcctccatgtggcctctggcacaggtgcttttcctcacagggtaggtaggagagtgagggagagtcattttatgtcataggcctgcygagagaactggttcaatacacttgattttatctagtttatgtcttattagacaagtctcagaagggaaaaatgagtccttttgatacctttaatcaccatcgcagttcctcttacctcaagaaagctttcccgaggagggggaggtttttccaagtgtctgagggataaacctcatggttgctggcttcagaacagtgtttttttttgctttgtatttgtgacagactttttctttccccttctgtgaatgttaactagaacacaacagatttcttttgggtatggttgaaaacattctgattttcatttt

SEQ ID NO: 154830 - DNA, 631 bp, Homo sapiens
ccaaatggatttcttattataccacagggactaattgacatcatgtgcctcctaataagacacactgagcaggacacaccatccttctgtggtatttctgctcaaaatgcgtaactcagatctgacaatgaggaaacatcagacaaagctaaagttgaggggcattgtagaccaccttcacttctcagtgatgtctcctctggccactccacataaaatcgagtcccctccatgacattccctattcttctctgctgtatttcttcctgtaacacctatcactgctaacacagtaaagtttttattgatcttatttatagtcaatatgtcctcattagaatatgaatgatcacagtgattggtttagtgatagccatgtgacccagtcagggtcaataagaaaaaatgagatttttctggaatactgagagacaarcatatcctctttttctgttggtcttgaacctgtgaagatataagcctggctttgctggatatcccaatgcagcttgagaatgaagtgcagacagcaccagagccaaaaggtggagaggaccaactactgaaggcacatttgagctcctgggtcaagataggcctaaagccagacctacacaaatgtattgtgtga

SEQ ID NO: 154831 - DNA, 617 bp, Homo sapiens
atccccttgagtatttatcatttctatgtgttgggaacatttcaggtcctcccttctagctattatgaaatatatgatactctgttgttaatcatagtcaccctactctgctattaaacactagaacttattccttttatctacctgtwtgtttgtcccattagccatcccttcacacctttcccagcctctgatatctatcattctactctctacctccattagatcaacttttttagctccgacatatgagtgagaagatgccatatttgtctttctgtacttacactaactttagttttaggaagataatatattatccagacatctcaggtttctggccactgcctcttagcaagactctatctccttccctttccgcttttagtttggacagtctgtactgaaatagcaactcactctaacatcatgatatttttttcttctaagttgagtaccaaggtggaacatgacagtttcaccatcgctttcactatcccataaaaagattaccaacttcaatgtgggaaaggggaatccttattgtacctcagtctacttaaattctgtcacttccatgtaggtctgtcactcataacatcctattcctagtactg

SEQ ID NO: 154832 - DNA, 617 bp, Homo sapiens
atccccttgagtatttatcatttctatgtgttgggaacatttcaggtcctcccttctagctattatgaaatatatgatactctgttgttaatcatagtcaccctactctgctattaaacactagaacttattccttttatctacctgtatgtttgtcccattagccatcccttcacacctttcccagcctctgatatctatcattctactctctacctccattagatcaacttttttagctccgacatatgagtgagaagatgccatatttgtctttctgtacttacrctaactttagttttaggaagataatatattatccagacatctcaggtttctggccactgcctcttagcaagactctatctccttccctttccgcttttagtttggacagtctgtactgaaatagcaactcactctaacatcatgatatttttttcttctaagttgagtaccaaggtggaacatgacagtttcaccatcgctttcactatcccataaaaagattaccaacttcaatgtgggaaaggggaatccttattgtacctcagtctacttaaattctgtcacttccatgtaggtctgtcactcataacatcctattcctagtactg

SEQ ID NO: 154833 - DNA, 586 bp, Homo sapiens
attggccttaggttgctatcaaggagagggcttttgcttcaatttactctcagaaatgttgttcctgggcagatgtttcctcagtcatgttgtacatcacttttcagttcaagtgcccactacacctttctgttctctgtgtcttctggaataaattattgattgagaaacatgtataaattcctggccagttaaagcttggtgctccttgggctggacgtccaatcctgaatcagacggaggagtgggtggccaatgacatgcagtmttaacatagcccccttacccacccctcaatagtaatatgggtttgaacgagtttttacagaaataaatatagtgtcagcctcacccaaacatcttttctgttatagaaacctttacttaacttcaacagatgtcaagaaagtaatatgtatcttttacaataattattataaaggtaaaaatcttagcctgtcctatgttataaaggtgtttttcttttacaactgtgaatcaggaaacacatcttcaggtgtgtacaagatctgggagatctcagatttggctaggctaccggggaggaagttctccatggttgaca

SEQ ID NO: 154834 - DNA, 536 bp, Homo sapiens
gatttccagtctctcaaaagtttagatctgccagcctcagtccacatgctaatactgggctgcagccagtggtggctgctctgtggtaggctggaactggctctctctggcctttgagagagatttgtgctcagcagttctatgttcagcagctttacattggtaggttgagaacactgaagtcggccatgatgagrgtatttataccacgaaaagctataagtcagattttttttctctcagtaagccagttaaacatttactagcacaccaccatcgtcacccctttggatgacatgttgagtgttcattcctcatacctataactcaccgtcatctccctacaatgaggctgagttgcccaccttgtccctttggtttatattctgggtttaggatcctcttgcaccacttctttgtatttaagggggcctctgtgaagaaaaatactccacctcaggcctttgttaggaaggagaggcttatcaaggaaaaggctctgaagtggagaaagggagggtggtctttctgcctgg

SEQ ID NO: 154835 - DNA, 536 bp, Homo sapiens
gatttccagtctctcaaaagtttagatctgccagcctcagtccacatgctaatactgggctgcagccagtggtggctgctctgtggtaggctggaactggctctctctggcctttgagagagatttgtgctcagcagttctatgttcagcagctttacattggtaggttgagaacactgaagtcggccatgatgagagtatttataccacgaaaagctataagtcagattttttttctctcagtaagccagttaaacatttactagcacaccaccatcgtcacccctttggatgacatgttgagtgttcattcctcatacctataactcaccrtcatctccctacaatgaggctgagttgcccaccttgtccctttggtttatattctgggtttaggatcctcttgcaccacttctttgtatttaagggggcctctgtgaagaaaaatactccacctcaggcctttgttaggaaggagaggcttatcaaggaaaaggctctgaagtggagaaagggagggtggtctttctgcctgg

SEQ ID NO: 154836 - DNA, 605 bp, Homo sapiens
gattgggtaatttatgaagaaaagaggtttttcaggctgtgtgagaagtgtggtgccatatctgtttctggtcaagagctcaggaaacttttaatcatggcagcaggggaagggggagcaggcatgtcacatgacaagagagggaggaagatggtggaaggaaggtgctattctctttaaaaaaatcagctctcatgagctctcatgtgacctaatagagtgagactcactcagtatgacagagagggcagtgagccatttatgagggatctgcccccatgactcaaayatctgctactagttcccacctccagcattaggggttacattttaacatgagatttggtggggacatatatcaaaactatttcagtcaaagacaaagaagattctgaaagcagcaagagaaaagaaacaaataacatataaaggaattctaatacatatggcagcaaacttcttagcatacaccttgcagactacaagagagtgggatgatatgctcagaatgctgaaggaaaaaacctgtcaaacaaggatatcatacccagcaaaactgtttttcagaacagaaaaacaaaagcttaggaaatttgtcaccatca

SEQ ID NO: 154837 - DNA, 605 bp, Homo sapiens
agtgttctattgcacattagagtgatgatgcttaacagtaagatatggaatgttgcaaaatagctagaagagaggcttttgaatgttatcaccacaaagaaatgctaagtgcacaaggtgatggtcatgctaaatactctgatttgatcattatacaacacatacatgtatcaaaacatcaaattttaccccataaaaatatacaattacaatgtgtcaattaaaaaaaataagactgcaacataactcttatctaaattttcagcctgtcaggcctaccgtatggattttagacttgccagcccccacaattatataagtcaatgtgtgtgaagaggcctggctgcccttctggaaagaccatggagagagagtgagagtgagagtgggcaagagagatgacaagacagagaaggaggaagagaaggaggaggagaaggagaaggaaaaggaaaaggaaaagagatatttatacaggccctagctgttccagccatcctagttgaggggccagacatgtgagtgaagccctttttggtttctaatctcagtcaagctaccaagtgattgcaactgcataggtgamcccaggagatatcagcaga

SEQ ID NO: 154838 - DNA, 558 bp, Homo sapiens
gaattccagtggcctgtggcgagagtgagttgctccttaccagttcaactcacttgttcccccagagtcactgggggccagggatgagtccccatgcatgatagccctgtgcaggattcccagtgtcctcccacttcagcccagcttcagcgtcttccctctgtccactcttagtgccttctttcagaagatctttaggagtacaccagtcttcttgrttcctcattgccagctgttccacctggctgtgtctagtcaaccatcttactctctctctgaaaacttaattttaatcaaagctaaatcaaagattttagggactcacactaacttattttgagaagccaagacacacttcctctcctgtgagttggggataattgtctgcaccctccgtcctttgagaggagtttgtgatgatacaatatgaaggaactttgcaaatcatgatgcatgaacttgagccatggctatctccctgccctggttatctcttttctttatgctgggggtgagggaaataccctgggcaaaaataaaggccctcactgggaaagg

SEQ ID NO: 154839 - DNA, 535 bp, Homo sapiens
ccagcttcagcgtcttccctctgtccactcttagtgccttctttcagaagatctttaggagtacaccagtcttcttgattcctcattgccagctgttccacctggctgtgtctagtcaaccatcttactctctctctgaaaacttaattttaatcaaagctaaatcaaagattttagggactcacactaacttattttgagaagccaagacacacttcctctcctgtgagttggggataattgtctgcaccctccgtcctttgagaggagtttgtgatgatacaatatgaaggaactttgcaaatcatgatgcatgaacttgagccatggctatctccctgccctggttatctcttttctttatgctgggggtgagggaaataccctgggcaaaaataaaggccctcactgggaaaggtgaaacagttctawgagcagtaagaattccagggagccatcctcttgactagcagtggaaagccactaagcaaccctcagtgaattcctgtcccctgacccagattcttctctcccc

SEQ ID NO: 154840 - DNA, 554 bp, Homo sapiens
ttgtacagtgaaaagagatacagcctgatcttttttttccttcatgtcatattttctggacaagaaaggatgagagctaaaagaacaatttgtaaaccatctaggcaatgggagctacatgcaaggagcaggctattgagaaaagcagtgacagcaggaaagcaaaggtcttccctgtgccagggcacacaagcaggactctcaagcctcctggaaacagagccccttggagagttggagccagcaaggcagggcagaagaatgagcctgaacacgaagctaagctagcacgtggcaagaacttggtgctttaactgcttagacaacaaacatatagccctctaccagacctacaggatgtgatcccctttccccttcttcactctcccacagaactatccctctttgtctcttctttaaggccatggttctcaaatkgtgtcactatttgccactaggcactattagttatcagagaagtggaaagtattttgtagttagtattaaaatacctaagcattaaaatatatattttcttaactcaaaagagacca

SEQ ID NO: 154841 - DNA, 630 bp, Homo sapiens
gtgatcccctttccccttcttcactctcccacagaactatccctctttgtctcttctttaaggccatggttctcaaatggtgtcactatttgccactaggcactattagttatcagagaagtggaaagtattttgtagttagtattaaaatacctaagcattaaaatatatattttcttaactcaaaagagaccagggttatttccacaataacatcattttcactcccctgctctattaatcaggtattgttggttggaaaagacaaaaatttcactcacactagcttaagccaaaaagaggatttatttgaaggttattgaatagtccagttaccattactgtgtaacatattatccccaaacctggtaggttaaagcgaccactttatcaaccattttatcatgcctatgaattatatgggttgggaatttgcataggacacaatgggaatggctctgctccatgatgtctggggtctcatctgagargattcaatggctgacggtgactcactggttgggggctggaatcatctaaagatttattcactcacatgcctgggtggctgatgttaactgacctcagctggggctgtcaaccggagcatctacacatggcctctacata

SEQ ID NO: 154842 - DNA, 486 bp, Homo sapiens
cagacagtgaatgtgtctaagattaaataaaaatayatcagtgtatactgaaatatttagtatatttgtttatatcttacttaagtggtattttcttcattaataaatatgttaagtgcacaagtttgattaaaatacttatttaagttcacttttagtagcaaacactagcaacttagtagtgactcggcacggttcccgattttattaaggtaatcagccaccactttatgtccaattgaaaggagataaattctctctggagaaagataatgtcaacatacattcatcaaaatattgtaacatattaggaagaattaaaaagaaattaatgctagaattaaaaatgtaatatctcaaaattcagaacacactggatgaattcacaaaggtgaactcaaagagcaatagaaaatatgactaaagttcaaagagaaaaaaaacacagccttaggaaacagaaatataagtcaatagaaaatccaa

SEQ ID NO: 154843 - DNA, 486 bp, Homo sapiens
cagacagtgaatgtgtctaagattaaataaaaatatatcagtgtatactgaaatatttagtatatttgtttatatcttacttaagtggtattttcttcattaataaataygttaagtgcacaagtttgattaaaatacttatttaagttcacttttagtagcaaacactagcaacttagtagtgactcggcacggttcccgattttattaaggtaatcagccaccactttatgtccaattgaaaggagataaattctctctggagaaagataatgtcaacatacattcatcaaaatattgtaacatattaggaagaattaaaaagaaattaatgctagaattaaaaatgtaatatctcaaaattcagaacacactggatgaattcacaaaggtgaactcaaagagcaatagaaaatatgactaaagttcaaagagaaaaaaaacacagccttaggaaacagaaatataagtcaatagaaaatccaa

SEQ ID NO: 154844 - DNA, 545 bp, Homo sapiens
gaattcacaaaggtgaactcaaagagcaatagaaaatatgactaaagttcaaagagaaaaaaaacacagccttaggaaacagaaatataagtcaatagaaaatccaaactgaagtacataaagaaaaaagaagatagaaaaacacagaaaagattrttaaagaaatgtgggaaatggtgagaatgctcccacatacatggagttggagagcaaaaaagaggatgagacagaagcaatatgggaaaagataacagtcaaaattttttcaaagtgatgaaagacaaacccacaaattctacatgcactactaatacttaaaagaaacaaagtcaaaggaaagtacacttagacacatcattgtaagactcttggcaggagagtgagagacagagagaaattaagatattaagaatggctagaaggtaaagatacattactttcaaagaataaacaataagatgggtatttgattttgccaccgaaatgacagaagtttgaggataatggaatgattttcaattatgccaggaaaaaaaagcaaataa

SEQ ID NO: 154845 - DNA, 496 bp, Homo sapiens
agaaataaagactttaacagataaacaaaagctgagagatttcatcaacatcacacctatcctgtaagaaacgctgaagagagtacttcaatcagaaagaaaagaacattaatgagcaataaataatcacctgaaggtacaaaactcactattaatagcaagctcaaagaaaaacacagaatattatgacactgtaattgtggtgtgtaaactacttttatccaaagtagaaagattaaacaatgaaccaatgaaaaataataactacaacttttcaaggcayagtagtacagtaagatataaacagaaacaacaaaaagttttaaagttggcagatgaagttaaggcgtagagtttttattagttttgggggataaagttaaggcatagagtttttaggtattttctctttgcttatttgtttgtttgtttatgcaaatagtgttaagttgttatcaggttaaaataatgggttataagataggatttgcaaacc

SEQ ID NO: 154846 - DNA, 550 bp, Homo sapiens
ataactaatactcatcctctccctcctacactatgcattctaaaatccccttatcctcaactattgccttggcaagcttggtggcttacatgatagtatgacacaaatcatcattctaaagaaatctgaatcactggtagtcattcccttgtcaagctagagttgcttcacmtgtccactcacagttacaattggacaagggagtaccaatcaggaagcacctaagtaagtcgccttggttccacaagcattcctccttgtcccagttttgtaaaggcagtcttcctgccaatcagggtcaattacttctgccaatggacttcttttcctgcctgctggtccctgggtacatggagtccaaagtgccctagctacagcataatttgtttaatgggatacttaccctctctcctgacaagagggcactttcatttggaaaaaaggcctccaatcctgcagtgcccatagtttcagggatggaaagcacaaaattcccagtgggttgttgagagtggtgctaagtgggactactcctgcttttgagtcttgt

SEQ ID NO: 154847 - DNA, 547 bp, Homo sapiens
ttcctctctaaagtagtaactctaacccttacagaaccaaccagcacttttttaaaaaaataacgattattttatttattatttattattatttaaaacaattttttttttttttgagcagagtttcactcttgttacmcaggctggagtgcaatgctgcgatcttggctcactgcaacctctgcctcccaggttccagtgattctcctgcctcagcctcccgagtaactggaattacaggtgccctaccaccatgcccggccaggctggttttgaacccctgacctcaggtgatccacccgtctcagcctcacaaagtgctagggtcacaggcgtgagccaccacgcccagcctatttattattttttagaaacagagtcttgctctgtcacccatgctggaatgcagtggcgtgatcatagctcatcagagccttgaaatcctgggctcaagtaatcctcccacctcagcctcccaagtggctgggactacaggcataccccactatgcccagctgattattattttttattttttgtacagaca

SEQ ID NO: 154848 - DNA, 470 bp, Homo sapiens
aacaggcaactatttttagacaagctcattttctttagtggctgtggaatgctgattatcctgcaggggaaggtttacaaagaggtacagtcaactgaagaggcctaaagttactgtcattacagcaaaaagaaaaatttaatacatttaattgtactctgagccctagaccttcttgcattttatttgcaaatgcaattatatcaggctcataacactttcaggtgtgattttaaaaygcaaggcctacagacaaatttggcttagtttatctctatttacaggggccaatacttctcacaagctgattctcgagtacaaaaatcaaatgcatctctaattctgtgaaggcattttggttttcccaagttctttaatgcttaatctcagattgaattcaccatagatcaaaaaagcaatttgaaacgagaaaaaagttaaaaatatgagttctttaaaaaataatgctt

SEQ ID NO: 154849 - DNA, 585 bp, Homo sapiens
aaagttacttgcagttccatcacagtcttcttccactaatggagatacaatgagaggcttacatgtttactgttgttttctttaggaacagagaatcagaggtggagatttggtgaaaaaatagatgaccacagtaagggaaattatggcatagtaaaaagtgaaagaaaaagacaagctcytcagtgacttcctcatttttgctgcattcctttttctctacacaatacaaaaggcaaccaagagcaataaaaaagggataggaaacttgtactgagggcaactgctgggtcgaacattaaagtgaaatataaaagcaatttatgtggttctttactcatccatttaaaaaattaacagaatgagtgatcaaattatttaatagatataatttaaaatgtgataaattttagaacacagttaaggaaacaaagagaaaaacaaaagggaggagggagtgataaaggagagagacatttttttttcttgctatccagagagtcatgccttaatcttgaagcatttaggatgccgctataaaaaactgatctgaaatttcaaagctgtcgagatgcccaggcacag

SEQ ID NO: 154850 - DNA, 585 bp, Homo sapiens
aaagttacttgcagttccatcacagtcttcttccactaatggagatacaatgagaggcttacatgtttactgttgttttctttaggaacagagaatcagaggtggagatttggtgaaaaaatagatgaccacagtaagggaaattatggcatagtaaaaagtgaaagaaaaagacaagctcctcagtgacttcctcatttttgctgcattcctttttctctacacaatacaaaaggcaaccaagagcaataaaaaagggataggaaacttgtactgagggcaactgctgggtcgaacattaaagtgaaatataaaagcaatttatgtggttctttactcatccatttaaaaaattaacagaatgagtgatcaaattatttaatagatataatttaaaatgtgataaattttagaacacagttaaggaaacaaagagaaaaacaaaagggaggagggagtgataaaggagagagacatttttttttcttgctatccagagagtcatgccttaatcttgaagcatttaggatgccrctataaaaaactgatctgaaatttcaaagctgtcgagatgcccaggcacag

SEQ ID NO: 154851 - DNA, 441 bp, Homo sapiens
gaaaaaacaaagtcttagattcaatggaatagaataacaatcttttataggttctgcctttggtgcaatgtatgtgtgtgtgtgtgtgtgtgtgtgtacaaatatttgtaggtatgtaaattggtctcattttttgtacttaaaagatattattgcaaacatgactgggtatgggaatgttctctccagctaagaaaactctaggaagaatgtagttgcatagagcttagaagccctggcatttgcttcargcattgctatgggatgctttagtcttggcttgtccgttgttgctagaatcacgtgctgccctcactgctgctcttgtccagctgccactgttactcaatccctcctgatagatatctctgtggtagcaacaattcaaaatttgccctgaggacaaggttagtatttcttgccagcacctgccactttccc

SEQ ID NO: 154852 - DNA, 585 bp, Homo sapiens
tcacaaccagcctccagatgtcaaaatatgaaggtgaatgtgaatgaaattgtttktctatcagagctccctaaatgaaatagaccaagattatcctgtacccctgatgccccaataaattggtcagtcgtcccaaagtaaaagcttgaccccatgagtttctaaatcatttccaacgtgtattgtagtttaaaacaaaaaattatgctatacttgaaggccattttagctgagttataaaatttgcttctataaatcttgccagagtaaaatgggccttggataatcatcaaaacaaatacagatggtccctgacttatgatggttcaacttataatttttctactttgtggtggtacaaaagcaataccatttagtagaaaccaagcttcaaattttgaattttgattttttcctagactagggatatgtggtatgatacttttacatgagatagtcaacacttttttataaaatagggtttgtgttagatgatcttgctcaactaggctaatgtaagtgttctgagcacatttaaggtaggctaggctagactatgttgttcagtaggttaggtatattaaa

SEQ ID NO: 154853 - DNA, 568 bp, Homo sapiens
atttattttttacttagtccagaactagaatgatagcaactttagggactgctctcatgaagcatttgaaggaggagaaggccttgcatatgatagttgcttagtaatatctcttaaagtgagatttagggaaaatgcattttttagcgttatcaatttcttccttataattttactttgaattacttatttaaagtttaaataatagtgtatgggaaaaaaatctttatttttaaacgccttctagtatgtattcttttatgggctggaatttgaatggttgaaaacagtagcattttagaggattaaaatttataaattaatttatctaaacatcttttttgaaaaccttcatttaaaaaatctattttccatttatatttttcatttctctctaggtgatcatatttaagtattgtaagttaaggacctgggcaaataattcctcaaaaattatattaatttatttttaaaaggaagtttattcacttactcacggcaaaccaactttraagataaaaatgtgttgccttaaagactgaagacatgttcaagatggcaaaaagag

SEQ ID NO: 154854 - DNA, 512 bp, Homo sapiens
gttttaacatacatatgagctgtayttatgtatgacacctattttactttttcatttttgttgttattgtcaaaacaaggccagtgtttttctacatcgactgaatttctggacccacttcccattcaaactgtttttttgaaaaacagtcttattaattttctgtatattttgttttctttccaacatttttagattcaaccatcagacacaaatttctttttatatctgctttgttagttgtggacatgcctttctaccgtgtcccttgatacatacacccattaagatgtttatctagctcgactaacactgagtgctggaatctgcaaagttacagaattgagaggatttagatcacatatcatttactctgaaaagaaagaaagggcacagattctggaaacagacaagtttgaacccagccctgctacctataaactgacttgtgggaccttagataaggtacatatctttaaaaaggtggatagtaatacacaccttgttagatt

SEQ ID NO: 154855 - DNA, 500 bp, Homo sapiens
caactaaaagtcattgtaataaagtatattacttaaaattaagagaaaaatcataggaccacccaagttttcattttggggtagggaggagcttcctctactgaatacactctaattggaaaataggaaaataaaaatgctttctggttagaccccttgaatcttgtttttttcaattcactggttactagatgagttgaaactctttcagtcagcaaatcatagaaacctgacaagctaccttaagcaaagcaaaacaaaacaaaaaactgctgtaaacataggagttaggtttgcctcaaagaaaactaaatyagaaacttagaccccatctgccttgcatctctgccttagatctgcttgtcttcatcgatttgtgctgctataacaatatacgacagagtgagcattttataaatcaaatttattatctcatagttctggaaactgggaggcccaacatcgaggtattcgcaggttcagtctccggcgaaggcctg

SEQ ID NO: 154856 - DNA, 528 bp, Homo sapiens
tgtggccatcttataatgcaggccttctagtaactataccttcttagctgccaggggaacctggttatgctaaatttcacactacaattggatcatgttatagtcagtttctagtatatgaagacagtcaaggagatgagtaaaataactttacagtattagcattttgaaataaagcttccctcatcaccaccctyctactgctaaaagggattgtccgaaacaaatactctcagatctttaatatgtgtgtgtgtgtgtgtgtgtgtgtgtgagtgtgtgtgtgtgtgtgtgtgtgagagagagagagagagagagagagagagaaactaaatgcataagtgcagttgctgggtttcagctgcctcaaagaaatataccgtctatccttggtagatgggagaccatacaccgcactcctaaaaatcaagtccttcttatgtgcaggaaaagtaaacaggctttggtggtcttcaggttttatccatttagaaattccacatgggtcattaaaccccattgtgaaag

SEQ ID NO: 154857 - DNA, 528 bp, Homo sapiens
tgtggccatcttataatgcaggccttctagtaactataccttcttagctgccaggggaacctggttatgctaaatttcacactacaattggatcatgttatagtcagtttctagtatatgaagacagtcaaggagatgagtaaaataactttacagtattagcattttgaaataaagcttccctcatcaccaccctcctactgctaaaagggattgtccgaaacaaatactctcagatctttaatatgtgtgtgtgtgtgtgtgtgtgtgtgtgwgtgtgtgtgtgtgtgtgtgtgtgagagagagagagagagagagagagagagaaactaaatgcataagtgcagttgctgggtttcagctgcctcaaagaaatataccgtctatccttggtagatgggagaccatacaccgcactcctaaaaatcaagtccttcttatgtgcaggaaaagtaaacaggctttggtggtcttcaggttttatccatttagaaattccacatgggtcattaaaccccattgtgaaag

SEQ ID NO: 154858 - DNA, 528 bp, Homo sapiens
tgtggccatcttataatgcaggccttctagtaactataccttcttagctgccaggggaacctggttatgctaaatttcacactacaattggatcatgttatagtcagtttctagtatatgaagacagtcaaggagatgagtaaaataactttacagtattagcattttgaaataaagcttccctcatcaccaccctcctactgctaaaagggattgtccgaaacaaatactctcagatctttaatatgtgtgtgtgtgtgtgtgtgtgtgtgtgagtgtgtgtgtgtgtgtgtgtgwgagagagagagagagagagagagagagagaaactaaatgcataagtgcagttgctgggtttcagctgcctcaaagaaatataccgtctatccttggtagatgggagaccatacaccgcactcctaaaaatcaagtccttcttatgtgcaggaaaagtaaacaggctttggtggtcttcaggttttatccatttagaaattccacatgggtcattaaaccccattgtgaaag

SEQ ID NO: 154859 - DNA, 527 bp, Homo sapiens
aacatttgtctttctttatcttcactttcatactttacactccattcccaggagtctccttgggtgccttattgcttgtcaatccacctccttgtaggtaaaaatctgatcaacttgctcacactaagactgaatatttacttagcatactacccctccttaaaatatttaccttttggtaggtgaagagctggcattaaccgaagattgaagctataatgatagaatttcaggcgtcaaaaaagggaaaacgatttggggatggggatccttttggggttactcacatcacgctaaataaggcagttaccagctctcaggrcagaaagaccaggccttctccataccccaactacacatacaaggagccttaatctaatacaggttttgaaggcacttcttaaagtcatgtcagatgggagacagaagcccaactggcattcgtctggagcttccctgccaccctggccacacctgcctcctggaggtccactctaaagagccttgtaggtagctgcagggcagaa

SEQ ID NO: 154860 - DNA, 478 bp, Homo sapiens
aattcccaagggcattttcagttagcattccacagggaactttctggaatacatttggatagcactaatggaagttaatatttctccaagctctatagcccaagattcagaaagggaagggaattttatcagtaattaaccataattttctctgatttatgaaacatagttctctctgtaaacaaatattacttttcatttttcttctatggatctcaagtgcatagaatgtgaaacatcttctttctgtaactgcagaaaagacaggaactcacycataacaaaatttagccagattgctttggctgagtgccgcttgttttctcaacagattgatgagaaagtccgacattaggctgtttttatgttgccatccctcaggggaacatagatgtgtatttgtgctttaaaacaaaaacatcatgaaactagtacaaactattccccctgaatcccttaacctatccctggaatatgt

SEQ ID NO: 154861 - DNA, 468 bp, Homo sapiens
ggaactttctggaatacatttggatagcactaatggaagttaatatttctccaagctctatagcccaagattcagaaagggaagggaattttatcagtaattaaccataattttctctgatttatgaaacatagttctctctgtaaacaaatattacttttcatttttcttctatggatctcaagtgcatagaatgtgaaacatcttctttctgtaactgcagaaaagacaggaactcactcatmacaaaatttagccagattgctttggctgagtgccgcttgttttctcaacagattgatgagaaagtccgacattaggctgtttttatgttgccatccctcaggggaacatagatgtgtatttgtgctttaaaacaaaaacatcatgaaactagtacaaactattccccctgaatcccttaacctatccctggaatatgtgtaatattgaggggcaaagaattca

SEQ ID NO: 154862 - DNA, 373 bp, Homo sapiens
atttctttgccttttttctctatgttatggcacagtacccaaagtttatctttaattctcatactaaatgttttatttctgtaatcacttggaatttctctgaaytttgttgttctcttattacttttagttgaaaaaaatgtaggccatttagttcttgtttaataaattcagtatcttctcacatctgtgcacactaattgctgattttattattttgctctgcgttaggtttcttctgttccagttatttctcttctggcatcagtttttatatttgtttactttgaccttcatatgcctgctgatctttgtatgtttatacttaaaagtaagggactcagttgattagtccaggcaggagatgtgggtt

SEQ ID NO: 154863 - DNA, 549 bp, Homo sapiens
ggtgagggcaggagttgattacaaagagatttaaaggaattggggagataggtgggcagtggaactgttcattttgattatggcagttgctgtaaatttttgtgaaaactcatagaaatatactccaaaaagaatggattattatgtgtaaattatagctaaatttaaaaaaatatatagtaaatgagttataatgagtgggtttatatttgaatgtgctcttatcagaaaaagacagtcataaaatcaagtattagaatttaagtgttgctcacgacaggagttttaaccaatgaactttgactattcttgacacaaagtattcaaattttctaccttggtcattcaactctggtatgaggccaggyatgactctgtgatgctgttgtcagcttatgacttttttctgcaatatttatttcattttctggacaaaacaaaataggtgactagaaggagataaaaaataaaagaagaagcaaagtaaaggagaaaaagggaaagaagtgaatactatgtataactttatacaaataaatttgacagctc

SEQ ID NO: 154864 - DNA, 544 bp, Homo sapiens
gataatttaagtcatgagagtggaaccctgattaatgacattagtgcccttttaaaagagacctagagagcactgcagccccatttctcccacgtgagaattcaaggaactagggtctacaacctggaagagggaagtcaccagagcctgattatgttggcaacttgacctcagactcccagcccctagaactgtgagaaataaatttytactgtttatgtcagtctgtggtattctgttataacagccagaactaaaacagatatagtgttttgtgtttcaaaaataaatattatattatacataattttgtatcttgccttcacccaaaaatgacttttttgagatctatacatactaatacagatagatgagttcattcctttaaattacttcttaggagtcaaactgatattttgggaagatgaattacatttatcttgtcgctttgaatgttccaggcatgctgctgcctaccttggtctcacattagctcaattagaaactggtatgtggagtttagatcttctattcctgagctggt

SEQ ID NO: 154865 - DNA, 597 bp, Homo sapiens
ttgtgctgggaattggctagtcagttgggcactacagtttccagacccttgctttaggcatgggagcaagtgactcattctagtaattgaaatggattgatatagcattttaggcaaaagtggttgtgtatctggcataccttcccctagttatggtacctttctcaggagaacttggaagatgtcagcatcatcaattggaaagcgcttgatgcctaagtcattgcttagggaagaggcatcaaaagagccacctgactaaaaacatctgcattggtcttctgaacttggtggcacgtaacagagtactctaatacagcttgcgacgctaacagcacattgaaaacaaccaaatcctattatggggaactagaaatcatcgatttctcatacagatggataactgagagaaaggtattgtattttgtttgtcccttgcagtacttaccacttcctactttgccttgcaattagctgtattcatctctctctgyctcctcaatgtatggttttaaagacaaatatggccttattaaacctgcaggatttaaatgtttttggcatatgtcaggatctgaatgtttgaagaatgaatga

SEQ ID NO: 154866 - DNA, 529 bp, Homo sapiens
gtatagggtatcaaaaaagatctgctatctataaattgatgcaaaygatagttttcagtgcaaaaactattccttttgacaggaatggaaactggtgggaaaatctgagagacttctttgattccatagttatttggttatagcactgagactgggatgcagatcttttgctaaaaatggtaggaaaccaatcgtttggactggacccctgattaggtaatgcaactgatgtttgtcatggattctccttcctaagggttgatttgtttttctcctaaaaataaatgaagagaaaggaagcccaggtttgaacattacaacttaagctctccagatcatcagacctcataattagaacatcacatttcctttagcaagtttttcttagataatttaatctatggctttgttccttgccatttcctagagaacaaaaatacttgtccagaaaaataactctaggacctgggagaacctgcaggaaatcaaccagcaaatgttagccttttttcctcctatgtcaccctct

SEQ ID NO: 154867 - DNA, 529 bp, Homo sapiens
gtatagggtatcaaaaaagatctgctatctataaattgatgcaaatgatagttttcagtgcaaaaactattccttttgacaggaatggaaactggtgggaaaatctgagagacttctttgattccatagttatttggttatagcactgagactgggatgcagatcttttgctaaaaatggtaggaaaccaatcgtttggactggacccctgattaggtaatgcaactgatgtttgtcatggattctccttcctaagggttgatttgtttttctcctaaaaataaatgaagagaaaggaagcccaggtttgaacattacracttaagctctccagatcatcagacctcataattagaacatcacatttcctttagcaagtttttcttagataatttaatctatggctttgttccttgccatttcctagagaacaaaaatacttgtccagaaaaataactctaggacctgggagaacctgcaggaaatcaaccagcaaatgttagccttttttcctcctatgtcaccctct

SEQ ID NO: 154868 - DNA, 585 bp, Homo sapiens
tccattgcattgggctggtgtgtctttttgtctttcaagattcttttaatctttagggccccctctctttatttctctctctttatttgttaaaaacacttggtcattgttttctgtagaatttcctataattttatagattttgctaattgcctgtctgatactgttgatcacattccatgttcttctaactctactttccaaaactagtacttacatctagaggyctgctctgattctgactaaatatattttaaaaattttattggaaaaaatttataggaagtactttttatcatataatttcaggaggcacataatttctggttgtttttcttgtgatgctaagatcaattcataggattaagtgttactagcctgatctattcgttatgaaaattgttcatgaattttataatttatagttttatcagtcattgatgatcatctaaaaccattatatttgtagaagttataaaatagggataatctaatgcatcattccttctatattaattagttggaattcttttatgaagaataattttctcttatcagctgtttggttatcctgtggtataggcc

SEQ ID NO: 154869 - DNA, 526 bp, Homo sapiens
tgacatactgtacctggaaaaacagtacactctcgcccaaatactgcactttccccacagtcttagcaaccggcagaccaggagattacctcccatgcctggcttggtgggtcccatgcccacggagccttactcactgctagcgcagcagtctgagatcaacctgcgaggttgcatcctggctggggaaggggagtccaccattgctgaggcttgagtaggtaaacaaagctcaaactgggtggagcccaccgcagctcagcaaggcctactgcctctatagactccacctctagggcagggcatagctgaacaaaaggcagcagacaacttctgcagacttaaatgtccccatctggcagctctgaagagagcagtggttctttctcccatcaygacattcgagctctgagaatggacagactgcctcctcaagtgggtccctgacccccttgtagcctggctgggagacatctcccagtaggggaccacagacacctcatacaggcaggtgcacctctgggac

SEQ ID NO: 154870 - DNA, 483 bp, Homo sapiens
gaattcaataaatgttattttaatgtaattgttagtgaatagcttgtctacctacatttattcattcacttgataaacattaacactttaacagggtatatactacataaaatttggtggtaggggtacaggtttaaaagaaataggctctctccacattctacaggggaaaacagtgagcaagagataatcacacctcagtgtgatgcgtatgataaagatgacatgartctcataggagaactcctatggattcagctccagctactcattgccatgtgggaactctgtggattagctccagctactcattgccatgtgggaaggtattcccagtgctgtcagaccagatttttcaagcaaaacttgaaagccatattttcaaacatactttcattctgcaatgtgggcttaagtttcttaaacatgattttggctaaaccaaatgattttgaggggtctagtcagcctgcagggcatcag

SEQ ID NO: 154871 - DNA, 629 bp, Homo sapiens
cttgttgtcttgctttatttcattgagttgatcttcaatctctgacacactttcttccgcgtgatcaattcagctattgatacttgtgtatgcttcaagaaattctcgtgctgtgtttttcagctccatcaggtcatttcttttcttcgctaaactggttattwtagttagcaatttctgtaactttttatcaaggttcttaatttccttgcattgggttagaaaatgctcctttagctcagaggagtttgttattacccaccttctgaagcctacttctgtcaattcgtcaaactcattctctgtttagttttgtcccgttgctgacgaggagttatgatcctttggaagagaagaggcattctggcttttgaaattttcagcatttttccactggtttgtcttcatctttatggatttatctacctttggtctttgatgttggtgaccttctgatggggttttcttttgaatgtcctttttgttgatgctgatgctattcctttctgtttgttagttttccttctaatagtcagcttcctcttctgcaggtctgctggagttctctggaggtccactccagaccctatttgcatgtgtattgccagcagaggctgcagaacagcaaa

SEQ ID NO: 154872 - DNA, 301 bp, Homo sapiens
tttattttggatatatacccagcagtggaattgctcgatcatatggtagctctatttttagttttttgggggacctccaaactgttctccrtagtggttgtacattcccaccaatggtgaacaagggttcccttttctttacatcctcaccagcatttgttactgcctgacttttggataaaaggcattttaactgggacaagatgatatctcattgagttttggatatctgatgattagtgatgttgagaaccttttcaccatttgtgtgtcttcttttgaggaatgtctattcagatct

SEQ ID NO: 154873 - DNA, 596 bp, Homo sapiens
aagcttacctaccatataaacgagttaaaaaatacaaacagtataaaccaagggcaacagttcctaaattctgaccattttataacaatcraaagagctccactgattaaagtaatagtggatgctgtaatggataaatcccaaattatcacataacagaataggttatttttatttcatgctcacataaagtcaaaaaatctatgttaatgatcagctgggtgtgcctgaggaggctggagacaacccaggctgaaagaagttcagttctctttgacccctcatttccaaagttgctctggcaaccaccacccagccagcaggtggaaaagaaagacaatctttcaagggaggtttctatttgccaggactaaagtaacactcaacacttctgctttatttcctatggccagatttcaatcatatggccatccccaaacacaaaaggtctagtaaatataagttatctggggcctgggagaaaagaaaacaagtttggtaaacagcaagctagtctttaccacaagaggttttaagacacagattctggggcattacccccagaagatcatcattcagcaggtctaataggatcc

SEQ ID NO: 154874 - DNA, 479 bp, Homo sapiens
gaattcatgtcaatgcagtcttttttacagtaataatgtaatgttaataacagaagaaaaatgcatgccttttaaagaattgttaagattaggaaacaaaaataagtcagaaggagccaaattaggagtatgaggtggatgcctaacggktttccatcaaaatcctaacaaaattgcctttgtttgatgagaggaatgagcaggagcattatgttggagaaggactctctagtgaagctttattgaacattttcctgctaaagcttttactaactttctcaaaaatactttcataataagcagatgttatcattcattgtccctccagaaagtcaagcaaaatctcttgaacatcccaaaagactgttgccaagacctttgttcttgactgatttgcttttgctttggctggacccttccacctgttggtagccattgctttgattgtgctttgtcttcaggatcataatagtaaggcc

SEQ ID NO: 154875 - DNA, 479 bp, Homo sapiens
gaattcatgtcaatgcagtcttttttacagtaataatgtaatgttaataacagaagaaaaatgcatgccttttaaagaattgttaagattaggaaacaaaaataagtcagaaggagccaaattaggagtatgaggtggatgcctaacgggtttccatcaaaatcctaacaaaattgcctttgtttgatgagaggaatgagcaggagcattatrttggagaaggactctctagtgaagctttattgaacattttcctgctaaagcttttactaactttctcaaaaatactttcataataagcagatgttatcattcattgtccctccagaaagtcaagcaaaatctcttgaacatcccaaaagactgttgccaagacctttgttcttgactgatttgcttttgctttggctggacccttccacctgttggtagccattgctttgattgtgctttgtcttcaggatcataatagtaaggcc

SEQ ID NO: 154876 - DNA, 499 bp, Homo sapiens
aagcttttaaggtataaatatatataataacattttaatattatagctatcttctcaacttttctgttacctaatatataaattataaagcctatcttctggttttacatgtttattatttattattattaataatttttgagacagggtcttgctctatttcccaggctggagtgtagtggtgactcactgccactgccacctcctgggctcaagygatcctcccacctcagcctcctgagtagctggtgctacaggtgtgtaccaccatgcctggctaattttttgaagagatggggttttgctgtgttgcccaggctggtctcaaactcctgtgctcaagcagtctgtccaccttggcctcccaaagtgctgggattacaggcatgagccaccacacctggcctattattactttttagatagggtctcactctgttgactgtgcagtggcatagtcatagctcactgcagcctcagactcctaggctcaagaata

SEQ ID NO: 154877 - DNA, 570 bp, Homo sapiens
ttttaaaaaatctctacgacagcttttaaatttgtcttctaaattccccttgttagacaagtaaatttctacaaaaaagtaatatcttatcaggaaaggctaggttagcctgcttcttgggataatgtccagccttatgtcctcttggaagaacattactctgttttctccgaataatgacagccaaaatcttctataaaacaataaataaatcttctatttatgctcatattaaaaccaaactgccttggtttgaaccccagctctgtcacttattagctagatgaacttagaaaaattgcctatcctcctatatgttggtttccttgtccatgaatacagataataacagtgcctactttgaargtctgctgcagggatcaagtgggttaataagtgcaaagttccagagcagcatctgaaacatagtttcaaatcaattgatatcagggtaaaaaatccagttgtctttccccaatttatatagtccccagttaggatagttttcatatccaataagatatgaaataatcttggagcctcaaataccatttgtttttctcaagtgaa

SEQ ID NO: 154878 - DNA, 561 bp, Homo sapiens
caacgccagtgcctgaagggataaataattcctgtggacaagcagagacaaagggaggaagtggcactaccatccccagccctggaaatgttactctgtaagccacagaagatgccaaatcagagtggctattctgcagcaccacactgtaggaggtttgtcccacaggtctcctgggcacaaactcctagccagcttcccacattgccagaatataccctgtgggaccgtccgcattcaktaagggcagcgctcccatcaggtactagacccaagccaaacctgggcttaaggtgccacttggagctgaaaaggaagcagtgacctagcggtaaagaaactctaagcaaatatatccaatataaaccaaaacaagccagacaaaaaacactggaataaataatacttcaatgcaaagacagatgtacatccagcaaaaacaacagcaaacagggaaccatgatctccacaaacagaagcagcaaagaaccagtaactgactctaaccagacagggatatgtgagctctctgaccaacaataaacaactaaattcctaact

SEQ ID NO: 154879 - DNA, 606 bp, Homo sapiens
aagcttggctgcagtgtgggtagtgagaagaacttgctgtggtgcctacccacagggttccagggcaatctttctttgatgtcttttccagaagaccttgtcttcaggttctaaactgtgagggacttgattgttctcagctcrtggatcatggaaagtttcttttatctggtgagaatatactttggcataatacatgaaagccttacattatttagttatatcagaattgaggagagtgggagatacatgagttctatttttaagggcacagggcctcccaataactactacataaaggttcagtctatgttttcccctgggagtgaatctgattccccgcaaagccaaatggtagtgcctttggccaaggcaatccaattgattcagttgtcaatttcagtttcttaaaatgccatttgttctttcaacttttctagaagattgagggtgatggggacaatgatagtgtcattgtgtttgcaataccttgtttaactgctttagagtttgtccagtaacatagattcctctgttgcaggagattcttctccaggggcgccccagaaaggaaacacatttctaataacatattagcaactatcc

SEQ ID NO: 154880 - DNA, 605 bp, Homo sapiens
aaagacattatgtcaaatgccttaaatatgttcaatgagmcaaaggaaattatggacaaaaaactaaaggaaatcaagaaagtgatgtatgaacaaaatgagaatatcgaagtgacagaaactataataacaagtcaaatagaaattcttgagctggcaagtagaataactgaaacaaacaaaaaactcactaaagaggttcaacagtagttttgagcaggctgaaggaaagatgagcaaacttgaaattatccagtctgagaagcagaaagaaaaaagaatgaagaaaaatgaaaagagcctgaaggatttataggataccatgaaacacaccaacatactcacaggagctccagaggaaaaaagagaaaaaggtttctctaaatatgtatttgaagaaatagtggccccaaagttcccaaacatgaggaaagaaatgaatatacacatctaagacatacaatgaatgaagtccaagcaggatcaaagagatccacaccaaggcacattacacccagcttgttgaaattcagagacaaataaataatttggagagtagcaagagagaaatggcttgttatatacaatgggtctttgataagatt

SEQ ID NO: 154881 - DNA, 605 bp, Homo sapiens
aaagacattatgtcaaatgccttaaatatgttcaatgagayaaaggaaattatggacaaaaaactaaaggaaatcaagaaagtgatgtatgaacaaaatgagaatatcgaagtgacagaaactataataacaagtcaaatagaaattcttgagctggcaagtagaataactgaaacaaacaaaaaactcactaaagaggttcaacagtagttttgagcaggctgaaggaaagatgagcaaacttgaaattatccagtctgagaagcagaaagaaaaaagaatgaagaaaaatgaaaagagcctgaaggatttataggataccatgaaacacaccaacatactcacaggagctccagaggaaaaaagagaaaaaggtttctctaaatatgtatttgaagaaatagtggccccaaagttcccaaacatgaggaaagaaatgaatatacacatctaagacatacaatgaatgaagtccaagcaggatcaaagagatccacaccaaggcacattacacccagcttgttgaaattcagagacaaataaataatttggagagtagcaagagagaaatggcttgttatatacaatgggtctttgataagatt

SEQ ID NO: 154882 - DNA, 605 bp, Homo sapiens
aaagacattatgtcaaatgccttaaatatgttcaatgagacaaaggaaattatggacaaaaaactaaaggaaatcaagaaagtgatgtatgaacaaaatgagaatatcgaagtgacagaaactataataacaagtcaaatagaaattcttgagctggcaagtagaataactgaaacaaacaaaaaactcactaaagaggttcaacagtagttttgagcaggctgaaggaaagatgagcaaacttgaaattatccagtctgagaagcagaaagaaaaaagaatgaagaaaaatgaaaagagcctgaaggatttataggataccatgaaacayaccaacatactcacaggagctccagaggaaaaaagagaaaaaggtttctctaaatatgtatttgaagaaatagtggccccaaagttcccaaacatgaggaaagaaatgaatatacacatctaagacatacaatgaatgaagtccaagcaggatcaaagagatccacaccaaggcacattacacccagcttgttgaaattcagagacaaataaataatttggagagtagcaagagagaaatggcttgttatatacaatgggtctttgataagatt

SEQ ID NO: 154883 - DNA, 605 bp, Homo sapiens
aaagacattatgtcaaatgccttaaatatgttcaatgagacaaaggaaattatggacaaaaaactaaaggaaatcaagaaagtgatgtatgaacaaaatgagaatatcgaagtgacagaaactataataacaagtcaaatagaaattcttgagctggcaagtagaataactgaaacaaacaaaaaactcactaaagaggttcaacagtagttttgagcaggctgaaggaaagatgagcaaacttgaaattatccagtctgagaagcagaaagaaaaaagaatgaagaaaaatgaaaagagcctgaaggatttataggataccatgaaacacaccaacatactcacaggagctccagaggaaaaaagagaaaaaggtttctctaaatatgtatttgaagaaatagtgrccccaaagttcccaaacatgaggaaagaaatgaatatacacatctaagacatacaatgaatgaagtccaagcaggatcaaagagatccacaccaaggcacattacacccagcttgttgaaattcagagacaaataaataatttggagagtagcaagagagaaatggcttgttatatacaatgggtctttgataagatt

SEQ ID NO: 154884 - DNA, 561 bp, Homo sapiens
aagtctgcagggcctgtgctctagctgggaggcagccataagtggtctaccttgaatcctgctccagtgccaacaggctgctgggcttttctggaataaattggagatcccctccccacctgatcatggggtggcattagggtcctggagaagggctatagagaagcccagcctggtcccaggtcccacacagagcttctctgacccagcacccatgattgggaaggtctccatgttctgaactgggggtccatattctgaaaggtgggcatgcgcggcatcaccattgctggggctgccgtcaaaacacatagtgctctacttacccatcaggggagagaccatgatcacaaaggtggttttcccagggcgagtcttctccattgtactctggatgtgctgatccctgcaatttccccaaaggtgggaaactcgacttcataatttgtggtaatggggaactgcatttgcactctcccctggcattttgtaaaagaaaagaaaaaaacacagagagtactaagcgcaccctgrgagtttcggattcagaatgaggtggaa

SEQ ID NO: 154885 - DNA, 477 bp, Homo sapiens
gaattctagtttgtttcatttgcattayctcagtttccctcctctccaacttaaaattcgtgcagatgatttttctatgtctatttttctgtgtctggctaatgcatgccttgatctcatgtctctcaaagaagcagtgaagtcacatagacctgcaaaacctgagccaagctgcttcacctttcacttctttctgcccacattatacaaccagacatagataacagctgatgtactggtgttgggaggattaaatgagatgctacaaatttatgtatgacaccttcttgacacattctaggttctcagtaagtgccctccctttctgctgctgctcctcatcctctgaatttggtggcctcagaagattatgttgttgaccttctcttaaatatgtactctgcttggcaagtttatcctctctcatgatttaaactatcattgttacccagataactgcaacttaatagctccaga

SEQ ID NO: 154886 - DNA, 477 bp, Homo sapiens
gaattctagtttgtttcatttgcattacytcagtttccctcctctccaacttaaaattcgtgcagatgatttttctatgtctatttttctgtgtctggctaatgcatgccttgatctcatgtctctcaaagaagcagtgaagtcacatagacctgcaaaacctgagccaagctgcttcacctttcacttctttctgcccacattatacaaccagacatagataacagctgatgtactggtgttgggaggattaaatgagatgctacaaatttatgtatgacaccttcttgacacattctaggttctcagtaagtgccctccctttctgctgctgctcctcatcctctgaatttggtggcctcagaagattatgttgttgaccttctcttaaatatgtactctgcttggcaagtttatcctctctcatgatttaaactatcattgttacccagataactgcaacttaatagctccaga

SEQ ID NO: 154887 - DNA, 408 bp, Homo sapiens
tttccctcctctccaacttaaaattcgtgcagatgatttttctatgtctatttttctgtgtctggctaatgcatgccttgatctcatgtctctcaaagaagcagtgaagtcacatagacctgcaaaacctgagccaagctgcttcacctttcacttctttstgcccacattatacaaccagacatagataacagctgatgtactggtgttgggaggattaaatgagatgctacaaatttatgtatgacaccttcttgacacattctaggttctcagtaagtgccctccctttctgctgctgctcctcatcctctgaatttggtggcctcagaagattatgttgttgaccttctcttaaatatgtactctgcttggcaagtttatcctctctcatgatttaaactatca

SEQ ID NO: 154888 - DNA, 578 bp, Homo sapiens
ctggctcctccatccaccaactggtgaatttgggcacattttaaatttctctcagtttccttatttataaaataccgaaaaactacctctcacagggttgtaaggagaraatgaaataatgtaggcactcaataaatggtagcaattattactgtgcctgttgaattaatgcaaaacataagctaaaggaaccaccacatgtcagtatgactttctaaccttttaatgagatctcattttgtttggcacaaagatctagattggtgatctggcagatgggtagctttgtgtgactgcccactgtggcgagcactgtattgctggtccctagaagcatttaaggagaggcattatagtcagcagtgggatgcatgccaactgttttattgatgatgcctatttggaccacaaggccagccagcatttgggccccaggaagaatatggccccattcatgtcattactccacaatgcggcggaaagactggacagctggggaggctgcaccccaatcgatgggcttccggtactccttcttgtccaggaggtactgcctgccacggtagttgggtagctca

SEQ ID NO: 154889 - DNA, 526 bp, Homo sapiens
tttatttatttatttattttgagactgagtctctattgcctaggctggagtgcagtggtgcaatctccgctcrctgcaacgtccacctcctgggttcaagcagttctcccgcctcagcctcccaagtagctgggattacaggtgcatgccaccacacctggctaatttttgtatttttagtagagacagggtttcaccctgttggccaggctagtcttgaacttattatagattaataagtagatcaactgattggtctgtcgttcaatcagtttgggagctagaaccaaaaataaaaagaaagccttcatgagagttgcaaacctgcatgttcatatgaactagacaaataacatgcagggcaggtataagttaaaacatggcagcagatattctgcctccatattgggaagcaataaggattgttgaggactttgacaaactgaagccttctggccccatttcaagggagcagctgttactcaaccccagccagtttttgtcatacaaatgcaaacagtatgtt

SEQ ID NO: 154890 - DNA, 537 bp, Homo sapiens
ctcctttcagctcacatttatttatttatttatttattttgagactgagtctctattgcctaggctggagtgcagtggtgcaatctccgctcactgcaacstccacctcctgggttcaagcagttctcccgcctcagcctcccaagtagctgggattacaggtgcatgccaccacacctggctaatttttgtatttttagtagagacagggtttcaccctgttggccaggctagtcttgaacttattatagattaataagtagatcaactgattggtctgtcgttcaatcagtttgggagctagaaccaaaaataaaaagaaagccttcatgagagttgcaaacctgcatgttcatatgaactagacaaataacatgcagggcaggtataagttaaaacatggcagcagatattctgcctccatattgggaagcaataaggattgttgaggactttgacaaactgaagccttctggccccatttcaagggagcagctgttactcaaccccagccagtttttgtcatacaaatgcaaa

SEQ ID NO: 154891 - DNA, 526 bp, Homo sapiens
tttatttatttatttattttgagactgagtctctattgcctaggctggagtgcagtggtgcaatctccgctcactgcaacgtccacctcctgggttcaagcagttctcccgcctcagcctcccaagtagctgggattacaggtgcatgccwccacacctggctaatttttgtatttttagtagagacagggtttcaccctgttggccaggctagtcttgaacttattatagattaataagtagatcaactgattggtctgtcgttcaatcagtttgggagctagaaccaaaaataaaaagaaagccttcatgagagttgcaaacctgcatgttcatatgaactagacaaataacatgcagggcaggtataagttaaaacatggcagcagatattctgcctccatattgggaagcaataaggattgttgaggactttgacaaactgaagccttctggccccatttcaagggagcagctgttactcaaccccagccagtttttgtcatacaaatgcaaacagtatgtt

SEQ ID NO: 154892 - DNA, 369 bp, Homo sapiens
tcagtgaaatttcctgattatctcctaggtgcatagaactgctaatattataaatagaaataattctaagatatactcccagctctcaaatagcctagttaggtacaagggtaagtacttaaaaaggaaagctaataatataagtaatatatataatttagtrggcaaatagcatataatataaaatagtttggagattaaaagggaaggaagccaatcctagtgaccccctctgtactaagtactagtcagcatgaatacttgaatcaggatgattgttcctcactgctataccctcagcacttagaagagtacctaggatgaatagagactgaataaatatttgctgactaaatgaggaaagaattc

SEQ ID NO: 154893 - DNA, 458 bp, Homo sapiens
tggcaggaaccttgagattgctttaaatgtgatagaattcattagaagattgagcagactatggtatgaactgactcacatataaaaatggacactctggctgctgtgtgttgactagactatctgtgggcaagggtggaagccacattactaagaaaractcaatatactaatatagatcagtctatttctctctgccaatactaggtacactgctgatatcacaggctttggttttacctatttatagattatttgaacttagaggccatataaaaccacagaaaagtcagcagaaggagagtagaaacatcaagagtcatgagagcttctgatgccctgagatacagaaaaaacaaactggtggactgtctgatccaagttttatattttgtgaggcttaactgccattaggagtaatgcagtggtgtgcctggaaaagcaaaaagtaaaatgta

SEQ ID NO: 154894 - DNA, 653 bp, Homo sapiens
gtatacatatctcaattaaaacatcaccttgaaccccataaatatatataattataatctgtcaattaaaaataagacttaaaaaaggaagttcttaatttgcaaaagaatctctgcccatatacctgctaattaaattactaatcaggcaataatccctaatgttacattacctagaaaatgaaatgacaaggtcataattatctaaagcattactttaaaagacttggggagaaaagctaagcaagccatggctggctgaagaggcgagatgatatgaggacattcaagtggccatagttcattaaaccacctttctgtgctattcagaaaattgtgttcaacagtaactagctcatttaatacctgaagtggaccattcagacggttaaacaaatgagattcatacaagcctcgtcaccctgtaattcacatctcatttgctctttcctttgtgctaacatctgctacatcactcttactatctggacaactcttgtaaactmccccactgaaaacttgcaaggcagtgttcagtttctttcacatgatgtatgttctgctatctccttgaaatggaatgtaggcaactttaaaatgctgtgtcgcacttagactttagggaacacctgtgcaattttgtttaaagtaaa

SEQ ID NO: 154895 - DNA, 594 bp, Homo sapiens
tttcactacttggcaaattctgtatttaaggcatccttaaataaagtggtgcatgttcttcaaactttcaagatgatttaaatgcagttataaaatagacattttaccaatcaatgttcgttcacatttctcaaagttcacaaagtgctatactcttatttttataaacactaggtgctttatcccattacgctgacagacctatctttcttcatgtctyttaaaatgtttccatctcttactctccatcccagtgattataaacaattgctagagtagatataatccaacagtcttttatatttgcctctcaaataaatctcaataaatcaatttttaatgaaaataaatggtttagtttagctcaagtgtaatctaagcttcctttcattttaacatttattattgaaaataattttaaaacacatttatctatttctttgtgttataacatatttgacatgacttaattaaatcttatttagtgtttgaggattttattgtggataaggttattattctgatcaattctaattgtacaacatttacagaaactgtgaatgtcagctggacagggtccagtgtcaaataact

SEQ ID NO: 154896 - DNA, 623 bp, Homo sapiens
aattctatttatttaagatggttctttaggacactagtacgccatcttctcggtttgctcgctttccaaaataaagtcactttccttgcaccagcaccttgtctcttgatgtactggctgccatgggcagagcagtaccagctttggactcatttacagtccctactcctacctgacgccccattgtgacaatcaaatttgtcttcataaatcaaattgcacaccctccacccccttgattacaactgatgtcaagtcaggcagggttgtaaagggctgaaagggtcatcctttatttctctaaatttgattcatgaataatcaggaatgcaccattttgagaaaaagcagagcaaataamatactggcatcagtgagaaatccattctattttaacatcgatttcatacaaagcaccaagtcataacgaataccatgcaggcatgcagtgtggttctggatgactctcttctacttgttcttttggtatggtaggtgcatctatatagattcccctcccaggctggataatttgattcgaagcacaaattttttaagtcaattccacggtggagagcaacacttttgagaacaataacgaattgattttgtctgcatttttt

SEQ ID NO: 154897 - DNA, 524 bp, Homo sapiens
gccaccataagaaatgcttgtaatcatttggtttgggcaaatcattataaaattttccatagcccatgattgaggacttgcttaaaataatatctcttgtccactagtacatacgaataacaggctatatttcattataatgaaaagaggttaacatatgagagtctttgcaagagtttctaaactctctcagggacatctttcctaatcaaagtgagcggagttggaagaatctgttttcttgtaaaaagagtaattttcctataaataacttgagagatcaatgatggataataagtccaaattattaggaaatatgatgctaccaattttcttaaaaatgggacttgaaaataccattctaccttgtgtaccattaattaacaaaacttgctaaagctggaaaaaatttattcagtattttactgtawtgcattttgtgtgatccttatcatcaaagaaaagaaagggaaaataggcagctatgtcatcacttgcattgtgttgatttttcagttagtgtt

SEQ ID NO: 154898 - DNA, 492 bp, Homo sapiens
tttcacgttgaaatcttaacctgtaatgtgatggtataaggaggaggggtttgggggaggtaattaagctgtgaaagtggagccctcatgaatgacgttagtgactgtgattgttaatattgtcaacttgatcggattgaaggatgcaaattattgttcctgtgtgtgactgtgagggtgttgccaaaggagattaacatttgagtcagtggacttggaaaggcagacccaacataaatttgggtaggtacaatctaatcagctgccagggtagccagattaaaagcagacagaagaacgtgaaaagactagacyggcttcacctctgaacctacatctttctcctgtgctggatgttttctgccctcaaacattggacaccaaattcttcagctttgggccttggactggcttccttgcacctcagcttggcttgcctattttgggacctcaccttgtgatcatgtgagttaatactccttaataaactcc

SEQ ID NO: 154899 - DNA, 461 bp, Homo sapiens
agatggatgggctgatgaagacacaatgcattcttcaggtaaaaaacagtcaagaggctggagcagtcacattaatgactgtactgtgacagtacagcctgctgactagagtttttcctgggatacagcatgtcagagcaccagagaattgggatggtggttggagaaagatgctacctcagtaaagaagacatacactagatgaagcctgttggcaactggcaattaagcattgctgtaggtttataaaggcgaytcagcgatcaagcaagtagacagctagaggatcgaaggccaacccactcatcctgcctaccaaaatacactgagaattaatgagtctttcccttctcaaggaggagtgaagagaagtcaggacacctcagggacctattacaacactgcaaaaccaggagcagcatcttcaagacccagatgaggagcatccttttgaaaatgaa

SEQ ID NO: 154900 - DNA, 461 bp, Homo sapiens
agatggatgggctgatgaagacacaatgcattcttcaggtaaaaaacagtcaagaggctggagcagtcacattaatgactgtactgtgacagtacagcctgctgactagagtttttcctgggatacagcatgtcagagcaccagagaattgggatggtggttggagaaagatgctacctcagtaaagaagacatacactagatgaagcctgttggcaactggcaattaagcattgctgtaggtttataaaggcgactcagcgatcaagcaagtagacagctagaggatcgaaggccaacccactcatcctgcctaccaaaatacactgagaattaatgagtctttcccttctcaaggaggagtgaagagaagtcaggacacctcagggacctattacaacactgcaaaaccaggagcagcaycttcaagacccagatgaggagcatccttttgaaaatgaa

SEQ ID NO: 154901 - DNA, 527 bp, Homo sapiens
attcagctacgtacatttttttctgtctcatagtttttttttcttttctcctagtttaggcttcctcatcattttggctatggcacagaaaagaggccacaagaagtcatcataagccgaagagaaagcactgtgttagatgctttatgaaaatgagagagagagagggagagagagagaaaatgaggccaacaggagattcaagagctggggactacagaggaatcatttcatacacaagctggagataactgtgttgtgcccaamcatcactaaacaccttttattgttttggtgaacaaaaccacacctatatgaaatcaatggctcaatgctcatcattagaagagatcaccagggtctccaagccagaagctaaccccagccccaggagctaacccttggtggaagaagacctttgtcatgaggatccagatgctggggaggtttccatgaaggctgagacttcagctgcagaggagagcatccagtggccagggaccctgacatttgtggaagccaaaatg

SEQ ID NO: 154902 - DNA, 527 bp, Homo sapiens
attcagctacgtacatttttttctgtctcatagtttttttttcttttctcctagtttaggcttcctcatcattttggctatggcacagaaaagaggccacaagaagtcatcataagccgaagagaaagcactgtgttagatgctttatgaaaatgagagagagagagggagagagagagaaaatgaggccaacaggagattcaagagctggggactacagaggaatcatttcatacacaagctggagataactgtgttgtgcccaaccatcactaaacaccttttattgttttkgtgaacaaaaccacacctatatgaaatcaatggctcaatgctcatcattagaagagatcaccagggtctccaagccagaagctaaccccagccccaggagctaacccttggtggaagaagacctttgtcatgaggatccagatgctggggaggtttccatgaaggctgagacttcagctgcagaggagagcatccagtggccagggaccctgacatttgtggaagccaaaatg

SEQ ID NO: 154903 - DNA, 438 bp, Homo sapiens
gatcttggctcactgcaagctctgcctcctgagttcaagcaattctcctacctcagcctcctgggtagctgggattaccagcatgcatcaccacacccagctaatttttgtattygtagtagagacagggtttcaccctgttggcccagctggtctcgaactcctgacctcaggtgatctacccacctcggcctccgcagtgctgggattacaggcatgagccaccatgcccagccggcaccttcttgctatgttctcacatggcggaaggatcaaagaaggtttttcgaactgcttttacaagggcactaattctatctgtgagggatccagccttatgacttaatcacttcccaaagcctccacctcttgatattatcaccttagaagttaggatctcaacatatgaatttgagggggggggcacaaatattcatc

SEQ ID NO: 154904 - DNA, 572 bp, Homo sapiens
ataggaacttgaatataatgtcaagaaatctgaggtttcccttctcctgaatatctggataaacatgtctcccattctctaccccagaatcagaccctgagacagagattagggtgcaagtttagtagggggcgtattggactctctggggctccctgggatcccctatactggaaggtatatccatcctccagctgtgagtattggccgccaacacttcacagttgacctctgttctggagaattgcctttggccaaatgggcactgcctcagcttggagattatatgctaccataccacttcagggaaagcctcagaaaatgtctaactgaagtagggaytccaaaggctggcccccttacctgaaggggacactaactctttgttacaatctgtgctctggaagttccctcaggggattgggctgaagcgaggctccagccaggactgcatccttgttcagctcctttccctgccccatcttacagccctgtctcctcttccctgaggacactattccactaaatcacgtgaacgagacccttgtctcaggctctgcttatagggacct

SEQ ID NO: 154905 - DNA, 609 bp, Homo sapiens
ccagaagaaggtgaaaagcaccagctaagaaaagggtggcatcatctgtggcttcttattgcccaagctcttctgtccccaaaccaggacattcttcagaaagggataaagatgggcacacagagatgaaaccgcaagttgttttgttccaaccactgactataacccatacacacagagctaccagccacatgtttatgcccagactctagaacaaaaggcaaaggataaaaacacrtaagaatcccatacaaggggtgagatgggcatccccagagagaaggcttcagtatgtttgtgttcacgttgcacttacctggatgctacgggtcaacagagtgctgcccaaagctctgcaaggggtctaggtggtcagagttcccccaaagtcttaattattttcatcattgcttcatctcaacgtagtttaaattggtataaatacacttatgaataagatgtttggcatgaagatatgcattttctccacacaaacaattttatacatgatgtttaggttataagtttaatccataaagctctgtttaaaccataaattcagaaatactgtcttttaatgaaaaaaatatttatgttagaacatatgaa

SEQ ID NO: 154906 - DNA, 548 bp, Homo sapiens
gatcttaaaaccacatccttctgagaatctaaaggtgtctccagggggctatattgggctgtgttcaggtatagcctaatgatcccttctcttcaaaacccaaaggctatatctggccactgtgtgggacctcttctgtattaatgtgatttttcttttacctaggggccctaatatcctttttgataaccatttgacatcagtctggacaatacacctcctcccggctatctacaaccaggctacataaaaccaaatctcaattatggatagggctctagttatttcccrttgggattctgaacccaataaaagtgcatgtagctggatggctgggggtggggtgaatatcacactccacagagacctagaggtgcagattagtagttcagcatggtccaacagaactctgcaaagaagaccatgacttctgtgctctgccttctaccttaatacttttcttttgaggagaggtgctatgagaggcaacgttgtaaattgcagggacttatcttagaaagatttggacaccagaaagggagaacttt

SEQ ID NO: 154907 - DNA, 542 bp, Homo sapiens
tgaccacttgctttgctcttttgtaaattacttatttatatcttttgtcttttttttcttggattatgttttgcttttcggtttgtagaggttatttatataatctggatttgaatcctttattagttgggtatattacaagtatcttctctggcttatcaattcacctttgtaggatcttttgacaatcacaagtttttaattgtaatagaattgaaatcaccaatctttcttattagattttgtgcttattgtgttttgcatcaggaatccttcccaaccctaaagccatgaaaaatttctctatatctccttctaaaatattgaatgtgttttttaatttttgttttaaattgacctagaatagtttttggttatattgtcaagcaggaattcaatttcactttatatccmtataaataacaattgacttcatattattaattgaatagcctttcctttttccattgatcaaaaatgtcacctctaccacaaagcaactttcccatatatgtctgactctttctgagctgtttgctcca

SEQ ID NO: 154908 - DNA, 499 bp, Homo sapiens
tttccagcattctaagaagcaataatactggacgcatcaatccactcagccaccctagggcactccttttgcgactggaatgcaatcttcttctttaacagacttgtacctgattgaaatcttgatgggtaaggatcctttatggtttcacagctaattgaaagcatcagctcgtcgagttttacaaacccattttttttttctctgcttgatgatgcagaactctgggtcttaatcaggttttatacaacccttgcccagattccaacatcatttcttggggacattttattctgtcaccaagagaacctatggctaatctccattcaggggtaggtcagcttcctctctgaatgagaaaacaaatctggattctcaatttttatgtcttataycaatttgactaatttattgtgtagtatctaaagtataggaatcaacaagattcatttctgtagaatataaaaaatgatcagcccttcaatgccacatcagagag

SEQ ID NO: 154909 - DNA, 548 bp, Homo sapiens
ttcttccaaacacattgacatgtgacatgtccgtttcatcctccagtatgattactttcataaattgttccactaatgtgtctttaacagttaataacctctctggagaataactcaactttgttacacataaatttaactaaaataagttttgtagttgtttggtgacttactgaattatttgaaaatgttattgctagttccttactaayatagagtgttttcacatgttcaagttgaaagataatcatttggtcactattttctcgtgattattgtcagagagttagataatagtggtctttatttttacattaataacttttttgcaaggttttggcttttatttaatgccaggttgaaaaataagccattcaaatataataaacattgtgctgtatgtgtgcatctagttcaacagtaaagaaaatttactgatgaatggataatacagaattttctataacattgatgttaagactgtaccctgattatcccttactttttttcaataattcatcatgaatctattgccttcaattaaagaa

SEQ ID NO: 154910 - DNA, 244 bp, Homo sapiens
atgaatctattgccttcaattaaagaaaattcttaaaactacatttgttaaatagcttttgaattcttatatttgacctagaagtaaaaatacttttrtttggctttgaactgcctcattcaaggtttaacagtgagttgcttactgagattcatcacatagtttttttctgtggttttgttgtcctacaacacatctctggtaagtcttgtcctggcagaccaaaaataacttttcttttctt

SEQ ID NO: 154911 - DNA, 550 bp, Homo sapiens
tgttcagtttatttgtgatgattttatgtgtatgacattaataacacaaaggaatggggaaagataaaatggagcttcactggtgcaaatttgctgtattttactagagttaagtcagtactaattttaaatgaattgtgaaagttaaagataaatactacaatctctagagcaactaatttttaaaaatcattaaaagaaagacagtcaagtcaggcatggtggcacacacctgcagccccagctactccagaggctgagcggggaggatcccttgaatccaggagttcaagggtacagcgagctgggaacacaccactgcactcaaggctgggtgacagaaagagatcctgtctcaaaaaaatacagccaaaatatcaasagaggagttaaaaatgatattcaaaaataccaaagaagacagtaatgaaagaatagaggaacaaaaaagacattagatgtatagaaaacaaatagcaaaagggcagataattttaactacagtcatatgtcacttaacgacagggatacatctgagaaatacgtcatt

SEQ ID NO: 154912 - DNA, 629 bp, Homo sapiens
gggtaggggccaacagagaggtgaatttatcacaaatcgaagaaaactgaaactcccaagttccaagtctctcacttgcatgagtctctttcatggcagcaaatatttgtttctgtgatttctgtatttcttttcttgaaatgagctcgcaaaattgaatgagcttgaggccccacgaaacctagctctacccctgactgcacagggttgaaagatggttgtgggtagcccttcctcctcttaaattccaagagctctgatgtctgtgcttcatgtgctcatgcagggatggctgtcactggctgtgcttgtggctatggctgtggttcgtgggatgttcagctggaaaccacctgccactgccagtgcagtgtggtggactggaccactgcccgctgctgccacctgacctgacagggaggaggctgagaactcagttttgtgaccatgacagtaatgaaaccagggtcccaaccaagaaatctaactcaaacgtcccacttcatttgttccattcctgattcttgggtartaaagacaaactttgtacctctctgtgcttatgtcatctctgttattgtccccagcttggggctcccctatccagaaaatgttgtcagtgtcccagt

SEQ ID NO: 154913 - DNA, 404 bp, Homo sapiens
ttcatgaaatatgtcagaaacactaaggcaagaatttgggtcacactgtrcatttctttagggttgtgttttgtcgtttactgttagagtaaatttgccccacataaccacttggaggccttttaaaacacaatctaagttctaatattggggagtagtttaggtatgtgtgatgcagtttcacatggtctctggtttcctctgcttttagggtccgtaattcctgacacttctgttttccaagtttttaaaaataatacataaattttaaacaggaagatttttatttggaggctttgtattttatgacattcttaatatctttcacaattttttgcttgccaacaataaatacccccattttgaaaaacaatgcacacacatgagaagggtagatattaagt

SEQ ID NO: 154914 - DNA, 572 bp, Homo sapiens
ggtttatttatggactttctgttctgttgcttttcatgttttcctatctagacacactacttcactggcttggttactacagctttaaatttagcatagaaatgaggtagtgggaattctccagccttgttcttcatttttgttttgttttgttttggttttgagatggagtcttgctctgtcgcccaggctggagtgcagtggcatgatctcggctcactgcaagctctgccacccaggttcatgccattctcctgcctcagcctcccgagtagctgggactacaggcacccaccaccacacccagctaattkgtttgtatttttagtagagacagggtttcaccatgttagccaggatggtcttgatctcctgaccttgtgatccacccgccttggcctcccaaagtgctgggattaaaggtgtgagccaccgcacgcggcctgttcctcattttcaattttgttttggttagtctaggttctttgaatttccaaatgaactttagaatcagcttgtttaatttctacaaaaagaaagtctgctgaaattttaattgagattgtgttata

SEQ ID NO: 154915 - DNA, 588 bp, Homo sapiens
cctatcacaattattgcatgttatactcagtagacagtgctttatatgtgaatggtacactggtcacaggtgattatccactcttcattcatgaacccaatgactgaatttatctctttgggtgtgagtagacaactgatggagaagatgatggaaacartggctcaattagaatacacttagaagaaggaaacatatcctaagaattggagcatcaggattaaataacttcaaaatttcaaaataatataggctctacaaatcttaatggaagaggctatttgactggtgaataagagcgaaccacttcgatttggttatcaatgagaacaagtagaaggcagatgaggcagtgtcacatcttatgagtttattgaccaactagagaagcaggatggttaaaagacttgaaatcatgtcacatggggataagtggtatgtgaaatatctcacgataattatgaattcatctatttctcctttaaattatgtaacttttaatgattactttgttattacacgttcccaaattgaagataggtctatctcctgtgtagctatctcaagcttatttagactagtgtttac

SEQ ID NO: 154916 - DNA, 546 bp, Homo sapiens
tgtttttagtcctttgagaaatcttcatcctgttttccatagaggttttactaatttgctttcccaccaacagtgtataagtattcccttttctctacattctctcaagtatcagttgtttcttgactttttaataatagctgttctggctactgtaagatggtatctcattgcagttttaatttccatttctctaatgattagtggtattgagcactttttcatatacttggtcattttatgtcttcttttgcaaaatgtctgttcatgtcctttgcacacttttaatgggggtatctctctctctctctctctttctctctccctctctctatatatttcagttgtttgagatccttgtgaattctggaattagtcctttgttggwtgcattgtttgcaaatatttttcccaatctgcatgttgtctgttcactctgttgattctttcttttgctgagcagaagctatttagtttaattaattctgcttgcctatttttgtttttgttgcatttgctttagggatcttagtcatgaatttttgc

SEQ ID NO: 154917 - DNA, 499 bp, Homo sapiens
tttccagcattctaagaagcaataatactggacgcatcaatccactcagccaccctagggcactccttttgcgactggmatgcaatcttcttctttaacagacttgtacctgattgaaatcttgatgggtaaggatcctttatggtttcacagctaattgaaagcatcagctcgtcgagttttacaaacccattttttttttctctgcttgatgatgcagaactctgggtcttaatcaggttttatacaacccttgcccagattccaacatcatttcttggggacattttattctgtcaccaagagaacctatggctaatctccattcaggggtaggtcagcttcctctctgaatgagaaaacaaatctggattctcaatttttatgtcttatatcaatttgactaatttattgtgtagtatctaaagtataggaatcaacaagattcatttctgtagaatataaaaaatgatcagcccttcaatgccacatcagagag

SEQ ID NO: 154918 - DNA, 557 bp, Homo sapiens
atcatccatcatggattaaaaaagtttaatcaattttttaaattggttaaatttgttaatcacatttaatggttgaaatttcttaatttgttttgrtatttttgcattagcctataaatataggaatttgaatctagttttgtgtttatgaatatttaagaaatacattaagaccagatttacagttccaattaagatagagtggatagtatcagactaacttgggctaagaaaaactataaaagctggataacagtcccaaaacagctgtctggtggcatcagaaaataaccaaagcatctaagacctgaggggccaaacgcctctgaaaaacagaaacattttgtgatgagccttgcattcaataatgtgttttctatttgagttgtttatcatttcctggcatggggtgaaggggagaagcaaggcagtgccctagagctcacagaagtctcactgggctggatagacaaaaattagagttcaggctacaaagaaatcaaaacttgaggcccaaaatgctagagaagagggaaccacaaaaagataaaactgat

SEQ ID NO: 154919 - DNA, 345 bp, Homo sapiens
tccttccagccacgttatgacagagtggctaagttatatccctacttcatggttgagcagactaaggctcaaggccaggcaatgtgctaagagtttcacaagcacaatatgtcatttgattcacgcagcccctccatgcagttggtattattggtttttcatttactagaaatgggggctcagagaggttaaataaactattcagagtcacagaactaatagtggtggagtgaatgagaacttagatacccttgactttggagtcygtgctcataacgactaccccataggcctccctggaaaacctgagattattgaccttgtccaagtccggcctgccatcag

SEQ ID NO: 154920 - DNA, 575 bp, Homo sapiens
cacaaacatacacattagccatagtgctgtcttccacctccacatcttgttccacctacacaccttgttccactagaaggtcttcaggggtaataatatacatgaagctgtcatcatctgtaacaaagccttcttctggaattccccctgaagaacttgcctgaggctgttctacagtcaatatgtatatacagagagagtagaaaggtagatggatacataaatacacacagtttatatgtgtgtgtgcatatatgtagaagaaatgtacaaatgtactctaaaataatgaaaaattatagtatagtaagtacataaaccagtaacatagtcatctattatcattaagtactatgtactactcataattatatatgttataattttatatgtctggcagcaaagtagatttgtttacatcagcatcaccacaaatatgtgagtaatgtgttgcactaggcgataaaaactttttagttttattataatcttatggaactacmattatatatgtaccttcattgttgactgaaatgttatttcagtcaacatgtatacagtgcatgactctatac

SEQ ID NO: 154921 - DNA, 592 bp, Homo sapiens
aaagcttttttcttccccatctctgatcattcacttagatttctagaaatgaaaccrtcttgtcaaagggtagcagcattttgaaggctcttgtggcatacagaaatgtcgcagcaatgttcattcccatcagcaatgtgggctaggccaacctcctatggtctttccatcatttgactattatccttttttaaagtcttattattctgattcagataaaataggttctgactgctgcttcattcagattttttaaattacttgttaggtattctgctcatttccatgatgggcttaattctgcttcacagatctgcctgtgtcttccattgcatccacctgtacatctatctaatctcctgagagacaaggcctgaacccacagtggtggactgcaccaaaatgccttctctggcccctgttcagatgtctcagaagggtcccatcactttccaacctcacccagtctgtcttgtgatgtgcctggctctttcctcaccgactcaggatctttaaaggcctccagggccacatcacacagcaggacctggcagccaagacagtgaattgcgatggcttatgagccttccca

SEQ ID NO: 154922 - DNA, 592 bp, Homo sapiens
aaagcttttttcttccccatctctgatcattcacttagatttctagaaatgaaaccgtcttgtcaaagggtagcagcattttgaaggctcttgtggcatacagaaatgtcgcagcaatgttcattcccatcagcaatgtgggctaggccaacctcctatgrtctttccatcatttgactattatccttttttaaagtcttattattctgattcagataaaataggttctgactgctgcttcattcagattttttaaattacttgttaggtattctgctcatttccatgatgggcttaattctgcttcacagatctgcctgtgtcttccattgcatccacctgtacatctatctaatctcctgagagacaaggcctgaacccacagtggtggactgcaccaaaatgccttctctggcccctgttcagatgtctcagaagggtcccatcactttccaacctcacccagtctgtcttgtgatgtgcctggctctttcctcaccgactcaggatctttaaaggcctccagggccacatcacacagcaggacctggcagccaagacagtgaattgcgatggcttatgagccttccca

SEQ ID NO: 154923 - DNA, 422 bp, Homo sapiens
ttattcttttatcttcttctgcctattaacacacttcactatccactacttactgccacttctctaattaaggccaatatcatggttcacctctatgtttcacacacaccacagaatgaactttctctattgcaaatttgatcatgtcattcctctttataaaattattcaatggattccccattgtcttaagtacaaactccagctcctttctgcactgtactaggtcaagcatgatcttactcgtgcttgatatttcctcactccaaactccagcaaacacttgtccttcaactattgcaaatcaatttcagttactcaaakgcactgtgctttctctgcctcctgaaagttacatatactgttttacttttacgacactgtcactctcttcacttagcaaattcctacctacccttcag

SEQ ID NO: 154924 - DNA, 557 bp, Homo sapiens
atggacatttgttatttctccaaattaataattttataatttcttacacctgtctttactacaatctctgaacataaattgtgaagatttcatggacatttatcacttccccagtcaaaactcttataatttcctatgcctgtctttactttaatctcctaatccgtcattataatttcctacacctgtctttactttaatctcttaatccgtcatcttcataagctgaggatgtatgtcgcctcagaaccctgtgatgattgcattaactgcacaaattgttcataaagcatgtgtgtttgaacactatgaaatctgggcaccttgraaaaggaacaggataacagcgatgttcagggaacaagggagataaccattaggtctgactgcctgggatccaggcaggacagagccatatttctcttattgccgaaaacgggtaagagaaatattgccaaattctttccccagtaaagaataaagatatattttttgccttcttgttgagttactgctggagggaatttggtgatagagggtatcagaaatatgggctc

SEQ ID NO: 154925 - DNA, 557 bp, Homo sapiens
atggacatttgttatttctccaaattaataattttataatttcttacacctgtctttactacaatctctgaacataaattgtgaagatttcatggacatttatcacttccccagtcaaaactcttataatttcctatgcctgtctttactttaatctcctaatccgtcattataatttcctacacctgtctttactttaatctcttaatccgtcatcttcataagctgaggatgtatgtcgcctcagaaccctgtgatgattgcattaactgcacaaattgttcataaagcatgtgtgtttgaacactatgaaatctgggcaccttggaaaargaacaggataacagcgatgttcagggaacaagggagataaccattaggtctgactgcctgggatccaggcaggacagagccatatttctcttattgccgaaaacgggtaagagaaatattgccaaattctttccccagtaaagaataaagatatattttttgccttcttgttgagttactgctggagggaatttggtgatagagggtatcagaaatatgggctc

SEQ ID NO: 154926 - DNA, 621 bp, Homo sapiens
aaacacatctatgataaattattgacattcttgagataaaaggagaaaacataaacaacctggaaaacatatttgggagaataattcaagaaaatttctctaatcttgccagagacataaacattcagatacaagaaacccagagaacacctgtgagatactatacaaatgaatgtcaccaagacatatagtcagcagactgtccaaggtcaatgctaaagaaaaaagtctttttttttttttttttttttttttttttcagggagtctcactctgtctcccaggctggaatgcagtggcgtgatcttggctcactgcaagctccacctcccaggttcacgccattctcctgcctcagcctcccgagtagctgggattacaggcgtgtgccaccacgccaggctaagtttttgtatttttactagaaatagggtctcactgtgttagccaggatggtctcgatctcctcaccttgtgatccaccaacctcggcctccccaagtgttgggattacaagcgtgagctaccgcacccrgctagaaaacactgataaaggaaactagagatcttgtataaaaagaactctatcagttcaatagcagacttctcagcagaaacctt

SEQ ID NO: 154927 - DNA, 538 bp, Homo sapiens
cataaaaataacagataatgtgaaaattatgtatgtaaagatatatttaggattctcaaagagataaagacatccaggaacaaaatagaaayttatgaaattaaactggcataatgaaacaggacaagtggatatgaaaatgagtaatttgaaatcctagaaatatgaacaaaaaatactaaaattaaaatattaacgggattaacttaacactggaagctgctgaagaaggaactcattaattggaaggtaggcttgaatttatttggaacacagcacaaaaagtttataatagaaaagggcaattagggacacggagagactttgaagtgtgttaaatagattttcagaaaaagaaaataaaggaaatggcagaacaattaagtaaacatattaaaaataaaaacataggtataaatgtttatgacttcagattgggcaatagtttcttagaaatgacatcaaaggcacaagcaacaaaagttgataacttgaaaatcaataaactaaaaatttatgtgtgtcaaaggacacacca

SEQ ID NO: 154928 - DNA, 555 bp, Homo sapiens
tgaatcttttttaggacccaccatttgacccactccaggtcgttagctcctggaggggtctgcatcttgtgagtgagcacaagccctggcacagagggaatgcttgcttagcatttgtggaatggagggccagatgcttggatgaaatgcacacacacagtggccatgaatcttaagaagcgtcagtggctagaaagaagatggtgtaaattttatccccctccctgtttctgacagaatatcctcctcttctggtaacaggttttgagacgaaacatggcacgagtctctcagaaccctgcttgagcagagcagttrcattatattccacaagtcataaatatttggggagcaaaatcgattcctgcagcagtggtggagggatggtaagttggacatttaatttttttgggggggtcaatcaagaggatttgtatgtgttggagtacaatgtttctgtttctcttcccagcagagtgattgctgtactttgatacaagtcatctacctcgtggccagctgaggtggattaaagtcttccccaggaggtagggc

SEQ ID NO: 154929 - DNA, 632 bp, Homo sapiens
tactacacagtcataaaaaatacagtgaaatcatgttctttgcagttacgtggatgcagctggaggtcattatcctaagtgaactaacacaggaacagaaaaccaaacaccacatgttctcacttataagtagaagctaaacattgatgcacgtggacataaagatggcaacaatagacactggtgactactaaagagggaaggaagggagtggggcaaaggctgaaaaactattgagtactatgctgactacctgggtgatgggatcaatcgtatactccaaagctcagcatcacacaatatacccatgtaacgagcctgcacatgaaacccctgaatctaaaatgaaagttgaaattattaataaatgaataaataaaatggtgatgatgatggtgataaaaacctacctcataacaatgatgggagaattaaattactcttagggarcatacagaacatagtaagcactatgtaaatgttagttattttagtaataactccttttcccccttgcctccttttgctctccctctcctccttcaattcttcaataagcacatactgaacaattaccaagtgcctggctttaggctagatactggaacagacccaaataataaaattagaag

SEQ ID NO: 154930 - DNA, 417 bp, Homo sapiens
tggcaacaaaccaccaatggctagaaactcttctatgttttgcgtaagattcttgatgcacaaactcacctttgctatctttgtgactttttgctaaggtcaatatcgtacatcctgggtttcctacccctggacctagatgcccaaactccaggccttctcattttctgcacacttggattggctgctgctggtcccttgkgggcctgccattcatgtgggggttgccctactacccctcactagctgtggtattgacataatcatgtgacttcagtctaagactgacatgataccagcaggagaagagaaaataacaggtgcaagtgagaagagcctggtcctgcgtctcaccaagagctactcattcctcaggagtcacgagccatgcatccaaaacaattaaaactttgcaca

SEQ ID NO: 154931 - DNA, 572 bp, Homo sapiens
aactgctttctatcacttcagaatatacaggagcatctcaatcctagtctttctttgtcttattttttttttttttgagtttgcattatctttttcagaccttagctttgargtgtgtatgcagcttcccccatcacatgacctcaccagggagcaactggcctggggaagctggactgggaagggctgagtcagcaaggaccacagtcacagcaggcacccttgaggggactggggtgagcaggaagctgtgtgtgctgaaatcagcagaaagcatgatttaaaattaaattggtgcatatttttaaatgcatttaagcaccactttaaatggtacaataaaaagcaacaccaatcttttctcatcacacgctcctcagacttcttactccaagggggaaatccatgcccattaagggcagatgttatggaaggagaaaaggaagtagactaatatttataacttgcctaactttaaacataacttttctctttagttctgaaagtaactctctaaaatatgctcagagaaattaacccaccaaaggtaaatctcatctcagagatgagat

SEQ ID NO: 154932 - DNA, 482 bp, Homo sapiens
gaattcctagcttccatacctatatttcattaacttgccgtgaaaccttgagataatcttaaaatttgctgcacctcaattatttcacctaagaaatgggtcttctctacccaagaacacaatgtgaaaataactgaaatactgtctgtagaagctctttgagctctttgaaagagtcaaacaatataaatcaaagctgttatttttatttctgagtaaatttgctcaagaatagaattgaggtttatatgatggagttttacagacataggtttatgtagagggttttaaactgatgctattccattgtgcttaacactgaattgtaaagacacasaaaatacagccaagtactgttaaatgacactgtgtgcaggtttgaaatgcagattgcatagtaaaaatggctgatacgtctgtgctctctagaagcctgctggcttcagtgggaggtactctggtctaacatcctctgactccct

SEQ ID NO: 154933 - DNA, 615 bp, Homo sapiens
atgtggttttaaactgatgaatgaatgaatcaatctatttcatcattaatttatccatcattgatttagcatgttaggtgtttataatactcagttggaagggtcagtgggccatttggctggaaaagtcttgcagatacagtagattatcaaaaagttgtcagtacagttaaatttacacttcctatcactcatagataagttgactgtaatgcaaaaagtcaaaggaaactacccagcgaaaattttgccaagtcttcacttcctgtgtgacaagtagacactatcgcttggtaaaggaagttactttgaagtgagttacactgctgagcaatctgtcctttctattctttcaataaagagaattgccaagctgcaaataggtcatcagagctcrtttcaattgtgttgataatactacatattttagagctactttaaggaagcccttatagaaacaactaaccataagacttttaaaagtaattttgtttttgaagaattaaataattaattttttgtagctttaaataaataaatcaaagtccttttttttttctcaccatccaacttttcctaatggtgattttgatttttcatcattcagagttttaa

SEQ ID NO: 154934 - DNA, 662 bp, Homo sapiens
ggagcacttggagagacaggaagggttcacagtgccaggtgccacagtggggtcgagcagtgtggaaacccagggagaaatcctgaggaaggctgkgtcctcacagacagcatccgtggccttggggaagagactctgagttccatgctttatgttcttgttaagttttaccagtttcataagtaggttgctgtcttttctaattctaaaaatagtgcacatttattgtagaaattttagaaaatacaaaaaagctcaaaaagaaaattaaaatggccattgtttgcttctatggtgagagctgctttatgacttttggcttgctcccctcagacttggcttgcctggtttgttaaccttccatcctagtttggacttcaccattcccatctcatcaccaattcttcaccgtgattgcactcaacaatgtagcccagatatggtaaaaactttcaaataaagtgatttgatgagctataaaatggtgcattctgagtaaatgagtgatctgtggtgtgtgacaatggcaccaagagggacacacatggaaaattacatcagcaacagaggacctcataggcacacatatttgaaaatctacagcctcgtcattggtccaggtttttccttgttaagcataatctaaaacatgggtttgttta

SEQ ID NO: 154935 - DNA, 597 bp, Homo sapiens
tgcattgatttgagcaagaagttgtgcacaatggttactagttggttgagtgaattataggatattaatatcatggaaccctatgaagtcatttaaaaaataataaagaaaaaatatattgatgggaaaagatattcacaatacatttttaagtaaacrggaaatttaatatataatatttatatttaataactatcaaataagaaaatttaatatataataagatctagcttggttaaaaattcacagccaaatttatatgtgcaaatgcactaaaattatatattatatatactaacatacattatatgtattatatatgaatataattatatattattaaattttatatattttattatacctgtatatataaataacatataacatttgtattatttatatataaattacatggagtcagaagtgttatgtggaatcacaagtgatttttatttttttcttttggcttgcatatatttaccaaaatagagcaaactacttatgatagactctggtcccaaaaatccccattaacatacttaataattggcaatgttcatttaagtgcagattgcacagaggtagaagtctgaa

SEQ ID NO: 154936 - DNA, 394 bp, Homo sapiens
gaattcccgagtggtcaggcttgagtcatgtgaccaacctgatgatcagagaatggtctgtgattgaggaatctttcaaagccatcaggggtgcagatggaagaaagtaagatgcttggtagacacaacagggkgcttcttacaagctcttttctcctacacatgcagagaaataggaaagaacctagtccacaggaccatccttaacaaatatatattgggtagtaggcttgatacttcatagccaatttccctggatattctttaaaggcttcctgtgggatctgcaaacaaaagcgttagcttgtatttctgatggattggttgtgagaggtaggaaatacagcaaacgaaggagactcttaagtttctggccgaagcacctgggtgagtg

SEQ ID NO: 154937 - DNA, 287 bp, Homo sapiens
ctttgcctaattatatggacataaaagatagtctagtggasagacaataatagagaaatatgacacagaacaatagatgctacagcaagtgcagttgacagaatctatgggagtgtagaggagggatctctaacttagacttgggaggccaagagaaactccatagagaatgacatcaagaacctaatctggaaaagcaagctgagttaggaaaaaggaaggggaagggaaatggtaggtagaaatgaaagacagagcaaggatttttcaaatagaaagaatgtttc

SEQ ID NO: 154938 - DNA, 586 bp, Homo sapiens
atatattgctattttcctgtgtttttctactatttctggaaattgtctagttcacataattaaaaactcaagccagacaaaagagaataatcagctatattaacagtaagccaaagacttctattcttcagaaatttacttaaaggcaaatcagatataaacctaggaagtccagaaaagttaataggacttaagcccacaccaagaaaataagatatatgtatgattaccttttttttgtagttaaccactgacactatgtaggatcctatagaaaaagaaaggcattcctgtttttaattttttgtttcatgtagtaaaaaatttactaccacaaaagtaaaatcaaccacaattaacaagcagtgaatggawgttgaatatttcaagaaacaaaagcacaatactttagattggttaagtggattaagagcaccattagaggactgacatgagaaatgtgatattttgaggaaaaaataataaaatatgaaaaatacaatgaaaaatcataaaacataaaaaacatatattaaacaaaaaaaattaaacaaaaaaaaccatatattaaattacaattttttaa

SEQ ID NO: 154939 - DNA, 586 bp, Homo sapiens
atatattgctattttcctgtgtttttctactatttctggaaattgtctagttcacataattaaaaactcaagccagacaaaagagaataatcagctatattaacagtaagccaaagacttctattcttcagaaatttacttaaaggcaaatcagatataaacctaggaagtccagaaaagttaataggacttaagcccacaccaagaaaataagatatatgtatgattaccttttttttgtagttaaccactgacactatgtaggatcctatagaaaaagaaaggcattcctgtttttaattttttgtttcatgtagtaaaaaatttactaccacaaaagtaaaatcaaccacaattaacaagcagtgaatggaagttgaatatttcaagaaacaaaagyacaatactttagattggttaagtggattaagagcaccattagaggactgacatgagaaatgtgatattttgaggaaaaaataataaaatatgaaaaatacaatgaaaaatcataaaacataaaaaacatatattaaacaaaaaaaattaaacaaaaaaaaccatatattaaattacaattttttaa

SEQ ID NO: 154940 - DNA, 539 bp, Homo sapiens
taatcagcaaatctaataaaacagaagcatcaagcagcatagagatgcatatgtaaaactcttaatttaatactttatgaaagttctccaaatctagtctgcagcccactagtgagttataaatttatcttgaaacccaagattctcttttgggaaaatgatttatgatatcatatatattcattttgtctatgaataaaggctacttattagtaaaacaactgagttatcattttgctataaattacatgttaactagtgtttactgaacttccttaattcagtattctttaactggctgtcagctcttggaaacattgcaaagtttctgtatgcaaagaattagaattcatgcaatgtggagaaggataatttgttatcagtgtgtcatgagtgttgtcttgagttattagtgattttcaattgctgtggtcsttgttttttaattataaattagtagtggtttagtttcatcattatcaattaagtttgctgtggacgattgggttaaccctgtagtctgtaatgatggatattta

SEQ ID NO: 154941 - DNA, 398 bp, Homo sapiens
gaacagtgtttgccatcgaataaacaacaaatactagcttttattttattataaaatttgattggagatacctcacagatcaatatatttccaaatgatctatggccacaatagaacttaatagctaatatgggagtgattattaataaaagatagttgtaacatagaaataataaatatttgaagtgatgcttgccctaaatcytctgatgctttccctaaatcctctgagttgaacattgcacatatgcatgtaacaaattatcacatggaccccataaataggtataaatatgtatcactaaaaaataaaataatattctctccatcccatcagtcactctcctctacctgccttatccaacatcacagccctttcccccacctgacatgtttct

SEQ ID NO: 154942 - DNA, 521 bp, Homo sapiens
cacgtaaggtacagaataattacataaatattagagggagtttggtataaggttagaaaaaactattacgttccagggttaaatttaatcacagacctatagactttaaagtctggtatagttgctagaaagaggccgtagacttgaccctaaacctcctataagccaaagcttatatcacatccaagtccatcggcatttatgtctacaatttctagctgtctacttttcctttctcttctattttattcaatacttttgtagttttaagtaacatagaaaagatttttgcgacagcgtatatgtcagtttctcagtatgattttatatcttagaaaattaacttagctacttaactaatagaatgaaattgaaaacagtttcacaaaacctctttagttaagccataactgaaactcaaatcacggagacatataccaagarcagagaagaaagtagtaataatctaggtggataaatattttaattgccaggtatcagtttttaacagtttggttggc

SEQ ID NO: 154943 - DNA, 478 bp, Homo sapiens
tcaaaaagcctgattctgtagttctggtatggctttgaaatctgttttataaaataaaaccaggtttgagaaacattgctttattaagtcatgggatagtataaaataaaaatagatatacaatagaaaatagaaatagaggctttcccttttattttgctttctagtttggctgaaggaatgcatgaaaacactaagtgatactttaaaagctagggcatggctatgtgtttgtgtgtgtgtgcacatattttatatgtgaacatattaacwtacattaatttagccatccaaggtagaatttggctgaaacaaaaacaatctcaataaacagtacaaaaattcatttaaaattaagaattcttttaagataaactttagataacagtgatatttcaattttaattttataattctgtattataaaattacttctagcacagtaacttttctttatgacattttaaaaattaattgt

SEQ ID NO: 154944 - DNA, 580 bp, Homo sapiens
caagttcacctaattatgagcttagaagctccagagcagaactctcacccaccaggagattgcctcaagagataacagtcaatttacaacccaaagtatgcccactataaaactctcactcaccaggagactgccttgagagacattacaactcaaagtcttgctataaaaaaaaaaaaaaaaaaaaaaaactctctcccatctggagagttttcagccacctctacctcatttctgcccatgaaaatgccaactcaactgcgtggtagataaggcaaaaagctagmatgtggaccttccacctgctcacttcctcccctgtgtatattcatgataagacccctttaaaagtgccccctttctgctccagaatcaaagcagtgcccttaaagcaggaaacccttgcttcttccctcagctagctttggaataaaaagtccctttctttataacagacctcgctcttgttaattggactcctcaagcagcaagcaaataaacctgcatttcgcttacagaattaccaaatgatccaccaatcttacttctgggtatgcatacaaaagaactgaaagtagga

SEQ ID NO: 154945 - DNA, 580 bp, Homo sapiens
caagttcacctaattatgagcttagaagctccagagcagaactctcacccaccaggagattgcctcaagagataacagtcaatttacaacccaaagtatgcccactataaaactctcactcaccaggagactgccttgagagacattacaactcaaagtcttgctataaaaaaaaaaaaaaaaaaaaaaaactctctcccatctggagagttttcagccacctctacctcatttctgcccatgaaaatgccaactcaactgcgtggtagataaggcaaaaagctagcatgtggaccttccacctgctcacttcctcccctgtgtatattcatgataagacccctttaaaagtgcccmctttctgctccagaatcaaagcagtgcccttaaagcaggaaacccttgcttcttccctcagctagctttggaataaaaagtccctttctttataacagacctcgctcttgttaattggactcctcaagcagcaagcaaataaacctgcatttcgcttacagaattaccaaatgatccaccaatcttacttctgggtatgcatacaaaagaactgaaagtagga

SEQ ID NO: 154946 - DNA, 580 bp, Homo sapiens
caagttcacctaattatgagcttagaagctccagagcagaactctcacccaccaggagattgcctcaagagataacagtcaatttacaacccaaagtatgcccactataaaactctcactcaccaggagactgccttgagagacattacaactcaaagtcttgctataaaaaaaaaaaaaaaaaaaaaaaactctctcccatctggagagttttcagccacctctacctcatttctgcccatgaaaatgccaactcaactgcgtggtagataaggcaaaaagctagcatgtggaccttccacctgctcacttcctcccctgtgtatattcatgataagacccctttaaaagtgccccctttctgctccagaatcaaagcagtgcccttaaagcaggaaacccttgcttcttccctcagctagctttggaataaaaagtccctttctttatamcagacctcgctcttgttaattggactcctcaagcagcaagcaaataaacctgcatttcgcttacagaattaccaaatgatccaccaatcttacttctgggtatgcatacaaaagaactgaaagtagga

SEQ ID NO: 154947 - DNA, 611 bp, Homo sapiens
gactacagtatattgattttggaatattagaaattttccagccaggtgcagtggctcatgcttgtaattctagcactttgtttttttgaagccrgcagatcacgaggtcaggagttcgagaccagccttggccaacacaatgaaaccctgtctctactaaaaatacaaaaaattagctgggtgtggtggtgggcgcctgtaatcccagctactcgggaggctgaggcaggagaatcgcttaaacctgagaggcagaggttgcagtgagccgagattatgccactgcactccagcctgggcagtagagctagactccctctcaaaaaaatttccatatggtggtttaatttccttgcttgtacattgcttttggaaataccattttgagcatgcagaatcaaaattaaaagctaactccatgtttttggtatctaattgttgcaatatcatattgttatttacatacaacagtgaagtcacagaagacctaataattatagaccctaaacctaacagcagtcaaagcaagaaaaatacataataaaaaatacatggaaggaagacagagcagcagttgaaaagatcctgtatttcttttattatgttacgga

SEQ ID NO: 154948 - DNA, 469 bp, Homo sapiens
cacccctcaccactctgttcacccttggcaagcatgggatccaggccagtagtgtgagccaagcgcagcctgccaggtcaagtgggcagaacgagcccagtggacctgagcaaaactckggcaaaggcgctgctggccagaggtttccaaacagaaaagcatcaccctgaggatcctggaacagtgggaccctatctctacaagaaataaaaataaaaaattagctgggcatgatggtgcatgcctgtggtcccagctacttgggaggctgaggtggaaggatcacttgagcctgtgaggtagaggttgcagtgacctgtgattgcaccactgcacaccaacctgggtgacagagtgagatcctgcctcaaaaacaaaacaacaaaaaaatatgaaggagaaaatacgtaactggaaggaagtaacttagtatctctttgggaaaaaaggattaaacaaaggaagagat

SEQ ID NO: 154949 - DNA, 604 bp, Homo sapiens
ggactatcttagctgtgtcctcaggatctatcactgtgttaatatatagaatatcacaataaatgttaataaatgatatttgttactcaacatttccatagatttctacaatccttttcatataatggatatcctcgccatcccttcaaaaatgtactatgtactctcttcatgtcttttcccttgtcctttctgagatatttgttctgctctcttgcctagtttctacttattttccatgattcgcttatttcataaaatctattccagcctaagcatttcatttctctcaaattgtgtcaagactatattacacygaactctactctcctaaagagagtcaaaaaatcatatttatacttgttatatatcctccacatgtcatagctctaagttgggaacattgctagttaatatataagatacagatggtttgtgagaaaagatacaagtctcttactgatgaattagatcagagataggcaaactatggtctatcagccaaatttggccggatgcctgtttttataagtaaaatttcattgggacacaaccacacccattcatttatgtattgtttatggtggctttcctgctataacaa

SEQ ID NO: 154950 - DNA, 591 bp, Homo sapiens
gtcataaatgttgcctttccatgatagtgtgygggtagcactttccatgatagtgtgcgggtagaaataggaataaaaataggaataatcaccaccaagccttgtgcatggtaataattagctagcactccctatgaaaaaaatttataattgtgttataatatatacaattttcacaaaataattatgttcaaacttacgataaattctcacttcctcattgtttttctctaaaatacagactaacacaagcagctttgtctatgatatgaaagggctgtaatgtaccaaaaataatggagagttattgataagtggaaagcattaaaaaaactacttcttaaaagacttttgtctcagtcttttatattttaatggtataagcttccagctatttcaagaaacaaacagtaaaattatttaacctattgaagagtctctacataaaggttaaaaaaatatgtcaatcaataagaataaactattgattgacagcctctagaaacttcacattatttcctagtcttaaaaaaaggtatgtttctacaaaataaaatatccgttagttctctatagaaatttgacacataa

SEQ ID NO: 154951 - DNA, 511 bp, Homo sapiens
cttttttaaaaaattgagtgttctcaaattctgttttctgtcagtcagtagtcttagataagaaaatgtttctcaccttagttataggttatatgcattattgatatttgactgaacgccactagttttcaagatgtgatgtaacttttggtctaacctraccttttcttgttttaatggtttctgctgtgaattaatagaaatatatatttgctttatattaaattgcaattattgagtatgtaaatatgaacttcaagagatggtttgttcctttagcaacttttggaaataagtatttcacttttaaatttaccaatttagtgaggaaaaacacctaaaggagctttgagattattcctagttttgaaatgtgactatttagggatgacatttgcacttgagagctgctgcagaaatgggttcatctagttaaccttcatctgaattgccaccctctgctttatcctatgaaacaactggtgaagagaaaatgttaattaggaagctt

SEQ ID NO: 154952 - DNA, 226 bp, Homo sapiens
tggctgcctaagaggccaaatattgagctagggggagatgatgatactggtggtgatactatcaatgaagaaaatggtaactaacactgaatcccaactacgattggttctaaattactttatataaacagaaagtttatgtaatgtggtcaaggtcacrcagcctggatagaatcccttcactgtattcaagaacgacatacacacaaaaagtccactaatccat

SEQ ID NO: 154953 - DNA, 452 bp, Homo sapiens
tcaatatacagttcatattgagtatgattttctcccattgaatctgggagaaaattgattatccctgtctttccagaaaatgcattcttcagtatcaacacaatgttgatactgccaaaagaaaaaaaaaaattaacgatacctagagctatttcactgctaaacctaaaactatttgattttacaattactgtattttctgcattgatgatatgttcgttatagtccagtagtattgaaaaacaacatggttcwttttaaaggtactcattcatctattattaaagggatggctgaaaagtaataaacatcatactcaactattacacaaacctactccaacttcttttatcaagagattaactacaactagatcagtaaatagctcagttacaatcttgacattttgttttttcactctactattattgttgaggattctgcgattaata

SEQ ID NO: 154954 - DNA, 472 bp, Homo sapiens
tcctgcagcccaagggtgtaaccacccagagggttcactttgccccctgcctagacagagccaattcatgaagacaggggaattgcaatagagaaagagtgattcacgcagaactggctgtgcgggagaccrgagttttattatttctcacatcagtctccctgagcattcagggagcagagcttttaaggataacttggtgggtgtggggaagccagtgagccaggagtgctgactggtcagagatgaaatcacagggagttggagctgtcttcttgtgctcactcagttcctgagtgggggccacaagatcagatgagccagcttattgatctgggtggggccagctggtccatcaaattcagagtctgcaaaatatctcaagcactgatcttagaagcaatttagggaaagtcagaatcttgtagcctcctaaactataatttctaatcttgtggctaatgttcatcct

SEQ ID NO: 154955 - DNA, 472 bp, Homo sapiens
tcctgcagcccaagggtgtaaccacccagagggttcactttgccccctgcctagacagagccaattcatgaagacaggggaattgcaatagagaaagagtgattcacgcagaactggctgtgcgggagaccagagttttattatttctcacatcagtctccctgagcattcagggagcagagcttttaaggataacttggtgggtgtggggaagccagtgagccaggagtgctgactggtcagagatgaaatcayagggagttggagctgtcttcttgtgctcactcagttcctgagtgggggccacaagatcagatgagccagcttattgatctgggtggggccagctggtccatcaaattcagagtctgcaaaatatctcaagcactgatcttagaagcaatttagggaaagtcagaatcttgtagcctcctaaactataatttctaatcttgtggctaatgttcatcct

SEQ ID NO: 154956 - DNA, 472 bp, Homo sapiens
tcctgcagcccaagggtgtaaccacccagagggttcactttgccccctgcctagacagagccaattcatgaagacaggggaattgcaatagagaaagagtgattcacgcagaactggctgtgcgggagaccagagttttattatttctcacatcagtctccctgagcattcagggagcagagcttttaaggataacttggtgggtgtggggaagccagtgagccaggagtgctgactggtcagagatgaaatcacagggagttggagctgtcttcytgtgctcactcagttcctgagtgggggccacaagatcagatgagccagcttattgatctgggtggggccagctggtccatcaaattcagagtctgcaaaatatctcaagcactgatcttagaagcaatttagggaaagtcagaatcttgtagcctcctaaactataatttctaatcttgtggctaatgttcatcct

SEQ ID NO: 154957 - DNA, 422 bp, Homo sapiens
gaggaattcaaaaaagaaaagcaaacgaaacctaaagctagcagaaggaataaaataataaagattaaaataaagataaatgaaataggaaaatgatagaataaatgaaagcaaaagttgattctttgaaataattaaaaatttggcaaacatttagtgagactgagaaaaaaagaaagaagatgtaaatagttaaaatcagaaataaatgtggagacattactaccaacctyacagaaataaaaaggattataagagaacactatgaacaattgtatgccatcaaatcagataaccaagatgaaatagacaaacttctggaaacacataacttaccaaaactaagtcaaaaaaaaatagaaaatctgcctgtaacaagcaaagagattcagtaatcaaaaatctcccaacaaagaaaagtt

SEQ ID NO: 154958 - DNA, 603 bp, Homo sapiens
aaaggttgaagggaggatcaaattgaacgatgattcactccttcctatagaaagacaatatcattttaaatcaaaatatcttaactgtttatgagaggtcccagctagaatcacacagttctgtactcagccatgtaacccttggacatttggccaaggtccctcaaatgcaaaggtgcaaacttgagttaataaatttcttccacacaccctgacatagatcattcatttacttttaaacaaatgtttattttstttcttcctcttttaaattacaagagaaaaacattcccgtagtatatgtagttggaggtgaagctggggcctcctgagttgagatatgactggccatggacttaggtacatttccttgcccctgcctgccccacctgtaaacatccagttgcacctcgaattgacttgggagatgcaaaacctttccaaggaaggcactcagtcacatatgattcagaaatatgagagcatgtctagcaaactgtgggaaaggatcaagaaggaagagacgagaaactgggatcagccacaaggcccgagggtggttccaggaagagcaaactttccctggacactgtcccagttcac

SEQ ID NO: 154959 - DNA, 440 bp, Homo sapiens
tagacctcatgtgagttatgaatctgaacttcatcctgctgtgtgctattggataaagactctaagagctacattacagattttttcgacaggaagtatcacagtaacaaggccctatttaaaggctgttgctactgctgtggaacagatttacccatttgtgttkgaaagcaggaaagaaattttatcattcaccacttaattggttagaatctcttactgtgcaccttttaaaacctgctgcacattggactcaaaaggaaaactgaaccaacggtaattgaggaaatagactcttttatttattcatggctacagtgtaagctccagtccctttggattttattccaaaccttgttataatataaaaaaggaagtttacaagacatgtcattgctgcttttacaaaaggacattctatttattttcgcaggaattct

SEQ ID NO: 154960 - DNA, 455 bp, Homo sapiens
ccatcagttttgccagtgtgggggcacagccttaagaaaacatgtttttattttgtttatttttacatagtagtataacaaaatatgtacagttttagtcagtgatattcttggaagtagaatacagttctatgttttatgacagaatttttatgcattgatgtaaactcttactataatgtaaaattaatatagaaataaagcaaattgcaaagaaaataaggaactaagtaatgggcaaattattctctgcactaaaatttactaattactaaaatcaatttagtattgccctttttctccttttaatatcccctactstttccctgtgggattgaagtagaattaactcaccgtatacatggaacttaacaaatctctactatagatcactcacagctttagacagtcaaactgttttcttgtcaaaagcccttgcagacacttttttcacc

SEQ ID NO: 154961 - DNA, 508 bp, Homo sapiens
gttgttagtcaaatatgctggtacaggagagttcactgtaatctcaggtcatagtaaaatgaatgaccatgtcaactcccatarcacactcatcatcgtagccaacgggtattgcctggtactctgccattaccagctggcactgatcactgaactccttgtaactgtgagcatgtacttggggagaaatcaaagtctcttctccagaacacatagcttcctttgttcaccacagccttatcttatatgtgtagactgcgtgtgaaggcagactcaagagtactttcagaacagtagatactgtggagggttgggtaccaagggaccttctaaaggaatgtgccaatgaggtctgacgtgctacagtttgctcaagaataatcatgtctgcaaggagtacctgttatttgctcaatgttgaagctgaataaacagagggtttctaaaattagaatcatctgggctgtgaagagagcacatgtagagaggcagatggaggcacacccca

SEQ ID NO: 154962 - DNA, 582 bp, Homo sapiens
ttaatccacataaagcatttaggacatgcctggcgtagactatttccctacattccatggaagaaagtgcttgggaaaccatttcttggtgtagtgaattcaaccaggccatgttcccaggtcactatttgcttatttggttggtgttttcaacaaagacttttaaaactctaggagagcttacctttctcatcttctttctccttcgtgtctttttctttttgtgaatgatgagaatgtggrtgagatctttccaatagacattttgctttcattcattttccactcatttcctctccacattttaccccaaaataaaagtgactcttttgaccttgactcacaatacattcacaaatatcaggggatcttctgcagctaccagctatggctctcaagtacttgcttgcctgatttcatgtgcgggggtggggagataaataaataagaaaatatttgtttttattgctatgattcttagagctcaaaacagcctgttttataaatcatctttcttttaaattttgatataataaatactattaaaagcagtacctggtattgacacatttaaaaattctc

SEQ ID NO: 154963 - DNA, 554 bp, Homo sapiens
gaaacattaacccacaacaggtctctgctaaaggatttttgtgacatccatctaattgtcacagaagcacagatgcaagcttaggagtcctgtgagaacagctattgctaccatccagtttagcatcagaaaacagagcagatcatgtaatgctagcacagataataaaccaggattcctatcattctcaccgatgaattttacatttaacattatcttcaacttaaatctaagtggttaggataarccatagtttcatcaaattctgtttccattgccactgttattttgacacatcctcaaaataactgccttcaccctttcttagttgaaagatagacagtgtttttctcaattttcatcttggaacaatttactgaaagaaaacttacgatgagtgagcttaaaactcttagcaacttaggcctgaatgtcattaaattaagaaagcccctctgtgattataaatagtcacagggcattagtgatgtaggtctgaagagctctaatctattacaaaaactttccttcagaggctttgatttgtgagcaat

SEQ ID NO: 154964 - DNA, 573 bp, Homo sapiens
atgatgtaagggataaagataactgtttagctgtgcccccagataggcatattgttcgcgtatggaagcaactggctttagcatgcagatgatggctgctaaggaatgtctcacatcaactgtcatatcccagcagtacaaatttataagatgaaacaactctctaatcccttaaactgttaatacatagctaagaatccttgtgcataamtaataaaatttacatttactaagcttcaatttctttgaaagtctgttttatttgatttttcagaaagcaataaggaaaaaaagtgcaatgaacactgagaggatgtgtttggaagggaagaggaatgtaataggagttcaatgtataaatgaagtgcatctcgggaaagctcacttgtctgcctgtattaattatttctgcagtgggagtgtagcaaatgatgtctctgaacatgaaattaatgcttgtgtgttttaagggatttttttcttgtttaatattttcctatgtatgtgaattttggccataatcctaaaactaagtctagaaacaaatgaatacccaaaaatggcaggaatggt

SEQ ID NO: 154965 - DNA, 573 bp, Homo sapiens
atgatgtaagggataaagataactgtttagctgtgcccccagataggcatattgttcgcgtatggaagcaactggctttagcatgcagatgatggctgctaaggaatgtctcacatcaactgtcatatcccagcagtacaaatttataagatgaaacaactctctaatcccttaaactgttaatacatagctaagaatccttgtgcataaataataaaatttacatttactaagcttcaatttctttgaaagtctgttttatttgatttttcagaaagcaataaggaaaaaaagtgcaatgaacactgagaggatgtgtttggaagggaagaggaatgtaataggagttcaatgtataaatgaagtgcatctcgggaaagctcacttgtctgcctgtattaattatttctgcagtgggagtgtagcaaatgatgtctctgaacatgaaattaatgcttgtgtgktttaagggatttttttcttgtttaatattttcctatgtatgtgaattttggccataatcctaaaactaagtctagaaacaaatgaatacccaaaaatggcaggaatggt

SEQ ID NO: 154966 - DNA, 577 bp, Homo sapiens
ggtttaaatatttaaactgtatactttgctacttaaacaggatggataatacaactcgaacattttttatcagggaaaaaatatgtgaagatgccatttgatttgtttattctcgaattttgtggcctactatccatgcatgaaacacaatgcagaatctttattgacagcgtgctagcattctttttttttttttaattttacttaaagttttgggatacatgtgctgaacgggcaggtgtgttacatatgtacacatgtgccatggtggtttgctgcacctatcaagcygtcctccaggttttaaaagccacatgcattacatatttatcctaatgctctccctcccctttcctctcatcccccgacaggccccagtgtgtgatgttcccctccctgtgtccatgtgttctcattgttcagctcccacttatgagtgagaacgtgcagtgtttggttttctgttcctgtgttagtttgctgaggatgatggtttccaggttcatccatgtccctgcaaaggacgtgaactcattgttttttatggccgcatagtattccatggtgtatatgtgcc

SEQ ID NO: 154967 - DNA, 577 bp, Homo sapiens
ggtttaaatatttaaactgtatactttgctacttaaacaggatggataatacaactcgaacattttttatcagggaaaaaatatgtgaagatgccatttgatttgtttattctcgaattttgtggcctactatccatgcatgaaacacaatgcagaatctttattgacagcgtgctagcattctttttttttttttaattttacttaaagttttgggatacatgtgctgaacgggcaggtgtgttacatatgtacacatgtgccatggtggtttgctgcacctatcaagccgtcctccaggttttaaaagccacatgcattacatatttatcctaatgctctccctcccctttcctctcatcccccgacaggccccagtgtgtgatgttcccctccctgtgtccatgtgttctcattgttcagctcccacttatgagtgagaacgtgcagtgtttggttttctgttcctgtgttagtttgctgaggatgatggtttccagsttcatccatgtccctgcaaaggacgtgaactcattgttttttatggccgcatagtattccatggtgtatatgtgcc

SEQ ID NO: 154968 - DNA, 519 bp, Homo sapiens
caggctagatttcatccctgtaatgctaatgttattcagtttgtagtggatatttatcttggggtggtatgtcaaaactatgcctgtatcctgtttctcttcagactgtgggctactgattttatcattgattagtatattttgcctgcaatagttactgtggcttatgtccaayggtgattttgaattttcgtcagttcttctatatgtattgattagaatatttttataaggaagagttaattattctgcatttacatatttattcagcttttaatttatgttagactcatgggtattttattctatgggcataatccagcagtagtattcattttgccgctcaaatgatcttggctttggccactgtgcactccctcaggttggctcttctgtcctttttacttatcttgattcttttttttgagaacgtccttattttccaccattatgttgcaggcttactgtatttgcctgctccaactccagaattaaccacttctccaagaaaccctggtt

SEQ ID NO: 154969 - DNA, 563 bp, Homo sapiens
tgttgatggcctagtagcttcagtcaagtgccagtgggagtgaggcaaaaatttgttttgaaggccatctgtgttttctcagcttgtgattgccacctacatttaacaaatgagggaactagggctcagagagttcaagattcatcccacacttctctagttagtaaatgtcagagagggttctatctgctgccggttttccattcttttcactgctcaaaacacatcccactggattctcaagtgtctttcctaatttctacatgcgctactcttcatagtctatgttatttaacatattctctctcctatcacttatggtgatactggtgccactggttgtattaacacaataatactgtaagcattgtcccatttcaatatatgtttccctgaggatattgataatgggacaccccataaagaaattaaaactcaacaattctaaaagagagcaattcaaaatcaatgcaagaagttttttggtacttattctcaggtttatagttgccttctctatataaayactacttacaacagggctttattgctttcttttttta

SEQ ID NO: 154970 - DNA, 603 bp, Homo sapiens
atatctagctaattgatgaaaggtttcattttaatatcagactcttttcccatttgaggagtgtttagagaacattgtttataatagattgccatgtgtgtctctacttgtgcaacacaatgctccgaagtatttagaacaagtggtgaaaccccgtctctactaaaaatagaaaacaaaattagccgggcgtggtggcggcgcctgtagtcccagctactcgggaggctgaggcaggagaatggcgggaacctcgggaggcggagcttgcagtgagccgagatggcgccactgcactccagcctgggtgacagcgccagacgccgtctcaaaaacaaacaaamaaaaagccaagtgtttatttcttatatttttcattttttcagcttcatataggcataactgacagataaactttgtatatattcaaggtatacagagcgatgttttgatatccatatatattgtgaaagattaccacagataaattatttaacatgttcatcatctcacatagtttcctttcttttgtgttgagaccacctaagatacactctcttagcaaatttcaagtgtgcaatacattattagtgtttacagggt

SEQ ID NO: 154971 - DNA, 620 bp, Homo sapiens
tcttgtttgtgcatctcaagggtacagagctatgatacgggtcttccaattaaagtcaacattgcctactgcaatttacacctattgatatgttagcagctaattcaaaagcatagcttgccgatttccactttgcaccacagtttcaattgtcacaagggagaaagcacaattcttattgcctttcttctgttttatgtttgtctacagggctgctcctcatattatatttggatgtgttaaatgattttttctgtttgcatgtggaaatctctttctgcttgttgtttacttttgtacaacagtggtgctggactgggatattgagataaagtatttttatgtataatttgagatatagctggaatatcatgaagtctataaagggctacatgtttatcagacagaataagtgcaatgtaaatccacatttgcccatatgaatatcattgacacatggtattgatagcattgtcatagccagatctatcaaatgtgttcaaattcataagagagcaatataaccatggaagagagttattaacatttactttcatcgaaatatgtgggctcctaaatactgttttttctttaaygtattttttctgatattcatttaa

SEQ ID NO: 154972 - DNA, 581 bp, Homo sapiens
tttaaatacatttccaggtttcttttaaaagcacatatcctttgacacaatgcacaacattttatagccctgaaccattgatgccttgtaaaagcgagtctttgcaaggttatgtttatcatttcctaatgtgctgctcgttctctgtaactttgcagctaacactgaccttcctccccctgtttcctctttaattgttttatatctaactctatgcttgaagatgtgctgagagctgccatgggtttctctgtaacactatggatattgctgctaaaygaatgtctcctgttgaggcacagagcatggtaaatgcaacttatggcctcatgtcccttttgggtaaatcctatctggggcaaataagagaaagaaaaatagcaaaaaaaacccatgggccttgggcaccccctagttctcagggtgggtgctgtaccaaggctttcaacaacaaaaaacttcttggcaaacagatgccacaatcctcacactcctctgcaacatcactattcttttccccaagtttttcctcccttctcttcttattctttctgtcattttttgtccattaagcaattgtc

SEQ ID NO: 154973 - DNA, 542 bp, Homo sapiens
tgatatctaaaataataaaaccaaataaactgtgccrtaaaggcactcaataagttaattgtcttttaaaaactgacgtttttccaaaattgcctgatttggagctactttctaacatcatatttgtaaacatcatatgggatgagtgttccagctaacaagttttggtaaagtgctttattgcaatgcaagaagaaaatcttccaggcaaatttgacttcttaattgagaatttcaaaatctttatgccattttaaatttgtttattttaatgttgctttggataatcagataaagtacttaattatgattctttgaattaaaagtcaaataatttctttctagttttaatcagtgattcccatacaatgattcctttatgcattttaaaaagatttttgttgttatcctaagatttttttcttagtcacttggctgtgtcttcccccactgatgaattttctatgttcatattaataaaatatttccgaggaactgtattggatgtagtttaatattcaaatgagtgtcaaatgtggttt

SEQ ID NO: 154974 - DNA, 474 bp, Homo sapiens
tgttctagagaacatccctacatagcaaaatcaagaactcattgtccatggatccttcctgatgctcacaaactggttttatgtatttatttgcaacatgaaggaaagcagacttaaaataacgttataaaaagaccacagcacattgcacacatatatttaattcagtaactatgatgtatagaaacgcttctggaaaccttagaacttaaactattaggtcgggtttcaaacacctgccactattggagcaataaaatatttttgtccaaattattcttctctgccccctcctcctcttctcctccccctcctccttctcctccytctcctccctctcctccttcctcttctcctccttttcctccttctcattcttcttcttctttcttctttcttcttccttcatttctgccatgaactgtgagtaagtcaggaccctctgaggagtcttaaataaaaccactgcctctt

SEQ ID NO: 154975 - DNA, 525 bp, Homo sapiens
atatttttggctctgctgggcattatggtctttgttgaaataacttacttctgttgttatatagggaaggcaactgcagacaaaatacaaataacatgttctttcggggtaaccagcccccaagatttcaacgtagattcttttctattttccctaagtgtcggccagtctgagaaataaagggaaagagtataaaagagakaaattttaaagctgggtgtccgggggagacatcacatgtcggcaggttccgtgataccccctgagctgtaaaaccagcaagtttttattagcaattttcaaaggggagggagtatacgagtagggtgtgggtcacagagatcacatgcttcaagggcaacaaaatatcacaaggcaaatgggcagggcaaggtcacaaggccagggcaaaactagaattactaatgaggttcccggtccgctgtgcacgcattctcattgataaacatcaggaaacagggtttgagagcagacaaccagtctgactaaaatttgctaggcagg

SEQ ID NO: 154976 - DNA, 534 bp, Homo sapiens
tcttgttaaaacattttaaaaataactaaactaagccaaaaatccattttggatccatggggtagactgtctcatagaatgtttctaaaaggaggtttttaaagtgttgttggatggtccctcttttgagttgttggaacataaatcatttgagacatttgatttgatggtttataaagtttccatgactctgtggtttattattcccaatttaggcacagggagttggtttatatttatctaatccaggtaatagagtatttaatttcctgtcactaaaaccagattctagaaatgtaatcatctaaatagaatgagaggagaggcagccagatccaacagaaattggactggagaagaaggggaaaaaaaaaacaaytgaaatctcccttctggcttcttttaaaacaatgggtcctttgtcaggcaaagagctttttgaacacactaagatatctttagccttaaaagaagtatcttctcttgtacctgtatcctaaagaaaatctattttcataacaatctgggaacggc

SEQ ID NO: 154977 - DNA, 611 bp, Homo sapiens
ccttgcctcctgcttattagccacctgacttggtacagcagagagctggcactcccatctgtctcctgtttgtgtttccttctgcaaacagcaccatgtttcactttaaataaccccattcccctactctcagttcagatcatgtggtagggctgacctcactctatcccaaagcctgctaatcagaacattccattccctagtgacaggcgcagtgggcaaaagaagcagacaggaccaactaatggycagtcttgggaatttgggtaaaataattgggaaatagaagatgtttttcttttggggttgttaaaccggtaggacatagcctggagctataggggccatctagacactatttgggaagaatctactagggaaaaagccaacacagaccagagtccagaggtagtggtgagtgtgacaatatcattggagcacctggatccatctgtgcctgaagttggtactatcattggacattatagttatacaagttaataaattcccatttttccttaatgtagttggatttgtgcttctggctttgcaaccaaatgagccctgttactatacttgagcagataacctttctctgctttaatttattt

SEQ ID NO: 154978 - DNA, 611 bp, Homo sapiens
ccttgcctcctgcttattagccacctgacttggtacagcagagagctggcactcccatctgtctcctgtttgtgtttccttctgcaaacagcaccatgtttcactttaaataaccccattcccctactctcagttcagatcatgtggtagggctgacctcactctatcccaaagcctgctaatcagaacattccattccctagtgacaggcgcagtgggcaaaagaagcagacaggaccaactaatggccagtcttgggaatttgggtaaaataattgggaaatagaagatgtttttcttttggggttgttaaaccggtaggacatagcctggagctataggggccatctagacactatttgggaagaatctactagggaaaaagccaacacagaccagagtccagaggtagtggtgagtgtgacaatatcattggagcacctggatccatctrtgcctgaagttggtactatcattggacattatagttatacaagttaataaattcccatttttccttaatgtagttggatttgtgcttctggctttgcaaccaaatgagccctgttactatacttgagcagataacctttctctgctttaatttattt

SEQ ID NO: 154979 - DNA, 567 bp, Homo sapiens
ggcataacaaatgcatcggcaaatgccaaacaagtcagttaggtcccatgattgtccacattctatggatgaagaaaacaatgggtgaaaaaaaaaaaaacaggattcactgagattctttaacctgccgaaggtcgtacaattaaggaacaaatatatatttgtataaatttaatccatttattgtttgcccggagaaaagtgcactgatgtgagctacgctttgtaaatgggaaatgggttaaggagtccaagtgcagttttgttacatggatatattgcctagtggtgaagtctgggatttagtgtaaccrtcacccaaataatgtgccttgtatccattaaataactttttatccctcgccctcctcccacccacccacctttccaccattccctgtctccattgttaaacttgggctgcttgatttcaaagactgtgctcttaataatgacattatcctgcttccatgtctctgactacattaggagcctaaaaccttaatatctgaaatctattctgaaactcacttcaaaactgagtgaggtagaaaagctcacagcaaa

SEQ ID NO: 154980 - DNA, 594 bp, Homo sapiens
tttagcctaaaaataatgctaatgactgacagtagtagcagcagcagggaatattaaataccacttaactatgtgtcaggcacggcactgctcaccactctttttcctactcccattttagaaaggggaaaactgagacacaaagagattaaaggaacttttgttcttctcattgttcaagctcagacctaactaactctcgccttcttggagagccatttttggatgatccgtagataacctctttccctccatcactgtttttcataacgtttctttgtgaaaccaaggtgatactcaaaagcctttgcaaggaggctagctctatccagcagccttcccattttgtaatcccatctcactaagaatcagccgtttgstgtgtaacctccctacctgggtgccccaggagaacaataaaggagtctgtctggttcagtgttccagtgctagttctggcccctggcattacagagacagagcaactgtcttgtgtgttaacaagtagtcaccgccctcccctgtgggcagccaaagtaatctagaaggcttatcagaagtgaaactcctccattaaagttcacccacggcaaa

SEQ ID NO: 154981 - DNA, 549 bp, Homo sapiens
taaaatgaggctgaaacctactgggctgcattcccagacggttaaggcactctaagttacaggatgagattggaggtcggcacaagatacaggttataaagatcttgctgataaacacaggttgcaggaaggaagccggctaaaacccaccaaagccaagatggtaatgagggcgacctctggttgtcctcactgctaactcccaccagtgccatgacagtttacaaatgccatggcaatgtcaggaaggttccctataaggtctaaaaaggggaggcatgaataatccaccccttgtttagcatatcatcaagaaatacccataaaaatgggcaaycagcagccctcagggctgctctgtggagtaaccattctttattcctttactttcctaataaaattgctttcactttatggactcgccctgaattctttcctgtgtgagatccaagaaccctctcttcgggtctggatggggactcctttcctgtagcagtttcaagaactaaacaaagcctaatgataccaatatgggaaaagccaatgatg

SEQ ID NO: 154982 - DNA, 488 bp, Homo sapiens
aagactgacatttttaattcattatatgcatgatggcctaattcctcttcttgattgtgaactctttggggtcaagagtcaatccatcgagtactacatccagaatatattaaacactcaactgatcaaatgttaaattaagtgatccctttaaaactccaccttttatccacagttgcaagttatggctatgttctgaaaatagataggtttccccttaagaaaattggcttgagaaaaatccaaggttataaaactaattattttcaatgctgtccaaatatgttgcaaactacacataaaattttaaatattctagtagctacctaaacaggataaaaaraaactgaaaattaactttagtaatatattttaatctagtttatccaaaatatcattattcaacgtgtaatcatcataaaaaatattaatgacatattttgaaaactttttggtgcatattttattctaaaacatctcagttggga

SEQ ID NO: 154983 - DNA, 419 bp, Homo sapiens
ctaagacagtataaaaatcctattccacataccagctaaaattcactacacgttgtggtaggcacaatcctcccccaccccaaacaaagatatccacattctaacccccaacccatgcatatgtaatattacttggcaggagagaattatggtcacagatggaattgaagttgctaatcagccaatcctaaagtaggaaagtggggagaggagcctggatgatccaktgggcccagtgtaatctcaagtgttcttaaaagtggaagaagagtccgaagaggtggccagggtgatgttctgtgtgaaggacaggaccttctgttgctggctttgaaagtaaaggaagagggccataaatcaaggagcataagcagcctctagaggcttggaaaggcaaggaaaccattccctcccaaagg

SEQ ID NO: 154984 - DNA, 618 bp, Homo sapiens
atcacctctttttgttcccctagtttcttaaaaaagtcgttgagatgactgcctttattttaacaaccctaaaaatatttgctttggacataatgcccaaatttcctcctaaaccattaggacttgtaacgtgggagatatgttttattcatctctgtgtccccggtattcagcactatgtctgctaagtaacaggtgcttagtttattcagtgaataaatgaataaatgraagacatctgatatctatagctctttagtcacattaatttcttcttctgtggccctctactcctctgttatccagcctttgcttgcatctctcaagcattcttgaaatttaattttcaggcatgtgtgacttaccctgaatactgctttgtcccctcactctttccctgatggcctgtcatttgatgaaacaccaccatgtttactgttgttcttagagatggatcagattttctctgcacagacacatcccagtcaacagtttgtagagaaccttcaagaacactcattctctccccttccctgtgaggtcgtaggtgggctataggaaatgaccattaccacttcacaaaccagaaaactggggctcaggtgcgaggtaggaccc

SEQ ID NO: 154985 - DNA, 608 bp, Homo sapiens
atagatcaaacaaaagagcaagtagagagttttgtgtattagtatataaccgagggtagatgataagtgcacaaagtaaggcaggtatgagttttcagaaaaggaagagattatttttagctgaagagcagctggtgaccattctcatattccctccttttcttccctgcccacagccatcaccaggtctcaagcataaagatagaaaggaaagttygttgtctcgctctgaaatccaggctattcccaatggctcagaaattttgcatcacctagcctgagtcatctcagctttagattttagtctatgttcaacaggaagcttctggaaaactttaatcagagaaggcatcattatcttagtgaggactttaaaacgtttgctctgggaactatacagaggagtaagagtggaagctggaagggagcctactgaggtggttcagtcagaaggctgacattattctctatgatccagactgggtattggcaaattatgatacatggaccaaatttggcccacagcctgttttgtaaataaagttttactggaacacagccatgcctatttgtttacatattgtctatagctgctttcatgctatgac

SEQ ID NO: 154986 - DNA, 673 bp, Homo sapiens
gtggttaattctatgtgatcgaaagttagagagtgttgctaaggccaacttcttagagggtaagcgggcataggacaggcaacaaaagcaatcccaagacccaaacgaaacaaatatcacaaaggacaaagtattttatcggacaggtttcctgaaaggtggggaaaaaaacaacagatcaatgctgaatgaccaaaatgttccctgctggataaacaaaacacactcacaaaaaatgattcaaaagtgtgaaggaaaagatgctgtattcacttacttgagggtagctctacatctttgcatatgccttgagtgaagagttgmccccaggtcattctcatttctgatttcaagaacaagatgataggaataattataattatattataaaaagtcatgttgattggggaatcactatgtcccatacactattcaaaatacttgtatccattaattaatgtaatcctcatgccagcaatgtatttatcattattatccgcattataaagctaaggaaacaaaatgttcaaaaaggttaatgatcaagtctgactataaagcttggctcttcattacagtcatccactaggatctatcaccataaagctataaatatcagagagattttttggagtagaacctatggtattgtattgctaacaagctcccaaat

SEQ ID NO: 154987 - DNA, 562 bp, Homo sapiens
aattaatgtaatcctcatgccagcaatgtatttatcattattatccgcattataaagctaaggaaacaaaatgttcaaaaaggttaatgatcaagtctgactataaagcttggctcttcatkacagtcatccactaggatctatcaccataaagctataaatatcagagagattttttggagtagaacctatggtattgtattgctaacaagctcccaaatcatgctaatgctactggtcttcaggcaagagtttgaggagcaagggtctagaagacaccagaaaatgcctatactgcttgtccagcttttctgggtggctgcgacttgtgggaaacaggcacgggctagactccaaaaattcgtctacatcaaaaacttgcctttgcatcctattttctgttggggatccactgcttagcagaatcataactttaggaaatagcctttggataagtcaatggggtaggcaaccaggggactattcagactttcctgtttgaccactgcactgcagtgaaagtctgaggtgcttaattcaaatgcgaagcccaaggggttgg

SEQ ID NO: 154988 - DNA, 525 bp, Homo sapiens
agagttgattgcatgactagttctaagggtgagaatayggctcaagtctgtcagtcatgacattcatcttcctccaatttcagaggttggctcaaggataggtgggtaaatcaaggaagaccaatgagtgcatcaagacatccttctggaacttatattgaaaatatttacattacaagcagtctcttcctcatggacttgaagctgagaacatgtaagaccgcagctgtgagaggtcaccaaatggagaagatatgtttaatactaaattcaatacaatgaagagaagaggcaagaaagaagagagagacactgctgatgagatgatttgaggctctgaatctagctgtatctgaagctaatgctaggcctggtatttttagttctatgaagaaatacattttctttgaatacttattgtttgttgtccaaagctttctgactcagatagagtccaaatgagaaaatcagaatgtaaagctgagaaatttgtatttaatttaaaaggcagttgcaagtttcttg

SEQ ID NO: 154989 - DNA, 457 bp, Homo sapiens
ctagttctaagggtgagaatacggctcaagtctgtcagtcatgacattcatcttcctccaatttcagaggttggctcaaggataggtgggyaaatcaaggaagaccaatgagtgcatcaagacatccttctggaacttatattgaaaatatttacattacaagcagtctcttcctcatggacttgaagctgagaacatgtaagaccgcagctgtgagaggtcaccaaatggagaagatatgtttaatactaaattcaatacaatgaagagaagaggcaagaaagaagagagagacactgctgatgagatgatttgaggctctgaatctagctgtatctgaagctaatgctaggcctggtatttttagttctatgaagaaatacattttctttgaatacttattgtttgttgtccaaagctttctgactcagatagagtccaaatgagaaaatcagaa

SEQ ID NO: 154990 - DNA, 443 bp, Homo sapiens
ctaaactaatcagtgtgaggtgaagccagggcatcaatatttttaaagtcctccaggtgattctaatgtgcagtgaaatctcagaatcactaaaggattctagtgatcggtttctccaaaggaatattttagcataataaagtatgtgttccartgaggaaaatctcttctttcatgattttgacaaaaatgaaaagaaaattcaaaaatcagtaatccaaataaatgacaagaaagaattttagaattttagaaacctaaccacttgaggtgtgttcattcaatgaacatgttaatgcatgctgtatgtggggccatgagagagcaccaaaggtggcctttagaactttcaacatcagctgcttttcctccgatctctggaggaaacaaaggattccttgtgctttgttcagttgtaacttggtatggaaattactcattcc

SEQ ID NO: 154991 - DNA, 390 bp, Homo sapiens
gctgcaagagatgatcactacagagcttcaggcagcatggcatcctggagttctgatttggcagttagtacaatgggttctagttcaaactttacccaaagacagttgtatttccaaatatggatctttctaaaacttggattcctcatcaatacagtagttcacaatgaactctattagaattacctggggagctttttgaaaagcaggtgcttgagctatttggcaaatccatgaactccaatctcaggggaaaaagttacagrttctgtgcacaacaagatgatgctgatgtgctaccaagtttgggaaacacagaaatagtccatcttttttggaagtttttcccacatacaaaatgtatgacactaggaagttgttggagggtca

SEQ ID NO: 154992 - DNA, 602 bp, Homo sapiens
taagctttttcaccatacaaaaaataagcatgtgatataatatgttatttagctcaatttattcattctacaatgtgtacatattttaagacatcatgttgtatacaataaatatatataattttccaaattaaaagtaattatattaatttttaaaaagtttgtgtgtgttattgctgcataaactacccccaaaataaatagcttaaacaaagaatttattatctgatgattttgaatttgacctgagctcagctgagcatttagtttggtagttttgcccggagccattcgagtaacataagtcatctgatagcttaattgggactgatggcctcactcacatcactggctaccagttttggctactkgccagctattggctactagctatctctgtgtgacctgtgtttctcaaggaggcttgcctggacttctccacagggcagactcagtgtgcaagaatagaagctcccaggcttaggagcagaattcacaataacgtcagttgagccacattttatttttcaaattcaataggctaactcagattcaagggaaagggaaatggactccattgcttgaaggtaagagtgagtcac

SEQ ID NO: 154993 - DNA, 405 bp, Homo sapiens
tgccaaggaaggtattgtggccaccatcttgcaaacagtctattataggcctgatgtgtgttttatctttttctgaagttatttttctctaaatagcaaacttaatacattttacatcccctattcccatcctgccctctcccctcaaaaaaaagtgtgagtaaacatatgcaatttttccactagagaccattgaaagcattcagccactatgggtcaatacagaagagtctattcaaaaacacaaccaaaagcaaacaggaacactaaaaaaaggaaaagaagagggagacrgatacagagaggcagataaaaagatggaggaagaagcagcagaggaagaagagattgagtaactttaaaaacaggggcatattaatcttatatacaatctaaaatgcctcc

SEQ ID NO: 154994 - DNA, 547 bp, Homo sapiens
cacttaattgttatgggtagtaggaagttttatatctgatgtcttttgatttactgaaagtgaacatgacttgtaaaatttgaagaaattttttcagctcctagctgacttttcctattttcttcatcattaccacatttatttttagtattgctagagttatctaatttttatgattaagaacaataaacagaaacttctcttgatgagtraattagaagtatcacctgcaaagacggcttttaacattgtaagcttgttttaaatatgttgtgatgatgtttgattggctttaaaatttccatatgcaaagtacaaatccctgaaaaagaaactccccagtccacagtaatgcaagttagcaagaagttttcttcctatatgagtgctgctctaacttcatttgtttttaaaaataaatgtgctgatcaatatcatgaataattaagtgaaaggagttgtgggatttggggctgttttctttttagtaattgtaaattccatttcacaaagccacagctcagtagctagaaggaaccacgtctgg

SEQ ID NO: 154995 - DNA, 547 bp, Homo sapiens
cacttaattgttatgggtagtaggaagttttatatctgatgtcttttgatttactgaaagtgaacatgacttgtaaaatttgaagaaattttttcagctcctagctgacttttcctattttcttcatcattaccacatttatttttagtattgctagagttatctaatttttatgattaagaacaataaacagaaacttctcttgatgagtaaattagaagtatcacctgcaaagacggcttttaacattgtaagcttgttttaaatatgttrtgatgatgtttgattggctttaaaatttccatatgcaaagtacaaatccctgaaaaagaaactccccagtccacagtaatgcaagttagcaagaagttttcttcctatatgagtgctgctctaacttcatttgtttttaaaaataaatgtgctgatcaatatcatgaataattaagtgaaaggagttgtgggatttggggctgttttctttttagtaattgtaaattccatttcacaaagccacagctcagtagctagaaggaaccacgtctgg

SEQ ID NO: 154996 - DNA, 547 bp, Homo sapiens
cacttaattgttatgggtagtaggaagttttatatctgatgtcttttgatttactgaaagtgaacatgacttgtaaaatttgaagaaattttttcagctcctagctgacttttcctattttcttcatcattaccacatttatttttagtattgctagagttatctaatttttatgattaagaacaataaacagaaacttctcttgatgagtaaattagaagtatcacctgcaaagacggcttttaacattgtaagcttgttttaaatatgttgtgatgatgtttgattggctttaaaatttccatatgcaaagtacaaatccctgaaraagaaactccccagtccacagtaatgcaagttagcaagaagttttcttcctatatgagtgctgctctaacttcatttgtttttaaaaataaatgtgctgatcaatatcatgaataattaagtgaaaggagttgtgggatttggggctgttttctttttagtaattgtaaattccatttcacaaagccacagctcagtagctagaaggaaccacgtctgg

SEQ ID NO: 154997 - DNA, 547 bp, Homo sapiens
cacttaattgttatgggtagtaggaagttttatatctgatgtcttttgatttactgaaagtgaacatgacttgtaaaatttgaagaaattttttcagctcctagctgacttttcctattttcttcatcattaccacatttatttttagtattgctagagttatctaatttttatgattaagaacaataaacagaaacttctcttgatgagtaaattagaagtatcacctgcaaagacggcttttaacattgtaagcttgttttaaatatgttgtgatgatgtttgattggctttaaaatttccatatgcaaagtacaaatccctgaaaaagaaactccccagtccacagtaatgcaagttagcaagaagttttcttcctatatgagtgctgctctaacttcatttgtttttaaaaataaatgtgctgatcaatatcatgaataattaagtgaaaggagttgtgggatttggggctgttttctttttagtaattgtaaattccayttcacaaagccacagctcagtagctagaaggaaccacgtctgg

SEQ ID NO: 154998 - DNA, 645 bp, Homo sapiens
agagtgaaggaaaacaggagttgtgattggtgtggaaatacatgttttagtgctaaacagatggtcagggtaggtggttaagggcaggacagaaggaggggaggaagttaacactggatattcttgggaagaacattccatgcagaaagaattgttgatgaagatcctaaggaargatttaggagagcaaagaagtcatatgcttgaaggttaaaaagcaaggagggaaacatcaggtcttcgaggaagtgaaagtgctaagtattaggcttgattgctgtccaccaacaacaaccatctctcattgcattagggcttgtttatgtcacctgcaaaactgtcagcttttcagaaatcccccatctatcttttgtgagtaaatattacaactgaatatttagattattctgaattatttttaacacatttaacaaattaaatagtataggattgcatcatttaaaaaggtaacaaatcaggttgggcacagtgactcatgtctgcaatcccaacattttgggtggccaaggagggaagatcgcttgaggccaggagtttgagactagcctgttcaacacagcaaggtgacgtccctacaaaaattaaaaaaataaaacgattagctggatgtggtggcacatgcct

SEQ ID NO: 154999 - DNA, 645 bp, Homo sapiens
agagtgaaggaaaacaggagttgtgattggtgtggaaatacatgttttagtgctaaacagatggtcagggtaggtggttaagggcaggacagaaggaggggaggaagttaacactggatattcttgggaagaacattccatgcagaaagaattgttgatgaagatcctaaggaaagatttaggagagcaaagaagtcatatgcttgaaggttaaaaagcaaggagggaaacatcaggtcttcgaggaagtgaaagtgctaagtattaggcttgattgctgtccaccaacaacaaccatctctcattgcattagggcttgtttatgtcacctgcaaaactgtcagcttttcagaaatcccccatctatcttttgtgagtaaatattacaactgaatatttagattattctgaattatttttaacacatttaacaaattaaatagtataggattgcatcatttaaaaaggtaacaaatcaggttgggcacagtgactcatgtctgcaatcccaacattttgggtggccaaggagrgaagatcgcttgaggccaggagtttgagactagcctgttcaacacagcaaggtgacgtccctacaaaaattaaaaaaataaaacgattagctggatgtggtggcacatgcct

SEQ ID NO: 155000 - DNA, 542 bp, Homo sapiens
tacgtaacatacggctcatagttctatatctcctgctgtatgatcattgtctcaattaatctccacaactctataaactatcattcttattacccccattttacagttaaataaactgaggcacagaaggattgggctccaacagccagtctctagagcacatattatataatgtaggtaratggctgtttatttccagtgtctagcacatagtacgatctcaaaatttatcttggaggattaaatgatttgaaagatttgaatgattaatttttttccaaatttatgcagtagtcctcatgttggtgtttctatatcaaaagccaaaataagattaatccattgcattagttctgcttttttcattcaattattgacttttagctataaaagtatctatactgaggcaatgtttctctatatataatacaactttttatttgaaagtaattttggattctcaggaaagttgcaaagatagtagagcaattttctgaataaccttcatccagtttccctaatgttatcttgaataatagcaa

SEQ ID NO: 155001 - DNA, 542 bp, Homo sapiens
tacgtaacatacggctcatagttctatatctcctgctgtatgatcattgtctcaattaatctccacaactctataaactatcattcttattacccccattttacagttaaataaactgaggcacagaaggattgggctccaacagccagtctctagagcacatattatataatgtaggtaaatggctgtttatttccagtgtctagcacatagtamgatctcaaaatttatcttggaggattaaatgatttgaaagatttgaatgattaatttttttccaaatttatgcagtagtcctcatgttggtgtttctatatcaaaagccaaaataagattaatccattgcattagttctgcttttttcattcaattattgacttttagctataaaagtatctatactgaggcaatgtttctctatatataatacaactttttatttgaaagtaattttggattctcaggaaagttgcaaagatagtagagcaattttctgaataaccttcatccagtttccctaatgttatcttgaataatagcaa

SEQ ID NO: 155002 - DNA, 542 bp, Homo sapiens
tacgtaacatacggctcatagttctatatctcctgctgtatgatcattgtctcaattaatctccacaactctataaactatcattcttattacccccattttacagttaaataaactgaggcacagaaggattgggctccaacagccagtctctagagcacatattatataatgtaggtaaatggctgtttatttccagtgtctagcacatagtacgatctcaaaatttatcttggaggattaaatgatttgaaagatttgaatgattaatttttttccaaatttatgcrgtagtcctcatgttggtgtttctatatcaaaagccaaaataagattaatccattgcattagttctgcttttttcattcaattattgacttttagctataaaagtatctatactgaggcaatgtttctctatatataatacaactttttatttgaaagtaattttggattctcaggaaagttgcaaagatagtagagcaattttctgaataaccttcatccagtttccctaatgttatcttgaataatagcaa

SEQ ID NO: 155003 - DNA, 536 bp, Homo sapiens
tgaattcaagttttagagaagtaaagtattacaagtaagtgaccatcctatatagtataatgaactgaatcatatttcatatttgtttgacccaaaatatcttataaagtaatatcgatcttttgtaggaccaaataccaaaaagttacacgatgacttgatcactaaatagtaagtatatatacacttttaggcacactgtaaaattaaattcaagacacttaacttgacaaaacatttatattcatgatcaaaaataccaaatgactgtcttaaaaacactctaatgatttttctatttcaaataataaagctaaaaatgtatttaatgttggataaatatagacaaaaaatggatctattcatgtccatttaagacagttttcttactgtcaaaatgagctacagaagaacaaatgagaattgcattcttttatttcaactttccacagaggcacagtacgaaaytcttttcttgtaacttccttgttaaaattaccatgtatcaagtagaataccaacccactgggataatg

SEQ ID NO: 155004 - DNA, 389 bp, Homo sapiens
aaaaacacttgtgaaaggcaaagcccggcccagaaacacaggcccagtaaaagactgggctttaatcataagattatacaatgcttcccctctcctatacctyaccaccacactaatagagctccatgcaatagcagtggcttacagctgaaaaagtgacaaaacacagtatttgaggaagagaattaacggaaaaccaaagtcaacaaagaaggcaaaaaaaagacaaagaaaataaaagggggatttgaaccctctggtacctatagctacagcaaatatcaaacacaattcctagccagattgacatatatcctcacattaaaagcatgtctcctttagttcatattagatgatagaacatatccagctttcaaaaaaaattatag

SEQ ID NO: 155005 - DNA, 594 bp, Homo sapiens
atgtacagaaaagctttttagtctttgctaaggcaggggataatggggggagggtgggaagcaaaaaatatactatctaaatagcctgggagraaaagctcagaaacgagatgctttggagaataagggctaggtaaacttcagagatattattgggaatatagaaggctaaattcatgttcagaactgggtgcatgctcagagaagatatgagaagtccctaagggaggtcttatgtctagcacactttcaggatctgcacaagcagaaactgaaagccaaggtaggtttggaaaatacctggctgaggtgctcaaaatatacccttatacacatggagcccgtctgccaagactaggaaattttttgtttaagcaacttaaaaaaatatttgtctagtcactagctgacagataagagatctcaattgccacaaacagcaaaaaaacacagattttaaaaattattcaaaaaagttactaaacagacaaccacaacaaatcctaagggagattaatataatttccagagatgccacatcatggtattaaaaatattcagtgttcaacgaaaaattaagaggcatgcaaaaaa

SEQ ID NO: 155006 - DNA, 594 bp, Homo sapiens
atgtacagaaaagctttttagtctttgctaaggcaggggataatggggggagggtgggaagcaaaaaatatactatctaaatagcctgggaggaaaagctcagaaacgagatgctttggagaataagggctaggtaaacttcagagatattattgggaatatagaaggctaaattcatgttcagaactgggtgcatgctcagagaagatatgagaagtccctaagggaggtcttatgtctagcacactttcaggatctgcacaagcagaaactgaaagccaaggtaggtttggaaaatacctggctgaggtgctcaaaatatacccttatacacatggagcccgtctgccaagactaggaaattttttgtttaagcaacttaaaaaaatatttgtctagtcactagctgacagataagagatctcaattgccacaaacagcaaaaaaayacagattttaaaaattattcaaaaaagttactaaacagacaaccacaacaaatcctaagggagattaatataatttccagagatgccacatcatggtattaaaaatattcagtgttcaacgaaaaattaagaggcatgcaaaaaa

SEQ ID NO: 155007 - DNA, 594 bp, Homo sapiens
atgtacagaaaagctttttagtctttgctaaggcaggggataatggggggagggtgggaagcaaaaaatatactatctaaatagcctgggaggaaaagctcagaaacgagatgctttggagaataagggctaggtaaacttcagagatattattgggaatatagaaggctaaattcatgttcagaactgggtgcatgctcagagaagatatgagaagtccctaagggaggtcttatgtctagcacactttcaggatctgcacaagcagaaactgaaagccaaggtaggtttggaaaatacctggctgaggtgctcaaaatatacccttatacacatggagcccgtctgccaagactaggaaattttttgtttaagcaacttaaaaaaatatttgtctagtcactagctgacagataagagatctcaattgccacaaacagcaaaaaaacacagattttaaaaattattcaaaaaagttactaaacaracaaccacaacaaatcctaagggagattaatataatttccagagatgccacatcatggtattaaaaatattcagtgttcaacgaaaaattaagaggcatgcaaaaaa

SEQ ID NO: 155008 - DNA, 538 bp, Homo sapiens
cttttactcctaaggtggagaaataccttatgtatttgaggaaaaacatgaagacagtgtttctgtggtggagtgagtatttgagtattagaaaggatgagtatcaggaaatgagaacatgaaatctatctgggaccagatgtttgtcaaaaatttgggttattcagaatgagatggtaagccaacagggagttttgttcagagaaattacrtaatttgatttcttttaaaaatagattactccgaagtggtgtggtggctcacatcccaacactttgggaggctgaggcaggaggattacttgagcccaggagttccagaccaacccgagcaacataatgaagccccattgccatttaaaaaatgttttaattaaaaaatagatttttctggatgtttgtgtcaagaatagacactaacagggtgaagtacaggaaaaacattagagagacttgttatattcagttataagcattggggtttatattgattagcagtcaggaagatgagctggaaaaagtacaggagactgagagga

SEQ ID NO: 155009 - DNA, 582 bp, Homo sapiens
cttggcactttttttttaacagtccttccttcaatatatctcattcctctcacattttattataagcagcaagaaaaaacaagcagtacctttaacactttgcttggaaatctccttaactagattacccagttcattaggcacattttctactttccaccttactgcaatagtgttgctacattctcccactacataataaacattttcccttcctaaagttttcaattacaggctctcacctcctcctgagccttcaccagcagcagcctcaacgtccagatttytaagtctgttcaaggcaatttatgtgtcttccattatactcaccattcttccagcctccacatgctgcctacttccaaagtgagttgcataccttcagtacttgtcatgggggcctctccttctagatgccgaactctgtattagttatctattgctgcataacaaataatctcaataattcaataattaaaagcttataacaaacattatctcaaagaacctatgtgatggttaatactgagtgtcaagttgattggattgagaagtacaaagtattaatcctgggtgtgtctg

SEQ ID NO: 155010 - DNA, 658 bp, Homo sapiens
ttaattacataaaatgtaagatttagattgctaattttatcctaagcaactcataagttttcaagtagctcccagttattatttttaatgactgtaatattcaatttaataacataccattgttaagttctttgttattttattagaaatttagacctcttctagttttatcctctttattcccacgttrttttaataccaccatagacatcttttactatatatgaaatatttccttagcttcctagagttggaaatactatatcaaagggcatgatcactttataattctaatacaaatggtttccctccttcgttcttcactcccagagactacaaagggtcataaaaagaccatgcaccagaagtcaggcagacctggcttctgactaacaggccatcctgtgtaaatgtggagacgtttttcatctctgtgaatctcatttttctatgttcctgagtcttaagatacaaactgtaaaaaattctgagtattaaatatgaataactgtaaaggcaaagggcatctttttaaacctcacttgtgaattgggaagtaaaaaaatatgtttacatcattttgttataataatagtattttctaggatgaaactttttcctctgtttatggagaaccaaaggcctcaagagatttaaa

SEQ ID NO: 155011 - DNA, 545 bp, Homo sapiens
tgtatctggaagtaagaaaccaaaagatagcaaatcccatggtgagatgtagatttatacatatatatctttatgtttcccaatatccttcaaatgtcttaaccaacatgtacaatatattttttcatgtcatctcattagagttaaaagaaacatgaaaccactttgaacattttggacataaaataaaaaagctttgaacttcttacttcatatagaaatagaactaaaaatgcatatacttcagagtcattttcttgaattgagtcccaaaatgaaactagatctttacacacaaaaaccaaaacatacacactgatagctttcttcagctagaactgaatctgtaaaaattatattactttcatcaacaacttttatttgcacctcacagttcaaatttatgcttacccttcatgtataaaatgagataataaaaataattgaccgaataatattttttcctgaggattaaatcagttagaatacataaaatacttagaatagyatgcacagcacataatgtcatataaatactgcttgtt

SEQ ID NO: 155012 - DNA, 537 bp, Homo sapiens
ctataagtggttgaatctttatttattatcatctgtgttaataaaagatgttaaggtgatacttaggttaatttctgacctttaaaaaaatgtttaattttaaaaacaaaaatataaactgccctgcaagctcgatttcatataggaaaatataaggaaagcaaagttatcattcaatttaaaattaggcctaaggtaatctatagactayaggaaagaaaggcaccaaaaagaaacataaagaaataaaaagcagaagtctggagaagtgtagtagaaactgagctgcagaattaagctagtttaagatataggcagggatacagtggaagtagacagagcagccaagtgggagtgtgccctctgaccacacacagcacatgaagcaaatccaaacagtggatttctttttctttttttgaaatggagtctcaccctgtcgcccaggctggagtgtggtggtgtgatcttggctcactgcaacctctgcctcctgggttcacgtgattctcctgcctcagcctcctgagtagctga

SEQ ID NO: 155013 - DNA, 567 bp, Homo sapiens
taacagctcacagttaaaacactttctcaagatgctcttggttagatttcagaaagtatcaagttcaaagtatgtctaaattcaactcatgtgtacaggacytgagagctggggacagcttgtccacagtcagccatgaaaggagcgtggagtcctcaaagctctcctctaagattatttgcagtgttctgcttgaaacacagttcgtatgcccagtttgtatagaaagtaaaagagcaaaaaaaattgttatgtatgactagtaagttcttgaaaagccatttcaggtatatgttatctcttgatttaacttacaatttcaatgagcataacaagatagtattcatatgacataaaagtctttggatcatgttaggtatggtcataatttatgcaacattatgaaaacatatatataatatattatgaaaaacatatatatttatatataaatatatataaaacattatgaaaaaaatatatataaaacaccaacttgctaagttcattcctgggttttggtagaaggctagattttagcttctctgcactaacgtgattgaagcc

SEQ ID NO: 155014 - DNA, 561 bp, Homo sapiens
acttgggaagctgaggcgggtggatgagcccaggaggttgaggatgcagtgagctgtgttcatgcctttgcactccagtcagggtgacaaagtgrcatactgtctgtcaaaaaaaaaatgcacgtatacataaatatatatatgtatatatgtaatatacatgtatatgttactttgtatgtatactatatatatgtatacacacacacgtacgtgctgcataataaatatattttagtacatccattgcttagcagtttgccattcatttaatgctacttgtttattattaatggagcttaataaaattatttattccccagtaaactactatcaattgtgataataataaaaaattattattaagcagctgccaacttttgctgctgttagacactttaaggaatgtttcaggcatacctgataatgtgcaagagcttttaatacaagattcaagttgtgtacatatagaccacaaaatgaaatgtcgatttacattagtgaattgttggcactgtatgaatgaaagatgtttctgatatgatgaaagaagggagaatt

SEQ ID NO: 155015 - DNA, 561 bp, Homo sapiens
acttgggaagctgaggcgggtggatgagcccaggaggttgaggatgcagtgagctgtgttcatgcctttgcactccagtcagggtgacaaagtggcatactgtctgtcaaaaaaaaaatgcaygtatacataaatatatatatgtatatatgtaatatacatgtatatgttactttgtatgtatactatatatatgtatacacacacacgtacgtgctgcataataaatatattttagtacatccattgcttagcagtttgccattcatttaatgctacttgtttattattaatggagcttaataaaattatttattccccagtaaactactatcaattgtgataataataaaaaattattattaagcagctgccaacttttgctgctgttagacactttaaggaatgtttcaggcatacctgataatgtgcaagagcttttaatacaagattcaagttgtgtacatatagaccacaaaatgaaatgtcgatttacattagtgaattgttggcactgtatgaatgaaagatgtttctgatatgatgaaagaagggagaatt

SEQ ID NO: 155016 - DNA, 492 bp, Homo sapiens
cctcaaattattgttaaaataattttttaaaaattgcctagtatcttacagaaactaactcayatatagatgggcagaaaaagtacagtgaaactctcttctattctttaggataatttatataacctttactgggtacctgccataagtcaaagatttctgggcagtgatgatatgaaaacaaaattagttatggtcactacacacaaagttcacgatacggttttggctgtgtccctacccaaatctcatcttgaattgtagttcccataatccccatgtgtcgtgggagggatctggtgggaggtggttgaaacatgggggcagttatttccatgctgttctcatgatagtgagtgagttctcatgagatctgatggttttatttatttatttaattttacttttcattctggggtacatgtgctgaacatgcaggtttgttacataggtatacatgtgccatggtggtttgctgcacctgtcaacctg

SEQ ID NO: 155017 - DNA, 422 bp, Homo sapiens
ttaaaataattttttaaaaattgcctagtatcttacagaaactaactcatatatagatgggcagaaaaagtacagtgaaactctcttctattctttaggataatttatataacytttactgggtacctgccataagtcaaagatttctgggcagtgatgatatgaaaacaaaattagttatggtcactacacacaaagttcacgatacggttttggctgtgtccctacccaaatctcatcttgaattgtagttcccataatccccatgtgtcgtgggagggatctggtgggaggtggttgaaacatgggggcagttatttccatgctgttctcatgatagtgagtgagttctcatgagatctgatggttttatttatttatttaattttacttttcattctggggtacatgtgctgaacatg

SEQ ID NO: 155018 - DNA, 450 bp, Homo sapiens
atactgaagaaaccatcaataatttagaattattttctcatcaggygcctgtaaagataaacctatggtcagaatatgaagattttctcttttttgttcaacttttattttagattcagggggtacatctgcaggtttgttacaaaggtatattgcacgatgcagaggtttggagtaagaatgatctagtcagccaggtacttagcatagtacccaaaagttagttcttctacccttgctcctttcccttcctttcccctctggcagtcactgatatctattgttcccatctttatgtccatgagtacccaaattttagctcccacttatcattgagaacatgtgaaagttggttttctgttcctgtgtaaatttgcttaggataatggctttcagctgtatccatgttgctgcaaagaacatgatttcatgcttctttatggctgcata

SEQ ID NO: 155019 - DNA, 619 bp, Homo sapiens
agaaataaaataagtagcctccaggcattcccttggccagaggagcaattgttttttaaatagccctttggtgccatgtctattactaaaccatatgactcattttttaatattactgcatktgagttaacacagtcttcccaaattaaagttttagatggggcctcaaaatttttagggcatggttttccccaggtttatattgaaagtgtggggtatctcccattactccccctttcatttttcttaaaggagaaagggagatgctggagaccaaatgtcccggttcctctgtagctgatctctccggaagataagcagcccagatttgggtttctagatggatacaaccaggtgcatgtctgaggcacagaggggggtatctgtaacccatagtaacattaaatgcagggccttcttctcctggtttagcagggcaacagtcatctgtagctccaggaatccacacactgtcattagtgtagatttctgcaggagcatccagccaggtgagaggtcgaataagtggaggaaaaggcacataagcccaataagaataattttgtggagcaggtaaatcagtgtgagaggaaactggtgagacagaaagtataaggat

SEQ ID NO: 155020 - DNA, 593 bp, Homo sapiens
accctttataaatgtgaaccattactattatttagggtactataaaataaactgtaatatactataatttatttaattatgtagaatggcatatgattaagtatgcatactcaatgcccaattaccagccatgtgagcttgggaaagtcgaatttttttaaacattttatgctccagttttctcatttctataatggatgaaacagtaatatctatttcatatcttgctgaaactattaagttaacacatataacacatatcccatgttttatacgaatgactgtcatcatcctctgactttgatgacttagaatgtaacaacagtttggatgttggtagtagtttatagtttaaattaaaatatttttaaaactcacaarttatttccaataattatttcctcatagttaatattatctctctttatgagttatcttagctgtatttaccaggggtgtaagttttatttatttccatggactgaagtgttttgaggaggtttatagaattacatataccaaagcaagggggaaaaaagacctaggaaactaagttccacataagatggaaagtttggtggtggtggtgtttt

SEQ ID NO: 155021 - DNA, 419 bp, Homo sapiens
cgccttccctaatccagagatgactgtggagcagaacagtctcactagtttttctccctctgctcacgacttagggttttattattaacttcaataggtaaggagaatgaaaaacaaacaaagcaacgtgggcagtggcaacattacctcaggactgatagcatcataatagtagtcattccctgagatacaataaaatacraagaatcgctttcctgtttcattctaaaatatccctgtcagcttaggcagtttctcctttttaatgatttctggtcagtactctcattctttctttccttggagtggagcttcccctctcctcccagtgttctttcagccctttctttttaatagtccttctctttagcacccaggactgaaaaagatagatatagggcagatacatgaattatctg

SEQ ID NO: 155022 - DNA, 597 bp, Homo sapiens
ggtgcccgaaacttcattagcaattttaatttcaccccagtcctgtggtcatgtgatctcgccctgcctccatttgccttgtgatattctattacctcrtgaaagacgtgatctgtgacccacacctattcgcacactccctccccttttgaaactccctaataaaaacttgctggttttgcagcttgtggggcatcgtggaacctaccgacatgtgatgtctcccccagatgcccggctttaaaatttctctctttgtactctgtcgtctttatttctcaaaccagcggatgtttagggaaaatagaaaagaacttacgtgactatcagggcaggttccccaataattacagttcctctaggtgggatgttacctcattaatttgagatctttctaactttttgaggtaggtgtttagcaccataaacttttctcttaacactgcttttgctgtatcccagagatttccgtatgttatgtctctgttttcatttatttcaaagatttttttacttctgccttaattgcactatttacccaaaagtcttttaggagcaagttgtttaatttccatgtaactgtgtggtttaaagaga

SEQ ID NO: 155023 - DNA, 529 bp, Homo sapiens
cactttatctacatttccttacaatttcttttgcgaatgaaagtaaatcagaagcatttgttgtytttgtcatttccaataccctactactcatattaatgctatgtgtttaaaatttctagatttgttgactgtatacatatggaatgggatacaggaataaaagtttcgagattctgttatgaatgtgtgagtaacgtaaaaactgtgacctttcctctaatttcatttcatcatttttaaaataagtaataacattaactgtttttaaacgtgcagcaattatactaggatgtaagattttaagttcactatgcaatttttccatagagcagtacttatgtgtagatgataattcatgtacaagtccaatattacttacccgtaaattcttaatctgcagtgtgccttgctcttgaattgttgctcttggatctctacccggaaaagtaaatccctcctttaaccagctaattacaggaagaggatcaccagtggctttacatttcagtaacgctgtaccatccac

SEQ ID NO: 155024 - DNA, 529 bp, Homo sapiens
cactttatctacatttccttacaatttcttttgcgaatgaaagtaaatcagaagcatttgttgtctttgtcatttccaataccctactactcatattaatgctatgtgtttaaratttctagatttgttgactgtatacatatggaatgggatacaggaataaaagtttcgagattctgttatgaatgtgtgagtaacgtaaaaactgtgacctttcctctaatttcatttcatcatttttaaaataagtaataacattaactgtttttaaacgtgcagcaattatactaggatgtaagattttaagttcactatgcaatttttccatagagcagtacttatgtgtagatgataattcatgtacaagtccaatattacttacccgtaaattcttaatctgcagtgtgccttgctcttgaattgttgctcttggatctctacccggaaaagtaaatccctcctttaaccagctaattacaggaagaggatcaccagtggctttacatttcagtaacgctgtaccatccac

SEQ ID NO: 155025 - DNA, 626 bp, Homo sapiens
tttaattgaagctagaatttatgatacagkttaccttcatatcaagacattgcagattctagtcaacctaaacctattttatcaatgataaaacctaataaaaacaataaaaactgtttatcattcacaaacaaaaattagaatcatttatttcactgcttttttcatcaaattcttacttttaatactaaataaaacattttaagaaaatattgaagtagaatattgtaataattctggcacatctgtcagtaattaggcaaatagaaattcaaactaaaagtttcatgggacttatttttatgggtcaaaaagagaaggccaatgaacaaaacactatgagtaattttttaatgcagtgagaaagtgagtctgtgttaccagagtaaagcatactaattaaattttaaacgattttttttcaaattaaatacctatgcagaattcaggtaacttcttataacctgcttttattgtcatatccctgaaatcattagatgcagccaaaggtcatctaattagtttttttctttctgtttttttactgccctaatgagtagctcatcaccttttgaatgaattgatcaataaagtaattgaaaatctcctggccagacataattttc

SEQ ID NO: 155026 - DNA, 626 bp, Homo sapiens
tttaattgaagctagaatttatgatacagtttaccttcatatcaagacattgcagattctagtcaacctaaacctattttatcartgataaaacctaataaaaacaataaaaactgtttatcattcacaaacaaaaattagaatcatttatttcactgcttttttcatcaaattcttacttttaatactaaataaaacattttaagaaaatattgaagtagaatattgtaataattctggcacatctgtcagtaattaggcaaatagaaattcaaactaaaagtttcatgggacttatttttatgggtcaaaaagagaaggccaatgaacaaaacactatgagtaattttttaatgcagtgagaaagtgagtctgtgttaccagagtaaagcatactaattaaattttaaacgattttttttcaaattaaatacctatgcagaattcaggtaacttcttataacctgcttttattgtcatatccctgaaatcattagatgcagccaaaggtcatctaattagtttttttctttctgtttttttactgccctaatgagtagctcatcaccttttgaatgaattgatcaataaagtaattgaaaatctcctggccagacataattttc

SEQ ID NO: 155027 - DNA, 626 bp, Homo sapiens
tttaattgaagctagaatttatgatacagtttaccttcatatcaagacattgcagattctagtcaacctaaacctattttatcaatgataaaacctaakaaaaacaataaaaactgtttatcattcacaaacaaaaattagaatcatttatttcactgcttttttcatcaaattcttacttttaatactaaataaaacattttaagaaaatattgaagtagaatattgtaataattctggcacatctgtcagtaattaggcaaatagaaattcaaactaaaagtttcatgggacttatttttatgggtcaaaaagagaaggccaatgaacaaaacactatgagtaattttttaatgcagtgagaaagtgagtctgtgttaccagagtaaagcatactaattaaattttaaacgattttttttcaaattaaatacctatgcagaattcaggtaacttcttataacctgcttttattgtcatatccctgaaatcattagatgcagccaaaggtcatctaattagtttttttctttctgtttttttactgccctaatgagtagctcatcaccttttgaatgaattgatcaataaagtaattgaaaatctcctggccagacataattttc

SEQ ID NO: 155028 - DNA, 512 bp, Homo sapiens
gaaaaagaaatgctttgcagattgcaaagctgctgaaagtatggtacccaaaaataatcctgaccttcagacacaacacgtgggttttcctattaagtatttgttaagagcacagaagtctttcactctatatattctttccattggaacaaaccagaccacaaacaacttttcattaatctttcttgacctcttcactgcgagttattttatgagtcaagatttagtgactagcatagttatcgaatgatcaaaaaggtctgccagatacaatcacaccaaatatcttcccattctgatctctctctacgtttcactggctacacacaaaaactatttctatgcacaaaggtataaatgatcacggtactacaatttcttgacgtaaaattgtacacattttccattttaagttcaataataaaatttacacacttaattcaaacacagtaaaaagcaatcagatttaaggaaggtaaaatatgactagrttcaaatttcagattttcaaa

SEQ ID NO: 155029 - DNA, 396 bp, Homo sapiens
aacaaacatatgaaaaaaagttcaacatcactgattattagagaaatgcaaatcaaaaccacagtgagataccatctcatgccagtcagaatggcaattattaaaaagtcaagtaacaacagatgctggtgaggtcgcagagaaataggaatgcttttacacagttggtgggaatgtaaattagttcaactgttgtggaagacagtgtggtgattcytcaaggatctagaaccagaaataccattactattacggggtagatacccaaaggaatataaatcattctattatagatagatatgcacacgtatgttcattgtagcactattcacaatagcaaagacatggaatcaacccaaatgcccatcatggactgaataaagaaaatgtggtaca

SEQ ID NO: 155030 - DNA, 614 bp, Homo sapiens
atgttagagtcacaactgtaatactctgagcaaaaatattatttcagtcaaattccctaactaaagtataattctaaactagaactctaaggtctggagagaatgaaggcattttggttgrgaatgtgctccaagcttcagccaagcagaaagaagttgagaaccccttctgaaaagaggggttaaccaagaaagaaacaaacataggatgcagaaaacagcagatccagcattccagacaaggaagacaaaagcagaattaggtttacggtgttgacctaaggaatgtctaaccaagtcagatcaggcagcctcagggaagactgtagtgaaggggacttaatagctaaagtctaaaaaaatgattatagaagattttatagtttctgttagagatttcaagaattcatgacaggtatagaaagcataagtaaatgggaaaatgggtttattattaattcaaagaagaacaaaaatagtaccagaaaagaaatatggtcataatactataacattcaactcacagtcaataatattgacatgactataataactcaaattctgaatattaatataaccaatgttttgaaagttcatagactaaaaagagaaaa

SEQ ID NO: 155031 - DNA, 538 bp, Homo sapiens
acataactcttgacatgtttaggaatccccagtagttctcatcatttctttagggaaagtagartaaatatttcataaggatgtctcattagtggtaagtctaattgcttctgtaatgacattaaaccctttcaatttccttctgaaggcagtctatactgcagtaatatagcttttttttttctttctattccagagtttgtggtagttacagaaaaatagcaatgagtgtttctttaaatagaagagctatacttgtgggctttcaatgctaacgttcagtgaccactaatatcatttcttaccaggcaaaactgtgttttattcattacagagtggagcacatcttgagactcttatagaggactgcatgaaatgtaggggcaaactgacacttgtctgagctctgcaggatagaaatttacatgcatactttgaacaattctattttttctattcaattcctttaacaaattatgggatttctcctagctttgtcatttgggacttcaagctgcttagtagccacagggagtgt

SEQ ID NO: 155032 - DNA, 538 bp, Homo sapiens
acataactcttgacatgtttaggaatccccagtagttctcatcatttctttagggaaagtagagtaaatatttcataaggatgtctcattagtggtaagtctaattgcttctgtaatgacattaaaccctttcaatttccttctgaaggcagtctatactgcagtaatatagcttttttttttctttctattccagagtttgtggtagttacagaaaaatagcaatgagtgtttctttaaatagaagagctatacttgtgggctttcaatgytaacgttcagtgaccactaatatcatttcttaccaggcaaaactgtgttttattcattacagagtggagcacatcttgagactcttatagaggactgcatgaaatgtaggggcaaactgacacttgtctgagctctgcaggatagaaatttacatgcatactttgaacaattctattttttctattcaattcctttaacaaattatgggatttctcctagctttgtcatttgggacttcaagctgcttagtagccacagggagtgt

SEQ ID NO: 155033 - DNA, 538 bp, Homo sapiens
acataactcttgacatgtttaggaatccccagtagttctcatcatttctttagggaaagtagagtaaatatttcataaggatgtctcattagtggtaagtctaattgcttctgtaatgacattaaaccctttcaatttccttctgaaggcagtctatactgcagtaatatagcttttttttttctttctattccagagtttgtggtagttacagaaaaatagcaatgagtgtttctttaaatagaagagctatacttgtgggctttcaatgctaacgttcagtgaccactaatatcatttcttaccaggcaaaactgtgttttattcattacagagtggagcacatcttgagactcttatagaggactgcatgaaatgtaggggcaaactgacacttgtctgagctctgcaggatagaaatttacatgcatactttgaacaattctattttttctattcaattcctttaacaaattatgggatttctcctagctttgtcatttkggacttcaagctgcttagtagccacagggagtgt

SEQ ID NO: 155034 - DNA, 577 bp, Homo sapiens
tcatctgtaaaatgaaggtttaaaaaaagcctttgtctttggtttgttatgaagcctgaacaaatgatctttgtaaagtacagtgaaaagtaaaggaagtagttcataaaagaatcactgttattaggaattagaagtagtatagtaaacaagaaagactttgaattttacttctgcatctgatcttcaatgagtttaatggctgtcaatttttaattcctttgactatcaaatagttaatgatcttcaagaggacaggcatggtggctgacgcctataatcccagcactttgacaggccacgaggtcgggggatcccttgagctcaggagttcgagaccattttgggcaacatggtgaaaccccatccccaccaaaaatacaaaaattagccaggcgtaatggtgtgcgcctgtagtcayagctactttggaggctgaggtgggaggattgcttgagcccaggtggtcaaggctgcagtgaaacatgattgcaccactgcactccagtctgggcaacagagtgatactctgtctcaagaaaactaataataataataacaataataataataatct

SEQ ID NO: 155035 - DNA, 661 bp, Homo sapiens
taaattttgcccagtgagttttacctagttcattttaaaagttgattttaatatgacctttaattttgctctgtttaattgataacaaacttagatatttgtttttcacttttcaaccagctctagttgttgagactacctctgtgaggtaacagaagagttttatttctcaatcacccactttttaaattcaagtatgtactgcacatgttgttccagtctctatatagcacactttaggagtacaagatatttcaatgaaagatggtcccctcatggtgctaaagagatttaggaaagttaccatacctaactcaaaaaccacaaactgaaagatgaaagtatgaattattggggacaagtatacttaaaatgccrtaaggtaaaatggaggaaactttgttttcataaggaaggctttttggaggagcgagtttcagagctgggtttggaatatgcattgtatgctttaattaattagaaaaggaaaagaaacatgctggaatgtgcttgcatgcacataaaacaatctctgaaagaacacacaagaaactaataataacaaatgcacttgcaggaaaaaaaaaatactggaaagtaaagaataagggaggaagacttccctgcatctactttatacttctttaaaaccctgtaaatg

SEQ ID NO: 155036 - DNA, 505 bp, Homo sapiens
aattttccagactctgacactcagttactgcctagcacccctttctgcaaagaatccttcactgttgaagtgatatagcacttgggtgacaaattatgaggaagcagagaggcagcaaccaatgagaaatgagaatggcaaaatgatggcatgtcaccaaacatggaagcctcttgtcaatggatatgctgtagtactttctctagtcctggaaacgtcttctaacaagtaactaataaattttaacttcataagatatagacacaagctacaatgctataatcaaatgatcataaacatataaatgcatcaaataacaaacaaggcaaccaagtcagtgctatacttagcattttgcactatttccacattctcagcagtttaggagcctacaagccacagcatcgtaaaagcttaataaycaatgacgcctctgtcaaaatcagttactaagacatttatgcttcctaccaaatttaatattaggaatacaagattgaatata

SEQ ID NO: 155037 - DNA, 451 bp, Homo sapiens
tctagattgagggccctacagctgcagacccagagagtatctgatgttcgagattgagggtcatgcagctgaagactccgggaggagctgagttggtaatttgagggtcttgcagctgccgactcggggaggagctgatgttctagtttgagggccctacagttggaaatctgtacaggagctgatgttctagtttgagrgtcgtgcagctgaagactcggggaggagctgatattctagtttgagggctctgcagctggaggtgcagacaggagctgatgttgtagtttgagggtcgtacagctgaagattcagggaggagctgctcatgtatttttagggtcatggagctgcagacctggagaggagctgatgttaaagattgagggtcatgcagctgaagactctgggaggagctgacgttctaatttgaggtcacctacaggtggac

SEQ ID NO: 155038 - DNA, 437 bp, Homo sapiens
cctacagctgcagacccagagagtatctgatgttcgagattgagggtcatgcagctgaagactccgggaggagctgagttggtaatttgagggtcttgcagctgccgactcggggaggagctgatgttctagtttgagggccctacagttggaaatctgtacaggagctgatgttctagtttgagggtcgtgcagctgaagactcggggaggagctgatattctagtttgagggcyctgcagctggaggtgcagacaggagctgatgttgtagtttgagggtcgtacagctgaagattcagggaggagctgctcatgtatttttagggtcatggagctgcagacctggagaggagctgatgttaaagattgagggtcatgcagctgaagactctgggaggagctgacgttctaatttgaggtcacctacaggtggac

SEQ ID NO: 155039 - DNA, 530 bp, Homo sapiens
tactctgttcccagtgtagtgtagtggcatggttacggttcactgcagcctcaaactcttgggctcaagggatcctcccgcctcggcctcccaagtagctgggacttcaggagtgtaccaccatgcctggcattttttttttttttttggtatttttttgtagagacagggttttgccatgcrgcccagaaacaatgtttaatatatatacattcatacgataattttatcaattcaataactctccttatcaaaggtaggtacgcattctggaaatttaagcaaatgagctagcttgcagggacaatatgaatgcactgcatttctgtcaaatggtacccagatttctggagcatcagttgtactacaaactcttatttttagaagtatctgggattctagccaggcgcggtggctcacgcctataatcccagcactttgggaggccgaggcgggtggatcaggtcaggagttcgagaccagcctgaccaacatggtgaaacctcgtctttactaaaaatacaaaaatt

SEQ ID NO: 155040 - DNA, 546 bp, Homo sapiens
atgaaagtgtgttggactttgtcaaatactttttctgtatcaattgagatgatcatttggggttttccccttcattctattaatgtggtgcatcaccttggttgattttcctatgttgaaccatccttgcatttacagactaaacctcacttagtcatggtatataattattttgataagctgctaaatttggtttgctagtattaaacattttgcatcaatattcataatggcggacgggcacagtggctcacgcctgtaatcccagcactttgggattccgaggygggtgggtcacgaggtcaggagttcgagaccagcctggctaacacggtgaaaccccatctctactaaaaatacaaaaattagctgggtatggtggtgcgcgcctgtaatcccagctactggggagggtgaggcaggagaatcgcttgaacccggcagagggaggttgcagtgagccgagatcgtgccactgcactccagcctgggcgacagagcgagactgtctcaaaaaaaaaaaaaaaaaaaaaagaagaagaattc

SEQ ID NO: 155041 - DNA, 521 bp, Homo sapiens
ttctaaattttcagttccaggtcttagatttaagcctttaatccatctcaagttgatttttgtgtaaggtgagagatgaggatccaggtttagtctcctacatgtggtttagccaattatcccagcaccatttgttgaaaagagtgtcctttccccactttatgtttttgtttgctttgtcaaagatcacttggtggtaggtatttgggtttacttctggattctttattctgttccattggcttatgtgcctatttttrtatcagtaccacactgttttggtgactatggtcttatagtatattttgaaatctggtagtgtgatgcctccagatttgttctttttactttgtcttgctttggctatgcaagctcttttttggttccatatgaattttagaattgttttctgtaattctgtgaagaatgatggtgatattttgatggggattgcattgaatttgtagattgcctttggcagtatggtcattttcacaatattgattctacccatctgtgag

SEQ ID NO: 155042 - DNA, 283 bp, Homo sapiens
ccaaaaaaaaaaaatagtgctacccttgcttcaacgggtggagggttagacaacttagagggcatgtcctagcttgaaagctgcttagggtattaattgaagtcyttgttgaaaatactttgcagtttaactactccgtgtatccaattctgtttatctcactctctcacaggtgtttattccttcccccaataaaccattctatatgcaaatttccataaagtctatgtctgagctaacataagggtattaaaatattacttatagagcagttgactgttag

SEQ ID NO: 155043 - DNA, 591 bp, Homo sapiens
attcaaaaaaaatttatggattcttataacacatgcttaatatttaagtctgacgaactgtcttagtggtcataatttacaagtctttccagtttgtaggtgcattattttttattatttaaatatcactctgtcyccatcttcttcttcataactactagcattcagacttcataaaatggtcacaaatgccgttccaatcggtcaaaataatttcagccacttcctttaaagcttacttacttctttaaaatcatattctcacgtatttttctcattagagataaacaaaatacaaaactttgtgatgatttgcaaatcaaaaaatttatatctcagccctttcagagaacgatataggaaaaaataaaatccctcatgtgaattttctccccaaaattgattaagagttcattttggaaagtatttcaagcttttggagactacacatagccaactgggagaaataaaaaagcataatagaaaagcataattcccgcctgtacttatatattcattattttaaattaacttattaattcatgagttaattctcatggtggacctcactcttccaccataagaatgagt

SEQ ID NO: 155044 - DNA, 562 bp, Homo sapiens
ttgggactgactaggtgactggcatgacccactgagagtgagcaaaaacagggtggagcaagacccccaccagggagctgcatgcagcaaaggaactacttcccacagccaagggagagggtgaaggactgtgcttcccctcactgaaaaccaggcttttcccacagatccttgcaacctgtgggttaggaggtcccctcctgggcccatgctaccagagccttgggtcccaagcacaaagctgtggagaatcacagtggctgctctggtcggcagctgctttcagcaggcactgagatacaggagtatttgcatactccagctctggcaactcccttgaggcaggagatctgatccgtccatcttgcgggaagggggctgaagtcaggtaactgagcagccatgctcccatggaactccaaaagctaaaatccactggcttggcatcaccaycggccagcacagccggctataaactgtctaacaagactgagttcctggagggtagggacagcaccatcaccgtaagtacattccactgctttcccttgtcaccggtgcc

SEQ ID NO: 155045 - DNA, 544 bp, Homo sapiens
atggaactagacttttgaagtttcacatcctgcagtcattggtcaactggagcataaacttccaggcttcttgcttttcactataaggataagcagatccagcaaactttgtaccatacactaaagaaaatcaatgatgtgggccagaaaaggcaatggcacacacaaaaaggagagggacacagtgtaagagtcaaaaaaaaaaaaaaaaaaaaaaaaaagagaaaaagatagaaaggaatctggactgaagacaacaatgtcagctacagggagtgatgttggagtatacactaaaaatacattttttgtgtgtaaccaaagctacctgtatttcctttctcttttcactttctagcatttggrattattaaaacactcaattattcccactttttaatattgatcagggcgattgcctgtcttctccttttgcttagaatgcttcacttttacttttttccaagatgatgcagaaaattagcgttattttgctattgattcaacttattgattttggaaattggagaacacatgtgagata

SEQ ID NO: 155046 - DNA, 544 bp, Homo sapiens
atggaactagacttttgaagtttcacatcctgcagtcattggtcaactggagcataaacttccaggcttcttgcttttcactataaggataagcagatccagcaaactttgtaccatacactaaagaaaatcaatgatgtgggccagaaaaggcaatggcacacacaaaaaggagagggacacagtgtaagagtcaaaaaaaaaaaaaaaaaaaaaaaaaagagaaaaagatagaaaggaatctggactgaagacaacaatgtcagctacagggagtgatgttggagtatacactaaaaatacattttttgtgtgtaaccaaagctacctgtatttcctttctcttttcactttctagcatttgggattattaaaacactcaattattcccactttttaatattgatcagggcgattgcctgtcttctccttttgcttagaatgcttcacttttacttttttccaagatgatgcagaaaattagcgttattttgctwttgattcaacttattgattttggaaattggagaacacatgtgagata

SEQ ID NO: 155047 - DNA, 563 bp, Homo sapiens
atttctaaacaaggtcatcttctgagatattagaggttaggacttccacgtatctttttcaaggacaaaattccacccaatacaataatataatacagatgaaataactcagaaatgcaagcacagcttcattctcaaatgctattttaaatgtaacaagcatagttcgattgattgatgcaaggagatartaatggaagctcagcatgactttaaaatcaagcaaatagatattaaacctggaaaaaagtaagaagattatttccagacaactaaatattgtatcacaattcttcctcccaggaagcagttatatattagactctcatttgaactcatgagaagtaataggacatcattttgtgttcttagtttttcagaacaaggcaggcggtctattcatataatttctgcaacttaggagaatggatgacacctgtgacattcagacaatcagaattgggctctcattagggcatgctgtttgctgctgcccatggtttacttgatgactgagtaaatgattcactggcatcctgttggtaatttctgatcaacatgca

SEQ ID NO: 155048 - DNA, 538 bp, Homo sapiens
tatagcaaaccaaatagacaacatgcccattataataatttctgctagcatttgccttaktacaatgttaattaatataaacaataatagcctagacactgtacaagtgttcaaagtgccttccatatcctcacagattcagtctctttggctaagctctgatgttgtacaggtttttatgtatttttttaactggcacataatatacatacttatttatgtggtacactataatattttaatacatttataaaatgtgtaataatcacatcgaggtttaatatattcatcacctcaaatatttatcatttgtgttgggaacattcaaaatcccctcttctagctatttgaaaatatgcaataaattattgttcattatagccaccccacagggctatagaacaccagaacttattcattctattcagctataattttgtatttgttagccaacctctccctattcccccacccttcccagcctctagtaatcactattctagtctctcctgctataagatcaactttttacattcca

SEQ ID NO: 155049 - DNA, 577 bp, Homo sapiens
agctgtgcttttttcagtggcatgctccaaactacttttctctagaataactctgtttgtttcaagattgttaaaagatgactctaagggtggctctgactttgactgatcacatattttatgtgaaacatctgtgcactgtacaggtttatctttttgaaaaccaaagtctttattttcagtggtattatctaattgtttttctggttctctgctgccaatcccttgctgattgggtagagaaggtttctgtggctcaaccattttcaagggaagagagctgaatatctttgctatttgggaattgtaagaggtatcaccttcaaccagagaacaaatattgtcaatctgtaaygtatcactactcacaacagtactattccttgactcctgtgagatttgctgatcgttcataggagaatggatagctgactctaatttgttatgctttccttgattgacattaggtgtgacttctgaattaccattagttgactcattctgcttttccttctgagttagtggaaaaatcttggttgatgttgctgtacttgctactggtccactaacatcaact

SEQ ID NO: 155050 - DNA, 598 bp, Homo sapiens
gagtatactctagtatgtggatgaccttcttgtgcgtagccaacctgggtggcttctgaccaaaatactatacaaactttgaatttcctggaatacgggatacaaagatggctcagattaccctccaatggttccaatattttggatatgtcttaacacccggagcctggcaaatatccccagaatgagcacagaccatatgtggtttgagccctgcctccaacaccaagcagcagcttcattctttttggggaatggctgggttttgcagaatatgggtaccaaattttgggctcatagcaaagcctctatatgaagcaacaagggggcctgaaaatgagctaatggaatgggccccagaaatgagagaagcctttgccaagctaaaacaggcccttacccaggctctcactcttggcatcccagagctaactaagcccttctccttgtatgtagcagagaagagggccatagctatgggagtactagcccagaaattaggatcagaacccagaccaaccacctrcttcttttcttttctttttctttttctttttctttttctttttctgagacggagtctcacactgttgcaggg

SEQ ID NO: 155051 - DNA, 489 bp, Homo sapiens
tcttatggaatggtattattccaaattatattatatatgaaggggctggggtgctaactctgtaagcaaaggacagcaaatatcagatgttagaaagtggaaaaagcarggagaaatgaagcagtatttgacattgcatatgtgttaacataaacaattaactcggacattcttgatactctgaacattaaattagatttagtttaaacaacacagagtctagggcaataatatcatgttggaagtgtaatttttttttctgtgaatatgtttcaaatatctgacttgccaagtgtaattctttactttctctttcagggttataagaaacgcacctgacttaaataacatgtattgtggatatataaatagactatatgttcaatattatcactgcacttataaaaaaagaatgatatgtgagaagatggccaatccagtgcagcttggttctacatattttagggaggcatgaggcatcaatcaaat

SEQ ID NO: 155052 - DNA, 489 bp, Homo sapiens
tcttatggaatggtattattccaaattatattatatatgaaggggctggggtgctaactctgtaagcaaaggacagcaaatatcagatgttagaaagtggaaaaagcagggagaaatgaagcagtatttgacattgcatatgtgtyaacataaacaattaactcggacattcttgatactctgaacattaaattagatttagtttaaacaacacagagtctagggcaataatatcatgttggaagtgtaatttttttttctgtgaatatgtttcaaatatctgacttgccaagtgtaattctttactttctctttcagggttataagaaacgcacctgacttaaataacatgtattgtggatatataaatagactatatgttcaatattatcactgcacttataaaaaaagaatgatatgtgagaagatggccaatccagtgcagcttggttctacatattttagggaggcatgaggcatcaatcaaat

SEQ ID NO: 155053 - DNA, 489 bp, Homo sapiens
tcttatggaatggtattattccaaattatattatatatgaaggggctggggtgctaactctgtaagcaaaggacagcaaatatcagatgttagaaagtggaaaaagcagggagaaatgaagcagtatttgacattgcatatgtgttaacataaacaattaactcggacattcttgatactctgaacattaaattagatttagtttaaacaacacagagtctagggcaataatatcatgttggaagtgtaatttttttttctgtgaatatgtttcaaatatctgacttgccaagtgtaattctttactttctctttcagggttataagaaacgcacctgacttaaataacatgtattgtggatatataaatagactatatgttcaatattatcactgcacttataaamaaagaatgatatgtgagaagatggccaatccagtgcagcttggttctacatattttagggaggcatgaggcatcaatcaaat

SEQ ID NO: 155054 - DNA, 616 bp, Homo sapiens
aaacacatattatgagaataaggcttttatgtagaaattagggataacatgaatgtgggaagatctggaagtgatgcatagctcaaggctggggctgtgctacaagctggaggagaaatggtcactaataatattggcataatgcactcatgcatttggaggaaagtctaagaagctaagatatctagctgccaagrctgcaacaggggaacacatggaaagacctgtgaagttcctatgctcatggtctccaggaattatatcttctgctttacttccaccttccaaatctcatgttagttccattcattggctaaaccggagctatacagtgatggtgattcctagctgacaataagcagtccaacttattttgtattttgctttattatttttgttgcttctttgtagattaaatcatgtgtttagattcattagtgactaatacaaattattacttgtattactcttaggtaatgctaggatttccttttaattcatttacctagaaatggtaacggtaacctacacaagtagaataattctgttggctcctggaaggcctacgtatcactgaagttgaagttgaaagaaatgccctgataaatcttaaact

SEQ ID NO: 155055 - DNA, 485 bp, Homo sapiens
cttgacaatgatctgatgaggaagagattgtgggttgatttatctctcttctataaaggatgatgaaagtttcttattgtggggaagcagagamttttagaaaaggtaattttgcttaaaaatatatgattgctatgtgagagaccaaaaatgctatgtaataagtgtaacatggaaacattatttagacatggaaaactaagaaaatgaataaatcaataaagctaccagaaaacacatttttcctgggattcaaggactcagtacaatatatctgacacttgcctgtgccatcttacttcagttcttcttgtttgtacatattttatgctaacctactataacttgcctatttctcttagtgaattaaaaaatacaaaatggtagaaacaaaacatattctcccatgtagttcttatggaattgctaatcctggggaataatctctgtatcctctgtttttagataaatgtttataaattaag

SEQ ID NO: 155056 - DNA, 464 bp, Homo sapiens
ctctgaatgtttgattgtggacatttaatcccttttcacacctagttagaaattgtttggttctatttatgtgatcttaatgtaagatgtttagtggttccctgtatattttttttctatttttaattgatagaaggacattttatgtccctcatgacataaaatttaaacagtacaaataggaatcttgtaaaaattaagtctctttcctattccagatcccagtactcttttccagaagcaaccactgtcaacacattttggaagctgtaccttattaacacgtatagatccactttatttttcaaggtctatgacacatactgccaaaataacctctacaaagattgcactggtttaacatctaatcagcagcatgaaaatgcccatttgctcacaccttttccccaaagaagtattattttaaaaactaatttgtctkattaatttgtacctctgaattc

SEQ ID NO: 155057 - DNA, 607 bp, Homo sapiens
gcagaggcttggagatgagaagcagcgttatgaaggtagggtgcggaggctcatacctgtaatcccagcattctgggaagctgaggcaggaggattgcttgagcccaggagttcaagaccagaatgggtaacatggtgaaaccccgtctctactaaaatgacaaaaattagctaggcatggtggtgcacgcctgtagtcccagctactcaggaggctaaagtgggaggattctgggagccagggaggttgcagtgaactgaratcatgccactacacttcagttgggtaacagagcaagatcctgtctcaaaaaataaataaataaataaataaaataaagcagcattgtgagtgtaggtccacgaacagtctggagtcactggaacacaaaatcagtataggcatggagttgaggcagatgtggtagtcaggagctagattgtggcagtccttgtgatcatgcttttcctaagacccatactcttccccttgaagcctgtgctctatgaagaaaagaatcactgatgaccatctaaggattacaggggacagttatccttaggtgaaagttaaaaatagctaatcttctgggggttgggagaggaa

SEQ ID NO: 155058 - DNA, 596 bp, Homo sapiens
taacccaaattttcaaccacttacaaaagcctacaacgttagacccctacaaccatcgaagctcatgtgtctgctgcacattccaagtaagtgtatgccacagaacccatacattccaacacattgagcaagcacacacatgcctccccagcttccccaaccctcggccaaccagggggcaatggggctgcaggcaggcctacacaccaggcaccacactgccagccctttccagccatycccaaggaaatgcaaaggagaaggagaatgagagaggaagtggccggtgtgaggccttagagaaagaaatgcaaaaccttttttggggcagggcaaccacatactcagagtttttaagtgtcaaagaaaagaatatgttgtgtgagactcccagtcctgctgtcaccgttggaatcacttactatcttccacacactatcagtgaggaccagtctttgccacgtgctctggaagtatagaaagaaaatgcagaagatgtacacatggtttagtcacctacacttctatggtctcctcctttctcctctcctccctccctttccctcctcccttccttctttcttaataatttaaga

SEQ ID NO: 155059 - DNA, 516 bp, Homo sapiens
cacgtttttaaaaagctaatgaatatggatttgagaatggcatatctgtttaacatcagaaagccctatgtaaccataatggttaatttctttagggatttattgatgtattccttctttgttttgctttttagtcagtatttacaggatgaaagtaagaccaaaagaaatagtgatctgaatcttttagagtggacccatcacagcatgaaaccacacgtgagtgacgatcatctacatgtgacatacttggttgcatttactaatagtatattatctagatttggctcccttcctgcccttcctccctccctgcatrcttttaaagtacacatctttttttttctttctttcttttttgtagagatgggatcttgctttgttgcccaggctagtctcgggcctcccaaaacaaagtgctgggattacaggtgtgagccaccatgcctggccagagtctacatcttaagaatgatctgcttctaaatctctagcaattaatctaactaaaatggg

SEQ ID NO: 155060 - DNA, 563 bp, Homo sapiens
ttgataaattcctggaaaaattaatctagaaaagagtaataagtcataaattatatcaacaatgaaaaaaaacctactaattcaatgaatattagaaacatcataagaggatgttttaaataacattatgctaataaatttggaaacttgaatgaaatagaaagattttcaaaaaaaatcaaaattgaccaaaatgtatacaacaccaaacaaaaagtataaacaatcctatgtcaatgtagaatctgtaattaaaattataaaaataaaattctaggaccacacacttcaatgggaaattcttccaaataactttaggaagaaacaggaccattaaagagagtagagaaagaggtgactcttcccaactcattttatgagacaaacacaactttaatattaaattggagaaagatttaacaagaaaatgacgttataggctagtcattgatggaataatcctaaataaaatgttttatatatatatatgttttgtcacatatatatatatgacaatacrtcatgaacaggtatagatgtattccaggagctcaaggttagtt

SEQ ID NO: 155061 - DNA, 640 bp, Homo sapiens
agtcttttctgtatatatatcaataaggtttgttaaaaagggagatcaaaagaaaccattgtggctataacagagaataaaatgagtatttcttgaagcctatgtccctttaartatgtatttgttttcttcttcactatcacctcatgaaaaatatacttaatttttttattttacagttgaaaataccaagccttagagagagtaaacaacttgtccaaggtggcaaaggttgttttttgtctccaaaacttctgttttctgcaccgtatgtatatagttttagtttgcttcagagttcacacattgtcttttcagacaataactattttaataatctagatggttgaatctaatcacataaactccaaagaaaaataattaattttatataaatctgtctttgctttccagataatcccttgagaatgcaacttctcaaaataatagggaagccaagggtacttctcagcaagcgtaggaatccttgctatgagttgaatgaagctgaaatgggagagtaaccaacgtgatttattccaggcactcaaagtaaagaaaatgtaacattattttattttccaaataaaatcaatctgacctcccttccccaacaacacccatcaaaggtgaaagaaaa

SEQ ID NO: 155062 - DNA, 583 bp, Homo sapiens
tcctcgtggtctgtggtctcgtgtccacgctgacctttgaacctcgtaactcttcgggtctccagcggccacctcttttaggctagcccgaatgtttgactttccggtcctcaatcttcctcacctagctgcagamcataaaactgtctttttatttacagggagatgttaaatatttgggaacatctgctcaggctgccaggttattttccgtttgaaagcatgccgatttgacatttgcaagttggtttatgttgcttcctttttgtttcactaagaacgcttttcataccaagatctgcgaaaaacgatgcccttagactgttatttagtttattgtctctgagtaaggccaaattccacagagggtctttggataatggcaactttgcttataagaagataatttttctagaaagtgttgcattggtctggtttcctaagctgttcttgtggtcatgtagactgggaggggagatcttcattccttgtgatgtcgctttccttgaattgtatttttactatagttccacaatgtctcagtcccagattgcaccatatgttgtttacatggtgcagtaaa

SEQ ID NO: 155063 - DNA, 582 bp, Homo sapiens
ttcaagtgccagtaaggaatgtggccattttattggaggaagtttgttacataaaatcatgctgtgaggagagccagcaaagacgccgttgaccagaaatgtcagaactgaatagaaatcaaacaggtagccccgaaaagtgccactccaataccctcccaaaggagggatgggggaaatggcaggtttacactacagaaaagggtattttgtrctttcatttaggagaaaagagggcagggaaaaggctcagtaggtacccaaccaactctgtatcctagtcggagaatataagataaataaacagctcaaattttatatgtgaaagcctgaagttttgaagtcatttcaaattacacagagaaatcatgaaaaaaaacattttaagttgcaatgccaaggcataaatgcaatatttgtatttctcagttacatgtaggagacagataaattaaagctatcattacttggcttctaggagaaataacttatttataaattaagttttaagtggccagcccactctaggtggaaagcatgtaaactgttggaaaagtgtatatttaaacatttccctgataa

SEQ ID NO: 155064 - DNA, 582 bp, Homo sapiens
ttcaagtgccagtaaggaatgtggccattttattggaggaagtttgttacataaaatcatgctgtgaggagagccagcaaagacgccgttgaccagaaatgtcagaactgaatagaaatcaaacaggtagccccgaaaagtgccactccaataccctcccaaaggagggatgggggaaatggcaggtttacactacagaaaagggtattttgtactttcatttaggagaaaagagggcagggaaaaggctcagtaggtacccaaccaactctgtatcctagtcggagaatataagataaataaacagctcaaattttatatgtgaaagcctgaagttttgaagtcatttcaaattacacagagaaatcatgaaaaaaaacattttaagttgcaatgccaaggcataaatgcaatatttgtatttctcagttacatktaggagacagataaattaaagctatcattacttggcttctaggagaaataacttatttataaattaagttttaagtggccagcccactctaggtggaaagcatgtaaactgttggaaaagtgtatatttaaacatttccctgataa

SEQ ID NO: 155065 - DNA, 501 bp, Homo sapiens
gctcaaccctccagttggccaattggctctgaaaaattacatttaaatctccaactcccaaatgctgctaagcacctcttaatttaatttttctccctttatgaaataggaatagtataaacacaasatgcaagcacttaatgcttcttttagcatcatcgttctggagctgagaggactgcccagggccttcacacaccaccgcctctttggtctccaactcagttcctcttgagacatttttagggcctcctccagaggctcaggcccaaacagatgtccctctcgcccccactttgaaatggtgtggcgtgagggaacacaagagagaagggggaaaaaaagctttggtaaccatgtgtcacagtagagaaagtggttcatacattaagggaaagtgaaaatgaaaaaccagaaaatatgcagagagttcatggacatcctggaaaacaacttctagcagatccccagctgaaccaagcaggtgcaagctttagatga

SEQ ID NO: 155066 - DNA, 507 bp, Homo sapiens
tctatctgcatgagaacaacattttgcatggaaaactgggcatgcaaatttaaccctgatttggcaactgcaggcctaatgcagcagaaatgaatacatcaactgcttcctctggctttcagctcctaaacccggagagaaaccagaactcctacttcttgcaayaagctttgcactaccccggcccactcagcgacctgcgttctctgtttctgaagactcctcttagcaaccgcaaaacccactgcccgcattgccactttacagaaagtagacattagggaccagggaggccgcctctgatccttgcgtcttggagagcttacgaccatcaccatgcatccccattcgtccttctgccgttttctcaaaggtgttgcagtggacatctgttgtttttgcccaccaggcccacattcctcctccttctgataacaacaccctagttttttgttttgtttttctctctaaggaatcactgcttgccactctcaatcctcaaggcca

SEQ ID NO: 155067 - DNA, 378 bp, Homo sapiens
ccatctgtggttcttgcctttctgtccttatccatagggcagctcattcttgcatatctgcagctcttgcatgcctgccattttgtatcttcctttttctcgttatatcagaagcattataataagttacattagaacccgttttgcatattttaacattgccttcacagtgaaactatagagagmtttatggtggcactctagtgaatattctgttctgcttctgttacatgactaccttaggaaaagtctccgagaactcctgtctcccatgattatctctcctaatcaggctttctactatcaaactactcagcaaaaggaactcaccaacctatagtgctaccagaagtctaataacataacactgtcaccaca

SEQ ID NO: 155068 - DNA, 580 bp, Homo sapiens
agtaaatacaaaagtgtatttaagtagacattattcttttatggcattcataaattcataaattgcacaagataacctgagttgctctaaatgcttttcaaacttaagtttaggggagcaacatcagcaagatggctcactagaaactccagcactcatcccttccacagtgacagccaaaacaatgaataaacaactacactttaatgtacataactgaaggagagtgcyagaatacatcaaaggagtaacagaaaccctggtgagcacagaaactcaggacagccacaaagagaatggaaggaaacatcacaactccaccaccctatccccagctgagatgagccagaaacccagaggaaactttccctataggaaaaaggcaagcaagaggattccagtagcctccaccaacaccttggacacccacagtcctcactactggagtccttgtagtcttcactggcactaagtccagctgagggagctgcctacaggccacacagccacactcacctcagagaaggaactaatactgtgctctattccctgtagcccacatggcaactgtgctatatca

SEQ ID NO: 155069 - DNA, 528 bp, Homo sapiens
tccttaaaattccctgttatcttttttcttcctggtgatctttctctctgtgctctgctcagaagccagacgttgtctctctcttaatcatttacccttaagtagctatggtagttctattaagtctgcagccttagttttttggtttttttktttgtttgtttgtttgtttttagtttactcctacctttctaattatttttttcttattgttcacataattctgcatcacaaaaaaaattttattttttaagaaagtggattaaggggaaaggctaaaaaaattaatttgtggggaaatggaaagcttggaacactaacatttttacaaaatttgcccttaatatatttaaacattgattaaatacaattcttattaaattcattgttagaaccaagcttggagtaaagaattatgaattcctttgaaaataaacttcatattcagaatgaatttaataaatagaagtagtagaagccaaaaataatgggatttattaatttagaacaaatctagagtagactatc

SEQ ID NO: 155070 - DNA, 280 bp, Homo sapiens
gaagtaggcaatggcttcccaccttgctccaagtaaaagcctaagttcttagagtggcccataaggtctagcaccctccagctccttgtcatcactctgacctggtttcctgccactctcccctggctattccagccatactggcctccctgctgttctaacatacaaacatgcacctgcctgggaggtttgtactttctgttccctctgcctagaatttcttcatccagagccatcatcatggytgtcccctgcacctcaaatcttccctgagacatta

SEQ ID NO: 155071 - DNA, 576 bp, Homo sapiens
tttctttgcttgtcagattccttcagattctgtggacaccagagtttcaagggaaagtgagtaaactggccacacaggacacttcagacaggtgacttggcatagaccaccagaaaaccagagaaagactcttcccaccagactcacgggtcagcctcatctttttgcaaaatggaaagccccagtgccaggactttccagttcttgaggaggatcagatgatgtggctgaaacaaccctggactaggaatcagaaatgaataattaaggcatggttctgccccttttcttgtgtgatcatgtatgaaccacttacacccttttgagccacagtctccaatgtacagattaatgacaatgcctgcaaaaatcacatatgtaccttcattctgcccttttaacaatayctgtgtggcaatgctcagtattcatggtgaacgttcctaatgaaattgtacctagagccatctggatcactgctgaaataatcatctgaatttcttgtccttggtgtaggtatcctaggaatacctgcctgcttagaccctctataaaagctctgtgcatcctgccact

SEQ ID NO: 155072 - DNA, 569 bp, Homo sapiens
tcctcccaaactcattctgtgcatcaccctgatagcaaacctgacaaacacacaataaaaaaaaaagaaatcaacaggccaatatccctgatgaacatagaggcaaaaatcctgaacataataccagcaaaccaaattcaacagcacatcaaaaggttaatttaccatgatcaagtaggcttcattctggcatgsaaatttggtccaacatgagcaaatacaaatgtgattcaccacataaataggatttttaaaaagccttagaatcatctcactagatgtagaaaaagcttttgctataatccaacatcccttcatgataaaaaacttcaagaaagtaggcactgaagaacatacctctaaataataagagccatctatgataaaaccacagccaatatcatactgaatgggcaaaaactgaaagcattacccttgcgaactggaacaagacaaagatgcccactcttactactcctattcaacatagtactggaagtgctagccacagcaatcaggcaagagaaagaaataaaatgcatcttaataggaaaagaagaaatcaaact

SEQ ID NO: 155073 - DNA, 466 bp, Homo sapiens
taggcccatccaggaaagggtgtacatcacttctgccacattccattgatcggaactcagtcatttggacccacgtaactccactgaagcttggaaatgcggtctacctgtgtgcatgggtggaaatgcggtctacctgtgcacatgggtgaatactaataatctctgctagaaaaactgaaaacagcagcaaaacaatattaataccattaacatctaacatttattaagctcytctgtgcacgcatagtaatttacctgatatagctgagactcaaaaaggttgaataccttgcctaagtttatgaagaggtctatgaggagcccagagatgaacacaggtctgcttcgttccaaaaaacatgtgcttaaccactattcgatactcctattgggataggaattgaatactgctcttagtggggctttatttttatgaaatagaaacaaaagctgtaaataccac

SEQ ID NO: 155074 - DNA, 592 bp, Homo sapiens
ataaaatgccacaagatgtgtttacatcatctttgcttcatggtatagtattatctgttgggtggtttctctgtccagagctaagtggcggagatttagttaggtatcatagtttaaaactacaggcctcagagccaaactgcytgtgtttgcattacattatctgttatttccaacccatttgtttggtgaagttagttgtacttctcagtgcctcagttttgtcatatgtaagtgagaatgatagtagtacctaccttataaaattgttatgtgtattaaatgagtaaatgtttcgaaatcacctaaaacagtgcttggctcgtattgtagaaggcagttatgttttaaataaagtataaatattttctcctagcttatccccttttcattttatagcttcatacacccagcaaatattcattgagttttgataaatactacacacttcgcagattgggaaaccagacctggttattagaacaactaatacccgtatgatattttcagtttatgaagcacttcttattttactttaatctttatgttaccagaaagggagggttcttggatctcccgcaagaaagaattc

SEQ ID NO: 155075 - DNA, 482 bp, Homo sapiens
gtccttatgtaaatatttatgtatttatttatagttattatttcattttttataaaataggacaatactatatatawtgtttttcaacttttgttgttttattttatgcttaacaatatattgtggacttcttctcacgtaagtacgtagagccattttattgtatttaatggttgggtaatgctctgttatataaacgcatcataatttaattgactagtcctttagtgatgagtgtttaagaggctgaaatttttcattattataaacaatgtagtagtgaacacttttgtgtagtcttcaactacttaaaatgttttattacttaataagaatttaatatattacaaagcggcatttaaaatactaggtaatgcacattatagaataatttgggagattggctagttaaccacttatgaggagaaagtggggtctctgctgtatgccttacacaaaaataaattgtatttgtaataaca

SEQ ID NO: 155076 - DNA, 482 bp, Homo sapiens
gtccttatgtaaatatttatgtatttatttatagttattatttcattttttataaaataggacaatactatatataatgtttttcaacttttgttgttttattttatgcttaacaatatattgtggacttcttctcacgtaagtacgtagagccattttattgtatttaatggttgggtaatgctctgttatataaacgcatcataatttaattgactagtcctttagtgatgagtgtttaagaggctgaaatttttcattattataaacaatgtagtagtgaacacttttgtgtagtcttcaactacttaaaatgttttattayttaataagaatttaatatattacaaagcggcatttaaaatactaggtaatgcacattatagaataatttgggagattggctagttaaccacttatgaggagaaagtggggtctctgctgtatgccttacacaaaaataaattgtatttgtaataaca

SEQ ID NO: 155077 - DNA, 530 bp, Homo sapiens
actacctaacatttcaatagacacatggttttttttttcagtcatattaattaagttctgtgcacggtgcttgcacataaataaaaccagatgcttaaattgtagctcaatcattacgctgtatttgctcacatcccctcctgtaccactttcaagaaattggcttttcgcctaaatggcaggggagggaaagggaaaaaaagaagaaaaaaaagttctggagctttagccttattctcaggttgatgagtggttgttgatatgtgacaaatacatttcgctttcatgacatctctatggaaarttaagaattgtagttttcttgaggcagttgagattcttaaaggagtatttattcatcatgctattaatttattggccttcataaaaactctttcaaaattgtcacctatctataaataagacttaaaacccaccctcggctacatagatacacacaaacacaaacacacagatgtatgtgtgtgaatttataaaataacctgtcaatacatatggagaaaatagtt

SEQ ID NO: 155078 - DNA, 617 bp, Homo sapiens
acttttaaaagtcaccatactgttacccctatctattcttaaatatcatcaacttgacaatttcatttggtgagaactgtttattcattcacatgccaagtttcgggctgtcacaactgataatcctctagaagtatcaacaggcaaaaggaaattggtgactttcttttttttttgcttttttaattaaagtatctgaccaatgcacttgatataatttctgactcaaaaaaacatgcttaataattaaatattaaagcaatctttatccacattgttatttaaccctgttctagaaattctgaccaataaacaagatgtcaaaaaattacagaaaagtagaagacaaaatgtatcattatttgaggaaacaaagataatttgctggccaggcacggtggctcatgcctgtaatcccagcattttgggaggccaaggtgggtggatcacctgaggtcaggagtttgagaccagcctggccaacatgatgaatctcygtctctactaaaaatacaaaaaattagaagggcatggtggtgggcacctgtaatcccagccattcaggaggctgaggcaggagaattgcttgaacccgggaggcagaggttgcagtgagc

SEQ ID NO: 155079 - DNA, 584 bp, Homo sapiens
ttcttggtggggaccaaagtaagaaaagccgtgggggtggtgaagcatttctttgtctggatcaaggtaagaaaagcagccagggcagtgaggtattccttggtggtcgggatatcttggaggtcaagtgtgtgtgaaaggcaagaaattcctagtatgagggattgagcctaaccaggacccaacatgggaaatgccccaagtaagacagggagtgaaaaggatagagataataacaatgatattccccctgatagccctctaggacttaggttaaaatattgattcatataataagactcatttcactgcacatgtcattaagaaattagcccaagcactaaacataatataggagtgccatactccctggcacccaccttcatcaggaagaatactgagaatgaaccagactctgaggagmcacttaaccaaattggttttagagactcctccacattgccttcttaagggtcaggattgcccttctgaaagatgtcggcttattcccttatgaaatgctatataatttgccttatttacattccactgctgacattcctatgcttgagatgaaagaccag

SEQ ID NO: 155080 - DNA, 584 bp, Homo sapiens
ttcttggtggggaccaaagtaagaaaagccgtgggggtggtgaagcatttctttgtctggatcaaggtaagaaaagcagccagggcagtgaggtattccttggtggtcgggatatcttggaggtcaagtgtgtgtgaaaggcaagaaattcctagtatgagggattgagcctaaccaggacccaacatgggaaatgccccaagtaagacagggagtgaaaaggatagagataataacaatgatattccccctgatagccctctaggacttaggttaaaatattgattcatataataagactcatttcactgcacatgtcattaagaaattagcccaagcactaaacataatataggagtgccatactccctggcacccaccttcatcaggaagaatactgagaatgaaccagactctgaggagccacttaaccaaattggttttagagactcctccacattgccttcttaagggtcaggattgcccytctgaaagatgtcggcttattcccttatgaaatgctatataatttgccttatttacattccactgctgacattcctatgcttgagatgaaagaccag

SEQ ID NO: 155081 - DNA, 505 bp, Homo sapiens
ttatattttaatatttatatttttacattgataatcaatattccaaaattatcttttcttgacagaaaggtaatgctaaatttgttatataccaagtttctgtataggtataaactgctgtacttcataatttattgttcatttttaatacttttcaccacaatctaatagtcatatcttcttcggatcctcttggctaagatagtttctcggactttttcattacacatatcaaagttatgtgctgtcattatgatgtatcactgttgatttgagctttgatcatctatcagaggtggtgtttgtcagttttctccactaaaaagatgctttcttttctctctttccatagtgtacgctttggaagacmgttgctataaaaaagttcacatctaaggagtagagactttgtgttccactttctgtgtctgtaatacctacgtaaattatttgtaaaattcttctacaagggaaatttgacaattctccatttattagttcttag

SEQ ID NO: 155082 - DNA, 652 bp, Homo sapiens
acatgttgaagaataaaactatatcctcatttctcagtgtataataaaaccaactcaagatggatcaaagacttaaatctaagacctgaaaccacaaaaattctagaaaataacatcgtaaaaacatctctggacattggcttaggcaaataattcatgactaagacccgaaaagcaaatgcaacaaaaatcgataaatgggacctaaataaactaaaaagcttctgtacagcaaaagaaataatcagcagagtaaacagacaacccacagagtgggagaaaatactcacaaactatgcatctgaccaatgactagtatccagaatcaacaaagaacgcaaacaaatcagcaagaaaaaaacatataattccatcaagaagtaggcaaaggacatgaatagactattatcaaaagaagatatacaaacagccaacaaacatatttaaaaatgctcaccatcacgaatcatcagggaaatgcaaactaaaactgcaatgagataccrccttaccccggccaaaaaacaatagatgttggcatggatgtggtgaaaagggaacacttttgtactgctgatcaggaatgtaaattagttcaaccactgtggaaaacagtatggcaattccttaaagaaataaaagtagaactacc

SEQ ID NO: 155083 - DNA, 545 bp, Homo sapiens
gttttgtggcctattatatgatctaccttggagaatgttttatgtgccactgagaagaatatgtactgtgcagttgttgcgtagaatgttctgtacatgtctgataggtccctttggtctaggttgtagactaacttcacygtttcttagttgattttttttttgtctagacgatatcttttgctgaaagtgggatgttaaagttccctgttcttattgtattggagtttatctcacctttatggcttgttaatatttgctttatatatttaggtgttctgatattggctgcatatgtatttacaattgttacgtcctcttgtttaattgaccttgttatgattatataatagccttatgtgcctctttttagagctgtagatttaaagtctattttatctgacataagtctagctactcctgctatcctttggtttccatttgcaaggagtgtctcttttttccatcacttcactatcattcagtgtccttacaagagaattaggtttctttctaagcagcatgcagttgagtcttgtttttca

SEQ ID NO: 155084 - DNA, 541 bp, Homo sapiens
ttctcagggggcaaattaaaaaggcaaagacattgtcccaatttaacacatggatgctgtagaaatatgaaatatgtagagacaaactatgatggaaaaactctgaaataatatagaagacactgtataagaatggcataatttactttttctgttcaacaatgcatataagaaatttcgtcataattctatttttcaagcattagatctactgaacatgtcctcttgatttttgaagcatgtgtattaaatgtatacaattgcaaaacaactgaagtttgttaccactatttgttatgtcaaaccacagtttaaatgtaacgtattctaaggccagcagagtatttcataatcagcatgaaaaatgtgtttggaagacaagttacaactggatggtaagagtaagtgagacrgttgacattaagaatgtttacagtgattctgagcaccaagaagggtgtttgttataaaacataacacacaagatctgaaaaggactgagttaaattatcactctgtgaggcaaagggtctgaaaaatt

SEQ ID NO: 155085 - DNA, 499 bp, Homo sapiens
gaattccacagctctattctgctggggacccaggaggcactgcggagctgcctcagcactgcctcccaggggagaggcctccatcctccggtgttccaggaggactgcagggtgtcgtgccaagctgggttaggctgtggttcaagggtgggaacctttgctgcgtggccctgtggctgcatgcagggcgccaaggcggagccgttcccttatgcagggatggaggtggtgttatctttttaaaytggatgcccagagaaggcttcactgagaaggtaagcttgagcaaatgcctgagtgaagtgaagaagcaggttatgtgagtatctgggagaagatggtcccaggcagagggaacagcaggatgcaaggccctgaggcagggtggggctacatacctgtggaaagggaagaagtcacagtggccagggtggagtcaggagtgggaggagaggcaagagccagtcatgcagcgacaggtgcctaaacatgtcgagcc

SEQ ID NO: 155086 - DNA, 499 bp, Homo sapiens
gaattccacagctctattctgctggggacccaggaggcactgcggagctgcctcagcactgcctcccaggggagaggcctccatcctccggtgttccaggaggactgcagggtgtcgtgccaagctgggttaggctgtggttcaagggtgggaacctttgctgcgtggccctgtggctgcatgcagggcgccaaggcggagccgttcccttatgcagggatggaggtggtgttatctttttaaattggatgcccagagaaggcttcactgagaaggtaagcttgagcaaatgcctgagtgaagtgaagaagcaggttatgtgagtatctgggagaagatggtcccaggcagagggaacagcaggatgcaaggccctgaggcagggtgsggctacatacctgtggaaagggaagaagtcacagtggccagggtggagtcaggagtgggaggagaggcaagagccagtcatgcagcgacaggtgcctaaacatgtcgagcc

SEQ ID NO: 155087 - DNA, 499 bp, Homo sapiens
gaattccacagctctattctgctggggacccaggaggcactgcggagctgcctcagcactgcctcccaggggagaggcctccatcctccggtgttccaggaggactgcagggtgtcgtgccaagctgggttaggctgtggttcaagggtgggaacctttgctgcgtggccctgtggctgcatgcagggcgccaaggcggagccgttcccttatgcagggatggaggtggtgttatctttttaaattggatgcccagagaaggcttcactgagaaggtaagcttgagcaaatgcctgagtgaagtgaagaagcaggttatgtgagtatctgggagaagatggtcccaggcagagggaacagcaggatgcaaggccctgaggcagggtggggctacatacctgtggaaagggaagaagtcacagtggccagggtggagtcaggagtgggaggasaggcaagagccagtcatgcagcgacaggtgcctaaacatgtcgagcc

SEQ ID NO: 155088 - DNA, 507 bp, Homo sapiens
tgccatgcacaggccacctctgagcctggtccaygctgttttgaggtgtcacagagctcagccccagccagcattgggagtggtcaggaccagctgtcacgttccccaggagaaaagcattaccattccactaaatcagcatcagcttcatgaagacacaagcagggtctcttgatcgtccaagcccgtgctaggtgtcttagatggggttcccccagaggcagatcctgagaccaggattcaagtgcaagtcgcttataagggagcccaggtagcaccaggtgggaatgggaactgagacaaggaagggaaggaaaccagtgctgtgcggcctcaaccaagtcacctaagctctttgagctttgtctcctcagtaaaacagagtgcagttatacctccctgagaggattggtgtgaggatcaagggaagtgcctggcaaaaacaaggtaagtccaaacggttggagtgacataggggcccccaggcatccaggattggccaaggcc

SEQ ID NO: 155089 - DNA, 565 bp, Homo sapiens
ctaaaatacatttctccaattccctgtccaaagctcatttgcagttttgacaagtacaaatgttttgtacccaaagacagtaaatgaggcagtagagccattggcaggcagagctctttcttctcccatgtacattcaacaataccagaaacaggactgagagagccttgtaaccatcatttccatggtttgagttttgtggtagggtcagggaaggcctctgtgtgtaagtgatgacaagggaacaggaattgaaaggaggaaaaccagggaccctgtgtaggtcagagggtggcaggtgaaggtcagaggaatgtcagattttactttaaktgaaagaaacagcaacagcaaccagaagttttttttttttttttttttctgacacagagtcttgctctgttgcctaggctggttgtgcagtggcacgatctgagctcactgcaacttctgcccccctgagttcaagcaattatcgtgtctcagcctcctgagaagctgggattaaaagtgcccaccagcacacctggctaagttttgcatttttagtagatacagggtttca

SEQ ID NO: 155090 - DNA, 525 bp, Homo sapiens
agctaacccatcacggggatttgacaaacatggcttccgattgtatcttctttccaattcattttatgaactcaggcaagttccttagcttctttaaatttgagaaatgagtatgacaacagtaccttcttctcaaggacacacataaagcacttaaatatttgataagtgctagtcacaatattggtgtattttgccttgacaaaagtaatgcctaattttattcaataaacaattgttaattgtcaactcatacataagctaayattgttaagttgcttcgtataatgcttatcacaaaaatggtatgtaatggttacataaatacaaataaaatcatgtatttgacaccatactgccattaggtgactactatctctccatattagaggtagagcagtgtcaaaaactaccatctgattaaataatagaaataacagctaagtacttactcggtactttcatctttctaagcaatttatatgatatgttacttaatcctgacaaccctatgaggaaggtcct

SEQ ID NO: 155091 - DNA, 600 bp, Homo sapiens
aagcatatgtatctctgggctcctgtttaacctcccagctctagaagatgagaaaaagcatgtccctcttacgggcacttacaccatttcttatgaagccatcccacacactgttaaacaaatctgattgtttctcaaactcccctttaactgcttcagcttattgctaagatgttggagtcttcctgtgttggtggccatggaaaccacctgtctatttaatggcatgaggtcttwtctttacttttcctggcatgccaggctgctggggaaaggccagagccctaagtttaaacaagtcaagtacagatgtttaagaatgacagctcccaacagcttcagatcatagctaataccaaaattaaactgtaacatggtatgctctgatggggaaactgtgcacagtttctaagtacacaaacaagacagtacacagacaattgtaggttccatttgggggcaattttcttcccttatcatggctatcagtgatacaatctgctgcagaagaatgtggtgttaactaattagtataccatatagaagtgcctgtcttgtattatttacagtgcctgggacacactcctagtacagggcttc

SEQ ID NO: 155092 - DNA, 600 bp, Homo sapiens
aagcatatgtatctctgggctcctgtttaacctcccagctctagaagatgagaaaaagcatgtccctcttacgggcacttacaccatttcttatgaagccatcccacacactgttaaacaaatctgattgtttctcaaactcccctttaactgcttcagcttattgctaagatgttggagtcttcctgtgttggtggccatggaaaccacctgtctatttaatggcatgaggtcttttctttacttttcctggcatgccaggctgytggggaaaggccagagccctaagtttaaacaagtcaagtacagatgtttaagaatgacagctcccaacagcttcagatcatagctaataccaaaattaaactgtaacatggtatgctctgatggggaaactgtgcacagtttctaagtacacaaacaagacagtacacagacaattgtaggttccatttgggggcaattttcttcccttatcatggctatcagtgatacaatctgctgcagaagaatgtggtgttaactaattagtataccatatagaagtgcctgtcttgtattatttacagtgcctgggacacactcctagtacagggcttc

SEQ ID NO: 155093 - DNA, 575 bp, Homo sapiens
aaagacaggccaaaagctaggcctcttgggccaaacagccamgctgtgaatgcaaaggacaagttattgaaggaaattaaaagtgctactccagtgaacacacaaacagtaagaaagtaaaacacttattgctgatagggagagtttgagtggtctggatagaagatcaaacaagccacaacattcccttaagccaaagcctaatccagagcaaggtcctaactctctccaattgtatgaagtctgagagaggtgaggaagctacagaaaacaagtctgaagctagcagagattggtcatgaggttcaaggaaagaagccatttccataatataaaatgtcgaggtgaagcagcaagtgctaatacagaagctgcagcaagttttccagaagagctggcaaagataatcaatgaagttgaccatattaaacaatagattttcgatagtgacaaaacagccttctattggaaggcgatgccatcaaggactgtcctagctagagaggagaagttagtgcctggcttcaaagcttcaatgaacaaactgaatctcttgttaggggctactgcagatg

SEQ ID NO: 155094 - DNA, 575 bp, Homo sapiens
aaagacaggccaaaagctaggcctcttgggccaaacagccacgctgtgaatgcaaaggacaagttattgaaggaaattaaaagtgctactccagtgaacacacaaacagtaagaaagtaaaacacttattgctgatagggagagtttgagtggtctggatagaagatcaaacaagccacaacattcccttaagccaaagcctaatccagagcaaggtcctaactctctccaattstatgaagtctgagagaggtgaggaagctacagaaaacaagtctgaagctagcagagattggtcatgaggttcaaggaaagaagccatttccataatataaaatgtcgaggtgaagcagcaagtgctaatacagaagctgcagcaagttttccagaagagctggcaaagataatcaatgaagttgaccatattaaacaatagattttcgatagtgacaaaacagccttctattggaaggcgatgccatcaaggactgtcctagctagagaggagaagttagtgcctggcttcaaagcttcaatgaacaaactgaatctcttgttaggggctactgcagatg

SEQ ID NO: 155095 - DNA, 575 bp, Homo sapiens
aaagacaggccaaaagctaggcctcttgggccaaacagccacgctgtgaatgcaaaggacaagttattgaaggaaattaaaagtgctactccagtgaacacacaaacagtaagaaagtaaaacacttattgctgatagggagagtttgagtggtctggatagaagatcaaacaagccacaacattcccttaagccaaagcctaatccagagcaaggtcctaactctctccaattgtatgaagtctgagagaggtgaggaagctacagaaaacaagtctgaagctagcagagattggtcatgaggttcaaggaaagaagccatttccataatataaaatgtcraggtgaagcagcaagtgctaatacagaagctgcagcaagttttccagaagagctggcaaagataatcaatgaagttgaccatattaaacaatagattttcgatagtgacaaaacagccttctattggaaggcgatgccatcaaggactgtcctagctagagaggagaagttagtgcctggcttcaaagcttcaatgaacaaactgaatctcttgttaggggctactgcagatg

SEQ ID NO: 155096 - DNA, 575 bp, Homo sapiens
aaagacaggccaaaagctaggcctcttgggccaaacagccacgctgtgaatgcaaaggacaagttattgaaggaaattaaaagtgctactccagtgaacacacaaacagtaagaaagtaaaacacttattgctgatagggagagtttgagtggtctggatagaagatcaaacaagccacaacattcccttaagccaaagcctaatccagagcaaggtcctaactctctccaattgtatgaagtctgagagaggtgaggaagctacagaaaacaagtctgaagctagcagagattggtcatgaggttcaaggaaagaagccatttccataatataaaatgtcgaggtgaagcagcaagtgctaatacagaagctgcagcaagttttccagaagagctggcaaagataatcaatgaagttgaccatattaaacaatagattttmgatagtgacaaaacagccttctattggaaggcgatgccatcaaggactgtcctagctagagaggagaagttagtgcctggcttcaaagcttcaatgaacaaactgaatctcttgttaggggctactgcagatg

SEQ ID NO: 155097 - DNA, 496 bp, Homo sapiens
cattttacatacctaaaaagaatcaatattttcttgttctttacaacattcttttttgttgttgttattgctattgttgaaggacaatcaattctgatttacataaactcaagggtaasttaaaaagacagttgcagtaactaagattgaagctggcatgcctttcccgagtgaggtgttagacataaaaatggctttcattttgtaatggagaaaaaagacttaagtctctgggacacaccactcttctcccctaatctcttccacaaatagcagcctgggtgatctttttgtaatgaaaattctatcacaaactccaaatattaaaactttctcatggctttccatcatcttaagaatgagatccaaattcttcaacctagtttaaatggttctatgccagggctctccaactctggtagacccaaccctccttaatacaaatattttgtattaccctcttcactctcctgagatgaaatctactcttaagata

SEQ ID NO: 155098 - DNA, 496 bp, Homo sapiens
cattttacatacctaaaaagaatcaatattttcttgttctttacaacattcttttttgttgttgttattgctattgttgaaggacaatcaattctgatttacataaactcaagggtaacttaaaaagacagttgcagtaactaagattgaagctggcatgcctttcccgagtgaggtgttagacataaaaatggctttcatttygtaatggagaaaaaagacttaagtctctgggacacaccactcttctcccctaatctcttccacaaatagcagcctgggtgatctttttgtaatgaaaattctatcacaaactccaaatattaaaactttctcatggctttccatcatcttaagaatgagatccaaattcttcaacctagtttaaatggttctatgccagggctctccaactctggtagacccaaccctccttaatacaaatattttgtattaccctcttcactctcctgagatgaaatctactcttaagata

SEQ ID NO: 155099 - DNA, 491 bp, Homo sapiens
gttagacaactgactcctgagtaactcctggatgaacatcaaaattaaggcaggagtttaaaaatactttgaaattaatgaaggagagaggaaatttactaaaatttcttggatacagccaaagcagtgttaagaggaaagtttrtagaccagcctaaatgacttcattaagaatttataaaggtcttaaattaacagtgtaactttacacctaaaggaagtagaaaaaagagcaaaccaacctcaaagctagtagaagaaataaaattagagaagaacttagtgatatcgctatgcgctatgcaaaaatctgtacaaaagatcaataaaaccaagagtttgttctttgacaaaagtaaataaggttgaataggcccatagctagattagcaaagaaaaagaaagatccaaatatctaaataagcacaatcagaatcaacaaaggtaatattacaattgatccaacagaaatacaaaagaatctccgtgac

SEQ ID NO: 155100 - DNA, 602 bp, Homo sapiens
tcttctttgtggtctgaaggaccctctatggatctggagaacactcccaggcagagaagcagagatgcaggctcttgaggaaggaagccttcagcatacacataaaaattccactgcagctataaagagcttccggatgggcagaaaggatacacatagggcggggaaaccacagcatatgttatacaattaaatggatagctgtatttgcactctaataatgaaagttaatgcaagtattataaattatgagaatataaaaatataattatataatttagacatgggagaaaagaagaggaaaataatttaaaacaataaaaatgaatttaaaataactaaaatatagaataaaaaactgggagttggttaggtgggaaaaaaaggtagaaggcaatgtatgtgccccatattctgtgctttttcagtctgggctatcagtacttstttctacagttgatgcatccataaatagagacataaatgaattatttatccttatcatagtaattatgagaagaattaaacttggaaattttaaacatgatttcctctagagaggtggagtggaattgagaattgtgagctgacaaaacaatttc

SEQ ID NO: 155101 - DNA, 460 bp, Homo sapiens
ccatttcatgctgggtaaatgattgaaaagaaaaccatacaatctatctcacccataattttatccatcagtccttttcagaaagcaacaatgggaaatgcatgccatgaatctctgtatacagaaacttttttttgcagtgtagctttcaatatcacagaatttacactataaaaaaaacctgtttcttcgtgttagatttcarctgcgtgtggttctacattcacctctctcactctgtatcagtcatcttcaaaatgatggtcatgggtagcatgtttcctaagatattttcctacatttcttcatgtatctgactattcataattctggcaacaattttgattatttctgaaagctcaaactatttctaattatctcactcatatttgatggtcagcatgacaagtggtcataaaaagtactttctgaatcattcagtagtgttcagttgcacttg

SEQ ID NO: 155102 - DNA, 500 bp, Homo sapiens
aacacatttccaccatgtgaaacccagaacagagaagccagttgagctaacccaaaaattctgacttacagaattgtgagatttttttttaacaatgaagtttgtggcaatttattataacagaaagtawaaagcagtataatttcattattggcttcgtttgtattttctaatttctgaggttatgcatatatcacattaattattaatcatttattttcacctctatagattgtgcttcacagatgttgcccattgggattttctgcctttatcatatagatttataagaatttcctatatacattttaaaatattatttatgaattaagaatattaaaaaatagtttgccatctgtttgcaaaatgtgtctattgtgcccttcattaaacagaatgttttaagctttatgaattcaagcccatcatttacttcttaattatgtgttcttttggaatttttttttttttttttttttttttttttttttttttagaca

SEQ ID NO: 155103 - DNA, 500 bp, Homo sapiens
aacacatttccaccatgtgaaacccagaacagagaagccagttgagctaacccaaaaattctgacttacagaattgtgagatttttttttaacaatgaagtttgtggcaatttattataacagaaagtaaaaagcagtataatttcattattggcttcgtttgtattttctaatttctgaggttatgcatatatcacattaattattaatcatttattttcacctctatagattgtgcttcacakatgttgcccattgggattttctgcctttatcatatagatttataagaatttcctatatacattttaaaatattatttatgaattaagaatattaaaaaatagtttgccatctgtttgcaaaatgtgtctattgtgcccttcattaaacagaatgttttaagctttatgaattcaagcccatcatttacttcttaattatgtgttcttttggaatttttttttttttttttttttttttttttttttttttagaca

SEQ ID NO: 155104 - DNA, 509 bp, Homo sapiens
ttggaatcatacagtgtgtagccttttcagactaacatttttttcacttggaaatgtacatttaagattcattcatctcttttcatggcttcacatctcatttctttttatcactgagtaatatcccattgtatggttgtaccacagtttgttgctccatttaccttgaaagataccttgyttgcttccagttttggtgattgtaaataaagttactacaaagattcctttgcaatttttgtgtagacataaaatttttaatcagttggttaaaaacctaggagggtaaatgttgtactgtaatgtaaaactacatttactttggaacaaaactgccataatctcaaaaggctatctcattttgccttcccacctacatcaaataaatgtttatgttatcctgcaatctcaccagtaactgaattgtcagtatttggaatttttgccattctaataggtatataatgctagctcgttggtgttttaatttgcaattctctaacaacaaa

SEQ ID NO: 155105 - DNA, 509 bp, Homo sapiens
ttggaatcatacagtgtgtagccttttcagactaacatttttttcacttggaaatgtacatttaagattcattcatctcttttcatggcttcacatctcatttctttttatcactgagtaatatcccattgtatggttgtaccacagtttgttgctccatttaccttgaaagataccttgcttgcttccagttttggtgattgtaaataaagttactacaaagattcctttgcaatttttgtgtagacataaaatttttaatcagttggttaaaaacctaggagggtaaatrttgtactgtaatgtaaaactacatttactttggaacaaaactgccataatctcaaaaggctatctcattttgccttcccacctacatcaaataaatgtttatgttatcctgcaatctcaccagtaactgaattgtcagtatttggaatttttgccattctaataggtatataatgctagctcgttggtgttttaatttgcaattctctaacaacaaa

SEQ ID NO: 155106 - DNA, 589 bp, Homo sapiens
caagtaggaaagatatcgctaaattcttttcctagcaaggaatattaatattaataccctgggaaaggaatgcattcctagggggaggtctataaacggccgctctgggaatgtctgtcttgtgtagttaagataagcactgagataagccctggtctcctgcagaaccctcagscttactagggttggaaaaactcgttaaatttatggtcagaccagttatctgctctccaaccctgttctctgttgtttaagatgtttatcaagacaatatgtgcactgctgaacatagacccttatcagtggttctgcttttgccctttgccctgtgacctttgttggacccttgtcagtggttctgcttttgtcctttgtcctgttccctcagaggcatgtgatctttgttagacccttgttagtggttctgctttttgctctttgaagcatgtgatctttgtacctactccctgtttttatgtcccctccccttttgaaacccttcataaaaacttgctggtctgagactcaggcagccatcacatcctaccaatatgtgatgtcacccctggcggcccagctgtaaaattcc

SEQ ID NO: 155107 - DNA, 432 bp, Homo sapiens
tccaggcttagccaaaggagatcctgcactggcatatgcttagcataaaaggtattcaagggacagctgaacaaatggaaggtgatccaaaaatactctttcttatttattgtataattctttttcatcggtakaaaaacatattctgaatcacaggaactttcaagttgtgctgaagaatgagagtgtaaacagaatatagaaaataacaaacttcaactctcaaagtaactattacacaagacgatgatgaaaaaggattaaaaggaaaagatcatttataattgcaaatatttcatcagatcactgagagagttagcaaagcacatttctgttaaagggaaaaagaaacaactcttcttacaccttgtcctttattctgcttgcgagctagctagctatagatccatatctggtagcaaaggagcagct

SEQ ID NO: 155108 - DNA, 432 bp, Homo sapiens
tccaggcttagccaaaggagatcctgcactggcatatgcttagcataaaaggtattcaagggacagctgaacaaatggaaggtgatccaaaaatactctttcttatttattgtataattctttttcatcggtagaaaaacatattctgaatcacaggaactttcaagttgtgctgaagaatgagagtgtaaacagaatatagaaaataacraacttcaactctcaaagtaactattacacaagacgatgatgaaaaaggattaaaaggaaaagatcatttataattgcaaatatttcatcagatcactgagagagttagcaaagcacatttctgttaaagggaaaaagaaacaactcttcttacaccttgtcctttattctgcttgcgagctagctagctatagatccatatctggtagcaaaggagcagct

SEQ ID NO: 155109 - DNA, 432 bp, Homo sapiens
tccaggcttagccaaaggagatcctgcactggcatatgcttagcataaaaggtattcaagggacagctgaacaaatggaaggtgatccaaaaatactctttcttatttattgtataattctttttcatcggtagaaaaacatattctgaatcacaggaactttcaagttgtgctgaagaatgagagtgtaaacagaatatagaaaataacaaacttcaactctcaaagtaactattacacaagacgatgatgaaaaaggattaaaaggaaaagatcatttataattgcaaatatttcatcagatcactgagagagttagcaaagcacattkctgttaaagggaaaaagaaacaactcttcttacaccttgtcctttattctgcttgcgagctagctagctatagatccatatctggtagcaaaggagcagct

SEQ ID NO: 155110 - DNA, 555 bp, Homo sapiens
gccgcgtccgaatccggggcaagcgagcgcccccggcgcagtttctgagaagggaaagccagcgggcccccacgctcgaagaccgccrgcgcccaacgcctgcccagcaacagcacaacgcgggccacagttagaaaggaaaagaaattgcctctgggctcacttgaagttgtccgagtccgccgggataccccctgtcaagaaagttgcggtggtacggcccgcctacttaaatgggcagggcgctcggcggccctagccaaaggcaggcggcaagcggcaggcagggtcgggtagggggcagagcctgggcgccgacaagccctgctggtccccggccgagccccgcctgcgggctcctcgagagtgctctcttgccaggttctaactacgtacagacacccaccgctggaatacacagtacccagccgctcagaactccagctccaatttgaatatttgttgaatatggggcccccagaggcggcagtgagcaggaacaagaccgcggcagtaaaccacgttcgctacttttgatccttccagtgcttgagc

SEQ ID NO: 155111 - DNA, 580 bp, Homo sapiens
gctgtatcaacatatgttttggactgtgaaaagattcatgctgtatttttatttttgtagtccacatcccactgagcggcctgaactctttctttttagggtyactgtcactaatccatctagtctcagggataatacttccaataatttatttgaaaactgtaaatattttaaaatctaaagtccgcaaatctactgcgcaatatatctggcattgttgctgttagttttgatttcttaaaaatcagatttagataagatagtaatagagagaaaactctaggttttagtagatctgggttctagagtcttccctgtcccaattagttgtatatccatgagaaaatctctttttttttattttaaaattgcaaccaattttattttaattttacttggatgcaacagccagagaactttcctaaattctgaatagtaaagatcacccatagcttcaccatacaatttcagaaagatacactgtgtatgtaaataccatgaccatccagaaattttcttctggttcattgaagaactgtctgttcttctgtgtatgtaaagattttgcaggttttgatgg

SEQ ID NO: 155112 - DNA, 580 bp, Homo sapiens
gctgtatcaacatatgttttggactgtgaaaagattcatgctgtatttttatttttgtagtccacatcccactgagcggcctgaactctttctttttagggttactgtcactaatccatctagtctcagggataatacttccaataatttatttgaaaactgtaaatattttaaaatctaaagtccgcaaatctactgcgcaatatatctggcattgttgctgttagttttgatttcttaaaaatcagatttagataagatagtaatagagagaaaactctaggttttagtagatctgggttctagagtcttccctgtcccaattagttgtatatccatgagaaaatctctttttttttattttaaaattgcaaccaattttattttaattttacttggatgcaacagccagagaactttcctaaattctgaatagtraagatcacccatagcttcaccatacaatttcagaaagatacactgtgtatgtaaataccatgaccatccagaaattttcttctggttcattgaagaactgtctgttcttctgtgtatgtaaagattttgcaggttttgatgg

SEQ ID NO: 155113 - DNA, 569 bp, Homo sapiens
caaggagtatgagtgagagtggctcctttcactactgtatcaaataacccacttataaaatgtttcttcctatcctggcaactctaagacttgctgatgtgaaagtttttgttctcaagggagaaatgtttccattagaaatacaactatgtgtctagtccactacattggaagatgaggatamcacctgaccatcttgggctgcttatgtcacaaatcaacaggtagaataagtggtttctatactgctagtgattgatcccaactaccaaaggggaacttaggttactgctaaaccacgaggacaaacagaactatgtatggaacccaggggatttcctgggacatctcttaatacttccatgcctgtattagtcagggttctccagagagacagaaccaactgtgtgttgtgtgtgcgtgtgtgtgtgtgtgtgtgtgtgtgcacgtgatatggggagatttattagaggaattggctcacatgattatggagactgagaaatcccatgacaggccatctgcaagctggagaccctgagatgctggtagtgtgactcagtccaagt

SEQ ID NO: 155114 - DNA, 569 bp, Homo sapiens
caaggagtatgagtgagagtggctcctttcactactgtatcaaataacccacttataaaatgtttcttcctatcctggcaactctaagacttgctgatgtgaaagtttttgttctcaagggagaaatgtttccattagaaatacaactatgtgtctagtccactacattggaagatgaggataacacctgaccatcttgggctgcttatgtcacaaatcaacaggtagaataagtggtttctatactgctagtgattgatcccaactaccaaaggggaacttaggttactgctaaaccacraggacaaacagaactatgtatggaacccaggggatttcctgggacatctcttaatacttccatgcctgtattagtcagggttctccagagagacagaaccaactgtgtgttgtgtgtgcgtgtgtgtgtgtgtgtgtgtgtgtgcacgtgatatggggagatttattagaggaattggctcacatgattatggagactgagaaatcccatgacaggccatctgcaagctggagaccctgagatgctggtagtgtgactcagtccaagt

SEQ ID NO: 155115 - DNA, 578 bp, Homo sapiens
aattggaattcattttccattttaaaatcaggaaattgagttgaagaagttaagtgacttgactctgtgactcaaagcctggtgccctttctactatggtacactgtgttggctatgttgatgtgtggtttcctgtttttcaagaattacagcttgactctaaaatataaatagtgtttctccttgggtaagtaattctttctgatcactatgggaataaaaacaagtattttcatttaggattttgaacatttgtgcctccaaaggaaaaaattatgcaaacctatttaacagacacgtggtgtttatttgcactagataagaatccttacctttctaaaaattaaatasagggccttacggactagctgccttagtgcttgaaaactattattcaacttgtgaaagctcagttcataaattttttagagcatatccctatgtaagtcagaacatactcataccatttccttcttatagatacagtgaatatgtgcagcctggcagtagttctcagacctataatgtactcctgaaaggcttgtgaaaacacaggtgtgctcctcttacccgtcccc

SEQ ID NO: 155116 - DNA, 578 bp, Homo sapiens
aattggaattcattttccattttaaaatcaggaaattgagttgaagaagttaagtgacttgactctgtgactcaaagcctggtgccctttctactatggtacactgtgttggctatgttgatgtgtggtttcctgtttttcaagaattacagcttgactctaaaatataaatagtgtttctccttgggtaagtaattctttctgatcactatgggaataaaaacaagtattttcatttaggattttgaacatttgtgcctccaaaggaaaaaattatgcaaacctatttaacagacacgtggtgtttatttgcactagataagaatccttacctttctaaaaattaaatagagggccttacrgactagctgccttagtgcttgaaaactattattcaacttgtgaaagctcagttcataaattttttagagcatatccctatgtaagtcagaacatactcataccatttccttcttatagatacagtgaatatgtgcagcctggcagtagttctcagacctataatgtactcctgaaaggcttgtgaaaacacaggtgtgctcctcttacccgtcccc

SEQ ID NO: 155117 - DNA, 559 bp, Homo sapiens
aggaaaccaaagatgaggaagagtagctatatttatatcagataaaataggctttaagtaaaaatctataaacagagacaaggtcactatacaatgataaaaggatcaattccacaagagggcatgacagttctaaatataaatgcacacaacattggagtacccagatataacaagcaaatgttatttaatctaaaggtaacaacaaatcataatatagtaatatttgggtacttcaacaccccacagataagctagatgaagaaacagcaaagaaaatcacctaccagatatttacagaacatgtctccataaacagcagaatacactttcttctcattagcaccttttacattatacaggatagatcatatgctaagccacaaaacaagtctcaaataattgtaaaratcaaaatattatcaagtatcttttatgaccacaatgaaataaaactagaaatcaataactaaagcaactttgaaaactgtataaatacatggatattaaataatatgctactgaatgacaaatggatcaaagaaaaaaataagaaaaa

SEQ ID NO: 155118 - DNA, 353 bp, Homo sapiens
gcagcatactgttggcagaagcaattgagcaacatgctaaaaaatttttgtaactgaattgtaaattttatttttgaattgaaattttatatttaataatagaggtaaaataattattgttttaagaatatttcagatctactgtaaatactgttttcattttatgatggtgatatttgttttcaacctcaaatttggcttttgcctcagatccatattaatttttaacattttttcattatttaaaatatctatttctcatatatttacaaatatatgtttatgtatgtgtgtgtatgyataaatatatatgggagtttgtatatgtgtctgtgtttatggttgctctttcc

SEQ ID NO: 155119 - DNA, 570 bp, Homo sapiens
atttcttctttgtgtcctcctagctaccagtgtttgctggaaatcctcaaagttccttagcctgtaggtgcattactatgatctctgtcttcatgatcacatggccttctgtgtgtctgtcctttgtgtctccaaatgtctctattttataaggtcaccagtcatattggattagggtttaccctaatctaatgtgaccttatcttaaattgattatacttgcagagaccctatttccaaataaggtcacatttacaggtactggaagttaagatcataaaaaatgtttccacagaggacccaatccagcccactaccctctttaattttttgcaggatctggtstgcagttgtgataaattttttttgaagcacaccttttgcatcctgcaggtttggggaggatgtatttccattatcatttagttcaaaatacaatttgatttcagttgtggtttcttatttagcttattaatttcttagagtgtgttgctgttttaaaacattttgggattttttggttgtctttttgtgagtgatttttggctgttggtgatcagagattatact

SEQ ID NO: 155120 - DNA, 569 bp, Homo sapiens
catacacctacattgaactctttttaaacaaaggtgccaggaacatacactgaagaaaagacagtctcttgagtaaatgktgcttgaaaacttggtagccatatgtagaagaataaaacttgacccctatctcccattatttataaaaattaaatgaaaatggattacagacttaaatccaagacctcaagctatgaaactactacaagaaaacattgggaaactctccaggacattgttctggggaaaaatttcttgaataatacccataaacacaggcaaccaaagcaaaaatggaaaaaggagatcacataaagttaaaaagcttcttcacagcaaaggaagtaattaataaagttaagagacaacccacagaatggcagaaaatatttgcaaactgtccatctgacaagggattaataaccagaacatataaggagctcaagcaactctataggagaaaatctaataatctttttaaaaaagatttgaatagacatttctcaaaagaagacatataaatggcaaacagacatatgtgaaggttctcaatatcattggcatcagag

SEQ ID NO: 155121 - DNA, 569 bp, Homo sapiens
catacacctacattgaactctttttaaacaaaggtgccaggaacatacactgaagaaaagacagtctcttgagtaaatgttgcttgaaaacttggtagccatatgtagaagaataaaacttgacccctatctcccattatttataaaaattaaatgaaaatggattacagacttaaatccaagacctcaagctatgaaactactacaagaaaacattgggaaactctccaggacattgttctggggaaaaatttcttgaataatacccataaacacaggcaaccaaagcaaaaatggaaaaaggagatcacataaagttaaaaagcttcttcacagcaaaggaagtaattaayaaagttaagagacaacccacagaatggcagaaaatatttgcaaactgtccatctgacaagggattaataaccagaacatataaggagctcaagcaactctataggagaaaatctaataatctttttaaaaaagatttgaatagacatttctcaaaagaagacatataaatggcaaacagacatatgtgaaggttctcaatatcattggcatcagag

SEQ ID NO: 155122 - DNA, 593 bp, Homo sapiens
gcaattataagaaacaagatggaatcagtaatataaagtgtcccaacaagaaaatagcccaggaactgatggtttccctgctgaattctaccaagcttttaaagaacaattaataccaattatttgaaaattgaaaaggagaaggtactcccacactcattgtaagaggtcagcatcacccttatcgtaaggtattagacaaggacacaacaaaatagaaaactataggcaaatattcctgataaacataaatgtagaaattctcaagaaaataccagcaaaccaaattcagtgatgcaaggatgggtcaacatacacaaattaataactgtgaaacatcaaaccaacagaaagaaggaccaaaaaatacaattctctcagtaaagwgatgaaattttgtaaatatgagtttcagataatgatgatttttgtgcttcagcatcctaagtttagtgaatcagagggcttaatcaccagatttgaaatttctttatagcatctttgactagaaacaatatggccaaatttgcttatttgtaataaatttggtatttagtcttttaaaataattattcccacttgaaaatgataca

SEQ ID NO: 155123 - DNA, 593 bp, Homo sapiens
gcaattataagaaacaagatggaatcagtaatataaagtgtcccaacaagaaaatagcccaggaactgatggtttccctgctgaattctaccaagcttttaaagaacaattaataccaattatttgaaaattgaaaaggagaaggtactcccacactcattgtaagaggtcagcatcacccttatcgtaaggtattagacaaggacacaacaaaatagaaaactataggcaaatattcctgataaacataaatgtagaaattctcaagaaaataccagcaaaccaaattcagtgatgcaaggatgggtcaacatacacaaattaataactgtgaaacatcaaaccaacagaaagaaggaccaaaaaatacaattctctcagtaaagtgatgaaattttgtaaatatgagtttcagataatgatgatttttgtgcttcagcrtcctaagtttagtgaatcagagggcttaatcaccagatttgaaatttctttatagcatctttgactagaaacaatatggccaaatttgcttatttgtaataaatttggtatttagtcttttaaaataattattcccacttgaaaatgataca

SEQ ID NO: 155124 - DNA, 593 bp, Homo sapiens
gcaattataagaaacaagatggaatcagtaatataaagtgtcccaacaagaaaatagcccaggaactgatggtttccctgctgaattctaccaagcttttaaagaacaattaataccaattatttgaaaattgaaaaggagaaggtactcccacactcattgtaagaggtcagcatcacccttatcgtaaggtattagacaaggacacaacaaaatagaaaactataggcaaatattcctgataaacataaatgtagaaattctcaagaaaataccagcaaaccaaattcagtgatgcaaggatgggtcaacatacacaaattaataactgtgaaacatcaaaccaacagaaagaaggaccaaaaaatacaattctctcagtaaagtgatgaaattttgtaaatatgagtttcagataatgatgatttttgtgcttcagcatcctaagtttagtgaatcagagggcttaatcaccagatttgaaatwtctttatagcatctttgactagaaacaatatggccaaatttgcttatttgtaataaatttggtatttagtcttttaaaataattattcccacttgaaaatgataca

SEQ ID NO: 155125 - DNA, 633 bp, Homo sapiens
tctatatgcctctacttgtaacagtaccacactgacagaataaggtagctttgtattaaggtatgaaattagaaagattgccctgactattctggacaactgtatttctgtgagagttttagaatcaatttgtccatttctgtaaaaaaaaaaaaatacaagtcatccaggattttgatggtgattttattaaatgcataggttaatttgaggattattactatcttaaaaatattaactattctgatccctgaacatggggcaactttctatttctttaagcctttggagtttttatctgctaaattcaatatctgccccacttaataagcagtgtctatggccttcatctttcycatgtgtaggtcctactttacttttttttgttaacatgtctgatattttcttcttgaaaattgaatgttttacatatttcacaactctgaatgattccctttatccccttttctgcagggttgatattgctggctttactgcctggtcatttttatttgttcagtgacttggtggaagaaaccctctaaaatcaagttcttccacagtataaaccctccattgctctttcttagatttcttttctatattttggggttttagccctggaacagcata

SEQ ID NO: 155126 - DNA, 610 bp, Homo sapiens
tactttgggtatatacttaatggcttttttcctttttgtatagctttattaaactcactagtttgataggtccatatcaarggtgttgccaacaaatgctgcaggtcaaaatggagtctaataaatgatgactcaatgattatatataggagattgcaggaaagtattctgctacaagcactgatgaaaaggcctgaatacaatgtagttacaaagaaaaatctcttatttgaaaaatgatttccaagctttttcatctgtgactgtttagaaagattttaagtgatattaccatgtctttatttgtcagttaggaaaataaagtgaaaaagaagaaataaactattatactttgtgtgcatgctctaatagaaacaaatgtatattatgccatgactgagtgaatattaatgataaaagaatgcagtcattattgcaagaattggttaatgattttgagaatgaaagtttggctttatatagagatttttattttaaatcaataaatttaaccaaacctttttctgtctcagaataattgtgcctctggaaccatgatgctgccacaaagtgggaatcaatatttactactatgatttgtggcttataa

SEQ ID NO: 155127 - DNA, 610 bp, Homo sapiens
tactttgggtatatacttaatggcttttttcctttttgtatagctttattaaactcactagtttgataggtccatatcaagggtgttgccaacaaatgctgcaggtcaaaatggagtctaataaatgatgactcaatgattatatataggagattgcaggaaagtattctgctacaagcactgatgaaaaggcctgaatacaatgyagttacaaagaaaaatctcttatttgaaaaatgatttccaagctttttcatctgtgactgtttagaaagattttaagtgatattaccatgtctttatttgtcagttaggaaaataaagtgaaaaagaagaaataaactattatactttgtgtgcatgctctaatagaaacaaatgtatattatgccatgactgagtgaatattaatgataaaagaatgcagtcattattgcaagaattggttaatgattttgagaatgaaagtttggctttatatagagatttttattttaaatcaataaatttaaccaaacctttttctgtctcagaataattgtgcctctggaaccatgatgctgccacaaagtgggaatcaatatttactactatgatttgtggcttataa

SEQ ID NO: 155128 - DNA, 610 bp, Homo sapiens
tactttgggtatatacttaatggcttttttcctttttgtatagctttattaaactcactagtttgataggtccatatcaagggtgttgccaacaaatgctgcaggtcaaaatggagtctaataaatgatgactcaatgattatatataggagattgcaggaaagtattctgctacaagcactgatgaaaaggcctgaatacaatgtagttacaaagaaaaatctcttatttgaaaaatgatttccaagctttttcatctrtgactgtttagaaagattttaagtgatattaccatgtctttatttgtcagttaggaaaataaagtgaaaaagaagaaataaactattatactttgtgtgcatgctctaatagaaacaaatgtatattatgccatgactgagtgaatattaatgataaaagaatgcagtcattattgcaagaattggttaatgattttgagaatgaaagtttggctttatatagagatttttattttaaatcaataaatttaaccaaacctttttctgtctcagaataattgtgcctctggaaccatgatgctgccacaaagtgggaatcaatatttactactatgatttgtggcttataa

SEQ ID NO: 155129 - DNA, 490 bp, Homo sapiens
gtagaatggtggttaccagaggcttgggggtggagtgactgtgragatgttagtcagaggacacaaaaattcagttacacagaaagagtaagttcaaggaccctatagtacatcgtgatgactacagttaataacaattaactgtacttgtctctgtgtgtatgtgtatatatatatatatatatatatatatgctctatatattgtataattgaaaattgctgagaataattttaagttttctcaccatgcatacacaaaaatggtaagtatataagataatgcagacatatatatatcaaaacattatgtggtacagcataaatatacagatattacttgtcaatttaaaatgtctatgatgactagaaaataataatatatttggaaagacggtcttcattatgagacttttatttttattttatacttttctgtcccatttgaatttttactatattctatgttatttttatataaataaatagat

SEQ ID NO: 155130 - DNA, 558 bp, Homo sapiens
ctttttaaagttaaagcagtatcctaaagaatgagcagaatttgttcatttctgggtcagatatttatcacwattttgttcaatgtagctatacataagatttctacttttattcaatctccaaataagctaattgttgagggaaacatttttatcttattttaatttttaaaaaaatctcctccatattccacaaacatcgactttcattgctgaataaagaaatgtattgcaatgggttcagctattctttaagcaaggttgtgtgaccttacaacttcatcgtaagtagaaatttctctcactttcagaagcatatcaatagcatatttaaaaaatatacctgccactttgttgaattgcctacatgtgaccctacacattgaataattaaaactggagtgaaaaaacaattttttgagactcaactgtttgatggttttgttacaaaatttaaaaacagccttataagaagtaatgtgaaataaaacaaatgtaagataagaaaaagacagatttttcaaagacctggaagaacagatgtacaatcagcatcac

SEQ ID NO: 155131 - DNA, 558 bp, Homo sapiens
ctttttaaagttaaagcagtatcctaaagaatgagcagaatttgttcatttctgggtcagatatttatcactattttgttcaatgtagctatacrtaagatttctacttttattcaatctccaaataagctaattgttgagggaaacatttttatcttattttaatttttaaaaaaatctcctccatattccacaaacatcgactttcattgctgaataaagaaatgtattgcaatgggttcagctattctttaagcaaggttgtgtgaccttacaacttcatcgtaagtagaaatttctctcactttcagaagcatatcaatagcatatttaaaaaatatacctgccactttgttgaattgcctacatgtgaccctacacattgaataattaaaactggagtgaaaaaacaattttttgagactcaactgtttgatggttttgttacaaaatttaaaaacagccttataagaagtaatgtgaaataaaacaaatgtaagataagaaaaagacagatttttcaaagacctggaagaacagatgtacaatcagcatcac

SEQ ID NO: 155132 - DNA, 510 bp, Homo sapiens
ttatccagttaataattctcttcattaacaggaaaaataaatacaacaataacccatgagtcatctgcatttgatcacaatcatttaatatatgttaattgaaataatgatctcaattttgtctctgttcaaaattataattkcatgtaaagagtttcttttcccttcctgtttggatccgtgagagtaaaacatgctttcataatcaggacctcacataagccatttcaaaatggtgaaacagaagatataaaattaactgtatagaacagtaaatagacataagggtttgcaagtaactatatggatataaatgaaaaataagtcagaccaaggaaatatcagttcccctcaatgatcagagaaattcaacctaagcatttttttcctgaactattcagaaaattacagttctctaagactattcctgatgtgcttgcaaaataattctttaagagcacaatcatttgagagctacccaacgcaaactgagctctgcaactatcccct

SEQ ID NO: 155133 - DNA, 510 bp, Homo sapiens
ttatccagttaataattctcttcattaacaggaaaaataaatacaacaataacccatgagtcatctgcatttgatcacaatcatttaatatatgttaattgaaataatgatctcaattttgtctctgttcaaaattataatttcatgtaaagagtttcttttcccttcctgtttggatccgtgagagtaaaacatgctttcataatcaggacctcacataagccatttcaaaatggtgaaacagaagatataaaattaactgtatagaacagtaaatagacataagggtttgcaaktaactatatggatataaatgaaaaataagtcagaccaaggaaatatcagttcccctcaatgatcagagaaattcaacctaagcatttttttcctgaactattcagaaaattacagttctctaagactattcctgatgtgcttgcaaaataattctttaagagcacaatcatttgagagctacccaacgcaaactgagctctgcaactatcccct

SEQ ID NO: 155134 - DNA, 510 bp, Homo sapiens
ttatccagttaataattctcttcattaacaggaaaaataaatacaacaataacccatgagtcatctgcatttgatcacaatcatttaatatatgttaattgaaataatgatctcaattttgtctctgttcaaaattataatttcatgtaaagagtttcttttcccttcctgtttggatccgtgagagtaaaacatgctttcataatcaggacctcacataagccatttcaaaatggtgaaacagaagatataaaattaactgtatagaacagtaaatagacataagggtttgcaagtaactatatggatataaatgaaaaataagtcagaccaaggaaatatcagttcccctcaatgatcagagaaattcaacctaagcatttttttcctgaactattcagaaaattacagttctctaagactattcctgatgtgcttgcaaaataattctttaagagcacaatcatttgagagctacccaaygcaaactgagctctgcaactatcccct

SEQ ID NO: 155135 - DNA, 652 bp, Homo sapiens
gagttggtatttgcctgctatattcttctccatttatcagttttattctatctaaaattctatatttttaatcactttttgtaaatagctcatagttttgtcttttaaaaaaattaatatgactatgtctgcttttggattggtgtgtttaaaactgtactattccacatgatagccactagccacatgtggctgttgagctttttaaagtgttgctagcctacattggtatcttagataggtgctataagtataaaatatactccagctttcaataatttataaaaaacgtaatacatgttattaataatttttattttgatattttgaaataatctttaaaatatttgtttagaatataatagtgacatcaaataatcttttttttctaatgcaggtaatagaaaatttaaaattatatttgtgactcaaataattttcatattgagaagtcctggtttagacaacttgcatcaaggaaattgttgtttcttgttttttatttttattttttgtgagacagggtctcagtctgtcacscaggttggagtgcagtgggacaatcacggttcactgtagccttgaccttccaggctcaggcgatgctccagctaagcctcctgaatagcggagactacaagcacaggctacc

SEQ ID NO: 155136 - DNA, 434 bp, Homo sapiens
cattcaatctgtagcggcaactgctttgccaacagaagaaagtagaaaagtaactttcagaggaaacctcattgtgagcacacctcaccagttcagaattattctaagtcaaaaaagcaaaaagttagcttactaactcgaaaatcttaaagtatggggctattctgttagaaaaaggtgatttaacattaaccactgaaaattcccttaacmcagaagatttcctaacaggggatttaaatcttaattaccttacaaaggtctgaccagacctaggaggaactcccttcaggacaggatgatacatggctcctcccaggtgattgagaaaaaaaccacaatgggtattcaataattgatagggagactcttgtggaagcagagttaggaaaattgcctaataattggtctgctcaaatgtgcaagctgtttgc

SEQ ID NO: 155137 - DNA, 552 bp, Homo sapiens
agactcttgtggaagcagagttaggaaaattgcctaataattggtctgctcaaatgtgcaagctgtttgcactcagccaagccttaaagtacttacagaatcaaaaaacactatctcaatccttactcaaaaggttacctacaccctctctgaaatgaatttgcataataactgttgtttatgggactgcatcttgatagggcagctggcttgttaagaaatactcaggaacccagcccagctctagaactcactcctgactgaaaaggcaatgttgagaatgctggtaagggaccactagaatccagcaacccagacccctttctttgtggtcaagaaargaaggaaaacaggtgcaggactgctgcattggtgagcgtaacgaatccaataagcagaggtccatgggtggttacgcacctggaagggaataagcattaggaccatagaggacgctctaggactaatgctcattggaaatgtactaggggtgctggcatccctgtgtttttttttcagatgggaaacattccccctaagtcaaaaacaccc

SEQ ID NO: 155138 - DNA, 541 bp, Homo sapiens
ataccatcatctaggagttttatakttttgtgttttacattgaaatctgtaacccattttgagttaattgttatgaaaggtataaaagtctccacagttttgtcttttccagaatttcagaatgttggacttatactatatctagccttttcagatttcctccttccgcttagtaatatgcatgtaacattcctccatgtcttttcatggctaaatggttccatttatttttagccctgaataatattccattttctgggtgtactacagtttatctgctgcaggacagcttggttgctctccagttttagcacttatgaataaagccataacaaacatccgtgtgcaggttttttgtgtgaaagtatgtatttaactcctttgagtaaatgccaaagagtgtgattgctgaatcatatggtaagggtttatgtagtttagtaagaaatcaccaaactgtcttccaaagtggctgcaccgttttgcattcccagccgcaatgaatgagagttcctcttgctccatattttttccagtatgt

SEQ ID NO: 155139 - DNA, 541 bp, Homo sapiens
ataccatcatctaggagttttatagttttgtgttttacattgaaatctrtaacccattttgagttaattgttatgaaaggtataaaagtctccacagttttgtcttttccagaatttcagaatgttggacttatactatatctagccttttcagatttcctccttccgcttagtaatatgcatgtaacattcctccatgtcttttcatggctaaatggttccatttatttttagccctgaataatattccattttctgggtgtactacagtttatctgctgcaggacagcttggttgctctccagttttagcacttatgaataaagccataacaaacatccgtgtgcaggttttttgtgtgaaagtatgtatttaactcctttgagtaaatgccaaagagtgtgattgctgaatcatatggtaagggtttatgtagtttagtaagaaatcaccaaactgtcttccaaagtggctgcaccgttttgcattcccagccgcaatgaatgagagttcctcttgctccatattttttccagtatgt

SEQ ID NO: 155140 - DNA, 542 bp, Homo sapiens
gataccatcatctaggagttttatagttttgtgttttacattgaaatctgtaacccattttgagttaattgttatgaaaggtataaaagtctccacagttttgtcttttccagaatttcagaatgttggacttatactatatctagccttttcagatttcctccttccgcttagtaatatgcatgtaacattcctccatgycttttcatggctaaatggttccatttatttttagccctgaataatattccattttctgggtgtactacagtttatctgctgcaggacagcttggttgctctccagttttagcacttatgaataaagccataacaaacatccgtgtgcaggttttttgtgtgaaagtatgtatttaactcctttgagtaaatgccaaagagtgtgattgctgaatcatatggtaagggtttatgtagtttagtaagaaatcaccaaactgtcttccaaagtggctgcaccgttttgcattcccagccgcaatgaatgagagttcctcttgctccatattttttccagtatgt

SEQ ID NO: 155141 - DNA, 541 bp, Homo sapiens
ataccatcatctaggagttttatagttttgtgttttacattgaaatctgtaacccattttgagttaattgttatgaaaggtataaaagtctccacagttttgtcttttccagaatttcagaatgttggacttatactatatctagccttttcagatttcctccttccgcttagtaatatgcatgtaacattcctccatgtcttttcatggctaaatggttccatttatttttagccctgaataatattccattttctgggtgtactacagtttatctgctgcaggacagcttggttgctctccagttttagcacttatgaataaagccataacaaacatccgtgtgcaggttttttgtgtgaaagtatgtatttaactcctttgagtaaatgccaaagagtgtgattgctgaatcatatggtaagggtttatgtagtttagtaagaaatcaccaaactgtcttccaaagtgrctgcaccgttttgcattcccagccgcaatgaatgagagttcctcttgctccatattttttccagtatgt

SEQ ID NO: 155142 - DNA, 527 bp, Homo sapiens
aggaaatgttttgaaagacttactgttttttgttttgttttgttttgttttgttttgttttgtttttgagacggagtcttgctctgtcaccaggctggagttcggtggcacaatctcggctcactgccacctccgcctcctgggttcaagtgattctcctgcctcagactcccgagtagcygggactacaggcacgcatcaccacgcccagctattgaaagacttactcttaccttttatgatacactaggcttgtgtctgtgtctcaacagctgagagaagcctctggcttcagcttatgcatcttcaaagcctcagatgtctcaatgccctggaagtagccaaattaaatctgacaatgattaggagagtaagaatgttacagtacatgctcttccttgtaaaaggccggaattaggtctgggttgcccctggcttcccgtttgtagcacagatagattggaagtggtgttggaaacagctcagtaggtagaccatgagttgggagttcggatggacctgaattc

SEQ ID NO: 155143 - DNA, 499 bp, Homo sapiens
gcccactggggcttcagctgtaaacattcacccctagacagtgttgtggggtcggaccccacagcctgcggtctgcatgttccccctagaggtctgagcagcggggcactgaagaagccagccacacccccatsgcccgccctgtgagggggataagggaacttttcctgtttcactaggtgcttacccaggagaaatgaagacatacatagacgcacacacagacacagtcttacaagggcatacaaattctttatgttcagcattattcctaatagccccaaattggaagcaattcaaatctccatccattagcgagcaaacaaattgtggcatgtctcaatctacccagctataaaaaaattttaaaaatgttaatacatgcaacatgaaacaatctcaaagtcattatgtctgtaatatatagaaaatggctataatcaaagaagaattcaagcaaaaaccaaatttttcaaatcaagtaaaagatataaacaaa

SEQ ID NO: 155144 - DNA, 499 bp, Homo sapiens
gcccactggggcttcagctgtaaacattcacccctagacagtgttgtggggtcggaccccacagcctgcggtctgcatgttccccctagaggtctgagcagcggggcactgaagaagccagccacacccccatggcccgccctgtgagggggataagggaacttttcctgtttcactaggtgcttacccaggagaaatgaagacatacatagacgcacacacagacacastcttacaagggcatacaaattctttatgttcagcattattcctaatagccccaaattggaagcaattcaaatctccatccattagcgagcaaacaaattgtggcatgtctcaatctacccagctataaaaaaattttaaaaatgttaatacatgcaacatgaaacaatctcaaagtcattatgtctgtaatatatagaaaatggctataatcaaagaagaattcaagcaaaaaccaaatttttcaaatcaagtaaaagatataaacaaa

SEQ ID NO: 155145 - DNA, 499 bp, Homo sapiens
gcccactggggcttcagctgtaaacattcacccctagacagtgttgtggggtcggaccccacagcctgcggtctgcatgttccccctagaggtctgagcagcggggcactgaagaagccagccacacccccatggcccgccctgtgagggggataagggaacttttcctgtttcactaggtgcttacccaggagaaatgaagacatacatagacgcacacacagacacagtcttacaagggcatacaaattctttatgttcagcattattcctaatagccccaaattggaagcaattcaaatctccatccattagcgagcaaacaaattgtggcatgtctcaatctacccagctataaaaaaattttaaaaatgttaatacatgcaacatgaaacaatctcaaartcattatgtctgtaatatatagaaaatggctataatcaaagaagaattcaagcaaaaaccaaatttttcaaatcaagtaaaagatataaacaaa

SEQ ID NO: 155146 - DNA, 511 bp, Homo sapiens
ctattaggaacttctctttcagagcagcatttagagatggaaggtgtctgttttctagcagccgcgaggggtacccatgatcacttctgcgtttctctaactgagcaaagttcattttaaaggacacaaatcctcaaagacycccagaacacgtcccaggacaccacttgaaaagcaccaattcaagaatataaaattctggactataaaaatctctttcagtggtgcattagcactgctacagtgcgattttgtcattagatgctaaagctgttttattggttttttttgttggtttttttgtttgttttgttttgagatggagtttcgctcttgttgcccaggctggagtgtaatggtgcaatctcagctcactgcaacctctgcctcccgggttcaagcaattctcctgcctcagcctcccaagtagctggaattacaggcatgcaccaccacacccagctaattttttatttttgttttctgatagagatggggtttcaccatgttg

SEQ ID NO: 155147 - DNA, 511 bp, Homo sapiens
ctattaggaacttctctttcagagcagcatttagagatggaaggtgtctgttttctagcagccgcgaggggtacccatgatcacttctgcgtttctctaactgagcaaagttcattttaaaggacacaaatcctcaaagacccccagaacacgtcccaggacaccacttgaaaagcaccaattcaagaatataaaattctggactataaaaatctctttcagtggtgcattagcactgctacagtgcgattttgtcattagatgctaaagctgttttattggttttttttgttggtttttttgtttgttttgttttgagatggagtttcgctcttgttgcccaggctggagtgyaatggtgcaatctcagctcactgcaacctctgcctcccgggttcaagcaattctcctgcctcagcctcccaagtagctggaattacaggcatgcaccaccacacccagctaattttttatttttgttttctgatagagatggggtttcaccatgttg

SEQ ID NO: 155148 - DNA, 627 bp, Homo sapiens
cagggcacctacacccaaaaagtgaacaggtgtgtaaatgagtgtggtgtggtctttatccaaggaggtcagggcracctcagcatctcccccttatctgtgggcgactgcatccatttcttccccctcattcttcccagctttcattgcttctgaactgctgacagtggggacagtggggacagtggggagggaagtatctgtgtctgaggagcccgcagtaccccctctcaggcttagccacactggctgcctgctccagttccaccctcggggccagcacttactcggcatatccgagttttggtttgtcctggccttttacagtcctgggaactgtgactggacctccactcacactgacctctccccagcacccttctccaccaccactacagaaacttgcatgctatttggtttggaaaattccagaaggcccgactctcctgtgggtctgtgtcacccctgaccaagtcccagctctgaggtctcaggcaggccaagctgcctctctgagctcctagagcctcagccccggaggggcagtggtggggcattcacaaagtaatctgtggtcatacctggctccagcaagcccacaggctgtgcctgccatgccgacacgcc

SEQ ID NO: 155149 - DNA, 625 bp, Homo sapiens
cccaccttggataaggctggcctgtgttaccatagaaggttgcaggaatgacggagtgtgactttcaggctagttcattaaagacttgcagcctttaccctgatgtcttggatctctctgtctgtctgggaaaaccctgtggccatgttgggaggtcactcaagcagctgtgtggcgatatccacatggaaaggaactggggcctcctgccaatagccatgggagtgagcccttttggaaacagattcctcagctccagcaaaatctttagataactgcaggcctggttactatcttgactacagtctcataagaaacctcaaaccactacaccacttctaaactcctgacccacaaacactgtgagataatacatgtttattgttgttttaggcagctcaattttgtggttatttgttgcaaagcattaggtagcaaatacagacacaaayacagaacacagcactgagaggtggagaatgaatgtcagattcctcatatttcaaccacctagatccagccatgcctcaagtcagcacgctttggtttgccggttacatgagccaaccattcctcctttggctcaagccagtgtggatttctttgcaactaaagagccctcgcc

SEQ ID NO: 155150 - DNA, 490 bp, Homo sapiens
atgaagtgaggtgcccatgtgccaagagaggaataaaaaggaatgggtggtgggttctttggggtgcaggggaaggggtttggagagactcagaactggggagaagcttgaattggatggagaaggagtctccccttctgggcagagcaagcagcacagacgcatggccacattggacgtggggaagggatgccaggtcaaccctgtgtgggagcagaaggatggaagagctgggacaaactcacgaggagccttggaaaccatgctggaactttaggcttcactrtggaggcagcaagcggttaacgaagcccataaactcatgtagaatgtgagctgttcttcattttttagtgttcactccaggcggggcaaaaattggaccagaaagggaagagaccaggccctgggaagtcagatagaggctttagcaagagacagttgccaagatgaaactggcccagatgaaactccctgatttcctgacttt

SEQ ID NO: 155151 - DNA, 372 bp, Homo sapiens
gagatcattgtttaatggaatcctctccaagggttctctctcttgcagacccgtccagggcatttcagagagaagagyctcgaagcccagcccggagaggcagaccagaaacaactgaaagcaggccggggaagataggagaggagagatgtgttttcttttcgtatttaggccttaagatccagcccatgtcagcctatctcctccccaattgcgggagtcagacacatgtcccccggaacagaacaaggtgtgcagctggggaggagacgtgccactgtctagcttggggcccacctgccatgtagctcccaaataacatagtgaagtggttaaagggcacttgttctggagccaagtggacccaggtcc

SEQ ID NO: 155152 - DNA, 570 bp, Homo sapiens
tcaaatggtcacatactgtatgatcgcatttatataacattcttgaggtgacaaaattattgaaatgaagaacagattaatggttgccagggatagggactggagggggtgtggggtatgtatgactataaagggatgacgcaaggagttcctttgtgctgatggaacagttctatatgattatgatgattacgatgttgattataacatttgattatgaggttaagcacatgartctttacctgtgctgaagttgtatggacctacatacacacaaatgaatgcatgtaaaatctggtgatactgaataaagtctgtggtctagatagcagtataatattattgtcaatgtcttggatgtgaagttgtgctatagttacaaaaccgtaccactggaggaaactgggtaatggatacatgggactctgtactatttttgcaacttcctataagtatataattattgcaaaatgaaaagttgtaagttttaagtaaggaactgggacgtatggtacctattttatgaaataagaaaagggtgctagaaaatttgaggggaataaaacgatt

SEQ ID NO: 155153 - DNA, 570 bp, Homo sapiens
tcaaatggtcacatactgtatgatcgcatttatataacattcttgaggtgacaaaattattgaaatgaagaacagattaatggttgccagggatagggactggagggggtgtggggtatgtatgactataaagggatgacgcaaggagttcctttgtgctgatggaacagttctatatgattatgatgattacgatgttgattataacatttgattatgaggttaagcacatgagtctttacctgtgctgaagttgtatggacctacatacacacaaatgaatgcatgtaaaatctggtgatactgaataaagtctgtrgtctagatagcagtataatattattgtcaatgtcttggatgtgaagttgtgctatagttacaaaaccgtaccactggaggaaactgggtaatggatacatgggactctgtactatttttgcaacttcctataagtatataattattgcaaaatgaaaagttgtaagttttaagtaaggaactgggacgtatggtacctattttatgaaataagaaaagggtgctagaaaatttgaggggaataaaacgatt

SEQ ID NO: 155154 - DNA, 618 bp, Homo sapiens
tggagggtttggaaatcagcatcttggtgctagctgtgctcataaccactgggtgtcacttctagtccctcttggtggacggagctgagacagatatgtacatatacacatacctttctcagctctgagatatatatatatagggtttctgtgtgtgtgtgtatatatgtgtgtgtgtgtgtatatatgtgtgtgtatgtgtgtgtgtgtgtatatatgtgtgtgtgtgtgtgtgtgtgtgtatatatatatatatatatatttcctttgaacaagagttcatattaatgaactcttttccaattttaatccaataccatgagattcattttacccttcctcctttccatgattttgttttgtttttttttttgagacagagtcttgctctgccgtccaggctggagtgcagtggcgcaatcttcgctcactgcaagctctgcctcccgggttcacaccattctcctgcstcagcctcccgagtagctgggactacaggcgcctgccaccatgcccagctaacctttttttttttttttgtatttttagtagagatggggtttcagcgtgttagccaggatggtctcaatctcctgacccgtctcggcctcccaaagt

SEQ ID NO: 155155 - DNA, 615 bp, Homo sapiens
tagtaagacacatttagtgagtctttttttttgtaccaaaatactgtgtccaaacaataaaatgctttttcaaaacaagaaatatgaagataaaactgcagcatcaatatactattatagttattgcttaaaagtatttagaacaaatagtatttttctacatttttaaaatcactacagacactgcaaataaggcttatgtatttatttagtggaatacaatgtgatgatgattggtaaactcttatgtactcttttctatacstgctctaacaaaatgaattttgatatggttacattatggaactttgtaaagctctttaaatttacagaaaacaagttttatttggttttgtaaagactagatcatacagctagaacaggtttttgtatatggttacacatataccagtatatatttgatttgctcagtttaagcccctgggagagttgcgcttcataccaaattctttgatagttcctttgggaaagatgcattatgtggaatttacagagggtttttagagatgtggacagcctctttaccgccatgacatttggcaagaaatcatgagtaaataatgaggctaggctatttaaatgtatttagcaatt

SEQ ID NO: 155156 - DNA, 615 bp, Homo sapiens
tagtaagacacatttagtgagtctttttttttgtaccaaaatactgtgtccaaacaataaaatgctttttcaaaacaagaaatatgaagataaaactgcagcatcaatatactattatagttattgcttaaaagtatttagaacaaatagtatttttctacatttttaaaatcactacagacactgcaaataaggcttatgtatttatttagtggaatacaatgtgatgatgattggtaaactcttatgtactcttttctatacctgctctaacaaaatgaattttgatatggttacattatggaacyttgtaaagctctttaaatttacagaaaacaagttttatttggttttgtaaagactagatcatacagctagaacaggtttttgtatatggttacacatataccagtatatatttgatttgctcagtttaagcccctgggagagttgcgcttcataccaaattctttgatagttcctttgggaaagatgcattatgtggaatttacagagggtttttagagatgtggacagcctctttaccgccatgacatttggcaagaaatcatgagtaaataatgaggctaggctatttaaatgtatttagcaatt

SEQ ID NO: 155157 - DNA, 538 bp, Homo sapiens
ctatggtattaaattaaatctgtagcacatgtcaataatatgccagattacctcartctctaaaaacagtgataaactatttcttcttgctaggatatagataatctaaatctcttggctacatttaactgatagattcatttttggcaaatgtgttgacattctgagatacagggagactaatcccaacatctgcactgtccctgaaatagcagaattactgctctgtgttgggggaaaatccataaacatggatttttaaggtttttttttttcctaggaaaaatggaaaatcgagggaagtagtaagaggtagacaagagctccttttccccttatacacaagtttcgattgctgcatctaaagataattttctcggaaaagtttgtagatcacaatagggaagtcagtttatcgtctactaaaagtgcccacccattttagtttaagaagacctagggaactaaaactacttatttcataactctcagcagtttgttcagggtagagaagtagcatcgtgattagcatgtggcc

SEQ ID NO: 155158 - DNA, 538 bp, Homo sapiens
ctatggtattaaattaaatctgtagcacatgtcaataatatgccagattacctcaatctctaaaaacagtgataaactatttcttcttgctaggatatagataatctaaatctcttggctacatttaactgatagattcatttttggcaaatgtgttgacattctgagatacagggagactaatcccaacatctgcactgtccctgaaatagcagaattactgctctgtgttgggggaaaatccataaacatggatttttaaggtttttttttttcctaggaaaaatggaaaatcgagggaagtagtaagaggtagacaagagctccttttccccttatacacaagtttcgattgctgcatctaaagataattttctcggaaaagtttgtagatcacaatagggaagtcagtttatcgtctactmaaagtgcccacccattttagtttaagaagacctagggaactaaaactacttatttcataactctcagcagtttgttcagggtagagaagtagcatcgtgattagcatgtggcc

SEQ ID NO: 155159 - DNA, 534 bp, Homo sapiens
atgcaattattctcataagtaactttggtcagaaaattttaacttaaatttgtccayagctcttcctcttccactgaccactaaaaagaattttggctttgtgagctgtttctctccctcttagttttttggagtatcttacctaacacaaaaatcaataaaagattgggtagagaaaaagattaaccctgacttagaaaaacattttattttttctcttgtatgtgtgtattttgagagatagcaacataatagcaatatatgaactaaatgaggaaaacttacaagctagaaagggagttttcaaataagtgttgtagagtttatttctttaatggtgtttgaatgatataagtacataggttgtgttaccttttacttattgctctgtgttctgtctctggtgtaacactggatgagtgggttatgagttgaataagtttatcgtaaagatatattccacaagtatctgataaggttttccctaagcttgttgaaatcaccatatgtgtattaagatttccattaccatat

SEQ ID NO: 155160 - DNA, 616 bp, Homo sapiens
tacttttatcattttagttttgtttaagtattgcggaaaaatatggaccattatattctccctgtttttattttaccttctgtgcactaacaattagtcttcctttgttttgcwctatgagtctgaaacgtttgttagttctctgctttcttagtaaatggtaccatttaaaatagattgtaaatatatattgcatagatatttaaatatatattataaatacatagaaatatatatgcatactcagagtcctctataagctctctgttctacttgagacttttcatatcagatccttatactgttttctctttgtgtttgatctgttcttttatcatgtctacaacaaagatgtttaacctatgtacaaagggaatataatttgactttatatactgccttttgaagatcatttttaatactagtttgaagccacatacatcagagtggtttggtaagatgagattttacacatcttgaaaagtccaggagagaatggttatacttggtgaatcaaattgtcttctttcctaccccatttttccaactctaaatacaagtgaaatgaatgttcttgtaaattgtactttctttttatggcttttagaccatagtt

SEQ ID NO: 155161 - DNA, 616 bp, Homo sapiens
tacttttatcattttagttttgtttaagtattgcggaaaaatatggaccattatattctccctgtttttattttaccttctgtgcactaacaattagtcttcctttgttttgcactatgagtctgaaacgtttgttagttctctgctttcttagtaaatggtaccatttaaaatagattgtaaatatatattgcatagatatttaaatatatattataaatacatagaaatatatatgcatactcagagtcctctataagctctctgttctacttgagacttttcatatcagatccttatactgttttctctttgtgtttgatctgttcttttatcatgtctacaacaaagatgtttaacctatgtacaaagggaatataatttgactttatatacygccttttgaagatcatttttaatactagtttgaagccacatacatcagagtggtttggtaagatgagattttacacatcttgaaaagtccaggagagaatggttatacttggtgaatcaaattgtcttctttcctaccccatttttccaactctaaatacaagtgaaatgaatgttcttgtaaattgtactttctttttatggcttttagaccatagtt

SEQ ID NO: 155162 - DNA, 616 bp, Homo sapiens
tacttttatcattttagttttgtttaagtattgcggaaaaatatggaccattatattctccctgtttttattttaccttctgtgcactaacaattagtcttcctttgttttgcactatgagtctgaaacgtttgttagttctctgctttcttagtaaatggtaccatttaaaatagattgtaaatatatattgcatagatatttaaatatatattataaatacatagaaatatatatgcatactcagagtcctctataagctctctgttctacttgagacttttcatatcagatccttatactgttttctctttgtgtttgatctgttcttttatcatgtctacaacaaagatgtttaacctatgtacaaagggaatataatttgactttatatactgccttttgaagatcatttttaatactagtttgaagccacrtacatcagagtggtttggtaagatgagattttacacatcttgaaaagtccaggagagaatggttatacttggtgaatcaaattgtcttctttcctaccccatttttccaactctaaatacaagtgaaatgaatgttcttgtaaattgtactttctttttatggcttttagaccatagtt

SEQ ID NO: 155163 - DNA, 616 bp, Homo sapiens
tacttttatcattttagttttgtttaagtattgcggaaaaatatggaccattatattctccctgtttttattttaccttctgtgcactaacaattagtcttcctttgttttgcactatgagtctgaaacgtttgttagttctctgctttcttagtaaatggtaccatttaaaatagattgtaaatatatattgcatagatatttaaatatatattataaatacatagaaatatatatgcatactcagagtcctctataagctctctgttctacttgagacttttcatatcagatccttatactgttttctctttgtgtttgatctgttcttttatcatgtctacaacaaagatgtttaacctatgtacaaagggaatataatttgactttatatactgccttttgaagatcatttttaatactagtttgaagccacatacatcagagtggtttggtaagatgagattttacacrtcttgaaaagtccaggagagaatggttatacttggtgaatcaaattgtcttctttcctaccccatttttccaactctaaatacaagtgaaatgaatgttcttgtaaattgtactttctttttatggcttttagaccatagtt

SEQ ID NO: 155164 - DNA, 593 bp, Homo sapiens
tattaactataatatactactgattatattattttaatgatttaataagcacttttaattaaaaatatgccttcctcttagtccatgtgagaaatgccattaattataatattaaggcaacatatatgctagacaaaagcattttagtaagaacacatgagtgttcaacatgccatccactctctactttctatttaagagttttacttacaaaggtgttactagagatgcaacttaaggatctagtatattctttgttaaggagtctgtttgtattctcttaagaaaagggaacattttratattcaaaggcaaggtagatccatcatattttaattcacctaaactaagaactccagagagagttatagcttattattcactatcttactctatctttatattattacttggttgtattgctaccaatatgaaagaaaaaaatagaggaaaaaatcctcaaattacttatgacataataggtgcactttttgcaaatttattttatttcagaaatggaagcatgttagctggctggataaaccggaactactctttcaagtctggctgtattctagcagagaaaagaagag

SEQ ID NO: 155165 - DNA, 593 bp, Homo sapiens
tattaactataatatactactgattatattattttaatgatttaataagcacttttaattaaaaatatgccttcctcttagtccatgtgagaaatgccattaattataatattaaggcaacatatatgctagacaaaagcattttagtaagaacacatgagtgttcaacatgccatccactctctactttctatttaagagttttacttacaaaggtgttactagagatgcaacttaaggatctagtatattctttgttaaggagtctgtttgtattctcttaagaaaagggaacattttgatattcaaaggcaaggtagatccatcatattttaattcacctaaactaagaactccagagagagttatagcttattattcactatcttactctatctttatattattacttggttgtattgctaccaatatgaaagaaaaaaatagaggaaaaaatcctcaaattacttatgacataataggtgcactttttgcaaatttattttatttcagaaatggaagyatgttagctggctggataaaccggaactactctttcaagtctggctgtattctagcagagaaaagaagag

SEQ ID NO: 155166 - DNA, 447 bp, Homo sapiens
atttttgtgttttagctaggcagttctatcatcaaaaggtaatgatggtatggtttcctctttttaatacttatctttctaatttttgtttaatgttacattgcattaacctggactagtgagttaatgttaaatactagttgygtcagtcggtgtagtttactaagagtgaacttcatttgaattcctgggatatgcctcaattgatcataatgagatcttctataatagactgtggaattcaattaattaatgttttatctaggattcaatagtatctttctttttgtgttatcttaatatttcagtatcagagttatgctacttttttgcaaaataaattgggatcactaatataacataagcttacctattttagaaaaaaaatgtaataacattcacaggtgaaaccactagatgttaaagcctatttttgggattaaaatt

SEQ ID NO: 155167 - DNA, 555 bp, Homo sapiens
ctggcttaatttgtatctggacaaaaggaagaggcttgtcagaaatttaaatttagctcccaaagaaatttttcagaactatgtcttcaaaccacagaaaagcacttctcatttgtctctctctccttttaccattagctttagtatataaatgaagtcataaccatcataattttaccaggaatcattacttatgatgtcttttccccatgatctcaccattaattattaagaatatgaatgcaaattactgtttgtgagacaaagtctgaagaaaacgtccatttttttaattttaagcaaacagtcaataatctcacaaaaaatgacgtctgatcaatgaagttgataattcttagtttatattttgaacagtttaaattgtaattttgacatttttctaagagacagatgaggctttatattgcttacataagctatgtatgctctctatcctaacaaatagtgcaayagccatgaaagaaaacactagcatttaatatgctttaccttcagcattcattacatacacagttattttaggaaagtaatgtt

SEQ ID NO: 155168 - DNA, 310 bp, Homo sapiens
ggcaactgaacaaaagaaaactgttgattctaatgagcagtactctcytcactcaacatctatgccaggatttttggaggggttacataaaggtgaaaggaaaaaaacaaaacaaaacatgaaaacaattttcaagtgcagccatttaagagtatagtatgaatgtcccttgaactttgtgagtgggaagacatctaaggaaatgtctctgtagctctccttttgaaaatcaatcttaactggacaagacccctggccacaagcctatgcaattagactgcatatcctagtaccacaaatgcaattgtta

SEQ ID NO: 155169 - DNA, 567 bp, Homo sapiens
tggaatatataacagtctctaagtaactatgtacccagaaattgggtagcttctagtgtggcttcctttttactgtaatagtgagtgcagaaataccagatgtttttacttaggacatcgtggaggcttgaaaataattacttcctcttttgaaggccttgagaaaagatttcaatgctttatagctttagtgaagacacatataaggtacatctatcatcaaggcaacttggaagaagcactttggtagtctatgaatgtggaaatggcatagtgtataatgtaacttgtaaaacatagactgaaagaagtctatattacagatagaaatccaccatgtttcaagtcagtgatttgaagaaaaaacatttccattaaaagtaaacaataggtgaaccacagccagatcacatctgtgcttcactttcaagttattatttaataattcgtttaccstgtaagcaattcagaaagacaattattgttttatgaaatctatagtgatatgttggattccaaagagatctggaggtctttttaactgtcatctttgaccaccctattcag

SEQ ID NO: 155170 - DNA, 565 bp, Homo sapiens
actagattgttttagctcatttcaaggatctctgttatctgatagtcacaccatggtagagtttcctctcatgttgcatagggatcayttgtgtaagctataggatattgtggaagtaatggaatgtaacttctgaaactaggtgatacaagacattgtggcttccttttgcttttttggcttactggattttgggaaagccagctgacatttcgtgaggaaaaccaggaagccctgtggaaaagcctgtgtggcttcctgccagtgaggaactcaggcttcttgagaatagatgtgagaataagctattctggaagcaaatcccccaactccagccaaaccctctgatgactgcagccctggctgacatcttaaatgtcatcccatgaaagaacctgagtcagaacttttcagcaaaaccattcctgaatttctgacccacagaaattataacacaataattgttgttttaagcagccaggctttggaataatttatcatatagcagtaggtaactaatgcatagactcagtatcatcaatatgaagatctctgaactgaatga

SEQ ID NO: 155171 - DNA, 379 bp, Homo sapiens
ccaaaaagaaccatcatcctgagagaatgcaactattagaaacaaagcactcgtctcccagtagtctacaggcaataactaagctgagaaaacaattcagcccataaggacggcatattttctaatgcccactttagatgtggcaaaagaggataaaataaagaaactttcagagggatcaccctaaaaaccacagagaacaatgtaataggaaactcccttcaagaggcagaatctgggcctaattatgaaatgttttccatcatcagggtagggagctcccacccaacaagtatccagtaagatttcacaaatgytacctgtgtatgtccacctgctgtatgtctcctgttttttgtttctgaatagtagagtgagt

SEQ ID NO: 155172 - DNA, 456 bp, Homo sapiens
aagttaaaacttttttgctctcatcttgcataaagagatcagtgtttggtcaaattaggtaatattaagctttaattcctttctgatttgaaagtcagctgtaattgggaataagattatttaacatctttaatactcaggaaacagaactagataaacagaaggataccgactcttcccatctttgcaaaccaaggcccattcctgaaaccccttttcttaaatccacttaaagaagttctgcaaacagtaaaggaacctaaactaaaacaatatgaaatcttttctgactttagctatgctaagaaaacatcgtaaatggtaaatgttagatctaaacagagcctgaataaccatctattgcarcatttcctaaatatctttgtgcagatctcattcaataggattttgtttggtgtggttccctgattaagtaagatggaaggtgctggattc

SEQ ID NO: 155173 - DNA, 538 bp, Homo sapiens
aatttattggggagtgctcytgggagtctctgagagggagcgaagaaataggattgagaaaaggaaagagctgatataagactaagacacaataaatgtctcagctgattgctcaggggatgaccctatagaatcatccgcaattgagcaaggaggcatgatttatgagccttcactggatgtcactgccctgcgggggccacacaacttgcttttagctgttggggaataatgccttgtgtctaggatccaggcagtcctccagccatgtaccacccaggattctaaaatctgaattgttttcttagaaatagagatgataggtgtgtttgtcctcatttcccaatttatttatgcaaggattaagaatttaacagaacaggtggttatacagaatagaatattcaagatagatttgtccattttcttatgccccctattccctgtgggttaaagaattgtcactttcactttcaataaaagtgatgatttgtattggttggggtaaaaaactaaattattgttaaaccattgtttt

SEQ ID NO: 155174 - DNA, 585 bp, Homo sapiens
ccttgtagcttttggctacgtaacacaagcattcctttgttttattcattgtttgttccagatggatttactaaaytgttcagagaaggggacccttattatttacctgtcttatagttgcatacagtaggaacataggaaaggaaccaatttagtaatgcatttggactcaaaagttaattctgcaattatactgggaaaaggaaggctaaaaaagacagaagctaggactgtaaatgattgtgggaccctgggtataaacttccatggataggatacaaagtcactgggatcaaacacatgcattggcagggcgtaagagttaagagagcatctgatttctaagatgaagactagtaatataaatagtcttctaatgttctaatctgaagtgggaaatatttatttgaatatataaattttgatatgttggccaattcaattactttgtagtcatgtctccttgatcatgtaatttcaaacatttttgtgtaaaaaatcattaagagcggtgttactccatataaactgttgtaaattatcagaagttagtggaggctgccatgaatagatttatattgtatg

SEQ ID NO: 155175 - DNA, 571 bp, Homo sapiens
  misc_feature (1)...(571): n = A,T,C or G
ataatattgttatagcagcttgaatggactaagacagttctacctgtgtgcaagcatctaaatttccccttttcataaagattagaggtcagattagagtcacattagaggtccaccctattctagcctgatctcatattaactaattgcatctgcatcgaccctgtttctaaataaagccgctttggaaggtactgggaattaggacttcaacccataatattccttatgtttagtttttttccaatactangtttaattaatttaaatgattagggataattaattttatcatgaaagaatacttatatgtgtggagagaaacagaaatgtttaaaaatgtggagaatgtagcaatacttccaggatctgaatactaattgcctccaaaaatctctacgaacattactatggagtctactcacttgaagcagctgaagtagatgatttgtctmaataaagtctatcattttcttgtgagtctaataagggaatacatatcacatagctgtttaatataacctggcattgaaaatgaggagaaagagaaagataagctaattgttgcagt

SEQ ID NO: 155176 - DNA, 547 bp, Homo sapiens
tgcctcagcggtagccaatattacaagtttacatatatccttcagccctttatctatgtattcagctggacatatatgtgatagcatcaataagcataataaaaagtactgagtgatcactacgtgtgttacactgtgctaatcatcacgttacatattttaacttataattcacataacaactctgtgaagtacatcctattaatactctcatgttacacctaactaaattgaggtgctgaaaatttatgtaccttgtccaaggtcccttcagtagtaagtaaacagaattcaaatagtctgatgctgacctcaagttcctaatcatgagcagactattttttaactacaacagtttcctatatatatgataaaaattatattgaaatagcttctcaaaaatgtytaataaggaaatgttaaaacatataacaagaacaagcaaaatagtaaaatgaacccctacatattcaatgcccaatttcaacaattgttgaaatggctcaatcatgcttcagccacaccctgcttcactctctcaactctg

SEQ ID NO: 155177 - DNA, 547 bp, Homo sapiens
tgcctcagcggtagccaatattacaagtttacatatatccttcagccctttatctatgtattcagctggacatatatgtgatagcatcaataagcataataaaaagtactgagtgatcactacgtgtgttacactgtgctaatcatcacgttacatattttaacttataattcacataacaactctgtgaagtacatcctattaatactctcatgttacacctaactaaattgaggtgctgaaaatttatgtaccttgtccaaggtcccttcagtagtaagtaaacagaattcaaatagtctgatgctgacctcaagttcctaatcatgagcagactattttttaactacaacagtttcctatatatatgataaaaattatattgaaatagcttctcaaaaatgttyaataaggaaatgttaaaacatataacaagaacaagcaaaatagtaaaatgaacccctacatattcaatgcccaatttcaacaattgttgaaatggctcaatcatgcttcagccacaccctgcttcactctctcaactctg

SEQ ID NO: 155178 - DNA, 575 bp, Homo sapiens
tgaaatttggggacagtttcaaaccatagcatcatacctgtataattcagtatgtatctctaacagataaggttattattattattattattmttattattattatttgagatggagtctcactctgttgcccaggctggagtgcagtgggaagatctcagctcactgcaacctctgcctcccaggttcaagcgattctcctgcctcagcctcctgagtagcgaggattacaggcacacaccaccacgcctggctaatttttgtatttttagtaaaaacggggtttcaccatgttggctaggctggtcttgaactcctgacctcaagtaatccaccctcctcagactcccaaaatgttgggattacaggcatgagccaccgcactgtaaccatgacaccattatcccacttaaaaaattaacaataatccctttatatcatcatatacttaataggtgttaataggtgttcagatttctctgacttttctctattttttgacagattgtttaaatctttatctcaataatatccatatagtttaagtatctctttaatccacaaattactccttc

SEQ ID NO: 155179 - DNA, 607 bp, Homo sapiens
ccaattactcagttgatcagactaactgaggtatttggaatcatgtagacaagtttccttggagatcaagtaaaytatttcattcatagaagagtagacatagaatggagtttcattttgctttttgcttttctttctcaaaaatacaggctaaataagtgtcattcaatggtcagaattacatctttttaataataacttacaaaatgaagttataagcataaaattacatgggtaattattagaataagaaggttaaagtgaaagaaaatttcaatttcgttatattttagaggaatcaagctgaagtatgtctaaaagtaatttacattctcttataaacctgatgtttcctaaagtgttaatttgaaggaaagctgttcccttgtcacttttgggaaactttgagtgccagtcccctgaaattgctcaatgtgatggtgaacactcaaacctgccatgaaccatctacctcttttaggatgcaacttgattgtggtttcttggagtctcttctgaacagtttcaacaggattttcattcatgttttcatatttttacccaccattaacttccctttcctttgtatcttttgtcatcaaattgt

SEQ ID NO: 155180 - DNA, 572 bp, Homo sapiens
tcttcctggactggctgggactagacccaagaaaaaccacccttgctgtaactgattagaaatcatctcacatatcatatatcaaagatcttactgtgtcctgtgggaaagaaattcttcattactattaagattattttatacttcactttcaagatatgtttcaagaatatgtcaagcattaaagtaagagattaacagtactcatatttcagatatagatttcacttgcatcttcctctattttccctgatgaaaactgggatctaggtaatttgatatctagaagtcccaccatcttgatttatgttgatttaatcacactcttggaaaaaatcaaatactagttcatggatgcgggaagaactcaatataatcacatactttgattgaaatgagttgaagaattttcatctacaatacttaggtggagaacctyttcacatacttccatcaagctcaaatcaatgtgcttcttgctactctaacgttctgtgaatttagccaaagacgaaatgaagatttgaagcaaggcttagcaaacacttcttactttaaaatgaggtctgaat

SEQ ID NO: 155181 - DNA, 560 bp, Homo sapiens
aaggaccaatgttatacctatattaaacagtattgccaaaataggaaacgaataattattgaccatttgagaaggcttcaaggaaagggaacgtgtcagtttagaccagttagtgygccagacacagtcaacagcttcttctcatcttacttacttgggaagggtgtactattctatcataatgaggagacattacccttaatgtattattgcctttaaatatgtctcaaattcatctacttctctccatctctttcttgcctttatgtggactcctctgtcattatcttctgttacaccttaatctggatagtaaccaacagagtttgaatatttcctttgtgaactctgcaagtttcatcaaagcagacaccaacattccttcttctcctctaccactatagtacatattgtacactagtgtatcttcagtattgtgaataatggtttgcatatatttttactgagttcttggtgtttaggctgtttgtatcatctgtttgatatcaacagcaccacatcataggtgcaaaatgtatgatttttgaatgaataaatct

SEQ ID NO: 155182 - DNA, 560 bp, Homo sapiens
aaggaccaatgttatacctatattaaacagtattgccaaaataggaaacgaataattattgaccatttgagaaggcttcaaggaaagggaacgtgtcagtttagaccagttagtgcgccagacacagtcaacagcttcttctcatcttacttacttgggaagggtgtactattctatcataatgaggagacattacccttaatgtattattgcctttaaatatgtctcaaattcatctacttctctccatctctttcttgcctttatgtggactcctctgtcattatcttctgttacaccttaatctggatagtaaccaacagagtttgaatatttcctttgtgaactctgcaagtttcatcaaagcagacaccaacattccttcttctcctctaccactatagtacatattgtacactagtgtatcttcagtattgtgaataatggtttgcatatatttttactgagttcttggtgtttaggctgtttgtatcatctgtttgatatcaacagcaccacatcrtaggtgcaaaatgtatgatttttgaatgaataaatct

SEQ ID NO: 155183 - DNA, 538 bp, Homo sapiens
agcatattggtaacatacgcttttgtaaacagaattaaaatatttaccttttctccctacctgattcttccagaattcacaaagctacttgttgattttcttatttcttggcaatacagtgaattgcaaaagttcaataagactctgttttctttataacaggacagaattggaaataccggttatattactaagactctgactgggatactatatttgagaagatacaaagaacatctagcttcaaagattctcagcctcatagtggctctcacttcctggcaggcccaggaacctcaggatattttggagagcccaagacaagaggaattcactaaaatctataggtattgcaggcaaagtttgatgatgagtccttggcttgacattatagctttgagaggcttttaaaagmcaaatctgatatttcttataaaaagattcaggaaagtaaacttaaaggggccaacaacagccaagctgagaggtaaatcaggaaggcaatcccattcacaattgccactaaaagaataaaata

SEQ ID NO: 155184 - DNA, 536 bp, Homo sapiens
cagtaggtattcttttgcaactcatagagaacgtagaaaaaatatttttgttttatgggagaggcctttgtattgtatttattgcatcatttcatccctccatatgccaaatttcattagtacacttcagttatttgcaattttatttttgcctcctccaggccataaaaatttatagacagtggaaatattataatcttttcctacccttttctagcctcctgactgtattcatgttctcctgtctgaggagctcatgattaagtgaacctgttgattgttaggttgtctaagttatctagaacaattaaggattgaacacattcctgaactctgaatmaaatttctgtttgcattttttgagctttagaaaaataattatagcagtcaacctggctctagagaagggtacaaattcatcctccctggacctgaactgtatatttgtaattgtataaggatgctctatttgctattaataaaatcttgaggataagataaattcttgagagatgaagaaaagtgccataaagaat

SEQ ID NO: 155185 - DNA, 536 bp, Homo sapiens
cagtaggtattcttttgcaactcatagagaacgtagaaaaaatatttttgttttatgggagaggcctttgtattgtatttattgcatcatttcatccctccatatgccaaatttcattagtacacttcagttatttgcaattttatttttgcctcctccaggccataaaaatttatagacagtggaaatattataatcttttcctacccttttctagcctcctgactgtattcatgttctcctgtctgaggagctcatgattaagtgaacctgttgattgttaggttgtctaagttatctagaacaattaaggattgaacacattcctgaactctgaataaaatttctgtttgcattttttgagctttagaaaaataattatagcagtcaacctggctctagagaarggtacaaattcatcctccctggacctgaactgtatatttgtaattgtataaggatgctctatttgctattaataaaatcttgaggataagataaattcttgagagatgaagaaaagtgccataaagaat

SEQ ID NO: 155186 - DNA, 437 bp, Homo sapiens
gaattcccttgccattctttaactcttttctggcaagcatttagtattcaggaatgagagacctttcattaaagaggctctatctgaagctctaggagtgtgcctatcaacaatttaaatgactaaaagtttcaactggtagtcaatctagtttgcctgtgaactcttatctcctttcttagatttttggactgtggtaacatctctgaacttgtaattactaaagtagttaaattatttgatccatgtgtaatatgatatgagatttcatatcatccacttactctctatctagaatgcactttatgagcacacgtcctcttttaggcaggcgtcagaatattaacttcgccttagatattctttttcttaaggtcagaagtgatctgataaagaaaacttyaggaaaaatatgtcttccttgctctccatgtagg

SEQ ID NO: 155187 - DNA, 562 bp, Homo sapiens
gattcactttttaagctcttgcatatgagtgaaaacatgtgatgttcatcttcctgttcctggcttgtttcgcttaacaaagtgcctcctgttccatccatgttgctggaaattatagggtttcacttttcttatagctgaatattattctattgtgtatttatatgtattggttgtgtgtaactgtccaaatctcatctcaatttgtatccctacatgtcaggggagggtactggtgggagatgattggatcatgggagctgtattagtccattctcacactgctataaggccatacctgaaactaggtaatttataaaggaaagaggtttaactgactcacagttccacagggctggggaggcctcaggaaacttacaatcatggcagaaggggaagcaaacacgtccttcttcacaaggtggcaggagagagaagaatgagaaccaagcaaatggggaagcccctcataaaaccatcagatctcatgagaatttactcactatcatgagaatagcatgggggaaaccaccccycattattcaagtacctcccactgggt

SEQ ID NO: 155188 - DNA, 541 bp, Homo sapiens
gaagaatttgaaataatttttaaaaatcaaacagaaatcctagaacttagaggtatatttgcttaactaaaaagttcattaggggcttttaacagtagaataaatcatgcagagaaaagaatcagtgaagtcaaagacaggcaattggaaaacacacagtttgtgagagagagaraaaaaaagaatgaaaaggaatgaaaaatgcccactgttaagaattaaagaaagaggaaagaaacaaaaagttgctccacagtcaaggacaggtttattttagagaaaacaaacctgagaggggcgtctggctgagttaggtcgtgcccactctcttactaagagtttttaaggatttagggtaggagagcttatcagaggcttggactgcttctgtgtctcttttgtgtctttgttgtgcttatctgggagggagagttgtgtgtctgttcccatacatccctgcagctgaaggcatacctgcagggtctgcttttagcttccctatcttagtgcacctaaagggaaaggaatgtgattattaagg

SEQ ID NO: 155189 - DNA, 510 bp, Homo sapiens
agtagttattggaatcccatatacagtgggaaaaaagtaagagcacatcttgatggaaagatatttgttaaggatataaaagaaataatgtcaatagtagaatctggatcttctcatgcaaaaattattaatagaagaggaaataagttagacgcttacaaataaacctcaaatgaacatcaaacatatcacggcatgcactgatagttacataacgtgatattcactcttctcttatttctttgtaagaacacccttaatccttagcacaacagagtcttcctggaatagagattatattatttagtctcactgctagatgtagctacttgataaagctgtggccaaattgttaarttgcagctttcaaggaatctcctttataccttgtcctttattctttgttatttcttcctctgctggctggaatgtaaatgtaactagagactgatgctgtcttagattatgaaggagcaagaaaaggtaggagaacaataaaatagaagactt

SEQ ID NO: 155190 - DNA, 445 bp, Homo sapiens
tgaaaaaaaaactggaagaaaggaataaactcctggacacgtaaaacctatcaagactgaatcaaaaagaaatagaaaatctgaacagacaaataagaagttacaagattgaagcaataataaaaagtctccccatcaaagaaaagttcgggatgtgatggcttcaytgttgaattctgcaaaatgtgtaagaagaactaatatcaatacttcagcaatgattccaaaataagtgaaaaagagtaaactctcctaattcattctaaggggccagtatggccctgattccaaaactagaccaggacacaacaaaaagataaaactacagaccaatattcctgataaacatagctgcaaaaaatccttgataaaatactagaaatcaggattcaactccacattaaaaagattatttaccatgatccagtgggattcatccaataaa

SEQ ID NO: 155191 - DNA, 597 bp, Homo sapiens
ttagaaaaaaagcatgaaaacttacaacatcttaccagatagagaatatcattaaacagatataatctatagaaaaaaatagaaattcagaaattgaaaagtgtaatagctaaatgaataatccaagggggtgatacgcaaaagcagatttaagctagcaggagaaaagaatcactgaacttgaataaaggtaaattgagattatacagttagagacacagaaagaaaaaaagaatgacgaaaaataaacagagtttcacagatccataagaaatcatcaagcayatgagatatacataatgagattcccagaagtaagggtagagaaaaaagggaagaaataatatttgaaaaaaaatagcaagaaacttttcaaacttaatttagaaacattaatctatatatccaagaagctcagtgaactctaaataagataaactcaacaagagccacacttagacaaattgtagtcaaagtgtccaaagacaaagagagaatctgataagcagaaagagaaaaatgaccctcatgtacaaggaatcctcagtaagtttaggagttgatttctcatcagaaaccatggaagccaggagacct

SEQ ID NO: 155192 - DNA, 580 bp, Homo sapiens
tccttgttttgtttttcagagtccagtatactcctgtgaacaaaacttggaacgtgtttgtttctctctgcctttttcctctatagtctggaaattagttgtgaatattcttaactcacagcaatatagttgtttgcatcagtgcaataagaattcattttcttttgcaacaggatgcaattggagaaactggttgttttactaaggttttgactggaagggtttgcttccctttaaagagtcaagcttaacttgcagagctgataaaagccccttgggaaaaactggcctcwtactcttctctacacagtccctgtatagggttcctgacctgcagtcagtaaagaatgtcactttctaacagacccaggagttccaagtttatcttgggaccttaagggaagaggatcacccaaatcacaggtatttgaagatacaaatccatggctgtgcttcactttaaaaggtcttatctgacattctttgtggaacagagtcccatcaaagccaatctaaaatgcctatttagagataattattcttgctgcactttgtgcaaatagtcaggccaagtataaga

SEQ ID NO: 155193 - DNA, 414 bp, Homo sapiens
aatactgtttttcaaattctactccaatgagctagtaatctgtccatcttgtgcatcactcagtgctcgcatgtctaaagattgtggctatatgacaaattttagtatctgtttagagaagccccatcctggtttggggggtttttttaagagaaaaactcctgggttttcttataggcttattaatctacactggggagcatccaactttttgtaatgtttaagtaaaattacaagttaagtaatattttaagttttgtagcccattaggtttctatcaactaatctacccagcttttgtagggcaaaaagcaatagacaatatgttagtgaatgsgcatggtatggttcagtaaaattttatttttgagaacaggtggtggactggatttggcccagggccatagattgcca

SEQ ID NO: 155194 - DNA, 545 bp, Homo sapiens
ggaaacacatgcagaaaatccccctggactcacagtttctacagtgaaaaagtgagctggatggaggtgaacastaggcttcctcactatcctgggttcctcagtgagagattcactctgcatcagcccgcagggagaatcacaagtactgatgcagggctgaaccaccagaagtcagttcgcgtcaaagggaggggtggggctaggggcagccagcagtggaacttggcagtggctcaccatccctgccagaagagaccccacaccagagaggctgtttatgggtgccacactgtgggaagcacagtccacagatgctctggaatctagaggctgactggctctcccacatggccctgagagccctccataaatctatcagcccatccagctggaacagctttagtggtggagtcattgtgagttttgtttctaacctggtcatcaggtgccctctagtgcttaaatagaatacaatagccagtttgctcagaatttctcaacaagcccactgaaatagtaaggtcacaaattcagacattgaa

SEQ ID NO: 155195 - DNA, 593 bp, Homo sapiens
ctagggcatccaaattggaaaggaagacataagattatccttgtttgcagataatatgatcttatatttggaaaaacctagagaccctacaagaaactattaaaactgataaacaaattaagtaaagttgcaggatacaaagtcaacatgcaaaaatcagtagcatttctacattccaacagtgaacaatgtgagaaaaaagtaatcccatttaaaatagccacacataaaattaaatacctaggaattaaccaaagaaatgaaagatctctatactgaaaattgwaaaacactgatgaaagaaattgaagacaacagcaaaaaaataaaataaaatatgttcatggattggaagaatcaatatttttaaaatatccatgctacccaaagcaatgtacaaattcaatgcaatccctatcaaaataccaatgacattcttcaagaagtagaaaagaaagctatcctaaaatttatatggaatcacaatagacccagaatagccaaagatatcctaagcaaaaagaacaaaactggagaaatcacattacctggtttcaaattatcttacagagctatagtaagcaaaatgaatg

SEQ ID NO: 155196 - DNA, 619 bp, Homo sapiens
tgatattgccttggtgcttatttcaggtagacaaaattgcttaaactagaataataatacaattcayttcaagaatatattaaagggaacacttacatgatcatctcaatagatgcacaaaacaacattagttaaaatgcaacttaaaactccctgagttttagccaggcacatgggctgccagctagagattgtattctccagcattccttgcagctaccagtggccatgtgactaagttcttgccagggaactataagcagaagtgatgtgaatattctctaggtaatggactgggctttgatttcttctcttctctcttttttcccctcttagcttctgttttagccagaccaaccatatgcttagactcattctcagctcatccccaaatcagagccacaagttaaagccactcatggtataccacttaattttctgtcttacaatgctattagaggtgttctttatccatgctaatatattctaggcttcctgaaacagagttttactcattcatctttatattcatttagaaccttacaaaaaaattgaaggcacagaaagtatttttaaatatacatttaatcgccatcaattttgtttgcttgttcctgct

SEQ ID NO: 155197 - DNA, 619 bp, Homo sapiens
tgatattgccttggtgcttatttcaggtagacaaaattgcttaaactagaataataatacaattcatttcaagaatatattaaagggaacacttacatgatcatctcaatagatgcacaaaacaacattagttaaaatgcaacttaaaactccctgagttttagccaggcacatgggctgccagctagagattgtattctccagcattccttgcagctaccagtggccatgtgactaagttcttgccagggaactataagcagaagtgatgtgaatattctctaggtaatggactgggctttgatttcttctcttctctcttttttcccctcttagcttctgttttagccagaccaaccatatgcttagactcattctcagctcatccccaaatcagagccacaagttaaagccactcatggtataccrcttaattttctgtcttacaatgctattagaggtgttctttatccatgctaatatattctaggcttcctgaaacagagttttactcattcatctttatattcatttagaaccttacaaaaaaattgaaggcacagaaagtatttttaaatatacatttaatcgccatcaattttgtttgcttgttcctgct

SEQ ID NO: 155198 - DNA, 603 bp, Homo sapiens
aaaatgcctcaaaaggcatttcagagacctttgtggcagcccctcccattacaggcccagaggcataggagggaagaatgcttttgtgggcagggcycagggtcctgctgctctgtgcaacctagggtcaccattccctgttcctcagctgctcaaactctacctgtgactaaaagggacccagatatgcctcaggccactgctccagagggtgcaagctggaatccgccaaggcttccatgtggtgttaaacctgcaggtgtgcacagggcaagagttgaagcttgggagcatctgcttagatttcagagtatgtatggaaaagcagaagtctgctacagcagtggagccctcatggagaacctcttctagggcagtgcagaggggaagcatgcggttggagcctgacacagaatccccattggggtactgcctagtagggctgtgagaagagtgccacaatcctccagaccacagaatggtagatacactgacagcttgcaaccatgctcctgaaaaagccacagatactgaatactagacaatgaagacagtcataggagctgtgccccacatggccttgggggcagagctgcccaagga

SEQ ID NO: 155199 - DNA, 553 bp, Homo sapiens
attgtagtcatagaacaacatttacaaagtaacataaagagatattgttaaaagcaatatgagataaaaaattgaatactgaaaattataagtcatctaaatgatcccaggaaagaaagaaaaaaatgaggaccaaaagtatttttaaaataaacatagactgaaacacacgataataatactacctkaaatgtaaatgtattaccacttaaaagacagatatttctaggcttcatgaaacacaaaatatttaagatatagactgtggcagacagattttaaagaagccctgtgattcctgcccctggtgtttgcatcatgtgtggttattcacacttctaaataacccatggggtgaagataaataaatggaacatattttcactaaatgataattaaataatgaaaagatttttaaaatgtgagatatggctaaagcagtgtttgttaaaagttataatttcaaataccgatgttataaagaaagttttttcaaagataagataatacaattgtttaatctcaaggttgattttaaaaaggagagacagat

SEQ ID NO: 155200 - DNA, 553 bp, Homo sapiens
attgtagtcatagaacaacatttacaaagtaacataaagagatattgttaaaagcaatatgagataaaaaattgaatactgaaaattataagtcatctaaatgatcccaggaaagaaagaaaaaaatgaggaccaaaagtatttttaaaataaacatagactgaaacacacgataataatactacctgaaatgtaaatgtattaccacttaaaagacagatatttctaggcttcatgaaacacaaaatatttaagatatagactgtggcagacagattttaaagaagccctgtgattcctgcccctggtgtttgcatcatgtgtggttattcacacttctaaataacccatggggtgaagataaataaatggaacatattttcactaaatgataattaaataatgaaaagatttttaaaatgtgagatatggctaaagcagtgtttgttaaaagttataatttcaaataccgatgttataaagaaagttttttcaaagataagataatrcaattgtttaatctcaaggttgattttaaaaaggagagacagat

SEQ ID NO: 155201 - DNA, 566 bp, Homo sapiens
cgagtagaaattgttcatgaagacctggaagcagggatcagtaactaagctgctacatttactcattcattctctggttttggaggagcccatgggtcacatatgcttgtgtgactctattcagcagtgtttatatttgacagtgacataatattgctgaacttaaaattatatgtgtggttattttttatcgagttacttgtacattcaagtgaataatagatgattttcaaataagtcgtttgcagcaactactcaaaacctatycaaaatctctctttgatcactactctcagagccagcatacttacaaaaacctccaatctaggcagattaatttggatataggtttgtgcatgtatgtttaagttattcttgactcctctcctgcaaaccttacaacgaatccattattaggaactactcattttaacttttcaatatgacctaaatccaagtgtgctccttaccacttaaaattagattattaatttcctgatttgtccataaacaatttcccccaaactaaaatgcaaggttcgtgagggctggaatttgcttggtac

SEQ ID NO: 155202 - DNA, 488 bp, Homo sapiens
  misc_feature (1)...(488): n = A,T,C or G
catatacagacattcttgcttttttcttttcttaaaatactctctctaaatctgttgcttaaatttagtggtccagataaagtgtcactttcccntaaaatcttcccatggagggttgctagattaagcaaataaaaatataggatggccagttaaacaaccaacaatttcagataaacaaccaaaaattctgttacataagtatgtcctgtgcaatatttgggacatacttacattaaatgaaattattcattgtttasctgaaattcataacgggccatcctatattttatgtggcaactctaagtggaagcaacactgtgaaacaatcatccacaatagcaataaaaagataacgtctttgagttcagagaaactaccagtcaaaagacacctttgccacctaagaaaatgacaaggcactgcatcatgaagcatgctggacatgcagataaatgcagacctccatttacccttggggagagaat

SEQ ID NO: 155203 - DNA, 534 bp, Homo sapiens
ttatccaagtgggtacaatgtagtcacatgagtccttaaaatttggagaacacgccccatctgaggagaaccagagatggcagtgtgagatggactcaactgctattggtggccctaaggatgcgggaagggggttatgagctcagggatgcagcttgccacaggaagctggaaaaggaaaggaaatgggtttccccctatagctttcagaaaggaatagatccctgctgacaccttggttgtagctcattgatacctgtgtcagacttctaacctacagaactataaaaagtaaataagtgttattttaatccactaaatttgtgrtaatttgttatgtcagcaatagaaacctaatacagtggctagcattgtttgagtacttactatgtaccagacataatgcttagtcatttacttgccttatttatttcttacaaccctattttacatatgaggaaattgagatttagagaggttgggtaacttgcccaagactacacagaaagaagtggtagagtaacaatttatatc

SEQ ID NO: 155204 - DNA, 315 bp, Homo sapiens
gtcggaaaccatctgtacatattacacacctttctctagatctactcccctgcacgttagcttaacaaagattctgaaaatatttgcaaaaaaagaagcctgtttraattttagcaactgttttacaaacatctactgacaatctgcatttaaagtaagaaatgtatatgctcctttggagaaagttgctctagtggagaaagaggggttctagatatttttctagtttcttaaactgatatactttacaattgaaagtaattttaggggactctggcaatgggtagtagagctctccacacttccaatggtgag

SEQ ID NO: 155205 - DNA, 315 bp, Homo sapiens
gtcggaaaccatctgtacatattacacacctttctctagatctactcccctgcacgttagcttaacaaagattctgaaaatatttgcaaaaaaagaagcctgtttgaattttagcaactgttttacaaacatctactgacaatctgcatttaaagtaagaaatgtatatgctcctttggagaaagttgctctagtggagaaagaggggttctagatatttttctagtttcttaaactgrtatactttacaattgaaagtaattttaggggactctggcaatgggtagtagagctctccacacttccaatggtgag

SEQ ID NO: 155206 - DNA, 451 bp, Homo sapiens
gttatgacaaatttctgataccatttttcttcattttccaatttttaaaaatattaaataactagggcttcaacaatcagtgccttttgaaagcactgataaaattgtgttttggctcaatttycaatacagtaaacatgacagtgtacttttaatttttgtcatgcttgagttttgtattaaagagtttcttgtattaaagagtcttactatgggagataaacagttctcggtaaattagcaagtgagaagcgctagaacattgcgaggaaagagaaccggtgtacatctgcctaccctatactttatatacttcccttttttcttcgtgatcgggggagggggatagaaaatgaagcagttgaactgacacaggagggctgtacagggaagaactgggaaaatcccattaaggagtggaggcttcatttcttagctgaatgttgaagaa

SEQ ID NO: 155207 - DNA, 497 bp, Homo sapiens
gaattcaaaatgatcatcttaaagaagcttagtatgctgtgagagaacagagatagtcaagcaaatgaaatcagaaaaaatgcaataacaagaatatcaacaacaagacagaactataaaaaaagaaccatacaaattctgcatctgagaaataactgaattgaaaaattamctagagggattaaaaagctgacccagtcatgcagaagaatcgtcaaactcaacagctcatttaaattcatcaaatcagaaaaaaaaaatgaaaagtaaagcctaagggatttatggcacaccattgagtggaccaatatacatattgtagaagtcccaaaaggagaaaagggagtagagagcttatttgaataaagagtggtgcaaaacatcccaaatatgaggaagaaaatggacatccagattcaagaatctcaaaggactccatgtaggaagaaaccaaagaaagggtaaagaagcccacactgagaaagattttaatcaaa

SEQ ID NO: 155208 - DNA, 497 bp, Homo sapiens
gaattcaaaatgatcatcttaaagaagcttagtatgctgtgagagaacagagatagtcaagcaaatgaaatcagaaaaaatgcaataacaagaatatcaacaacaagacagaactataaaaaaagaaccatacaaattctgcatctgagaaataactgaattgaaaaattaactagagggattaaaaagctgacccagtcatgcagaagaatcgtcaaactcaacagctcatttaaattsatcaaatcagaaaaaaaaaatgaaaagtaaagcctaagggatttatggcacaccattgagtggaccaatatacatattgtagaagtcccaaaaggagaaaagggagtagagagcttatttgaataaagagtggtgcaaaacatcccaaatatgaggaagaaaatggacatccagattcaagaatctcaaaggactccatgtaggaagaaaccaaagaaagggtaaagaagcccacactgagaaagattttaatcaaa

SEQ ID NO: 155209 - DNA, 497 bp, Homo sapiens
gaattcaaaatgatcatcttaaagaagcttagtatgctgtgagagaacagagatagtcaagcaaatgaaatcagaaaaaatgcaataacaagaatatcaacaacaagacagaactataaaaaaagaaccatacaaattctgcatctgagaaataactgaattgaaaaattaactagagggattaaaaagctgacccagtcatgcagaagaatcgtcaaactcaacagctcatttaaattcatcaaatcagaaaaaaaaaatgaaaagtaaagcctaagggatttatggcacaccattgagtggaccaatatacatattgtagaagtcccaaaaggagaaaagggagtagagagcttatwtgaataaagagtggtgcaaaacatcccaaatatgaggaagaaaatggacatccagattcaagaatctcaaaggactccatgtaggaagaaaccaaagaaagggtaaagaagcccacactgagaaagattttaatcaaa

SEQ ID NO: 155210 - DNA, 520 bp, Homo sapiens
atggccaacagaaaccaatgccatctgtcagtgcttcactgaggctttagattgagaactgtaagaaaaatgattactctcacagcccaggcttgtgtataccagaagagaaatcgtgagctgctgtgtaaacaccctccgatgaacatgaaaaactctcaaactgcagggtccagaggcagccacacaaaccctcaaatcacacgcaaagtcagcacgtaggcagacacacaaaccctcaaatcacacccaaagtcggcacgtagatatcaacttgctagcttcacccagtgccagccaggacagggtccctaagcagcagggtagtgggagstatctggaaatgtgggcatggacatcactgtggcctaatggctgggggtctgggtgtcctctttctcctcacccattcagccatggccgctttccactgccacaaagacagaggggcagagccacatgaacactattttttcaagaaacgaatactccagatttccctgtttttgctgtaagaaaa

SEQ ID NO: 155211 - DNA, 567 bp, Homo sapiens
actcagttgtatgtaagaaaacccaattccccttgaggaagagaaagggctggagtcctttaaaattaactgcctgtttttctctctgtggctagtgagactcatctctccctttgccatgcattgtgaagactctgtttctctagctgtgcagctctaaggtcactagacagataatctcaagtcgtaaaacatgttgttccttgaaaagtaagaaataatgtaatgcatgtcttaattaaataactgtctttgtttctcgcttctgtaatatgctttgccccgcacagatctccctccgccccatgaaatgcttaaaaggtagcttgactctttgtttggggctcagtcctttggatgttaatccgactgactcggtgcacctaaataattaaataattcctcctcaacccctgcstctgattcctcaattatcccacagcaattacatagtccttctttgtgttttgtgacagtttttgacttttatccgatataagtaggccactcctactcccttttagtagagaacatggaatatctcttgcatggaatctttttccatat

SEQ ID NO: 155212 - DNA, 555 bp, Homo sapiens
attcttcaatttgaaagaaaaggatgttaattagaaagaagaaattatctgaaggtacaaaacttactggtaatactaagtacatagaaaaacagaatattataacactgtattatactgttaaagtactcatatcttatgtagtttatwctttaaatgacaaaccaattaaaaataacttcttaagatgtaatacaataagatatacatggaaacaacaaagagaaatcagggggatgaagtggaactgtagagtttttactagtttttgctcgttttttaatgcaataagtgttaaattgtcatcagtttacaataatgggttatattatttgcaagcctcatggtaacctcaaatcaaaaaacatacaatggatacacaaaaaataaaaagaaattaaaacataccacaagagaaaatcaccgacgggaaggaaggaaagaagaaaagaccgcagaacaaccagaaaacaagtaagaaaatggcaggagtaagtcattatttatcaataacactgaatgtaaatggacgaaactctccaatcagtttgagta

SEQ ID NO: 155213 - DNA, 555 bp, Homo sapiens
attcttcaatttgaaagaaaaggatgttaattagaaagaagaaattatctgaaggtacaaaacttactggtaatactaagtacatagaaaaacagaatattataacactgtattatactgttaaagtactcatatcttatgtagtttatactttaaatgacaaaccaattaaaaataacttcttaagatgtaatacaataagatatacatggaaacaacaaagagaaatcagggggatgaagtggaactgtagagtttttactagtttttgctcgttttttaatgcaataagtgttaaattgtcatcagtttacaataatgggttatattatttgcaagcctcatggtaacctcaaatcaaaaaacatacaatggatacacaaaaaataaaaagaaattaaaacataccacaagagaaaatcaccgacgggaaggaaggaaagaagamaagaccgcagaacaaccagaaaacaagtaagaaaatggcaggagtaagtcattatttatcaataacactgaatgtaaatggacgaaactctccaatcagtttgagta

SEQ ID NO: 155214 - DNA, 555 bp, Homo sapiens
attcttcaatttgaaagaaaaggatgttaattagaaagaagaaattatctgaaggtacaaaacttactggtaatactaagtacatagaaaaacagaatattataacactgtattatactgttaaagtactcatatcttatgtagtttatactttaaatgacaaaccaattaaaaataacttcttaagatgtaatacaataagatatacatggaaacaacaaagagaaatcagggggatgaagtggaactgtagagtttttactagtttttgctcgttttttaatgcaataagtgttaaattgtcatcagtttacaataatgggttatattatttgcaagcctcatggtaacctcaaatcaaaaaacatacaatggatacacaaaaaataaaaagaaattaaaacataccacaagagaaaatcaccgacgggaaggaaggaaagaagaaaagaccgcagaacaaccagaaaacaartaagaaaatggcaggagtaagtcattatttatcaataacactgaatgtaaatggacgaaactctccaatcagtttgagta

SEQ ID NO: 155215 - DNA, 567 bp, Homo sapiens
  misc_feature (1)...(567): n = A,T,C or G
gaatgcaagtcaaaactacaatgagatatcactcacatcagttaaaatggcttttatccaaaagacaggcaataccaaatgctggtgaggatgtggagaaanggaaaccgttgtacactattggtgggaatgtaaaatagtacagtcactatggagaacagtttggaggttactcaaaacactaaaaatagaactaccataggatccagcaatcccactgctagatatagacccaaaagaaaggaaatcaatatatcaaagagatatctgtgcttccaatatatattgcagcactgttcacaacagccaagatttggaagcaacctaagtatccatcaacatcaacatacaaaaatatagttagcataagatctrgtacttgacagcacaacaggatgactacagccaataatattaaataattgtacttttaaaaaataagagtataattggattgtttgtaacacaaaggataaatgcataaagtgatggatacctcatttactccgatgtgattattatgcatcaccacgcctgtatcaaaatctcatgtacccctgtaccagt

SEQ ID NO: 155216 - DNA, 452 bp, Homo sapiens
gctctgcaacctctgccaccaatactggagaaatcctccaacctcactgttttctcctgaacttgttcccttctgtttttygattaatacgcagcaaacaggcacaccttcaagctgccaaaagcatcttcaacgttgtacacttacaatcttcaaaatatagttgttcaaaagagtcatcaaagtagtttttgaaatagaacacttactttgaccacataattgaaccttcggatatcttgaattgcacttgagaagtctaaccgattaaaggcttctcccaaggtgcaatagccatgcctctggaaaagcaacacagaagttaaaattagtcaattagccaaaaagaattggcagttaatgtcaattaattgtgcgattaaaaaaatttttggcaaaggacaatttgtttttattttgaagactgattttagatttagatgagagtatag

SEQ ID NO: 155217 - DNA, 334 bp, Homo sapiens
cattaccttatatcaaactatactatgagtctacagtaaccataacggcatagcagtggtacaaaaataggcacatagaccaaaggaacagaagaaagaatccagaaataaagccacactcctgcaaccatctgatattcaaaaaagttgacaaaaataagcaatggggaaagtgctccctattcaataaatggcatcagaattacttggctatcgacatgcataagaatgaaattggacttctacctatcatcatatamaaaaattaactcaaaaatttactcaatttaaaagtaagacctcaacctataaaaatcctagaagaaaacctaga

SEQ ID NO: 155218 - DNA, 474 bp, Homo sapiens
agttggaaaaaaaagtctgccagtgcctctactcacaagatatgcagaagtgccagagaccgatgtagtgcagtggctgatataggcatgaagatactattgataactgaagtaaagtagggacactgagaaaacactcgcagcactacaagccctacactaaattcaaagtaatacagttcactgctggagaaacttgaagtcagtggtatactgaggataacaataacaacaattaaatcataaccaagttttattactaattaattcaattaatataccaatgatctgacagaaraacagatgcattcatttctatttttttcccatattcatgtaatctgaataagtgctatgatacagcccactagctaaataagcaagatcaatatggtgaatcagcatgcacctgtttttcctacaaagcatgaaaaatgacctaaaggtaatcttgattaatattattgtaggagt

SEQ ID NO: 155219 - DNA, 462 bp, Homo sapiens
ttgtacagctccctgaccgtttacatcaatgtcttgattttcttcctcctgcaatacgttataaaactaaagttttaaaaatatcactctcattttcatcttaaatcctttaaagactcttagaattcagcacaaactctgtaggttatcattcaaggctctttattacacaagcttttctgacttttagctttagtatacatgacttcactaaaggggcggcagatatggcgtgagagttaagagtgttaagttttggagctgtacagacaaggatccatgtcacagctctgtcacttcctagtagagaccttgggtaaattayttaaccttccgagcctcagttttctgatctgataaatggagaaaataataataatgcaacctcattttcttattaaatataagtctgagagaatttttcttctaaaaaactcttataaagatgagctctcttcttat

SEQ ID NO: 155220 - DNA, 355 bp, Homo sapiens
gccagctattgcagtgccatttattgactatagagtacttactgtattgcttatktttttgtcaactttattgaagatcagacgactgtaggtgtgtggttttatttctgggttctctatcatgttccattcatgtatgtgtctgccttcataccagtactatactgttttgccttgtagtatagtttgaagttgggtaatgtgacgcctccagctttatgcttaggattgccttggctattcaggctcttttttggttccatatgaattttagaatagtttcccctaattctgtgaaaagtgatgttggtaatttgataggaatagagttgaatctgctggctgctttgggtag

SEQ ID NO: 155221 - DNA, 355 bp, Homo sapiens
gccagctattgcagtgccatttattgactatagagtacttactgtattgcttatttttttgtcaactttrttgaagatcagacgactgtaggtgtgtggttttatttctgggttctctatcatgttccattcatgtatgtgtctgccttcataccagtactatactgttttgccttgtagtatagtttgaagttgggtaatgtgacgcctccagctttatgcttaggattgccttggctattcaggctcttttttggttccatatgaattttagaatagtttcccctaattctgtgaaaagtgatgttggtaatttgataggaatagagttgaatctgctggctgctttgggtag

SEQ ID NO: 155222 - DNA, 638 bp, Homo sapiens
tggttgtttaatctattaaatagacagtgaaatgcacatgaaatcttcacacagtgtctcatagttgcttggaacatatttatgtagtaagcattgttcttggctgagcttacattaagtgatctgtaaattagaagttatttgttatatttgtttcgtttccttattgccctagatgccttttctctggacctagataatttagtctcactctgtggcctttacccttcaataaatatggattattaatataatttagctacataattcctaaggaaatattaattcataaagattgttaaattgaactgaatatctttgctaagtcacasgcattgattaaattagataaaattgtcattttccattgattttgtttatataaataatattgaattatttatattcttatttagtctagtagattgacaggcagttttattaagaaatgaatcaaatggtaaattttgaatcatctggtaaaaatggacaaaatttagttttatcttgtggtctggaaatacaccctaaattattgggtcaagttagtgaaaactgttaaattgattatgaacgtaggcacattacttataaatccccttatgctaacttaaaacttgtgaatgtttagtgttatc

SEQ ID NO: 155223 - DNA, 526 bp, Homo sapiens
agatctggttaattaacgtggtaatgggactccctagaatttaagtccaaagmatggtgtgattttctttgttgagctaccatatattgaagttcaggaaagaaaccacccagttgatatagcaatagtatacaaaacctgctggattatgagaaatttccaacattctttattatgtaagcaaacacttttaatgcttaactgtgataggtttggaacttttttttccaagttgttacacagaaggaaagcaagaaagaaagcatgaaggccaattagaaggatcattcaatatttctcagaaaagagaatgatggcttagaccagtggtgatgttcaaaatcttacaaaggtagaagactagcaacatttgtgactgaattggatacggaagtgtgtgagagagaggagccaaaggtgacttgattcttccttttctgggcaaatggaggaagggagattgtatttatgaagatggaggtctgtgggaggttttgtggggaaagattgggggagttcaattttg

SEQ ID NO: 155224 - DNA, 465 bp, Homo sapiens
aatgtctgttaagtagatccagaaaaaatgaaaggacgtattaactaaaacatcagtattcaaggaacaataaagatagaatttataactgggcttctgagagaggtggacagatttacagaagactgaagctgggaaacacctaaccccagctaagacacaccatgattgtctaatttatgcctgtaccccgwataggtgtcagagtgcctgaaacatcatagatggccattcaatatctgacaaatgataaatgaatggatgaataaatgaaggaaagaaagcttggtggaagggcagtcaggcttcctggagatggggctgggctgcggggggtactatgtagcaattgggtgtccctgggtcttcccacactggctgttttcttggttatgtatgactattccttaggctatgactctttgactttcttgcctgtggtatgaaaattacgcttactatcta

SEQ ID NO: 155225 - DNA, 465 bp, Homo sapiens
aatgtctgttaagtagatccagaaaaaatgaaaggacgtattaactaaaacatcagtattcaaggaacaataaagatagaatttataactgggcttctgagagaggtggacagatttacagaagactgaagctgggaaacacctaaccccagctaagacacaccatgattgtctaatttatgcctgtaccccgtataggtgtcagagtgcctgaaacatcatagatggccattcaatatctgacaaatgataaatgaatggatgaataaatgaaggaaagaaagcttggtggaagggcagtcaggcttcctggagatggggctgggctgcggggggtactatgtagcaattgggtgtccctgggtcttcccacactggctgttttcttggttatgtatgactattccttaggctatgactctttgactttcttgcctgtgrtatgaaaattacgcttactatcta

SEQ ID NO: 155226 - DNA, 600 bp, Homo sapiens
acaaaaacctgatgttaaaaacacagaaaacaagatttaaaaatattaatttagaaatttgagagggctaacttcagtacacattagttttaaaaccttaataaggatatagggaggcagagcaagatggccgaatagaagcctccaccaattaattgtcctgccagcaggaacaccaaagtcaacaactatccacacaaaaaaagcatcttcgtaagaaccaaaaaccaggcgagtgatcacagtacctggttttaattttctatcactgaaaggagcactgaagagagtcggaaactcagtcttaccttgccaacaccgtgcctcctccatcccccagcagggaggagaatctgtgcacttgtkgggagggaaagtgcagtgactgggagactttgcaatggaactcggggctgccctgttacagcagaaagcaacaccgggcagaactcagccagaacctatggaaggagcatttagaccagccctggccaaaggcaaatcatccatcccagtggtcacaacctgagttctggcaagcctcgccaccaggggctaaagtgctcctgtgtcctaaataaacatcaacggcagtctagg

SEQ ID NO: 155227 - DNA, 539 bp, Homo sapiens
caaggcagtacctctacaagtctgcaagggccacagtgttactgggcttgggtgccccttaatgcagatacagctgaagtgaccaaaaacttagatcataataccatactcaactcctttcaaaaacctagaaagccttctcaaaaaggttagatacaaacaagcccagactgtgaagactacaataatacctaacacttgaatgcccagacaccagaaaacatccacaagcctcaaaaccatccaggaaaatgacctcatcaaacaaattaaatagggcatcagtgaccwatcccacagagacagagatatgtgacctttgaacagaaaattcaaaatagctgttttgaagaaactcagtgaaattcaagataacagaaagaagaaattcagaatcctatcagataaatttaacaaagagattgaaataatcaaatacaatcaggcagaaattccagagttgaaaaatgcaattgacataccaaggaatgcatcagggtctcttaatagcaaaattattcaagcagaagaaagaattc

SEQ ID NO: 155228 - DNA, 418 bp, Homo sapiens
taagtaacttgcccaggaccacagagckagcaagcagcagatattacatgcaaatccatctgcttcatcctatggctcacacctttcacagtaagttctgattccatctggtcataccaaccaaggctacattttctaaatttacactccccaaactatctgtggtgaagggtaatttttcccccaaattgtcactgtgtgatattttaatatttccatttctgaatgtcttggcattgtacaattgctataaaagtttctaaatgcctgctctcaagttctgtaaacatcttaccaggaactggtaatgaacagttgtggatgtgcattagtctgggcccacactttgagtagcaccttccacatgatctgtctaacctgtccacccagggacagtgctttgagctgtaatgaccaa

SEQ ID NO: 155229 - DNA, 408 bp, Homo sapiens
aattaagtaacttgcccaggaccacagagctagcaagcagcagatattacatgcaaatccatctgcttcatcctatggctcacacctttcacagtaagttctgattccatctggtcataccaaccaaggctacattttctaaatttacactccccaaactatctgtggtgaagggtaatttttcccccaaattgtcactgtgtgrtattttaatatttccatttctgaatgtcttggcattgtacaattgctataaaagtttctaaatgcctgctctcaagttctgtaaacatcttaccaggaactggtaatgaacagttgtggatgtgcattagtctgggcccacactttgagtagcaccttccacatgatctgtctaacctgtccacccagggacagtgctttgag

SEQ ID NO: 155230 - DNA, 607 bp, Homo sapiens
tctgtaaacatcttaccaggaactggtaatgaacagttgtggatgtgcattagtctgggcccacactttgagtagcaccttccacatgatctgtctaacctgtccacccagggacagtgctttgagctgtaatgaccaacataaaggtctagaaggtgtttctaatatttcaagaattctattaagaaattgcaaaattatccttaataacagttattctgttgcatcccattgggtgcactgcagtataattctgacacttgctactgggagttagtgtagaccccatgtgttaagggctcaggcctccaggagactgccctcgtttcacatgccagctgtgtggatttgcatgtaattatctgctgcttgctagctctgtggttctgggcaagttactcacaagttactcaaagccactcacacttttaactgttcaactaccaatccccagactctaggacacccttcaggtycgataatttgctaacatgactaacagaagtcaggaaagtactagatttatggctatagttttattgtaaaggatgcacacagggtgagatctaggggggatgcagttccaccctctttccctgtggaatct

SEQ ID NO: 155231 - DNA, 570 bp, Homo sapiens
gatagagggggctgcgttggtgccaggaccctgtggcagagtttgctctctctgcccgctgtgctgggaagtagaaagaggcaggatttgtgaggctctctgagcatctttaaaggagtattacaatgcaaagaatgaagactcttcattaggtggagcttaagtggctcctaatgcacargaataataggaaggagtggatttgctgcactgcctcaatttgtgattaggtctcaacttttaataatccaaaagcctccactgcagcctctggagctgcaaaccttctgctgccaattgagagaacattctccaaaatgattaagtctcaaggcaatgtcaaatcctctgctagcaaaatgctacagaaatcacgatctgcatcatgggtctcagtcatcagcatatctgtaacaaatccaggttagagagaggcaagggacatcatcaatgttacagccctggatcatcgttttccttgaaatgaccataagcctaataggaaggctcggctaagcaagagaaaacacatcttttcctctgatatagtatatctgaaatattataatt

SEQ ID NO: 155232 - DNA, 516 bp, Homo sapiens
tgagcatgccctgagatgctctggagagagaagcagcttttcttctgtttgataaagttgatcccaccttgcttttttttttcttttttttttgagacagggcctctctctgtcgcccaggctggggtgcagtggccaggttggtttcaaactcttggcctcaagtgatccgcccacctcggcctcccaaagtgctgggaatccaggcaggaggcaccgcacccagccccacyttgcttaaagactctgtaatagctaccttaatgatatgctaattttcctcatgtcatttctactggacctaaacctataattatatccatttatcccatgaggccaattacaaagtcgaaccctagagaaaacacataccaaaaccaaaaaaaaaaaaaagcttttcaaattttgcttatttactcagaaaacctgagtaatactattcgtgagaatggattctgtggatgatagatcatgctagattgggctacattgtaacaagaattcactttagagatt

SEQ ID NO: 155233 - DNA, 516 bp, Homo sapiens
tgagcatgccctgagatgctctggagagagaagcagcttttcttctgtttgataaagttgatcccaccttgcttttttttttcttttttttttgagacagggcctctctctgtcgcccaggctggggtgcagtggccaggttggtttcaaactcttggcctcaagtgatccgcccacctcggcctcccaaagtgctgggaatccaggcaggaggcaccgcacccagccccaccttgcttaaagactctgtaatagctaccttaatgatatgctaattttcctcatgtcatttctactggacctaaamctataattatatccatttatcccatgaggccaattacaaagtcgaaccctagagaaaacacataccaaaaccaaaaaaaaaaaaaagcttttcaaattttgcttatttactcagaaaacctgagtaatactattcgtgagaatggattctgtggatgatagatcatgctagattgggctacattgtaacaagaattcactttagagatt

SEQ ID NO: 155234 - DNA, 479 bp, Homo sapiens
ctccttacacaaaatcactaaacaagcaaataatgggtaggggcaggggggaggrgcagtgttaccattttatctgaggtcattgatcctgagcatcaagggaaaataggatttgtactacatgaaacaggcaggtaggaatgtttggaaattaggggatcctctgagggctcttctcatactgccttgtttaatggtgaaagttaccaaaggactagagcaaccctagagaagtagaggaccatcaagggctccaatccctcaagaataaaggtttgggtcactccaccaggtaaagccaaaggtgtggctaagggcaatgggaacaggagataagtaaaggtcaactatggccttatttttctccttccttggtgggttttaaatatataagtatgtatactaattctttttatgccccttcatccttctccaattattctatataattggtcagttacttttacaatttatatata

SEQ ID NO: 155235 - DNA, 479 bp, Homo sapiens
ctccttacacaaaatcactaaacaagcaaataatgggtaggggcaggggggaggggcagtgttaccattttatytgaggtcattgatcctgagcatcaagggaaaataggatttgtactacatgaaacaggcaggtaggaatgtttggaaattaggggatcctctgagggctcttctcatactgccttgtttaatggtgaaagttaccaaaggactagagcaaccctagagaagtagaggaccatcaagggctccaatccctcaagaataaaggtttgggtcactccaccaggtaaagccaaaggtgtggctaagggcaatgggaacaggagataagtaaaggtcaactatggccttatttttctccttccttggtgggttttaaatatataagtatgtatactaattctttttatgccccttcatccttctccaattattctatataattggtcagttacttttacaatttatatata

SEQ ID NO: 155236 - DNA, 454 bp, Homo sapiens
aaaacaatcatcatttgcagatgacatgatgttgtatatagaaaactcgaaggaatccrctaaaaaaattattggaactaatgaacaaattcaatttgtttcaaggatacaagatcaatatgcaagtcaagtatatgaactatacacttgcatgaacaattcaaaaatgaaattaagaaagcaattccattcatagtaacatcaacaaaaggaataaattgaagaaaagtgcaaaacttatactcaaaaactataaaaaaatgtttggatctaaataaatggaaaaatatcccatattcatggactgttagacttaatattgttaacacagtagtatttcccaaattgatctttcagattcaaccaatcactgatagaatcccagctaacttcttgtagaaactgagaagctaattctaaaattcatatgggattgcaaggaacccaaaatagc

SEQ ID NO: 155237 - DNA, 564 bp, Homo sapiens
tgtgatatatctaaaagtctttttgtttaattgataaaagcaatgtgtctcatttttatgtttttgtttttattgcctttgtaaatattttattatatagaatctgctgtatttgtgttgtatgtttcttctcataattaaaaacatgtgtgtttttatcctagaggctacttttataattcaracttcatcagataccctataactctatattcgtaagatctatcagttccctcctgtgatcagtaaaaataatgacacaggattttcatctttgtcactttgcaagccggggacctctagccagtgacaccctgcctgggccttgcttaaccacactacctgctgcaggagatagccctcccacttggcctgcctggggccagccccgacttgcgcacttcttgagttctccagttcttgtcctgtgccaagaagaatgaggatgtgctgacaatcagagtgagcaaggtggggagttttattgagtgatgaaacagctttcaatggagaggggacatggcggcgggggggggggtctccctacctgaaggcgagagagtc

SEQ ID NO: 155238 - DNA, 514 bp, Homo sapiens
gcaggttgtttctgctttttggttatgctgctgtgaacatgtcattgtgtggacatatgttttcatttctcttgggtatacatctagaaacggaattgcttggtcatatggtaactctatgtttgtttaacatattgaaggatttccagaccaaagcgtctgcctcattttaattctcctcagcaggatgagagttccaatttcattcacatttttatttgtctttctgattataaccacccaagtgggtgtgtagttgtatggttttgatttctatttcttaatgactaatgatattgaacatctttttagatacttattgacaatttgtttatcttctttggagaaatgcctattcagatgctttgccaatttttcaattggattgtttattttttattattgagctttaagggttccttattctagatactcatcctttattagacatactttttgcaaatattygctcattctatggggtgtcttttcactttcctgatggtttcacttg

SEQ ID NO: 155239 - DNA, 514 bp, Homo sapiens
gcaggttgtttctgctttttggttatgctgctgtgaacatgtcattgtgtggacatatgttttcatttctcttgggtatacatctagaaacggaattgcttggtcatatggtaactctatgtttgtttaacatattgaaggatttccagaccaaagcgtctgcctcattttaattctcctcagcaggatgagagttccaatttcattcacatttttatttgtctttctgattataaccacccaagtgggtgtgtagttgtatggttttgatttctatttcttaatgactaatgatattgaacatctttttagatacttattgacaatttgtttatcttctttggagaaatgcctattcagatgctttgccaatttttcaattggattgtttattttttattattgagctttaagggttccttattctagatactcatcctttattagacatactttttgcaaatatttgctcattctrtggggtgtcttttcactttcctgatggtttcacttg

SEQ ID NO: 155240 - DNA, 647 bp, Homo sapiens
tgctgaattgcacttcaactgccttacatggtgcaaaacagaacatatgatcatcccatcactcctgtgccgtcgggttatgttcagctgtcaggtttgttggtttcctaaatcaaccagtcatagaccatcacctaaaatatttttcactgtcaagttctagagcataaaattagtctttattgctttgaccattactgattttgaaggcygaggaatgatcacatagaaaaggcaacagagcctggaccagaagggctcccagatgaaatgcattttggctgatggctttcattggaacactgacatgaaggagctgtcagggctctgggcggtttccctagggtgtgaaggccaggcaggtcatgtggttacttttcatcctctgcactacttcctgagagctggacagtgtcattgagtttgggcccatggacaacgcatacaagggaaatcttggaactgcctgaccgttgttcagggcctctggtgctgaaatcctgcaaatctccaggacagaagtcaagatgttttctgagaagtctccaaagtctctccaatgaataagaaaataaagtcaagctagtggcttctccttcgaatgatacctggttttattttttttaatttctttttttcatcaacgt

SEQ ID NO: 155241 - DNA, 647 bp, Homo sapiens
tgctgaattgcacttcaactgccttacatggtgcaaaacagaacatatgatcatcccatcactcctgtgccgtcgggttatgttcagctgtcaggtttgttggtttcctaaatcaaccagtcatagaccatcacctaaaatatttttcactgtcaagttctagagcataaaattagtctttattgctttgaccattactgattttgaaggccgaggaatgatcacatagaaaaggcaacagagcctggaccagaagggctcccagatgaaatgcattttggctgatggctttcattggaacactgacatgaaggagctgtcagggctctgggcggtttccctagggtgtgaaggccaggcaggtcatgtggttacttttcatcctctgcactacttcctgagagctggacagtgtcattgagtttgggcccatggacaaygcatacaagggaaatcttggaactgcctgaccgttgttcagggcctctggtgctgaaatcctgcaaatctccaggacagaagtcaagatgttttctgagaagtctccaaagtctctccaatgaataagaaaataaagtcaagctagtggcttctccttcgaatgatacctggttttattttttttaatttctttttttcatcaacgt

SEQ ID NO: 155242 - DNA, 606 bp, Homo sapiens
tagttccttttcattagtgggttttctcattgcttcagttcaactctgagcagttcctgggactattagagactgtagtagaggtcatgggcgtcatggatgtagggaatcatmatttcttgaatatctactgtgtgctgatagcatgcttagcatatatatataaaatatgtatataattatatataatttaatatattataatgtataatttcacatcattataattacacaaactataattaatgtacatatataatttaatccttacaataaggctgtgaagttctatcccattttacaaataaggattttgagacaaaaaggagtctaaataattggccccctaaggtcaaacacctagtaaataatagagcgctaattcgaaaacagattttttggaatacccaaacacttatttctttcctgagcatgtgcccatgaaaggatactagacagggtaagagtgtataagttctcaccgttgccccagttggatataaaggcaggaactgaacacagtctaaaattcaaagtcttggggccaatgtaaagaatcagagccaagaagggatcatccgtgacagcatctgatgaaatgtatgg

SEQ ID NO: 155243 - DNA, 592 bp, Homo sapiens
tcatacctgctgctatgtggtggaagttgcttatcttgctcatcttttactccatttagaaagtaacaccatctctcccccatgttgactaccactcaaaacaaccactctaaaaaagaagcayggatttcattctccaaaggcaatgaaagtttggtcactaaatatagaaaatgcttccccataaggcacactagtcgtctgctttcccttgggtgatttccactgggattctgtaccaaaagtcagtgttggttgatcagagttccctctgtcgcctgacaatccacatgcattagccaagaggtggcgtcgcagcatgatgctcccaaattctccatctgtagggcgatctcatttgcaaactctactagagggcctagatgcaaagctctgtaactttctgcactcactatttccatgggcatttgttccccaaacacaatgcacctctcctttacatgataatcttctcctgagtgtagtttcatggacttaaggactttcagatgattttggtcacttaattctcctggcacctggaagagataatgcagatgtttaatcagtcagcccacatggtctgcaacat

SEQ ID NO: 155244 - DNA, 552 bp, Homo sapiens
ttatatatgcatgtatacctatgcatacataatcataggaaatatacattttgtgtcttaatttttgatcagtattttgtaaacagtttttcttcacctctgtggtggaaaatcatgtttcagccccaggccctttgcaatatcatttccctcatggtttggtttgtaactttagtgaagtctctaatcaaatgtcagctcatcagagaggctgtcctgaccaccttatctgaaatagcccctgttctcacaccactccttgtctttctcttttgttactatgcaaatggactctgatcattacctaatagcatgtcataggcttatttacttgtgtgtcatcaattttctccatatccattctccccaacacccctctctggccaggagaatgtaggcagtgtgaagatcaagatgttgttttgttctctgacacatccctaagacctaggacagtgcctggcatattgyaggtgctcgacaaatgttcatttctgatggaatggttccatgttgaacatttcaattaactgtatgataaatcatgtagct

SEQ ID NO: 155245 - DNA, 577 bp, Homo sapiens
actataattgttgttattataattattattatcataatcctaatttatagattaggaaactgagacaagttgcataagaaaagtaaggttatgaaagttttaagtggtggaacagataggatctcaggtctaactccaaaaactacatatacccttatccattatgctgattctccctaaggccatgcagattacatgcgttccattgattaataattgtatgctctatcatggattctatrtcataattgtatagaagcatacattactggtctagttcccatagtacacttcaagcatcagcatactgttactgaatcagcatactcatcaacatacaagaatcagcatactcatcaatcacagggtacaggtattaaataaatattttgcaagtttactcttgaatgtcttcaaaagtctttaggtaagtataatcttattaattcataattagaacatcctaaagacttaacattatttactctattacctttgaaccacctcccttaaaagacagtgaattggttagaataagttgtggcagctgctataataaacaacccgtcaagcccca

SEQ ID NO: 155246 - DNA, 577 bp, Homo sapiens
actataattgttgttattataattattattatcataatcctaatttatagattaggaaactgagacaagttgcataagaaaagtaaggttatgaaagttttaagtggtggaacagataggatctcaggtctaactccaaaaactacatatacccttatccattatgctgattctccctaaggccatgcagattacatgcgttccattgattaataattgtatgctctatcatggattctatatcataattgtatagaagcatacattactggtctagttcccatagtacacttcaagcatcagcatactgttactgaatcagcatactcatcaacatacaagaatcagcatactcatcaatcacagggtacaggtattaaataaatattttgcaagtttactcttgaatgtcttcaaaagtctttaggtargtataatcttattaattcataattagaacatcctaaagacttaacattatttactctattacctttgaaccacctcccttaaaagacagtgaattggttagaataagttgtggcagctgctataataaacaacccgtcaagcccca

SEQ ID NO: 155247 - DNA, 485 bp, Homo sapiens
gcacactaaaaatactaacaccctttactaatgctagtatcacctgtatggaagcgtgaacccagtgtcatttgccaacaccctcctagaaagttgtgtttcagaagttttaaattttagaaaggtaatgtatttcatatattgaatattatgtcactcccggtggggtttctggcagcaaaggtagtgataattctgcagcacagctaagttgcataaatgaagttaaaaacamcttcattaaagataagaaatacaaagttagcctcaggtttatttagtttgggttttgtgattaaataaattatttatcattttgattttcagagcttttacatagccgtgaattgaagaaggatgattgtggacctctggtaatagaattcccatttattgagcacttgctttgtatcaagcactgcactgagcctgattactctactggaattattttatttaattttctctccagtatcataggtaga

SEQ ID NO: 155248 - DNA, 359 bp, Homo sapiens
tatactcccttgagcccccttggcttcctgtgacttgacgactgcttctcaagcccttttgtgggctccagcggaaatgaagtaaagccctttgaagccaaagaaggttctgggagagtgtttggcaccaggtgaagagatcactttccaattgccagtgaaatatttgcctcaggcatgggaagggaatgaggcttgtttctttaccttcagttagttttcayagagaaaaatagtggctcaagctttaaaaacattggctggtgatttggcttcatgggaattccctcatcctaaatagataaaataatatagctacagaaagctaatagccattctcagcatgaatagtaccgaat

SEQ ID NO: 155249 - DNA, 622 bp, Homo sapiens
gacccaagctctgatatgttccctgactataaactcctgagtgccagaggccatgaccttgacttccyatattcaatttatttctggctgcaaaaaaatcgtgcccagagtcaagccatggtaatatgtaataacgttatgtttcagttggttaatttttgcttcctttaaacactgaagactcaagcaccaaattgtttcaattatttaaaaaataaaccaatgctcaggttagtacagttctttatttatttgatacgaataaatgaagaaactgttggcagttgctcacttcgacagtgaatagggtttggcttgttgactgagtggcgaaggatttggatatgaatattttcagttggcagtaaggaggagaaagaattttctattttctttttgacattgtgagtataagaaatgctttgtgctgttatcctgacaaccttacaaatcaaaataagaaagaaatggtaacctacagctttcagtggaagataataagtgggggaaaagacaagtatattttcattctcaaaagggtaaaatctgtcagtaggaggaagaggaactctcattttgaggttaaagtataaaatattaacttcaaatagcttcacatgca

SEQ ID NO: 155250 - DNA, 622 bp, Homo sapiens
gacccaagctctgatatgttccctgactataaactcctgagtgccagaggccatgaccttgacttcccatattcaatttatttctggctgcaaaaaaatcgtgcccagagtcaagccatggtaatatgtaataacgttatgtttcagttggttaatttttgcttcctttaaacactgaagactcaagcaccaaattgtttcaattatttaaaaaataaaccaatgctcargttagtacagttctttatttatttgatacgaataaatgaagaaactgttggcagttgctcacttcgacagtgaatagggtttggcttgttgactgagtggcgaaggatttggatatgaatattttcagttggcagtaaggaggagaaagaattttctattttctttttgacattgtgagtataagaaatgctttgtgctgttatcctgacaaccttacaaatcaaaataagaaagaaatggtaacctacagctttcagtggaagataataagtgggggaaaagacaagtatattttcattctcaaaagggtaaaatctgtcagtaggaggaagaggaactctcattttgaggttaaagtataaaatattaacttcaaatagcttcacatgca

SEQ ID NO: 155251 - DNA, 389 bp, Homo sapiens
ggctaatggtggtatagacaagtatattcatacaagtagmgagaagagataagatctaagatggactttggtggtagaaccaacaagacttgctcctggattggatatgatggataaggaagagtaaaaatcaaaatgatttctagaaatactactcagctaaaaaggaggggactagctatacacacaacaaccttaatgaatttccagggaattacgctgagtgaataaaagttacttcccagccgggcgcggtggctcatgcctgaaatcccagcactttgggaggctaaggcaggtggattgcctgaggtcaggagatcgagtccagtctggccaacatggtgaaaccccgtctgtactaaaaatacaaaaaaattaacagggca

SEQ ID NO: 155252 - DNA, 389 bp, Homo sapiens
ggctaatggtggtatagacaagtatattcatacaagtagcgagaagagataagatctaagatggactttggtggtagaaccaacaagacttgctcctggattggatatgatggataaggaagagtaaaaatcaaaatgatttctagaaatactactcagctaaaaaggaggggactagctatacacacaacaaccttaatgaatttccagggaattacgctgagtgaataaaagttacttcccagccgggcgcggtggctcatgcctgaaatcccagcactttgggaggctaaggcaggtggattgcctgaggtcaggagatcgagtccagtctggccaacatggkgaaaccccgtctgtactaaaaatacaaaaaaattaacagggca

SEQ ID NO: 155253 - DNA, 642 bp, Homo sapiens
attttagcaatcagaatgttcatatctgctgattccatatatctcagatatttctaaatagtcttaacattttaatcaaataacctttcctgtatactacatgcagatgcctattacaattcaatgtctgccttctttcgttatatttccagctcatttagtcaacacacattttcttcatccctcttctgagccagacacagtgctagattctgagggtaaaacaaaacaaaacaaaaatractaaaatactgttcctatgtaaaggaactcactggttggtagaagggacagataggtcaaaacttagaattctgctgcagtgtgataagtacaaccatagagatgggttatgaactattaatggagtagtttaattagattaaaatatatacgtatcttacatctaagtgttttctatgtctttttgtaaaataattattgtttcttggagtatgtatcttcagaagatgactttttcctgaccttattctcttgctcttgagggaccttattggaacttcctatgattacacctaatgcctgtgtgagaatttccagaagcctcaatcctgctgtcatcctcattaaagaatcacctggagagaagatgcctttggagaactttaatccccttctttc

SEQ ID NO: 155254 - DNA, 642 bp, Homo sapiens
attttagcaatcagaatgttcatatctgctgattccatatatctcagatatttctaaatagtcttaacattttaatcaaataacctttcctgtatactacatgcagatgcctattacaattcaatgtctgccttctttcgttatatttccagctcatttagtcaacacacattttcttcatccctcttctgagccagacacagtgctagattctgagggtaaaacaaaacaaaacaaaaatgactaaaatactgttcctatgtaaaggaactcactggttggtagaaggracagataggtcaaaacttagaattctgctgcagtgtgataagtacaaccatagagatgggttatgaactattaatggagtagtttaattagattaaaatatatacgtatcttacatctaagtgttttctatgtctttttgtaaaataattattgtttcttggagtatgtatcttcagaagatgactttttcctgaccttattctcttgctcttgagggaccttattggaacttcctatgattacacctaatgcctgtgtgagaatttccagaagcctcaatcctgctgtcatcctcattaaagaatcacctggagagaagatgcctttggagaactttaatccccttctttc

SEQ ID NO: 155255 - DNA, 589 bp, Homo sapiens
aagcctgcatttttttggacagtttatgtgatccattcgtttatttaatggaaacaaaattaagcaaactgagaatacaaagaaagtcaaattagctaggtggtatcatatagataaaactgaaatttttggtcaacatggttggttaacttccccaaccacttgcttcaaacactgcgctgctgaatagatataacaaccctgaaaacaggcatatacacatatctcagtttgaaacaaaaaaagaaaactacatggtaccagaaatgaagaaagtcaatccaaaacttgagcagtgaattggagctaatgccaaatggcccataaagttactgagcctggatactctcctaaattactgaggttttaacctaagagtagagagttgagaagtaacrcagaagttgagtttgcaggcctggtggcatgggaagctacaatttcaatctcaacttaaaactgagagcctagaagggactataaaagttctttccattggaatggagatttagggagaaaaatgggctgcctgtcctaagtcatggtcgaaaactaataatcttggaaaaatctaaaccaatactatgtg

SEQ ID NO: 155256 - DNA, 590 bp, Homo sapiens
caagcctgcatttttttggacagtttatgtgatccattcgtttatttaatggaaacaaaattaagcaaactgagaatacaaagaaagtcaaattagctaggtggtatcatatagataaaactgaaatttttggtcaacatggttggttaacttccccaaccacttgcttcaaacactgcgctgctgaatagatataacaaccctgaaaacaggcatatacacatatctcagtttgaaacaaaaaaagaaaactacatggtaccagaaatgaagaaagtcaatccaaaacttgagcagtgaattggagctaatgccaaatggcccataaagttactgagcctggatactctcctaaattactgaggttttaacctaagagtagagagttgagaagtaacacagaagttgagtttgcaggcctggtggcatgggaagctacaatttcaatctcaacttaaaactgagagcctagaagggactataaaagttctytccattggaatggagatttagggagaaaaatgggctgcctgtcctaagtcatggtcgaaaactaataatcttggaaaaatctaaaccaatactatgtg

SEQ ID NO: 155257 - DNA, 357 bp, Homo sapiens
atttgttccaatgcaactaatctttagatagctagwgccaaaaaagcagcattcataatattgtcctcagtggctttccttttgaaactgtggtgccaggaaaaatgatttactgccagcctggactgagacttgagctttgtagaaaagatttattggtatcaacttagcataatgccataatcatcctgaaaatacatctgtcactataaacccttattgtcaggtgcctgacactttccataaaactatgcttcaagtggaaaagtgatttggatttcacatcctttattgcaatgtttcttgatcatttaaaagtctatcatttctatgaactttctggatacactagggcag

SEQ ID NO: 155258 - DNA, 277 bp, Homo sapiens
gggaccccagtcccaacgaagactaagaagctgaaaacattcctcagtatcaatgacagtccctcagatttgaccagagtttaaagtgctaaatgcacttaaggtagcttgaaattaccatttatcatatttgttaacttgtcaagatatasagactttaaaactgtgcacaaattaattagtccatcatttattcttatctttgccacaaatcaaaggagttcaaaagtcaacctaatggcatttgtgcatttcaattgattccaaatgtaggatt

SEQ ID NO: 155259 - DNA, 549 bp, Homo sapiens
caagttagttacttgcaagttaaaatgagggtatagacattgggtaaatattcccattccaaaggggagaaattggccaaaataaarggtctatgggccccatgcaagtccaaaacccagtggggcagtcattaaatcttatagctccaaaatgatctcctttgacttcatgtctcacatccagggctggctgatgcaaggagtgggctcccacagccttgggcagatccttcacaggctggcattgagtgcctgcagcttttccaggttcatggtgcaagctgtcagtggatctacatttctgaggtctgaaggatggtggacctcttctcacaactctgctagtcagtgccccagtggggactctgtatcggggctccagccccacatttcccttccacactgtattagcagaggttctctgtgagggttatgcccctgctgcagcctgctgcagacttctgcctggacatccaggtgtttccatacatcctctgaaatctaggcagagattctcaaagcttttttgtcttctgtgtactcacaggc

SEQ ID NO: 155260 - DNA, 572 bp, Homo sapiens
tttttgtttttttttttgtcattccttttttttttctttgcttttcagtttgggaagtttcttttgatgtattttcttgctcactgatttcttcctcagttatgtacattctttcagtaagcccattaaactcttcatttctattacaacattttttatttttagcattttcttttgcttctttcttatttcctatctctctgcttgtattacccatctgttcttgcatgttgtcccctttttaactataccttttaraatattattcataattattgtaaattcctggtttgataattgcaaaatctctgccatatctgagtatctgagcctggttctgatgcatgctttctctcttcaaactgtttttatttttatttttattttttgtttctttttttttgtttttttgcatttgttcatgctttgtaatattttgctgaaagtcaagaatgatgtatcaggtaaaaggaatcaaagaaaatgggtcttaatgtgaggttttatgtttgtctagctaagagttaggttctgtttactgtatgctgtagctgcaggtgtcaggggctaaa

SEQ ID NO: 155261 - DNA, 563 bp, Homo sapiens
attcgcgccaatagtttcgtgtgttctgggctttctttacatgcctatatttgtctttggaggggttcctctcctacttagtaataaaccaatacatttcttaaacatcttaaaagattgacttggagactggtgcagataggcttttccatccatccctccctctgcacctccttccaatcatttaacagacttgtattgaagacctgctgttggctagacccagcagaggatactgcagtgaccagaaaaagccagacaaagcatctaccatcctgggctttggttggcgttgactttgacttcagagacagccaggaccttagggtctaggatgtcatctcatgtgagagtgagagacggaatgatgcgtgttccgtgggaaaaagaggaccaacagctacttcccagtataaagagagttcctggggaataaacactggctttgtcggctgcacaggtctcctttttttttgagacggagtttcgctcttgttgcccagggtggagtgcagtggcgtgatctyggcccactgcagcctccgcctcgggggttcaagcga

SEQ ID NO: 155262 - DNA, 459 bp, Homo sapiens
ttttttttgagacggagccttgctctgtcacccaggctggaagagttgaggaagaaatcggtgctctccctggatatggggaggaaagtgtctgaagtggtttcttaagtctgggctgctccctgccaccagctccctcccscttggcctccacaaagcctcaatttggccccagaacccacacgtctcagctcctgtcagtctctgaaagtgctcttgaatcaaagtcattagcaaagggccagctggctgtgtgaggggccatgggctttcacaggcagtgaccacaggaggcccctgccaaactcacatcctttaccaactcaggaccctctgtttccacaacaggacagacgccctgctcaaaagatactctcagggtcccccaggcgagcacgtctggatttctgagttattgagccaaagaaatgtttatgttgcctttggctttttcacgct

SEQ ID NO: 155263 - DNA, 459 bp, Homo sapiens
ttttttttgagacggagccttgctctgtcacccaggctggaagagttgaggaagaaatcggtgctctccctggatatggggaggaaagtgtctgaagtggtttcttaagtctgggctgctccctgccaccagctccctcccccttggcctccacaaagcctcaatttggccccagaacccacacgtctcagctcctgtcagtctctgaaagtgctcttgaatcaaagtcattagcaaagggccagctggctgtgtgaggggccatgggctttcacaggcagtgaccacaggaggcccctgccaaactcacatcctttaccaactcaggaccctctgtttccacaacaggacagacgccctgctcaaaagatactctcagggtcccccaggcgagcacgtctggatttctgagttaytgagccaaagaaatgtttatgttgcctttggctttttcacgct

SEQ ID NO: 155264 - DNA, 567 bp, Homo sapiens
ttgttgcagctgcagggctctccctttagccagatggtaggaaccctctaccggggacagaaaacccaattcaaagtggtgcagacaaccgaagcaggaggaatgatttatgcaactaaaaaatctaagggcagctggcrtcaggcaaggctgcatctgggtgttcagtgatgtcacctggactttcctttcccaacccctccctggctctacttccttccctcagtgtgagtgtcatgctcaggtggactggttcccttcaaaagtgatgaggcggcacccacagccccagccacccaacagaaatggaccttctctccctgccactaccagcccttgccctgaccctcaccacctgattggtcacatgcccagaccttagccaatcactgtggccatggaggttggctctgctgattggtcaggccgaggtcatgtggccactgtctccaggggcatttggagctgctcccctgtttgggtgggagatggcgtgatggctgagagagcaggttcagggccaaggctctgcgtcctctgtgcatcacttcctggatgtgcatactt

SEQ ID NO: 155265 - DNA, 330 bp, Homo sapiens
gtatctgcactttgttggtcaattgtagatggtgctaatttgtggggagtttttcctgcaacttccccctgtgccataatccagaggacctccctctgcccccagtgctgtaggctaggcagctatgggcctggctcagggctgtcgggcaaggattggactctctataggttccgttkggttctggttagatcacagagctcaggcaaggaaaagccgacaatagatcagaaggaagttgagcgctcaggaaggaggagtgggcaggatgcttggtggtgtcagaggattccttcggattaaaaaaaatagatgttattgcactttgtg

SEQ ID NO: 155266 - DNA, 513 bp, Homo sapiens
cagagagttgttctgaggatgcaaagagttcttgcatgaaaaattcttaggaaagtgctgcacatagtaggtattcaatagcattagctatttagattggaattagtggctttttgccatttactcctgactgtaggagctgttctctgggccccagatctccattccagcaatgatctctctcctccaactctggcattggaggagtaccacaatcctgcctccaggtttcatttgctgacacccaggggcagcattaggtgtagagtgctggacatctaagggaagaggttcaattgtccatccgtttagttatttactcattattcaatgaatgttaattgagaccagtcagggcagctgagaagcagtgcggttgtgaggagggctgttagtaggggagatgcaggtgctggtgtgcttccctgtatgaatatggcagctagtgcagsgtcatgaagagggaatcagggacactctggggatgttaaaaactctgttgatgtggaatca

SEQ ID NO: 155267 - DNA, 569 bp, Homo sapiens
atctacttggcaactttccaatgtcccacttcaggtgggcacagtgacctcctttgtctggtttttggcaaccatacctatctgttggacctgggcactgcactgacagccagctgacctccctgcctctctgtgtgggaacgtgctgcaaagccacatctctctaattctgtgtgtgtgtgtgtatatatatatatatcttttagagacaagatctcactctgtcactcaggctggagtacagtgaagcaatcatagctcactgcagccttgaacttctgarctcaagtgacccttgacctcagcctcctgaagagctgggactacaggcatgtggcaccatgcctggctaattttaaaatcttttttttggtagagacgagcgtctcactgtgttgtccaggctggtctcaaactcctgtcctccagtgatcctcccacctctgcctctcaaagtgctgggatcattctgaatatgaggtggtgactttttaaaaaaaaactttttttttaacctaagtagaactttgcattatcgctggtgttgtcttttagatttagcccatgta

SEQ ID NO: 155268 - DNA, 569 bp, Homo sapiens
atctacttggcaactttccaatgtcccacttcaggtgggcacagtgacctcctttgtctggtttttggcaaccatacctatctgttggacctgggcactgcactgacagccagctgacctccctgcctctctgtgtgggaacgtgctgcaaagccacatctctctaattctgtgtgtgtgtgtgtatatatatatatatcttttagagacaagatctcactctgtcactcaggctggagtacagtgaagcaatcatagctcactgcagccttgaacttctgagctcaagtgacccttgacctcagcctcctgaagagctgggactacaggcatgtggcaccatgcctggctaattttaaaatcttttttttggtagagacgagcgtctcactgtgttgtccaggctggtctcaaactcctgtcctccagtgatcctcccacctctgcctctcaaagtgctgggatcattctgaatatgaggtggtgactttttwaaaaaaaactttttttttaacctaagtagaactttgcattatcgctggtgttgtcttttagatttagcccatgta

SEQ ID NO: 155269 - DNA, 631 bp, Homo sapiens
taaaccccttggtcaatttacatcatattttctttttaaaaattttatttctaagaatatttcccccctcaatgcaatctcacggaaggtaaaccattcatattatcagtgccacattcactgggatcctcaagaggaatgtggggcagggtctttgaataagtagtcttctggaacctgtttttgtttttaaaccagaaccataagcaagtatagaataaaggccatttttttttagttcctttctgaagaaaatgccttttgtttgaggtgagatgtgatattatcctggttgaaactagaaacttgcatcaatgtctgtagtttttcagaatcattttaatttataatctccttatattcaggaacatcaagaatgtacctagtttartgatatgtggatatagctattaatattctgttttatgccatttgcagctagattcaacctgcaacacactacttggaggctatggggtgattctgaagtaaagacttgtgttttcccagttcctgggcttcttcatgctgaaagtcttgctccatcacctgtcccatattaatttccagagctccttctgaaaagcttgttatcactcaagctattctttcggttccgtctttgaaaaac

SEQ ID NO: 155270 - DNA, 631 bp, Homo sapiens
taaaccccttggtcaatttacatcatattttctttttaaaaattttatttctaagaatatttcccccctcaatgcaatctcacggaaggtaaaccattcatattatcagtgccacattcactgggatcctcaagaggaatgtggggcagggtctttgaataagtagtcttctggaacctgtttttgtttttaaaccagaaccataagcaagtatagaataaaggccatttttttttagttcctttctgaagaaaatgccttttgtttgaggtgagatgtgatattatcctggttgaaactagaaacttgcatcaatgtctgtagtttttcagaatcattttaatttataatctccttatattcaggaacatcaagaatgtacctagtttaatgatatgtggatatagctattaatattctgttttatgccatttkcagctagattcaacctgcaacacactacttggaggctatggggtgattctgaagtaaagacttgtgttttcccagttcctgggcttcttcatgctgaaagtcttgctccatcacctgtcccatattaatttccagagctccttctgaaaagcttgttatcactcaagctattctttcggttccgtctttgaaaaac

SEQ ID NO: 155271 - DNA, 426 bp, Homo sapiens
tgtccttttgcagtgtttcagataccatgacagaaagcacatcaaggaaacatggtttwccacaaagtccttgtttttaaatgtttcctatttgttatccattttcacacactttgaacatggtgtcttctttgttctggagcttgtttacttagattttagcctggaaatgccctttgctgtgaatgctaacaactccgagattcatggcagctgtcagtacctacatcctgggtccaaagaaagtgccctggactggggacccaagaagaggtggctctccatgcacttgagatgcctgtccgccccctcaccctcacctccttcccttggcacccaggcacgctggcctcctttctgcccctgaaacacaatgactctgctaccacttccaggcctttgaacttgccattcctctactacaat

SEQ ID NO: 155272 - DNA, 387 bp, Homo sapiens
accatgacagaaagcacatcaaggaaacatggtttaccacaaagtscttgtttttaaatgtttcctatttgttatccattttcacacactttgaacatggtgtcttctttgttctggagcttgtttacttagattttagcctggaaatgccctttgctgtgaatgctaacaactccgagattcatggcagctgtcagtacctacatcctgggtccaaagaaagtgccctggactggggacccaagaagaggtggctctccatgcacttgagatgcctgtccgccccctcaccctcacctccttcccttggcacccaggcacgctggcctcctttctgcccctgaaacacaatgactctgctaccacttccaggcctttgaacttgcc

SEQ ID NO: 155273 - DNA, 418 bp, Homo sapiens
accatgacagaaagcacatcaaggaaacatggtttaccacaaagtccttgtttttaaatgtttcctatttgttatccattttcacacactttgaacatggtgtcttctttgttctggagcttgtttacttagattttagcctggaaatgccctttgctgtgaatgctracaactccgagattcatggcagctgtcagtacctacatcctgggtccaaagaaagtgccctggactggggacccaagaagaggtggctctccatgcacttgagatgcctgtccgccccctcaccctcacctccttcccttggcacccaggcacgctggcctcctttctgcccctgaaacacaatgactctgctaccacttccaggcctttgaacttgccattcctctactacaataatcttctccagatc

SEQ ID NO: 155274 - DNA, 426 bp, Homo sapiens
tgtccttttgcagtgtttcagataccatgacagaaagcacatcaaggaaacatggtttaccacaaagtccttgtttttaaatgtttcctatttgttatccattttcacacactttgaacatggtgtcttctttgttctggagcttgtttacttagattttagcctggaaatgccctttgctgtgaatgctaacaactccgagattcatggcagctgtcagtacctacatcctgggtccaaagaargtgccctggactggggacccaagaagaggtggctctccatgcacttgagatgcctgtccgccccctcaccctcacctccttcccttggcacccaggcacgctggcctcctttctgcccctgaaacacaatgactctgctaccacttccaggcctttgaacttgccattcctctactacaat

SEQ ID NO: 155275 - DNA, 418 bp, Homo sapiens
accatgacagaaagcacatcaaggaaacatggtttaccacaaagtccttgtttttaaatgtttcctatttgttatccattttcacacactttgaacatggtgtcttctttgttctggagcttgtttacttagattttagcctggaaatgccctttgctgtgaatgctaacaactccgagattcatggcagctgtcagtacctacatcctgggtccaaagaaagtgccctggactggggacccaagaagaggtggctctccatgcacttgagatgcctgtccgccycctcaccctcacctccttcccttggcacccaggcacgctggcctcctttctgcccctgaaacacaatgactctgctaccacttccaggcctttgaacttgccattcctctactacaataatcttctccagatc

SEQ ID NO: 155276 - DNA, 426 bp, Homo sapiens
tgtccttttgcagtgtttcagataccatgacagaaagcacatcaaggaaacatggtttaccacaaagtccttgtttttaaatgtttcctatttgttatccattttcacacactttgaacatggtgtcttctttgttctggagcttgtttacttagattttagcctggaaatgccctttgctgtgaatgctaacaactccgagattcatggcagctgtcagtacctacatcctgggtccaaagaaagtgccctggactggggacccaagaagaggtggctctccatgcacttgagatgcctgtccgccccctcaccctyacctccttcccttggcacccaggcacgctggcctcctttctgcccctgaaacacaatgactctgctaccacttccaggcctttgaacttgccattcctctactacaat

SEQ ID NO: 155277 - DNA, 593 bp, Homo sapiens
caggacagctgtccctccttattcaggccttatctcctccccaagacacacacatgcatgcgcacgcgtgcgtgcgcacacacgcgcacacacacacacacacacacttgtcgagacccagtaatctaccctgmttctttggtggtgatggtaattgctttggaaactcttataaaaatgaaattaccctgtgtatttattagttaggtgctcagcatctctcttcctggtaaaattttagttctgtccagagcaggaaacttaaccattctcttctcagtcatgtgcccataacaatgtccaacacactgtgtaaacatctgttcaaatgcactgcattgaatccagttgaagtgatttcaaaggaaataaatgaaactgttaaaagatggatatgtttttggcttgagggctcattcaaaaggaacaaagctgctaaaattaagtattggccatgaattactctagactttcaatagaaaagaacatccaccaggcatggtgacttgctcctagagtcccaggtacttggaaagctgaggtgggaggatagtttaagctcaagagctgaaggctgcagtgagctatgattg

SEQ ID NO: 155278 - DNA, 593 bp, Homo sapiens
caggacagctgtccctccttattcaggccttatctcctccccaagacacacacatgcatgcgcacgcgtgcgtgcgcacacacgcgcacacacacacacacacacacttgtcgagacccagtaatctaccctgcttctttggtggtgatggtaattgctttggaaactcttataaaaatgaaattaccctgtgtatttattagttaggtgctcagcatctctcttcctggtaaaattttagttctgtccagrgcaggaaacttaaccattctcttctcagtcatgtgcccataacaatgtccaacacactgtgtaaacatctgttcaaatgcactgcattgaatccagttgaagtgatttcaaaggaaataaatgaaactgttaaaagatggatatgtttttggcttgagggctcattcaaaaggaacaaagctgctaaaattaagtattggccatgaattactctagactttcaatagaaaagaacatccaccaggcatggtgacttgctcctagagtcccaggtacttggaaagctgaggtgggaggatagtttaagctcaagagctgaaggctgcagtgagctatgattg

SEQ ID NO: 155279 - DNA, 593 bp, Homo sapiens
caggacagctgtccctccttattcaggccttatctcctccccaagacacacacatgcatgcgcacgcgtgcgtgcgcacacacgcgcacacacacacacacacacacttgtcgagacccagtaatctaccctgcttctttggtggtgatggtaattgctttggaaactcttataaaaatgaaattaccctgtgtatttattagttaggtgctcagcatctctcttcctggtaaaattttagttctgtccagagcaggaaacttraccattctcttctcagtcatgtgcccataacaatgtccaacacactgtgtaaacatctgttcaaatgcactgcattgaatccagttgaagtgatttcaaaggaaataaatgaaactgttaaaagatggatatgtttttggcttgagggctcattcaaaaggaacaaagctgctaaaattaagtattggccatgaattactctagactttcaatagaaaagaacatccaccaggcatggtgacttgctcctagagtcccaggtacttggaaagctgaggtgggaggatagtttaagctcaagagctgaaggctgcagtgagctatgattg

SEQ ID NO: 155280 - DNA, 385 bp, Homo sapiens
gtgaaacgaaagcaaggcacaaaacagtgtgcctccttttgtgtaaaagggggggaaacatgaatgtatttatgcatgtttatatttgcataatgaaattctgaaggatagactgatacaataaaactaattacttgattcaagaggtgattgattgggaatgtgtaatctgaaaagactagtgatataaaagcagacaaaattaagctttccttcaccaagaacacagaagcaaacatttcccaaggagcaattaagaaagaagaataagcagtgggttttgtctttgaatgacatttccctacagatttacacaacrgcggacggccaaaggaagatggagctaaggggaattggcaaggagaaggcagagctcagaggctta

SEQ ID NO: 155281 - DNA, 565 bp, Homo sapiens
cagaagcattgtcagggtggagaaggactctctgctgaattcttcagtggcatttttctgctaaagctttggctaactttctcaaaacactctcataataaacagatgttatcattctttggctctacagacagtcaacagcaaaatgcctggagtatcccaaaaaactcttgctgtgacctgtgctcctgactggtctgcttctgctttgactggaaaatgtccacctcttggtatccattgctttgattgtgctttgtcttcaggattgtactggtaaagctatgtttcgtctcctattacarttatttgaagaaatccttcaggatcttcatcctacttgtttaattttcattgaaagatctgttcttgtctgcagctgatctgggtgcaatggttttgacacccattgagtggaaaacttacttaactttaatttttcagtcagaattgcataaactgaaccaactgaaatgtctgttaatcatcaggtcttttcaattagggcatggttaattttttccttgcaaattgacatgaatggtctgccaccacaggcttcatc

SEQ ID NO: 155282 - DNA, 572 bp, Homo sapiens
aagcaaatctttggcctcagcagcacagaggcctcctgagtaggggggaggggtatggagaggctgcagtgtcctgggaagggcctgtgcccatgaagtgggcttcatccccactttgtgcagtttgtgcagaaagatagcctcagacaaagtccagagtggcagcaaaaccctgaagttcccttggagaggcaggctgcgcaaatgcctatttggtgattcagaatcaacaagccaggcccaaatttacatgggctccctccaggatgggtgagagctcccaagagcttcatgggaggtccmagtgggtggctgtggcctggagagagtaggattgaagcagagctggggtggagtcagaacaagagacaacagcagtgaacagcaggctctgacaaccaaagaccagaaaggagagcatctcccagcccccaaggggagcaatgccagcccccagcatcagacacatctgcaggaaaagcaggggacttcagctaaccaagaataatgttcctttacccagacagaattgagcctgggaaattagataacgctaaagggaagccaacatg

SEQ ID NO: 155283 - DNA, 572 bp, Homo sapiens
aagcaaatctttggcctcagcagcacagaggcctcctgagtaggggggaggggtatggagaggctgcagtgtcctgggaagggcctgtgcccatgaagtgggcttcatccccactttgtgcagtttgtgcagaaagatagcctcagacaaagtccagagtggcagcaaaaccctgaagttcccttggagaggcaggctgcgcaaatgcctatttggtgattcagaatcaacaagccaggcccaaatttacatgggctccctccaggatgggtgagagctcccaagagcttcatgggaggtccaagtgggtggctgtggcctggagagagtaggattgaagcagagctggggtggagtcagaacaagagacaacagcagtgaacagcaggctctgacaaccaaagaccagaaaggagwgcatctcccagcccccaaggggagcaatgccagcccccagcatcagacacatctgcaggaaaagcaggggacttcagctaaccaagaataatgttcctttacccagacagaattgagcctgggaaattagataacgctaaagggaagccaacatg

SEQ ID NO: 155284 - DNA, 490 bp, Homo sapiens
attcctcactcactgtgggactggacacagcctttcagggcatctccaaatagaaccaagatagtgaggtagggggcgggactcaactccagaggctgggctcagacactggaccaaattgagagctagctgaaacagggccagggcagaagyagctttccataagacatgcccaccagtgtgccatgtcagtttaccatcgccgtggcaacacctgagagttaccacccctttctatggcagtaacccaatgacccggaagttaccacctttttcctagaaatgcctgcatcaactgccttttaacttgcatgtaattaaaagtgggtacaaatatgactgctgaactgcccctgagctgctactctgggcacactgcctgtggggtagccctgctccacagggagcagtacagctgctgctgcctcaataaaagttgctgtctaacaccaccacttgtgcttgaattctctcctgggcaaagccaaga

SEQ ID NO: 155285 - DNA, 437 bp, Homo sapiens
gggtccccggcagtttgcagcaacactggctgctcaaaaggacagcacgaggcttttcacagcatgtagatgccatggctttatgagagctttgagcttgggagggtctacttgtgcttttgcaaccttagtttagatttcatttgcatctactatttgtaagtgcaccatttttctamgggaagtatgtatgtgagaattatctacatgatttttgtaggtggctcacaaaacaaatgtcagtagccattctatggccttggagtatcatttcccacaccttttctatgggctgtctttatttttgactctaatacgtatcccttatcatacaaaaagttcttgagcatatttgatatattttaaaacttccaccccagtggaattaacactaattatatttaattccacacaaacttttgtcccagttgtagacc

SEQ ID NO: 155286 - DNA, 437 bp, Homo sapiens
gggtccccggcagtttgcagcaacactggctgctcaaaaggacagcacgaggcttttcacagcatgtagatgccatggctttatgagagctttgagcttgggagggtctacttgtgcttttgcaaccttagtttagatttcatttgcatctactatttgtaagtgcaccatttttctaagggaagtatgtatgtgagaattatctacatgatttttgtaggtggctcacaaaacaaatgtcagtagccattctatggccttggagtatcatttcccacaccttttctatggrctgtctttatttttgactctaatacgtatcccttatcatacaaaaagttcttgagcatatttgatatattttaaaacttccaccccagtggaattaacactaattatatttaattccacacaaacttttgtcccagttgtagacc

SEQ ID NO: 155287 - DNA, 390 bp, Homo sapiens
catctctgacattatgatgaagagaatatgtatttcatgacagggcaaatgttgccatccttctgagggaagatgtaaatgaggatgcttttagggatgatttctacattgtcactaaactgagacatttgtgcttgctcgtgccaagtgaagattgctgttgctgttgttctctcgcagtgattarggttcattccctagcaacaggcagcagcagaaaggaagctttgcaggcagagtcaccgaataaacgcagtgggaacagtatcaacaacaaacccagtgatgaagggaggggcatgtggggcacaccacattgcctctctggcttctcgtctgcacctggggccagaggcaggtgggaaggagaccttgacaatgtgggaagtc

SEQ ID NO: 155288 - DNA, 477 bp, Homo sapiens
ggccacactggggatagagggctgccaccctgtcccacagtctcgtgggagcaccaagttggggtggacacacagcccagagcagcctcccacggggggattttccacagaagcatttacccccatttgaatatctctatggtaatggactggatgttcatgttccccaccccctgtccctgccaaatttgcatgttgaagctctaaccccctatgtaattacctttggagatcattaggtttaaatgaggtcatgggggtggggttctcatgatggattagtgcccttataagaaaaggaagggatcagagctctccctgtctccaccawgtgtggacacagagagaaggcggccatctgcaaaccagaaagggagccctcaccagacaccagatctgctgcaccttgatcttggacttccagcctccagaactgtaagaaataaatgcctattgttaaagccccccagtctatgg

SEQ ID NO: 155289 - DNA, 521 bp, Homo sapiens
cttctttcactgtctcctgccaccacgtgaagatgtgcttgctttccctttgcccttctgccatgagtgtaagcttcctgaggcctaccagccatgcttcctgtacagcctccagaactctgagtcaattaaacctcttttctgcataaattacccagtctcagttaattctttatagcagtgtgagaacggactaatgcaacagccagtttctccaaccctccaggctggtctcaaacycctgacctcagatgatctgcctgcctcggcctcccaaagtgctgggattacaggcctgagcgatggtgcccagcccctaattcttaaacaggaagatagagtcatggttacccaacaatgagaaaaatctctcaatgtgagaaactccaaaacaaacaaacagaacacaagagaagcagtggaaatcatgcagaaaccagaaggaaacaaagcaacagtaattaagttttaaattaaaatgcagctacaataaataaactctaccataaagatacagatct

SEQ ID NO: 155290 - DNA, 521 bp, Homo sapiens
cttctttcactgtctcctgccaccacgtgaagatgtgcttgctttccctttgcccttctgccatgagtgtaagcttcctgaggcctaccagccatgcttcctgtacagcctccagaactctgagtcaattaaacctcttttctgcataaattacccagtctcagttaattctttatagcagtgtgagaacggactaatgcaacagccagtttctccaaccctccaggctggtctcaaacccctgacctcagatgatctgcctgcctcggcctcccaaagtgctgggattacaggcctgagcgatggtgcccagcccctaattcttaaacaggaagatagagtcatggttacccaacaatgagaaaaatctctcaatgtgagaaactccaaaacaaacaaacagaacacaagagamgcagtggaaatcatgcagaaaccagaaggaaacaaagcaacagtaattaagttttaaattaaaatgcagctacaataaataaactctaccataaagatacagatct

SEQ ID NO: 155291 - DNA, 589 bp, Homo sapiens
ctaagcctactcaacatctccacgtggatatctgataggcacgtccaaattaagatggccaaaaccaaatctgggatttcacaccacccatctctgtaagtggcactcctcagttactcaaaccaaaaatcgaagggttatgcttgattcatctctctccatcactgccctcgaacccaatccatcyaacaactctatctccaaaacattactcaaacaggtcctcatctttccgtctctgttacactcatcagaccccaaggggacccactgatctcccttgtttccacttggtcctacacaagggcttcacacttagcagtaagagttatcctcagaggctgggcttggtggcacatgcctgtaattcccgcactttgggaggctgaggcagctggatttcttgagctcagaagttcaagaccagactgggcaacatagtgaaaccctgtctctataagaactacaaaaattagccagcagtggtggtgtgcatctgtagttccagctatttgggaggctgaggtgtgaggatcacttgagcccaggaggttgaggctgcagtgagccatgatcacgtcactgaact

SEQ ID NO: 155292 - DNA, 589 bp, Homo sapiens
ctaagcctactcaacatctccacgtggatatctgataggcacgtccaaattaagatggccaaaaccaaatctgggatttcacaccacccatctctgtaagtggcactcctcagttactcaaaccaaaaatcgaagggttatgcttgattcatctctctccatcactgccctcgaacccaatccatccaacaactctatctccaaaacattactcaaacaggtcctcatctttccgtctctgttacactcatcagaccccaaggggacccactgatctcccttgtttccacttggtcctacacaagggcttcacacttagcagtaagagttatcctcagaggctgggcwtggtggcacatgcctgtaattcccgcactttgggaggctgaggcagctggatttcttgagctcagaagttcaagaccagactgggcaacatagtgaaaccctgtctctataagaactacaaaaattagccagcagtggtggtgtgcatctgtagttccagctatttgggaggctgaggtgtgaggatcacttgagcccaggaggttgaggctgcagtgagccatgatcacgtcactgaact

SEQ ID NO: 155293 - DNA, 486 bp, Homo sapiens
tttgcgtctctgacttcctcttctgctttcagccagagaaaaygcgctgcaatttttttttttttttttttttttttttgagacaaggtctcattctgtcacccatgctggagtgcaatggcatgatcacagctcactgcagcctctctgagtagctgggactacaggcatgcaccaccatgtctggctaaatttttaattttttttataggtaaggtctcaccatgttgctagctggtcttgagctcctagattcaagtgattcttccgcctcaggcttccaaagtgttgggatttctggtgtgagccaccacgcctggccaatgccttgcttttaaagggctcacctgactgggtcaggcctactcatctattctccttattttgtggtcagttaacttggactttattatacttacaaaatcctctcgcagtattacctattattagtgtttgactgaaaaagcagagacaggaatcttgggg

SEQ ID NO: 155294 - DNA, 484 bp, Homo sapiens
tttgcctggcttggtggttaggaatgtggactctgaagccaggaggcctgggctcacatccaggctttgcagccttgggaaggctcctgaacacctctgtttctttgctaaaaagtgggcaggatatcactatttttggtatagacctaccggaaggatcagaagacttaatacctgtgtgtgttttggagagttattggcacatattagatagttttactgtgaatcatcattatttataataattctctgacatgctggaatgtacactgtctttagaaatgaaatttgttttgttttcctaatttcgtgcaacctacatttttccagtgctattttctttggggaaagagcatgcagatgttccgtgttttcaatgtagcggtgtataaaatgtcatcattgtttcctttctggtggaatattmagagccagcttaaagataatctactccagaaagttccatattagcaattatgtgggg

SEQ ID NO: 155295 - DNA, 495 bp, Homo sapiens
tgctccaaatttcaaagagtagggaattagtgaaattaattatggtatatctacatcatataattttttcacactaatttttttctatgtagaagaatttaaagattatgaatcatacaaatttaagtataaatgcaaattacataggatggatactgtttgtgaggccttgtgagtgtgatatgcaygtttgtgtgtttggtaggatgtacacaaaatacacaaagtacacaaagtgtgcatgtgtatttgtgtacacaaagatattaacagtaattatttctgggtattgagattactggtaatatttgctttctattaaaaaataagatataattagttatttgatttttaatttctctttactactaacatctcttaaacatatcaaaagttgaattgcaacttcaaaaatatgatttgtatattttctttaataaacacacaatgatcaatgttttattaagtatagtccctatatacctaaatatttat

SEQ ID NO: 155296 - DNA, 547 bp, Homo sapiens
gccttgctcaccaaatactgcatgttgtcccttgtaatagggagctaaacattgagtaaacagggacacaaagaagggaacaatagacactgggatctacctgagggtgaagggtagaagagcatgaggacagagaaactacctgttggggactatgtttactatctgggtgatgaaataatctctacaccaaacttctatgacacacaatttaaccacgtaacaaaccagcaygtgtaacccctgaacctaaaacaaaagttttaaaaaaaatgcgtttctctaatagtgaatgatattgataaattgttcatgtgccaagttaacatgtatagatcttttccagtgaaatgtctctttaaatcttttgtccattttgtatcgggttgtcttattattattgagatgcaagaggtctttaaatattttagatagatttattttgaccaaaatatgttttagaaacattttctcccagtttatgacttgcttttttatattcttaacaatttctcaggaagagcaaaatatttttgttttcattggg

SEQ ID NO: 155297 - DNA, 561 bp, Homo sapiens
acattttcttgtgtgctttgtacatacttattttttttttgcttaactcaaagctactaggattatttttatagtttctttttcaagtattatagttttatatttatatttcgagctactatccattctgagttaatttttgtataagttgtgaaatctatatcaagtttcatttattttgcatatggacatcgaattgctccagcactgtttcttgaggagactattcattgcctttgacacctttgtcaaaaatcagttgactcgcccaagtatggtggcacatgcctgtaatcccagcactttggaaggccgaggcaggaagattgcttgagcccaggagttccagaccagccagggcaacatggtgaaaacctatctctaccaaaaatacaaaaaaatgycaggcatggcggtgtgcacctgttgtcccagctaataagaaggctgaggtgggatgatggtttgagcccaggaggcagaggttgcagtgagctaagatcataccaccacactccagccttggtgacagagccagacactgtctcaaaagaaaaacaa

SEQ ID NO: 155298 - DNA, 571 bp, Homo sapiens
ggtgtgcacctgttgtcccagctaataagaaggctgaggtgggatgatggtttgagcccaggaggcagaggttgcagtgagctaagatcataccaccacactccagccttggtgacagagccagacactgtctcaaaagaaaaacaaaatcaattgactctattttgtaggtctgtgactagccttgtttgttctgttcattgagctacatgtctatcctttcatcagtaccatactgccttacktacagtagctttataagaagctttgaaattgggtaatatgttttgccaaatttgttactttgttcttgttttccaaaattgttttggctatttcagctcatttgattttgatataaattttcaaatcaaaagtttactgggatttttaaaaggataacattgaatctataaatcaaatttaggagagaagtggcaaagcgagatggtggaatagaaggttccactgattgtcctccctgcaaggacaccaatttaataactatctacatgaaaaaatcaccttcataagaaccaaaaactaactgagtactcacagtatctggttt

SEQ ID NO: 155299 - DNA, 544 bp, Homo sapiens
gttgacttaagagcccttgggccttaagagaatatcaggtagaacactcctatgggccagtggtggtggtggccatggggtaaggctcctctgtttttggaaatgggaggaaatggtgagaaggacagcatcttctggtttaagtgccagctcaggcacagtacagtaaaacactaggtagacttctaaggtttctaactctagtccctggttactggaaagcatatctggacctgcctgggatctgggggagctcaccatcctgaagygaaggacacagtcctggctggttttgccacctgcttattgtagagccccagagccttgagtgaacataggcagtgatcacagcaggtcttgcgtgagacccaatgttgtgctggcttcaggtctgacccagcacaatcatagtggtagtggctacaggggtgcttgtgtcactccaccctcagtttcacgtgactcagaaagagagagactctgtttgcttgggcgaaagtaaggaaaaagaacaagagctgctacctggtaatacagagaattc

SEQ ID NO: 155300 - DNA, 573 bp, Homo sapiens
taatattgatcatagcccaaagaataaaataaatatccttgagtccaagctaatataaataatttacgatgattagataaagagaagagagagaagggacagttcttttttacagaagaatttcaatttataactgtagaagaaatgaagraaatagaaaatcgctattatcggggtaattattgctgcaggcaaaatgctagggttagtggacaaacatttaaagaaaaacagaatatttgcataatctcagagtttttctctcaaaataaataattactggttataaaaattaaaatagtaattttgctgtggagaaaattggcagatgctagcttaatcaagtgatcaacattaacgttgccagtaataggacatattgacctcatgttcccttgataagatgcaatgataaaggcacgacacctctgctgtatttttttaaatatacaaccttaataaaatcatgacaaaagatcaaacaaacccaaactgaggaatattctacaaaataactaaccagaattatttcaaagtcttcagatcatgaaagacaaagaaaggctgaggaac

SEQ ID NO: 155301 - DNA, 573 bp, Homo sapiens
taatattgatcatagcccaaagaataaaataaatatccttgagtccaagctaatataaataatttacgatgattagataaagagaagagagagaagggacagttcttttttacagaagaatttcaatttataactgtagaagaaatgaagaaaatagaaaatcgctattatcggggtaattattgctgcaggcaaaatrctagggttagtggacaaacatttaaagaaaaacagaatatttgcataatctcagagtttttctctcaaaataaataattactggttataaaaattaaaatagtaattttgctgtggagaaaattggcagatgctagcttaatcaagtgatcaacattaacgttgccagtaataggacatattgacctcatgttcccttgataagatgcaatgataaaggcacgacacctctgctgtatttttttaaatatacaaccttaataaaatcatgacaaaagatcaaacaaacccaaactgaggaatattctacaaaataactaaccagaattatttcaaagtcttcagatcatgaaagacaaagaaaggctgaggaac

SEQ ID NO: 155302 - DNA, 573 bp, Homo sapiens
taatattgatcatagcccaaagaataaaataaatatccttgagtccaagctaatataaataatttacgatgattagataaagagaagagagagaagggacagttcttttttacagaagaatttcaatttataactgtagaagaaatgaagaaaatagaaaatcgctattatcggggtaattattgctgcaggcaaaatgctagggttagtggacaaacatttaaagaaaaacagaatatttgcataatctcagagtttttctctcaaaataaataattactggttataaarattaaaatagtaattttgctgtggagaaaattggcagatgctagcttaatcaagtgatcaacattaacgttgccagtaataggacatattgacctcatgttcccttgataagatgcaatgataaaggcacgacacctctgctgtatttttttaaatatacaaccttaataaaatcatgacaaaagatcaaacaaacccaaactgaggaatattctacaaaataactaaccagaattatttcaaagtcttcagatcatgaaagacaaagaaaggctgaggaac

SEQ ID NO: 155303 - DNA, 573 bp, Homo sapiens
taatattgatcatagcccaaagaataaaataaatatccttgagtccaagctaatataaataatttacgatgattagataaagagaagagagagaagggacagttcttttttacagaagaatttcaatttataactgtagaagaaatgaagaaaatagaaaatcgctattatcggggtaattattgctgcaggcaaaatgctagggttagtggacaaacatttaaagaaaaacagaatatttgcataatctcagagtttttctctcaaaataaataattactggttataaaaattaaaatagtaattttgctgtggagaaaattggcagatgctagcttaatcaagtgatcaacattaacgttgccagtaataggacatattgacctcatgttcccttgataagatgcaatgataaaggcaygacacctctgctgtatttttttaaatatacaaccttaataaaatcatgacaaaagatcaaacaaacccaaactgaggaatattctacaaaataactaaccagaattatttcaaagtcttcagatcatgaaagacaaagaaaggctgaggaac

SEQ ID NO: 155304 - DNA, 260 bp, Homo sapiens
ttcctatatagattatcatattttctgataaagactgtttgacctcttcctttctaatctgtatgactttttttttcttgccttatgacattggctagaaattttaatacaaaacagttaaaaagggtaccaaaagagatattcttgtctgtcctaatcccaatgsaaaagctttcagtcttttatcatttaagcatgatgcacagctttaggtttttcataggtaaacttcatcaggttaaagaggtatcttctagtcc

SEQ ID NO: 155305 - DNA, 601 bp, Homo sapiens
ctaataatatatgtatatakcaaattccacctataaaaactccatgaaataatctaattatggggatctatagaaaattggtgatagcaaaggtttggggatgaagaagggatgggtataaagggatatatatcttgctataaagggatagcaagagagagtcttatgcagttgtatttttttatattgtgttgtgattgtggtggtggttacacaaagatacacatctaataaaatttcatggggccacacatacacatacacacacctgagtgaatgtataaaggataatatctgaataaaatttatggattttactaaattgttttctctggttttgatactgcctgggatcttttgcatattactttgaatgttcctacggatctataattatttcaaatttaaaagttgagaaaataaccctcccttgaatccattatcctccccaaataatttacatttagttcttccccttctctttcaaactttgaaaaagtgttacctgtatgaatcatgtccaatttcacatctccgtttgactcattacattgaaattttacttctgctctcagcattcttctgaatttgctatcattaa

SEQ ID NO: 155306 - DNA, 560 bp, Homo sapiens
caccacatcacaaggtttagtagttacgtaaatttaagccagcgtttccagcaaggtttcagcataagtagctagcatgatacagatgttctcaaagtccaagcaggtgggaactgcagggagctgatgcctaagtaagctcaaagtaatggaatatgaagttgttggtttgaagtcaattgtctgttgttgtgaagttacagatagtgatgtgaaattaaaagcttactgaaattcccattaaatacccattcagaatcagggaacaagagcaaatctggaatttaaaattcagttgaaaaactaaccaaaatgttcacagaaataaggatggctatatcaattgggataaatgacaaaataatatattttgaaatactaacaggagttaaattaaataaactaaatatatttatataaacatgagctcatttcaaaagcatayataaacaaaatgaattttaaaagttgcaaaaatttacaaactaataatatttatatgtgctttaaaaaagctaattatttatatttttttatctattcacatgtagtttaaagta

SEQ ID NO: 155307 - DNA, 574 bp, Homo sapiens
aaccaataaaggaatgtaaatgccatcagaagaagggttgaataatactgagctagtgctgtttacaatcaataaatgataagtgaagcagccaggtgcagtggctcatgcctgtaatcccagcactttgrgaggccgaggcaggtgaatcatctgaagtcaggagttcaagaccagcctggccaacatggagaaactccgtctctactaaaaatacaaaaatgaggcaggaatggtggcacatgcctgtaatcccagctactcaggaggctgacacaggagcatcacttgaacccaagaggtagaggctgcagtgagccaagatcactccattgcactccagcctgggcagcagagagagactctgtctcaaaataataataaaaatcataataataaaagtgaagcaatttgacatctcattccaatgtaaagtaaagggaaaattagcacctcatgcaaaatttcctattggtgtcatcctaaatttttagtgaaaataaaaataatacatataaattcatgacaagcctggaggaaaataaatgtataaacttaatccctcaaacacaaa

SEQ ID NO: 155308 - DNA, 477 bp, Homo sapiens
catcaccatcatcactctcttcctcctctttatcctcaaggtatctggyaacagttctgaagaggcattagagttgatttattactttggggaagtgagatgtaaggtgcagtccccagaaaccttcagcttcttccatgggagtttctctttccacaggctcctttcaggacatgcctagtcagtagaggaggcctccatggtaaatgacgttaacattccacgaacttctgtctctcccattccccactgccccaagcaggatggttcacatcttgtcctgctgctgcccttgtcccttgtcccacagatggtcctgctcaaggcttacaccactcactgcccctcctcccagagtcctcccttcacacccatcatcactattcctggaaggtctctgcttcttcctgggctgctcagggccatgagaactggacatctggttgctgctgggaaaggacaaagcccatctttgac

SEQ ID NO: 155309 - DNA, 596 bp, Homo sapiens
tggctgtacttttgtattccttaaccaagctttcgctgtcttctccgtccccttctgtgactatagtaaccactatttcactctctactgctatgagatctaaattgttagcttccacatttgagctagaacatgtggtatttatctttctgtgcctggtattttcctgaatctttttgtgtctttcatttctctgaacaagtgctgagacatgagaaagggtgaggtgggggccctaagtttctgctcttccaaggctcctccaatatttcaagttatttgwccacactggtttgtgacttcagatcagaactgtgttgttaatagatgtttaaaaaaaaaaaacaaataaattgtggggtaggtatgggtgcttgatgtcttatacttatttacattttaagctcttcttatggtgtctctggccatagccataatgagtttgtggttactaaatcagtcctcagaggcctagatgggttgaacatggaaattacttaataaaagaaactcaggtagttggaataacaaagtgaccctaaagcaaaactgcttgtgttgaatatagttccaataaatatctgccatttgaattg

SEQ ID NO: 155310 - DNA, 503 bp, Homo sapiens
aaaatttggattaatttaacaaatgcatatgaaccagtgagaataaacaatgttaacatttgtcatctttgtttaatatcgttagtttttgtttttattttttgagacagttccctgttctatcacccaggctggagtgcagtggcacaactcactgcaacctcyacttcccaagctcaaacaatcccccaccttagcctcttaagtagctgagactacaggcatgtgccaccatatctggatatatatatatatatatatatatatatatatatatatatatatatatatatatatactttttttgtagagatggggtctcgctatgttgcccaggctggtctcgaattcctgggctcaagtgatcctctcatctcagtctcccaaagtgctgggatgacaggcttgagccaccacaccaggcccatcatcagtttttatataaagaaaaaaaaaccttaaaattgttaggcaaatactatgacaaattgtaatatatattc

SEQ ID NO: 155311 - DNA, 503 bp, Homo sapiens
aaaatttggattaatttaacaaatgcatatgaaccagtgagaataaacaatgttaacatttgtcatctttgtttaatatcgttagtttttgtttttattttttgagacagttccctgttctatcacccaggctggagtgcagtggcacaactcactgcaacctctacttcccaagctcaaacaatcccccaccttagcctcttaagtagctgagactacaggcatgtgccaccatatctggatatatatatatatatatatatatatatatatatatatatatatatatatatatatactttttttgtagagatggggtctcgctatgttgcccaggctggtctcgaattcctgggctcaagtgatcctctcatstcagtctcccaaagtgctgggatgacaggcttgagccaccacaccaggcccatcatcagtttttatataaagaaaaaaaaaccttaaaattgttaggcaaatactatgacaaattgtaatatatattc

SEQ ID NO: 155312 - DNA, 522 bp, Homo sapiens
ctgaatatttttattattatttgactatacacaacagagagacaaaaagagttctttaactcgactagggcataaggacctttactaaacaaaacaaaataaaacctgtgaaaaaagaggcaacaatagcaacatgtaaacaaaacggcaccattataattgttaggtcttagcaattgaaatggaacttaatggtggtgatgaagttttcctacgtgactggttactttgtttccttactaggcagtacttttcatgtaggcagtaaagtcaaaagcatccatgacaaattctcaaggggatacacagataccccttataacaagcaagcagatacagcaactggtarcatcattatatacagctgagttgaaactccttaagaaggcaatctaaataaccttgtcacatccattctccacacttttcctttggcaagtgctccatgtccccgtgaagcctcatttccccatctattgccaaaggctaccatttcatatcacacatcaaagcgtgagaaat

SEQ ID NO: 155313 - DNA, 632 bp, Homo sapiens
ctctctaaaacatgatatatttcttcgtatattaaagtcttctttaaagtttaaaaagttttacatggtcttgactatttttgtcggatatatttctagatcctttatatttttcttcctattaaaaacagtatctttcttaaaaataccctttctaactctattgttggaatacaaatgttcatttgggatttatatgttgatctcacattcttcttgtttactaaatttatccattaattctaacaactaatttgaagagtcttctgggttttctatggagacagcatgtcatatgcaaatagtgacaacttaatttactttttccctgtttaaatttttttttcttttctaagtgtactttctatcacacgatattsttaaatagaatcaatgagggtggtacatttgtatatttctgattttttaaggaagtcttgtcagtagtttacttttgagtctctatagatttctttactgtgttaaagctattcctgtctaactctggtttttaagactttttatcagttactaataggttttgaatttcacttaacaattttgttcttttaaaatgactatatatttttttcccttttaacttctgaacttggaaattgcattaatagttc

SEQ ID NO: 155314 - DNA, 537 bp, Homo sapiens
tgggttccctatgaatcctcagagccaagaaaaggaggaaggctcctgtgtgtcaygtgaggtaatgacgtggtgtctaatgaaactgcctgcagttcctgcatcatcactccttccttcatgttaacttgcagtgggaggctccactgtggtccactaacaatggaatgagatggcttccatttagtcagtggactctaatatacactggtgggaaagtgtggagggtcagcaatgagatgtggggagggacaatgattggaggacccaatatagagatagcccacagtgaagagagtgttgaatggttgaataaggggaaagggtaataacagactagatggtggcccatttagtagggctattttgagataaagaacttctgaaaacacaagggaagatgaagagctgtcaggaatgtggtcttcctccccaagggcagacctagatattccccaaggtcatctcccacccaccccctactcttcattttactctctcccttttcttccaccccaggtgaagaaacccagaagg

SEQ ID NO: 155315 - DNA, 537 bp, Homo sapiens
tgggttccctatgaatcctcagagccaagaaaaggaggaaggctcctgtgtgtcacgtgaggtaatgacgtggtgtctaatgaaactgcctgcagttcctgcatcatcactccttccttcatgttaacttgcagtgggaggctccactgtggtccactaacaatggaatgagatggcttccatttagtcagtggactctaatatacactggtgggaaagtgtggagggtcagcaatgagatgtggggagggacaatgattggaggacccaatatagagatagcccacagtgaagagagtgttgaatggttgaataaggggaaagggtaataacagactagatggtggcccatttagtagggctattttgagataaagaacttctgaaaacacaagggaagatgaagagctgtcaggaatgtggtcttcctccccaagggcagacstagatattccccaaggtcatctcccacccaccccctactcttcattttactctctcccttttcttccaccccaggtgaagaaacccagaagg

SEQ ID NO: 155316 - DNA, 505 bp, Homo sapiens
gtgatgaaggtgcgggccctgctcagacagggtttgtgtcatgaagacatgaagacagtgcttccccacacactcactgcccacacattgtccctgacgttgtgacacaatcagccctaggggagtctgatattacttaaaacagaacttctcaaataattttctgtgaaggatctttttttttcattaatttgcaatctaccttgcatggtgacttttgtaaaatacagtaaaaaatgaattacttaaacttctggytacagtgttgacatagagagctttggaaactgttactcttttctttaaaacaagaaaaatctgaataaacttaaaatcaacaactttcctttgggctaatgagagaactgaggtagcagggcaagttgataccccaatatctggaaaagcacccaaatacacagagttgtttacatttctgcttacctggagcaaaagcctctagagctacaagctgttaggaacatttaaatggtgattttgaaaa

SEQ ID NO: 155317 - DNA, 660 bp, Homo sapiens
ctaggggagtctgatattacttaaaacagaacttctcaaataattttctgtgaaggatctttttttttcattaatttgcaatctaccttgcatggtgacttttgtaaaatacagtaaaaaatgaattacttaaacttctggttacagtgttgacatagagagctttggaaactgttactcttttctttaaaacaagaaaaatctgaataaacttaaaatcaacaactttcctttgggctaatgagagaactgaggtagcagggcaagttgataccccaatatctggaaaagcacccaaatacacagagttgtttacatttctgcttacctggagcaaaagcctctagagctacaagctgttaggaacatttaaatggtgattttgaaaaattgctggatgttgagtgcagcttggcattaagagtgagaaactcayggaagttgcactcctatgaaagccctcacgccttcatggattttaccttcaggaatcccaacaggttctcttcgtggagagtcaaaaataattctctcatggctttgtcaggaagagtagaaaagaaaccatttctaaatcagcccagagcattctcaataacaaagacctacttccaggtaaaaagaccttatgagcttcgtatcatgcctaagcatgagtgc

SEQ ID NO: 155318 - DNA, 660 bp, Homo sapiens
ctaggggagtctgatattacttaaaacagaacttctcaaataattttctgtgaaggatctttttttttcattaatttgcaatctaccttgcatggtgacttttgtaaaatacagtaaaaaatgaattacttaaacttctggttacagtgttgacatagagagctttggaaactgttactcttttctttaaaacaagaaaaatctgaataaacttaaaatcaacaactttcctttgggctaatgagagaactgaggtagcagggcaagttgataccccaatatctggaaaagcacccaaatacacagagttgtttacatttctgcttacctggagcaaaagcctctagagctacaagctgttaggaacatttaaatggtgattttgaaaaattgctggatgttgagtgcagcttggcattaagagtgagaaactcacggaagttgcactcctatgaaagccctcacgccttcatggattttacsttcaggaatcccaacaggttctcttcgtggagagtcaaaaataattctctcatggctttgtcaggaagagtagaaaagaaaccatttctaaatcagcccagagcattctcaataacaaagacctacttccaggtaaaaagaccttatgagcttcgtatcatgcctaagcatgagtgc

SEQ ID NO: 155319 - DNA, 660 bp, Homo sapiens
ctaggggagtctgatattacttaaaacagaacttctcaaataattttctgtgaaggatctttttttttcattaatttgcaatctaccttgcatggtgacttttgtaaaatacagtaaaaaatgaattacttaaacttctggttacagtgttgacatagagagctttggaaactgttactcttttctttaaaacaagaaaaatctgaataaacttaaaatcaacaactttcctttgggctaatgagagaactgaggtagcagggcaagttgataccccaatatctggaaaagcacccaaatacacagagttgtttacatttctgcttacctggagcaaaagcctctagagctacaagctgttaggaacatttaaatggtgattttgaaaaattgctggatgttgagtgcagcttggcattaagagtgagaaactcacggaagttgcactcctatgaaagccctcacgccttcatggattttaccttcaggaatcccaacaggttctcttcgtggagagtcaaaaataattctctcatggctttgtcaggaagagtagaaaagaaaccatttctaaatcagyccagagcattctcaataacaaagacctacttccaggtaaaaagaccttatgagcttcgtatcatgcctaagcatgagtgc

SEQ ID NO: 155320 - DNA, 562 bp, Homo sapiens
atgacaataataatatctatgatttgggcccctgctaggtcctgaccacattctgtgaggaaggtattagtataaatattttcaggtgactaaaatgagattgaaagagatttaaaaacctctttaagttcagatatctgtaagtacmgtctgggattcaaacacatggatgtctgactttagagttctgcatttaactacagaccacagaatacacatgcaaagagaacacacttgcagtaactgaccacaaaaaagcagtcagaactatgtatttagggtaattattcttagccttggtgcagtgatagaattggggtgtctaaatcagctgtgaggtccatgaagtatttgggcagcactaatacagtaattatattaatggttaatatctagtgctcactgccaaaccaaatactgggctaagtactttgatgcattgtcctatttaagcctcacaatctctctatgaggagggtactatgacaatatgttatagattctagaacaaacttttttcatattttaacaaatctgaaattaagaagcaacctacaactgg

SEQ ID NO: 155321 - DNA, 562 bp, Homo sapiens
atgacaataataatatctatgatttgggcccctgctaggtcctgaccacattctgtgaggaaggtattagtataaatattttcaggtgactaaaatgagattgaaagagatttaaaaacctctttaagttcagatatctgtaagtaccgtctgggattcaaacacatggatgtctgactttagagttctgcatttaactacagaccacagaatacacatgcaaagagaacayacttgcagtaactgaccacaaaaaagcagtcagaactatgtatttagggtaattattcttagccttggtgcagtgatagaattggggtgtctaaatcagctgtgaggtccatgaagtatttgggcagcactaatacagtaattatattaatggttaatatctagtgctcactgccaaaccaaatactgggctaagtactttgatgcattgtcctatttaagcctcacaatctctctatgaggagggtactatgacaatatgttatagattctagaacaaacttttttcatattttaacaaatctgaaattaagaagcaacctacaactgg

SEQ ID NO: 155322 - DNA, 562 bp, Homo sapiens
atgacaataataatatctatgatttgggcccctgctaggtcctgaccacattctgtgaggaaggtattagtataaatattttcaggtgactaaaatgagattgaaagagatttaaaaacctctttaagttcagatatctgtaagtaccgtctgggattcaaacacatggatgtctgactttagagttctgcatttaactacagaccacagaatacacatgcaaagagaacacacttgcagtaactgaccacaaaaaagcagtcagaactatgtatttagggtaattattcttagccttggtgcagtgatagaattggggtgtctaaatcagctgtgaggtccatraagtatttgggcagcactaatacagtaattatattaatggttaatatctagtgctcactgccaaaccaaatactgggctaagtactttgatgcattgtcctatttaagcctcacaatctctctatgaggagggtactatgacaatatgttatagattctagaacaaacttttttcatattttaacaaatctgaaattaagaagcaacctacaactgg

SEQ ID NO: 155323 - DNA, 562 bp, Homo sapiens
gacccaaaacattactgaagaagaagaaagttgggggactcacattaaccaattttgagacttactataaagctatagtaatcaagacagcatggtattggggaaataatagacacaaagatcaatgaaacagaatagaaagcctcaaaatagactcaaatacagccaactgagttttgacaatggagcaaaggcaatgcaataaaaaaagaacagtcttgacaacaaatggtgcttgaacaactggacatcaatattgaaaaaaaaaagaacctagacatagactttacaccttccacaaaaattaactcaaaatagatcatagatctaaatatcaaacactaaactacaaaacttctasaataaaacacaggagacaatcttggtgaccttgggtttggtgatgaggtttttgatacaacacacccaaaaacacaatctatgaagtaaaacaattgatcagttggactttattaaaattcagaacttatgctccacaaaacacacttttttatttgtagatatgcatggggtagaaatgcaattttgctacattgatata

SEQ ID NO: 155324 - DNA, 499 bp, Homo sapiens
atttgaaggatttccacattggaaggagatttggtctgtgtcactgcaaagggtcaaactaagcccagtgggtagaagttacagcaaggttcctttgattacactagaagaaaaacctctagtaactccaatcctctgtgcaacatcggacccgtgctgccttgttctacaatgagttccttccaacctgggggatgctggcctcggctggatgttcacttttgcaaggctgtgaacagaaatactctttgttcactgagaggctggaccagatgagctggtggacgtttagaaccccttggtagcattttaaagcatmcagatttccaggcccctctatcagagcttctgattctggggtgggccctgggaatgtgcatttatttttgaattccccaggtacttcctactgatgagtggggtttgggaaccagcagattaggcagctgctggggtgccttctaacatgaacatttggtgattctactgcatttttctc

SEQ ID NO: 155325 - DNA, 475 bp, Homo sapiens
tcccaagaatgatggctacaaataagcccagacagtgaaaactacagtaaatacctaacctttcaatgtccagacagcaaagaacatctattagcatcaactccatccatgaaaacatgacctcaccaaaaggacaaaataaggcaccagaaaccaatcctggagaaacagagacatgtgatgtttcgacagagaattcaaaaaaatagctttgttgaggaaactcaaagaaattcaagataatacagaagaaattcagaattatatcgaatagagttaacaaagagattgaaataattacaaataatcaagcagaagttttggagctgaaaaatggaattggcatactgaagaatgcagagytctttaatagcagaactgatcaagctgaagaaagactttgtgagcttgaagacagtctttttgaaaatatacagtcagaggagacaaaagaaaaaggaattaaaaaaaaagt

SEQ ID NO: 155326 - DNA, 469 bp, Homo sapiens
agagcttgtatttattgagctgtgtctatcaacatagcggcattgttttatatttttataaatctctttaatgtgcagctgagtagaaggcagctggattcttatatctgcttttgcattaaatactttaagatatgctttggtcaaagcatatgacgaaaagccagcatcacagagatatgcagttggaaaagcgaggacctcatggatcctgtgttaggcagcctctaagatgtctcccagtgatcctgccccccaacattcatatccttgtgtaaacccctcccctcctatgtgggctggacctagtgatttggttstaaggaatacatatggcaaaagtggtgagatatcactttgacgattacattacaataagactggctttttggaactgaaggagacctctggcccatatccagcgaggaactgaatcctgccaacaaccacggcaatgcgtttggaagga

SEQ ID NO: 155327 - DNA, 548 bp, Homo sapiens
tattattgcactgcctgtgaaatgggaactgtaaacattctaatatgtgcctctcaagtcaagacgaggtcacccaccttctctcaccattcaacaataatttcaagtttcctaatgcaggatcttatgaccccaaattcccgggcatatactggaactgatcttgagccataaaaggtgagaagagaattttgagatagagctgaaaaaaacactgtatatctggggaattcatttgttcattccacaaatatagattgaatacctactatgtgccaggaattgttctaactgctggggatgcatttgtgaacaaaacagatgtaactctctcccttgattgctaattgctaattactgtgcattgctaattgttgacgctgggtgatgaacacatggggactcattcaatgatttgctctacttttatatatgtttggaaatttccrtactaaagttaaaattataagtcccaaatctcaaaaacatgatgctgagtgaaagaaggcagacacaaaaaaagtacatgctatgtggctccatttata

SEQ ID NO: 155328 - DNA, 395 bp, Homo sapiens
  misc_feature (1)...(395): n = A,T,C or G
aaataaaattatctgtttgcagatgatgtgatcttgtatgtagaaaatgctaaagagtccacgaaaaagctgttagaactaataaatgaattcagcatagtagcaggatgcaaagtcagcacacaaaaatcagctgcatttctgtacactaacagtgaacaatcccaaaaggaagttatgaaaacaattccatttacaatagcrtaaaaaatactttggaattaagttaactaaggaagtaaaaatcttggaccacaaaaactagaaaacatgatgaaagagattaaagaagatacaaataaatggaaacacatctcatgttcatggattgaaaaacttaacattgttaagttgtcagtactacccaaagtgatgtctggaattcnnnnnnnnnn

SEQ ID NO: 155329 - DNA, 475 bp, Homo sapiens
tattttctttttttccaattaatcttacagcaaatataccatgcaggtgtgttttctgatcaaaagaataaatgtaaaaagcaaatattttaaagaaacaatatccagtaaagtcctcagtacttagaaatgaaatacctttctaaataatacatgagtctaaaatcaaaagagaaattagaaaatgtttcaaaattagaaagttatttgaaacagaatagtaaaaatataacatcagtctttattatgcagcttgaaagagtacataagagggaactttataactttaagtgcttatataactgaaaggaaaaaagcatcarttgtctatgtttttaccttaagaagctacaaaaaccaaaaataatgagaagtaaagagagatcaggagagtgtggcacattggaacataggacagaagataaaggagttttaaagtatctatttatcttgaaatccttgcaatttaggactg

SEQ ID NO: 155330 - DNA, 397 bp, Homo sapiens
tggtctggctgcattgggcctgctgagtcatttgctatgcttccgatcttttatmgttcatttcccccaagtttttctgttttcctgtttgttcggtttctatcttcagtgttagaggcttttcttatagcttcaaaaattcagttactttttctttcatttctccctgtcctgtgggtttggtttttaaatttatctttttaatatgtctgtattagtttgttctcacactgctaataaagacatacttgggactgggtaatttataaaggaaagaggttcaattgacttcacagtcccacatggctggggagaccttacaatcatggcagaaagcgaaggggaagcaagacatatcttacacacggcagcaggcaagagagagtgtgtgcagggg

SEQ ID NO: 155331 - DNA, 557 bp, Homo sapiens
taatcccagctactcgggaggctgaggcaggagaattccttgaacctccacaggaggaggtggaggttacagtgagccgagatcgtgccactgcactccagcctgggtgacagagcaagaccctgtttcaaaaaaaaaaaaaaattcagaccagcctgggtaacaacaagaccttgtctctgaaaataaaacaaaaaacaaaaattgtcaggtgtggtaatgcatgcctggatcacgggaatttgaggctgcagtgagccaggatcgttccactgtactccagcctgagtgacagagcaagagtccrtctcaaaaaaaagattactaaattagtagatgcaaagctggattcagattcattctggcttcacagtgttgtgctcttgactggtagagcagctccctccccccagtctgtggttttgctttttgtaggttcagttacccaatgttagctgcagtccagaaatactaaatagaagattccagaagtaaacaatttataagttttaaattgtgcggcattctgagtagcctgatgaaatctcatgcaccct

SEQ ID NO: 155332 - DNA, 574 bp, Homo sapiens
ctatgtaaaaacatgtaaatttgtactgaaagatatttagaaaaatctgtataaatggggagctataacttgcttaaggacggaaagctgaaaaatgataaagctttcatttctaaaaaaaaaaaaaaaaaaaggaaaaaagattcattggttcaataaaacaccaatcaaaatcccaaaagtgttttttgaaaaacttgatgagctacttttttgttgtacattgaaggatgaagaaccaataatgggtaagatatttttgaaaagataaacatgattttcctatcataatgtagaaaaaaatgcttaaacttacaaccaagtaacttagtaactaagaatgctaattaaacccacaattagataccttaccaccattagtttggaaaacaaaacatctgaaaatgtcaagatcttagtgacgataggtatcaatatgctggttgaagtaagttagtagaggtgcttttaaaaatcataacgttatyttgtaatataaacaaaacatcagtatatcttatggcccagcaattctgtccttagaggctcactacaggaatgtgtatgaatactg

SEQ ID NO: 155333 - DNA, 650 bp, Homo sapiens
tgtggtcactgggaaaaggctcaccaggcataggcagcataagaatgaggaactggcagctaggcgtgatggctcacctgtaatcctagcacttygggaggccgaggcgggcggatcacgaggtcaggagattgagaccatcctggctaacatagtgaaaccctgtctctactaaaaatacaaaaaagtagccaggcatggtggcacgtgcctgtagttccagctactcaggaggctgaggcaggagaatcacttgaacctgggaggcagagattgcagtgagccgagatcaggccactgcactccagcctgggtaacagagcaagactctgtctcaaacaaacaaacaaacaaacaaaaaaaagaacaagaagaataagaagaatgaggaactggcattgttgggttccttttctcactatggggattttatgggataaattgtgccctctacaaatccacatgttgaagtcctaacgctcaaaacctcagaatatgactatatttggagatacgacctttaaagaggtaattaagataaaataaggtcacagagtgggcccaaatccactatgactggtgtctttataaggagaagaaatttggatacacacacacacacacacacacacacggaatatgacggagag

SEQ ID NO: 155334 - DNA, 566 bp, Homo sapiens
actactgctttcgttggccaaaatgtcctggtttgaacaacaaagcatgtttaccttaagtgtagacacattcaaatcactcttcttaactgaaagcatccctttcctagaagcatacaaacaactgcataacaaacaaccacaagcctcagaggcattcattaacaaagatttgttttgttcatgggtttgkggtgttcatcgtggtgggttggctgatcctggctaggtttactcatgaatctgtgaacacttccaacttggctgatccatggtggtcttgttggtatgattgaggtgactcaactttctcccctgcagctggttagggcgtgtcccctggtaagagcagcagcatgagagagcacgtaaaaacaagcacttttccaagacttatgtcaagtctgctgtcatcctgttggccaaagcaaattccactgtcaaagtcagagtagtagagctctgcacagtgatgtgtcaaaggacatgaatatagggagagagtaagaattggagcgtttgtgcagtcagccagacgatgcctggaaatgcttactgtgttcaca

SEQ ID NO: 155335 - DNA, 566 bp, Homo sapiens
actactgctttcgttggccaaaatgtcctggtttgaacaacaaagcatgtttaccttaagtgtagacacattcaaatcactcttcttaactgaaagcatccctttcctagaagcatacaaacaactgcataacaaacaaccacaagcctcagaggcattcattaacaaagatttgttttgttcatgggtttgtggkgttcatcgtggtgggttggctgatcctggctaggtttactcatgaatctgtgaacacttccaacttggctgatccatggtggtcttgttggtatgattgaggtgactcaactttctcccctgcagctggttagggcgtgtcccctggtaagagcagcagcatgagagagcacgtaaaaacaagcacttttccaagacttatgtcaagtctgctgtcatcctgttggccaaagcaaattccactgtcaaagtcagagtagtagagctctgcacagtgatgtgtcaaaggacatgaatatagggagagagtaagaattggagcgtttgtgcagtcagccagacgatgcctggaaatgcttactgtgttcaca

SEQ ID NO: 155336 - DNA, 556 bp, Homo sapiens
cagctttctaacttgtgtccaaactcttttcacagacctcagtagttcaattacatttgaaccaattaattatattgtgaaagcacgtatatgcagaacccttctctggattccaaatataacattcgcagttacccatcacaactttatatggtttttatcaaatgctgaagaatcaaaccatgtaggagctttgagcatttctgcctctatggaagagatgggctgggacagataggatgaatcactgactccaacacaatgcaccacccttttaaatgatactgaaccctacatgtccacaagccatggtctctaatactttggtcaagccaacctcccttcctcacatgccctcattttcttctatgtttkgcaaatacttgctcattcctcaagatacagttgaaaagtgtacgcttataaaaaagaatgagatcatgtcttttgtgagaacatggatggagctagaggctattaatctcagcaaactaacacagcaagagaaggtcaagtatcacatgttctcacttctaagtgggagctaagtgatgag

SEQ ID NO: 155337 - DNA, 537 bp, Homo sapiens
ctcatccagatgtccccattataggttgggttctccaggaggaagacagggatggagctagaagcacaagaaattttggaggagtaatacctgtggaaggaaaagtaaggaagaagcagaattgggcagagggagccatcagaatgtgacacagatctgtcaaaaggttctcccaggccagtgtggaactttatgcaaggtgtttctgctggaagagttgaacaaaatatggctgggagctaaaccaactatttttcccagctactggctgtgggcatctataagaagcacattccctggcaactatcaccacctcaggctgagggccacccccaagaatatatgacccasttaggaggctgaaggagttaacagctggaggctgtcagctaaccagaggccctgtagctggccagagttgagcctatatgatatgtcttcacatctccccctaaatgtttggtataacagtttcagtctcctaaattttctggcttagtatgtgggactgaattagataatggggaaaatcaaatg

SEQ ID NO: 155338 - DNA, 506 bp, Homo sapiens
catacaaacccattaatattggtcctagcatgtgtggttttttcctagctatttgttgaattctattatttttaaaatatgctttcttattcattatcaaaaactacttacatgtctcttttcattctagtttactcatattgttttataacaagaaaagagataaaatttgttgatattagagggaagttttgtttaggttaaacggsgggtaattttaattgaagataaaatatataaccactctagatatggagttctgaactcctctgattagtagttgggactgaggtggagttgaggtagggactgtaattccacagttctttgatagaacttgacctgcagtgggtgagaaaaaggaaatgcggtcttcttgcagttcaggaagcctgactcctattcatgcacataaccccatctaggacagaagcagggttatttttttattttggattcaggtttctcagtgtattttctgaataaggaatgcaattaattagttc

SEQ ID NO: 155339 - DNA, 506 bp, Homo sapiens
catacaaacccattaatattggtcctagcatgtgtggttttttcctagctatttgttgaattctattatttttaaaatatgctttcttattcattatcaaaaactacttacatgtctcttttcattctagtttactcatattgttttataacaagaaaagagataaaatttgttgatattagagggaagttttgtttaggttaaacggcgggtaattttaattgaagataaaatatataaccactctagatatggagttctgaactcctctgattagtagttgggactgaggtggagttgaggtagggactgtaattccacagttctttgatagaacttgacctgcagtgggtgagaaaaaggaaatgcggtcttcttgcagttcaggaagcctgactcctrttcatgcacataaccccatctaggacagaagcagggttatttttttattttggattcaggtttctcagtgtattttctgaataaggaatgcaattaattagttc

SEQ ID NO: 155340 - DNA, 563 bp, Homo sapiens
gcttgtagacatattgatttttataggaatatttatatacaaatttttcaaaatttaaatctgtaaaagccaattattcttatcactgcagtgcaggtgtatgtggctgggtgatattctggaaaagggtctgggaaaggatggtcatgttggatgaccgggacaattaaccaagtataggaggggataatgaatactgatattattttgctattagtattttggctacacatactatgcatctatttatcagagtaacagggagcttattggaggcattgacgaacactgtgggcatttttccatatgcagttcatgttagagtttgggtgaagtccctggttaaagaaaagaggtacctgggaagttctgtctgtaagttagagttgcagcagtaagtggaaaataaatgttcacgtgggtcacggctgtaccctgtagccatgaggttggaggckaaaggtccagctcaggccattgtagctaaagaggtatgctctaaatttgcccaagaactcagactttctcacagacagaactgaaagtacaccatagagttgata

SEQ ID NO: 155341 - DNA, 523 bp, Homo sapiens
tgactataatgtaaataaatgagaactcaataacaaaaaacgaggttccagttattcataatcttcccattttttcaagtattccatcaaatacttggaaattaattagcatatgtctaataacacatggatcaaagaggaagtctcaaaggaaatatacaaatatattgaactgaatgacaatgaaagtgcaacatatcacagtatgcagaatgaaaataagctgtgctgaaaaggaaagtcatagcacttagaaatgaagaacggtctgaagtcaacactttaacttactagaaaagaagagcaagagcaaaataaaccaaaatcaggaagaaagaagaaaataactatacagcaaaaaatgataaaaattaaaataagaaaacagaacgattaatagactcaaagtggtctttcaaaatgatcaatgaaatggataaacttcttgcaarcctgataaataaataaaaagagaacatccatcttacagaaatctgaaatgaagaggggatatcactactgg

SEQ ID NO: 155342 - DNA, 580 bp, Homo sapiens
cattaataaatctgtatgtcatattaatctccttttgggagttgatttttcaagcaaaccttcagaaggcagagaagctttcccttggcccatgcaaatatatttaagatcaatcatttgctcctgtaagggttttaagaataaacagcataaagttcacttggtacaggartcaaaaaataattataattataatggaaattcaagtgtagagtagaacttgaacaagtgcaagccatttttgtggggaccatccttgaaatcaaacaatagtagtacttaatcaatgagatattctactgcaaaaatcattcttaagcactcataagcaatacctctgttaaataggcacaaaaaacatctggaactaaaactctaaatcagaaagtcaaattctatgcaaaatttccaagttcaggcaatgcataaaaattttctaaacaacagtttatttaattttctaaacaacagagaatttagaaaggcaaatgccgactcttcagcttttactgtgaatactgatttgctcctggccctttgaaatgtgtcactagagttatgattaattatttagaggcca

SEQ ID NO: 155343 - DNA, 482 bp, Homo sapiens
caggcaatgcataaaaattttctaaacaacagtttatttaattttctaaacaacagagaatttagaaaggcaaatgccgactcttcagcttttactgtgaatactgatttgctcctggccctttgaaatgtgtcactagagttatgattaattatttagaggccaaaaaatgccctttacctgttatccttatgaaatggaaattacgaagtcagaaaaaataakatagtgattaaaaataaagcaaaaacaatggttagtgttattagtaatatcttcaaagttagaaaatccaggatgggagacttccttaaaattgaacattctcaatgctgatacttatgaaacatttttttttttttgcttcatgtggagaaataattttttaatcaacagtacttgcatgaaagcagctttgagttttcagaagagaacggaactacttcaaagcagggcctgctgctccgaatacaatattgtct

SEQ ID NO: 155344 - DNA, 576 bp, Homo sapiens
tggctattttgataattaaaggggataatatagagcataggacctggcacacagtagtgcccaataaaygttgcatcaggaaggtctgcttccaatgaatcctgaaaagtcctccctctttgcatagactgctcaaagaggcacccatccagatgcaccctcccatactctaagatcgtccagccccactatcaagcctcacctgtgccacatcaaatttttgcatttaagagcattttgcaagacgaatataatatagtgttaatattacatacagaatggtttaataggtcaccttcccagaaatgtgtatttctaaacacttttaaactcttgctcatgctttagggaccagtttaaatgtcacctcctctgagaagcctttttagattctctccatacggaacccattgtgttctctttgttccatcaaacttggtctcttgtcctatgactatggggagcgctgcctactggttcaattcactgtctcagcgtctgactcttgcactagggtttccagcatctcgaactctgattctcaaaaggactgtaacagtccagccaactgcttag

SEQ ID NO: 155345 - DNA, 290 bp, Homo sapiens
tggagtgaggaggggatagggggcaccagggaggccagttaggaggatattacaataatccaggtggagacaggacaggatggttacttgggtgaggaggtactggtggaggtggtgaaactgaccagtttggggatgtgcttggaaagtggactgctctgtacttgctgatggatttgatgtgmggagtaacagaaagaaaagaatgagagagaaagaatgattcttagggcttttatttaatcaactttaaaatttgaggataattttagagttgtagaaaagttgca

SEQ ID NO: 155346 - DNA, 508 bp, Homo sapiens
tgatgaacattgcagcaggttcggctattcagaatgagctattttctcccaaatcctgtaattgcctggagcaygtgatctttttgaaggtcattagaggcatgcggctgtcagatctctcccagaaagtttcgctttgattagttagttcctgatgcttatttcctaaaaggctctttttgtcccccacccccccaaaaaatggggagcattaaaattttaaaaaaggattagatgaatatcctgctaaatgtaacttggcaagatgaaaggaagtagcaaagaaacatgaaaagggtgcagaccttcttgggccccctgctggagagccaacctgagggaaattgacgcacgatcagcatattccttccccaaaatgaggcgactcggaaatacacaatatcaatcatcatctatgcaaccactcattattttgactcaaacagaacgacatacatcattggtaaagcccacgtggacatttccaggtccctggggcatttataag

SEQ ID NO: 155347 - DNA, 508 bp, Homo sapiens
tgatgaacattgcagcaggttcggctattcagaatgagctattttctcccaaatcctgtaattgcctggagcacgtgatctttttgaaggtcattagaggcatgcggctgtcagatctctcccagaaagtttcgctttgattagttagttcctgatgcttatttcctaaaaggctctttttgtccccmacccccccaaaaaatggggagcattaaaattttaaaaaaggattagatgaatatcctgctaaatgtaacttggcaagatgaaaggaagtagcaaagaaacatgaaaagggtgcagaccttcttgggccccctgctggagagccaacctgagggaaattgacgcacgatcagcatattccttccccaaaatgaggcgactcggaaatacacaatatcaatcatcatctatgcaaccactcattattttgactcaaacagaacgacatacatcattggtaaagcccacgtggacatttccaggtccctggggcatttataag

SEQ ID NO: 155348 - DNA, 517 bp, Homo sapiens
agttaccttttcaatccctagattgtgtttgccaaaacttcmcttgcaatagggacactccagcaaccctggctcggggctccctgcgtacttagatgtaatactatgtcaacaacatcctgcaggctgaagcagcctcttttttttaaagccttggatcaactatgcaagctcaacttgcttttatttttgttgaaaatactaaattcatttgtcatcactaattccctcaagcaaaggaacagctcctcgttgatgccatagtttgcaagatactgaagtcgcacgttgtttctaagaacactgatgctctaaatctccagcttttgacttcaggaaaatggcacttactttatattcatagaatttctggggcagttcttctcaaactttaacatgcacgtgaatcgccgagggatcttgttaagaggcagattctagctcggtcagtctggatgggacctgagattctgcattcaggttcccagaggatgtcaaagctgctggtgcatggacc

SEQ ID NO: 155349 - DNA, 517 bp, Homo sapiens
agttaccttttcaatccctagattgtgtttgccaaaacttcccttgcaatagggacactccagcaaccctggctcggggctccctgcgtacttagatgtaatactatgtcaacaacatcctgcaggctgaagcagcctcttttttttaaagccttggatcaactatgcaagctcaacttgcttttatttttgttgaaaatactaaattcatttgtcatcactaattccctcaagcaaaggaacagctcctcgttgatgccatagtttgcaagatactgaagtcgcacgttgtttctaagaacactgatgctctaaatctccagcttttgacttcaggaaaatggcacttactttatattcatagaatttctggggcagttcttctcaaactttaacatgcacgtgaatcgccgagggatcttgttaagaggcagattctagctcggtcagtctggatgggacctgagattctgcattcaggytcccagaggatgtcaaagctgctggtgcatggacc

SEQ ID NO: 155350 - DNA, 292 bp, Homo sapiens
gaatgttccagaaagataaaggaccaagggaaaagagagcaggatttggtctgagatataagcaggagattatggtgctccttctaggccacagcaagcaattgaytttaattctaggtaaaatggaaagctggaggaagattttaataaagatgcatgtgattcaagatatgggttttgtcatcgttcttactcactcgaccagcgaggtcatgcattgatcataggatgtcaaagctggaagaagataccagtttagaagatgctgctgtcactgaatgcagatttcata

SEQ ID NO: 155351 - DNA, 530 bp, Homo sapiens
gtttttcaccagccatgatcatgacagtgacaacaataacaatacagccttatgctcatagctccattcattcaaacagccatgcaacaacacctgagatttgttgtgcatctgtgaggactgaaggtccgagctccttcctccaaccacccataccacactcactgaggactcactaggtgtcaggcaccatcttagcacaaataagatacacaaggcctgtgcctttgggagcttaatttctagtagggactggaggagaggggcatatggayaataacaaccaaaaaaaatggtaatgtcacagtatgataaaggctgtgaaagaaataaagtgcaagctagagaataataggagagaactgactgggtagtcagggaaggcctcttaaggagttggcctttaaggggagacctgaagaatgagatggagacaatgcagccatgtttcaggcagaggaaaacgctaagcccatggggtaggcactatggtctgaatgtctgtatccctccaaaattcagatgttaaa

SEQ ID NO: 155352 - DNA, 531 bp, Homo sapiens
gataataacaaccaaaaaaaatggtaatgtcacagtatgataaaggctgtgaaagaaataaagtgcaagctagagaataataggagagaactgactgggtagtcagggaaggcctcttaaggagttggcctttaaggggagacctgaagaatgagatggagacaatgcagccatgtttcaggcagaggaaaacgctaagcccatggggtaggcactatggtctgaatgtctgtatccctccaaaattcagatgttaaaacctaatcctcaatgtgatggtgttaggaggtagggcccttgggaggtgattaggtcatgagggccaagccctcataaatgatattcatgccctgataaaagaggctccagagagatcaacggccccttccattaccaatgaagaacaaaacaaaatgatgacagycatctatgaaaaaggaagcaggccctcaccagacatgaatcttctggtgccttgaccctggacttaagcagcctacagaactataagaaatagatgtttgttgctta

SEQ ID NO: 155353 - DNA, 533 bp, Homo sapiens
agtaagtgcttaataaatgccaattactgttcttatcatctccctgcctggttgccacaacagcagagtatattcagggcttagcactgagatctgatttgcctctgtaaggtcccctgttaagtttcttgctgtggttctcactcccaaggcagtcatcaaatatttgttgaatgagcaaataaatcaatgaatgggtttcctgattaccttatctttaagccaccaaaaggcacctttttatgattaggcttcctttgcaagcaatgtgactctgccaggccctgggcttttgcagaaagmgaaggtggaagggagatggttattagccactgtctctgcaaacgacaagccatctgcaccccgttacctaagcatagacctctgtgggtgccaaacttcagagcccagaaagttggaagggattccgagcttggatccctcaggctaggctattcttggaagccgagcaacacgcctgccacagggaaatgagtcatgcagaggctgaaggcttgatggatttctccacg

SEQ ID NO: 155354 - DNA, 589 bp, Homo sapiens
aactggggatagttgtaaaaacaaatagaacttctctctgcctagaggtttcctttcatgaagataaagtttctagctggaactggctgtttttgcagggaagcacacatgagacaagctttttggagtctctccaatacctgcctgtttcataaatggcacagtctccaaatctgatgctcactggaccagggtcaggctatggaactgattaaaataagtaggaacctccaaggccctatgtccctactctccattttcagattgrtaagctgagacctatgtactggaaaaataagctcaagggctccaagtagaaatagttgtagtcctggagtcagccttgggtttagctccacttccaaaatgtgtcaacttatagaacccttattttttcatagggttatgaagccactggtctattttatccaacagagaaatcagctccaagcaaatcccacctggacacagtgtctttgcctgactccagaaacaagatggcactctgtctccagtggttccactttacctagatttggagcctccaaaacattgtatggccacactccatctctgcctacgatggaat

SEQ ID NO: 155355 - DNA, 589 bp, Homo sapiens
aactggggatagttgtaaaaacaaatagaacttctctctgcctagaggtttcctttcatgaagataaagtttctagctggaactggctgtttttgcagggaagcacacatgagacaagctttttggagtctctccaatacctgcctgtttcataaatggcacagtctccaaatctgatgctcactggaccagggtcaggctatggaactgattaaaataagtaggaacctccaaggccctatgtccctactctccattttcagattggtmagctgagacctatgtactggaaaaataagctcaagggctccaagtagaaatagttgtagtcctggagtcagccttgggtttagctccacttccaaaatgtgtcaacttatagaacccttattttttcatagggttatgaagccactggtctattttatccaacagagaaatcagctccaagcaaatcccacctggacacagtgtctttgcctgactccagaaacaagatggcactctgtctccagtggttccactttacctagatttggagcctccaaaacattgtatggccacactccatctctgcctacgatggaat

SEQ ID NO: 155356 - DNA, 581 bp, Homo sapiens
attttgctctgcatattctaggtgaccttttcctcccccatttttcttcatattttggatgaatttatctgtcagtggaaatgtcttgaaagaataagttcactccaccttcacaaggatggtaatgatgatgatgtttatagcagctaccatttatgggggaactgaccttgggcctcacgactgtgctaagcacttaacakacaatgtttcgttttatcattattatgacctgaggccctgaaaaagaatttgagctcccagtggtttgagaaatgatcccaggaaacactggtaagaggaaagagaagtgagacagggaagtaaaaggaaacaataaatggtaaattttaaattaagtgactgcttaaggcaactgggccttaagatcactagagacatctgggatatagcatgaaatatctactctacatcacagttatcctgcctacaagacaacggactggagtgcttatccacaaatccctaccgttggctgcttccagcaccttcactccccctgcaggtgggctaaacctgcttccaaagccagaaaagacagagtcggaggggttcacagt

SEQ ID NO: 155357 - DNA, 581 bp, Homo sapiens
attttgctctgcatattctaggtgaccttttcctcccccatttttcttcatattttggatgaatttatctgtcagtggaaatgtcttgaaagaataagttcactccaccttcacaaggatggtaatgatgatgatgtttatagcagctaccatttatgggggaactgaccttgggcctcacgactgtgctaagcacttaacatacaatgtttcgttttatcattattatgacctgaggccctgaaaaagaatttgagctcccagtggtttgagaaatgatcccaggaaacactggtaagaggaaagagaagtgagacagggaagtaaaaggaaacaataaatggtaaattttaaattaagtgactgcttaaggcaactgggccttaagatcactagagacatctgggatatagcatgaaatatctactctacatcacagttatcctgcctacaagacaamggactggagtgcttatccacaaatccctaccgttggctgcttccagcaccttcactccccctgcaggtgggctaaacctgcttccaaagccagaaaagacagagtcggaggggttcacagt

SEQ ID NO: 155358 - DNA, 477 bp, Homo sapiens
gaattcagaaatctttacccctaagggacatcatgaagcaagacaaagaatgaaatggagggctaggatgatgactggatttcctgctgattgaaggaatgttgaaccaagcacatgtacttcaatcctaaccatacacagggaagttctttctgtatttggaagagctaagcggaagatctcagcactagtcccagcccctgtgtccatgccatttcagcactagataacaagatatatccatgtaggaagatggatgaggaaagcagggtggatctgtctcccccaaaggaaaccacraggcataaacagcagcagtccccagaggacaatgtacacacaacctctttcctccaactctggtgttgaaactgccctgagctgactttaaatccactgcaggtagttgcatgaggagtacttacaggatcctgctggctctgttgctactctctatcatggagtcctgcagccttt

SEQ ID NO: 155359 - DNA, 477 bp, Homo sapiens
gaattcagaaatctttacccctaagggacatcatgaagcaagacaaagaatgaaatggagggctaggatgatgactggatttcctgctgattgaaggaatgttgaaccaagcacatgtacttcaatcctaaccatacacagggaagttctttctgtatttggaagagctaagcggaagatctcagcactagtcccagcccctgtgtccatgccatttcagcactagataacaagatatatccatgtaggaagatggatgaggaaagcagggtggatctgtctcccccaaaggaaaccacaaggcataaacagcagcagtccccagargacaatgtacacacaacctctttcctccaactctggtgttgaaactgccctgagctgactttaaatccactgcaggtagttgcatgaggagtacttacaggatcctgctggctctgttgctactctctatcatggagtcctgcagccttt

SEQ ID NO: 155360 - DNA, 520 bp, Homo sapiens
gctctgttgctactctctatcatggagtcctgcagcctttgaataaatacctgccaggccaagctagcaaatagcacagtttcatgtctggaatttgcagaccagggctgaaggaagttagacaygcttctgtgaagaaaactgatattctgctggggtttgcaagatccctaaaggtcccgtcctccccctgggaatcccagcagtttagaagattcctgaaagggaaaggagcagctcacctgagacaagcaagggccagattgttgaagccatcgttgccctgctgagcttcaggacactcaactcacagttgcagatttcataagcaacaaaaagaagaatccatttcacaggcatttttcagtgcctgtctgaccacactgatcaaggcagtgggggtacagaggtgcacaaaacgtgcaaagtgcctgctacagtgatgcttaccctctggtggggagagctgaagttctgggaaagtacagtttgagggaatgcctcatatgcaaaaggccaa

SEQ ID NO: 155361 - DNA, 520 bp, Homo sapiens
gctctgttgctactctctatcatggagtcctgcagcctttgaataaatacctgccaggccaagctagcaaatagcacagtttcatgtctggaatttgcagaccagggctgaaggaagttagacacgcttctgtgaagaaaactgatattctgctgggrtttgcaagatccctaaaggtcccgtcctccccctgggaatcccagcagtttagaagattcctgaaagggaaaggagcagctcacctgagacaagcaagggccagattgttgaagccatcgttgccctgctgagcttcaggacactcaactcacagttgcagatttcataagcaacaaaaagaagaatccatttcacaggcatttttcagtgcctgtctgaccacactgatcaaggcagtgggggtacagaggtgcacaaaacgtgcaaagtgcctgctacagtgatgcttaccctctggtggggagagctgaagttctgggaaagtacagtttgagggaatgcctcatatgcaaaaggccaa

SEQ ID NO: 155362 - DNA, 556 bp, Homo sapiens
ctgtgcatcaaagggtcttcatcacttccttgctgaattccagtttctctcttagatacattatttgtcatgtagttattatctatttgttgtttcagttgtacatcgtggaagaggctagttttgaatgcctctagtcagacatcttgatctaaaggaaataattaacaaaatataagttgccactgcatgtcattttcattatgactttgtactttgcagaaagttagtagaaacattaatattgataacagagtaagtcataaaacaattgctttgtaagcagagttattaatatacaaatatgtttataaattttggatacttaccggtcctcaattttgagctactttgtttcccaatacctgaacctatgttttaataaaacggtcagttttttaaaagtctatttgttattaggattatgttctgaaattaatttctaagagatgttttgtaatcaatrgatattcaattcagtattctaaatctgatgaattatcatatttaagtttacaaactgaaactgtagagtcaatgtgataatgaccttgaa

SEQ ID NO: 155363 - DNA, 535 bp, Homo sapiens
ttctattttgttctgaatacatagagtgtgtatgtaattttaagaccagctctgtgtaatgaaaaagacaacatggcatcatgtgatccaataacaaaaatttattaagaaatgctgtgaaacctatgcagattcttatcattttttgtattttctttcagctatttttctcctgcaaaatgtgtttactcatcatctctcaaataactatgtatatttttccctaaatgactgaaagcactaaatatatttatatacacgcacaaaaggaygacagttttcatccaatggacaatgccaaaattgtaagggagtttttgtaaaaacaattattgaatgcttacaagggtggtcccatagttagctaagtatataggttgctaaggtgactaatttgaaggatagtgaatgagtgcaatcatgtctgttaattagtcagttgctacaacttttatttataatgaaatctttaagtagcttgtttatacaattggattttttgagaaatatgctaaatagcctccctgaattgaat

SEQ ID NO: 155364 - DNA, 479 bp, Homo sapiens
tcaaggtagcataaatataaatctgttggtctaagtgactgaaaaattaaggatactttagcctcaagcattgctggatccagggctcgagtgatatctttgaactctttttctttcaatctcttacacaggctctcttctaataaagggaatgatggtgggccatgaccttcatcctgccattgtaatagggtcttaaagcttaggcagaaaactcccagtgggacatttcttggactagtgtgtgtaacatacctatccatgtagtaatctctgtgccaggatgatagggttgtatgatcagtcaaacctgggttatgtgcttatcagtgttgctcccagtagaaatatatgtgttttctaaaggaaagagaggtttgggaccagagaaagaaataaaaacatcttacacaggcaacagcagcaartgtccatagcagacatataatactaagcctattttaaaggtaagaaaacca

SEQ ID NO: 155365 - DNA, 614 bp, Homo sapiens
gatttcaccatgattgtaagcttcctaagacccccaccagaagttctagatactggtaccatatttcttgtacagcctgcagaactatgagccaaaataaacctgctttctttataaattacccagactcaggtatttctttatagaaacccaaaaatggactaacatgatactaattggtaccatggattcgagcattgctctaaagatgatacctgaagatctggaagcaattctggaactgggtaacgggcagagttttgaagagtttggaaggtttggcagaagacaggaagatgagggaaagtttagaagttcttagagactggttaaatagttgtgaacaaaatggtgatagagaaatggacagtgaaggccagactkaagaggtcacagatggaaatgagaaacttactggaaactggagtaaaggtcatccttgttacacagtagcaaagaatttagctgcattgtgtccatgctctagagttttgtggaagggtgaacttaagagtgatgaattaggttatctggtggaagaaatttctaagtagcaaagcgtttgaaatgtggcctgcttctaacagcttatgattagttatgagaacaaataa

SEQ ID NO: 155366 - DNA, 625 bp, Homo sapiens
tgttttgctttttctttttcctggcatcacagaccatgaaggccacaacatctgttacccaggaatacacagaaacaacctagtctccaaagtagcatctattatcagcatctttctattgctgatgagtatcaggggtttccagaaagccacactggagcaatcccacttccgggtatagatcaaaagaagtgaaaacaggatcttgaaatggtatttgcatgcctgtgatcattgtagcattatgcacaataaccaagaggtagaagcaacatacatatctatcaacagataagtgaataaaaaatgtgatatatacatacaatggaatattattcagccttgaaaggcaggaaatcttgtcatgtgctacaataaggatgaaatttgagcacattatgsgaagcaaaataaaccagttacaaaaaggcacttgtatgaggtatctaaaacatttaaacttacagaaacagaaagtagaatcgtggttgttaagggttgcagggcgtgtgaggggaatagggagatgttgtttaacgggtgtggagtttcagccattcaagaagaaaaattcctagagatcttccgtacaacaatgtgcatatagttaacactattgaattat

SEQ ID NO: 155367 - DNA, 606 bp, Homo sapiens
gagtctggcaattgtagtgtttttcctggatagtgaaagatctgagtgaacagttaaaaattgagaatttcattaccaaggaagaaatggagaatagtggatattgagaggcatctatgatattagtgtcttccatgaagagtcctaaaggaaatgatttgggatgtgagtgcaacccaagaaggagagaaagatttctccagaaggaagtgttaattccattgccaagtagagagagaagtcaaggagaatgggagccaagaaaaagtcacaggatttcatgttagtggatcattttagacttcagcagtatttagtttgagtagtttggggcctcgttgcagcagcaaacaaggcacgaacaccttcaattcttaagcttactgtttgagtaaaataacaaaaaaactagccaatgaacaaacaaatatataatgtcaagtagttatatactttccatagaaccaggcaggaagaggagagcattattagtgtgccagcttggaaacagtggccaggaaagctcttttggaagaggtgatgtttgaacagasacttgaggaagtgagggatggactcaaaaagttgcctgttaggaacagagaa

SEQ ID NO: 155368 - DNA, 598 bp, Homo sapiens
tttttccttcaataaaacatctaaactttgatatttcacacattaatctaaagcattccatttgggtaattaggatcttaatatagactctatactgagtaaatcagaaaccaaaatgttaattaaatatgacataatcaaatatttatggctagctgttgagtatttatcttaaatagtccataattagaaatgaaataaaaatcctgtacagaaccatcgtaatacttattaagaaaagttagtaatcaactattcctacatcctgccatagcaaagcctgtatcaagatttatatgtgcgtaggtctgccagagagccctacaataaaaaagacaggctgacatttagaggcaataaagataataaaaattatcaaagtgaaacatcaaatcaggagctttktggcctcaatgactttggaaataaggggcctctggagacacgccataccagatcttgtagtagtttacgtggttgatctccacgtatccatatagcagatatttgcaatgttatactaacttaagcccaagagagaatcctggatctgaagcattgctgatctatctcacaattttaagaggttccacagtac

SEQ ID NO: 155369 - DNA, 579 bp, Homo sapiens
atggtcctgacttgatcctgtccaaagtgtttgctgctgtggctgtccagatcctccttacagatgggaacactcaccctctcagctcctggtccaagtaaaactttggaatttcttttcaacaaaaggactcactcctttggctgtctctcccaaggtcctgccctygccccaggagcagcccacatctaatggtattggaagagagaagaggataagccctcttaccactaagtggaataatgaagggccatctcagctccttcgctctggtggggttggctgaggcctctgttgctgcttcatcacagctcaatttctcccccagcccaatcctgcttccctcattcttacacagttgttgctgctgagcacacacaccaataaattttttgcatgcaaattttggtttcaggatttgtctccctgcaaactcaacctgaagcaccatctaagacagattggtggtcatctaaagatgaactgaattctctgggagcctcaatggaactcaagtgacagcattataaaaagatggaagtgtgctttctatgttcatttaaaagccagagagaaatc

SEQ ID NO: 155370 - DNA, 585 bp, Homo sapiens
ctgacttgatcctgtccaaagtgtttgctgctgtggctgtccagatcctccttacagatgggaacactcaccctctcagctcctggtccaagtaaaactttggaatttcttttcaacaaaaggactcactcctttggctgtctctcccaaggtcctgcccttgccccaggagcagcccacatctaatggtattggaagagagaagaggataagccctcttaccactaagtggaataatgaagggccatctcagctccttcgctctggtggggttggctgaggcctctgttgctgcttcatcacagctcaatttctcccccagcccaatcctgcttccctcattcttacacagwtgttgctgctgagcacacacaccaataaattttttgcatgcaaattttggtttcaggatttgtctccctgcaaactcaacctgaagcaccatctaagacagattggtggtcatctaaagatgaactgaattctctgggagcctcaatggaactcaagtgacagcattataaaaagatggaagtgtgctttctatgttcatttaaaagccagagagaaatcagaaaatgtagt

SEQ ID NO: 155371 - DNA, 577 bp, Homo sapiens
tattgataattttaataaggatgataagagttattatgttaccaaaaacatctactgatagtaggaattccacaaaaaagtattaatgacgaaattgtacattgcctgaagtttggtttaaattatgaaaagcaaaacaactaatgtacatcgggcaagggaacagatgaaacaacactagctaaatattgataagtgtcaaagctgggtgaaaagaatatagaaccttatctctattattctacagagtaaaatatttctgtaataaaaaaataaaaatgaatgttatgaggtctctgtgcacaaataggtgtccaaatctcttttcttgctatcaattataaaaagtgatattataaagcacagggcataaggtttaatacacttatggttctgaatacagattaacaaactactttctggataggtagtttccattcatactccaatcagctggatatgaggatattcaacyacccataacctcatcaactctgggaattatcatcttaataacagggtatgcctgccttgatcaatcagggttcactaagagaattaagccctaatgtgttaa

SEQ ID NO: 155372 - DNA, 577 bp, Homo sapiens
ttctttcaaggacataaggttcaaacaggatattctttacaaaacaaaagtaaaacgaccattaacaatgtttatagcacagaatttacatatgtacacttatgcaatgaaatagctcctaaaggtaaaatcaaaagaaaaataggtaagttgtatttcagaatataaaacacaaatacaattgcaacttttaactacagattataagtaagtaaaggataaaaagaggaagccttgagcaagcgttcctgasgaactgattttagaccagcgaagataaggagaaggggcttttacactgaggaccagaaaataaacaggagatggataccagggaactactccaggcaaagataaaagcatgcacaacagccccagtgcatgaaaagcactggagtggctagagcgtagtaagcaagagaaaaaggatgtcaagatgagactagagccagatccttcaaaaccccataagccatgttcagactcattaaaaaaaaaaaaaaaaaatctcttctatgtgcatttgaagtgtttcaaggtctaatacatttgaaaaatgaagtattattatatagca

SEQ ID NO: 155373 - DNA, 577 bp, Homo sapiens
ctggttctggttctccaccttatatacagcatactgtgggacttctttgcctagataattgcatgggccaatttacacttttttatatatatatacacacacacacacacacacacayatgcatatatacatgctaatatatggatagagacacacatttatatattataactatacaatatataaatttatatattgtatagttatatattatatatgtatatataataaattatatataaatttatatattataaatatatataaatatgtgtgtatataacatataaatttatatatctttatatattatatatgtatatataattatatatagaaatttatatattataactatatataaatatatgtatctatccatatgttatatataatacaatagataatagatatatagatatagatatatagatgtatatagatatatagatgtatatatagatatggatatataaatataatgtatgatcgatatctatatataggtatatagatatacccgtgtttgtgtgtgtgtggatgtgtctatctatctatctatctatctatctatctc

SEQ ID NO: 155374 - DNA, 577 bp, Homo sapiens
ctggttctggttctccaccttatatacagcatactgtgggacttctttgcctagataattgcatgggccaatttacacttttttatatatatatacacacacacacacacacacacataygcatatatacatgctaatatatggatagagacacacatttatatattataactatacaatatataaatttatatattgtatagttatatattatatatgtatatataataaattatatataaatttatatattataaatatatataaatatgtgtgtatataacatataaatttatatatctttatatattatatatgtatatataattatatatagaaatttatatattataactatatataaatatatgtatctatccatatgttatatataatacaatagataatagatatatagatatagatatatagatgtatatagatatatagatgtatatatagatatggatatataaatataatgtatgatcgatatctatatataggtatatagatatacccgtgtttgtgtgtgtgtggatgtgtctatctatctatctatctatctatctatctc

SEQ ID NO: 155375 - DNA, 577 bp, Homo sapiens
ctggttctggttctccaccttatatacagcatactgtgggacttctttgcctagataattgcatgggccaatttacacttttttatatatatatacacacacacacacacacacacatatgcatatatacatgctaatatatggatagagacacacatttatatattataactatacaatatataaatttatatattgtatagttatatattatatatgtatatataataaattatatataaatttatatattataaatatatataaatatgtgtgtatataacatataaatttatatatctttatatattatatatgtatatataattatatatagaaatttatatattataactatatataaatatatgtatctatccatatgttatatataatacaatagataatagatatatagatatagatatatagatgtatatagatatatagatgtatatatagatatggatatataaatataatgtatgatcgatatctatatatagrtatatagatatacccgtgtttgtgtgtgtgtggatgtgtctatctatctatctatctatctatctatctc

SEQ ID NO: 155376 - DNA, 482 bp, Homo sapiens
tgtaattgggagactttgctcttttcacatgcctttcttgttatgcctgaaagtcccacacccttattagggagggacatattagccaaagctggagctattatctacatgaatacggggaacaagttacccatttgttgtcctctacttgaggagggaatcaaccctgaagtctgggcattggaaagacaatttgaaagggcaaaaaatgcccacccagtccaaatcaggctaaaagaccccaccacttttccttatcaaaggcaatatcccttaaggcctgaagctcataaaggaatacaggatattgttaaatatttaaaagctcaaggcttaggaaggaaatgcagcagtccctgcaacaccccaattctaggagtacaaaagctgaatggtcaatggagactagtgcwagatcttagactcatcaatgaggctgtatttcctcagtatccagttgtacccaacccttatacccttct

SEQ ID NO: 155377 - DNA, 538 bp, Homo sapiens
atgtttgtaaaatcctctcaagtttggtagcatggacatttctataggaggaactccctgtagtgaaaaatagtcacataaacctaatactgcaagtgctattttgttttaatatcttaaaattaatctaaaaacaaagccaaagacaattatagttacaaaataaaattgtgtaaatctagattatgtaaaaacaagaatttaacaaaatcaggtgatatcarctggtatgaaccaaattcctcacctttcagagtgggacagtaacagactacatatcaggctaataaatcaaggaatgcaattacatgcttattatttaagataatactatttaacaccagaaaaacacttttaaaaaggaatctgttcaaagtgtttacctctagggagaagggctgggacttgtagcagggggaaaggtaatttttatttttcaataagatatttaatgtggtttggaattttactatgtgcagttttaaaatgccatacaaaaaataaaaagggggtgaggagagggagtaacttgttcaaa

SEQ ID NO: 155378 - DNA, 538 bp, Homo sapiens
atgtttgtaaaatcctctcaagtttggtagcatggacatttctataggaggaactccctgtagtgaaaaatagtcacataaacctaatactgcaagtgctattttgttttaatatcttaaaattaatctaaaaacaaagccaaagacaattatagttacaaaataaaattgtgtaaatctagattatgtaaaaacaagaatttaacaaaatcaggtgatatcaactggtatgaaccaaattcctcacctttcagagtgggacagtaacagactacatatcaggctaataaatcaaggaatgcaattacatgcttattatttaagataatactatttaacaccagaaaaacacttttaaaaaggaatctgttcaaagtgtttacctctagggagaagggctgggamttgtagcagggggaaaggtaatttttatttttcaataagatatttaatgtggtttggaattttactatgtgcagttttaaaatgccatacaaaaaataaaaagggggtgaggagagggagtaacttgttcaaa

SEQ ID NO: 155379 - DNA, 539 bp, Homo sapiens
gctgtgggggacaggggtatggttcccagtccaatggaattatactctcaaggggattatggttgtctctgctgagtcatacaggtcaccakggaagtgggggaaagcctgcagtcacaggcctcaccctgctcccttgcagcccacaggcctactggccattttcattcccaccatgccctccccaacagcactgagtctatttccaggcagctggtgaccaaggctgagaccttgcaccagatcacgagcctccctgttgagaaagcaagctgactcacagttttttagtgtcccagggagcctgcagtggtgatccagttccttcaaagggtctgtggatttttcaggctttcctggtatattcctgcaatagttcttggagcaaaagttcacaccgtgaatctccacatgctgccctgtccatctgagtgagagctacaagctagtcctgcctcctatccaccatcttcctgtttaagcctccacatttgtctttaaataattaggcattttggtcactgatttgtttttgttat

SEQ ID NO: 155380 - DNA, 539 bp, Homo sapiens
gctgtgggggacaggggtatggttcccagtccaatggaattatactctcaaggggattatggttgtctctgctgagtcatacaggtcaccatggaagtgggggaaagcctgcagtcacaggcctcaccctgctcccttgcagcccacaggcctactggccattttcattcccaccatgccctccccaacagcactgagtctatttccaggcagctggtgaccaaggctgagaccttgcaccagatcacgagcctccytgttgagaaagcaagctgactcacagttttttagtgtcccagggagcctgcagtggtgatccagttccttcaaagggtctgtggatttttcaggctttcctggtatattcctgcaatagttcttggagcaaaagttcacaccgtgaatctccacatgctgccctgtccatctgagtgagagctacaagctagtcctgcctcctatccaccatcttcctgtttaagcctccacatttgtctttaaataattaggcattttggtcactgatttgtttttgttat

SEQ ID NO: 155381 - DNA, 539 bp, Homo sapiens
gctgtgggggacaggggtatggttcccagtccaatggaattatactctcaaggggattatggttgtctctgctgagtcatacaggtcaccatggaagtgggggaaagcctgcagtcacaggcctcaccctgctcccttgcagcccacaggcctactggccattttcattcccaccatgccctccccaacagcactgagtctatttccaggcagctggtgaccaaggctgagaccttgcaccagatcacgagcctccctgttgagaaagcaagctgactcacagttttttagtgtcccagggagcctgcagtggtgatccagttccttcaaagggtctgtggatttttcaggctttcctggtatattcctgcaatagttcttggagcaaaagttcacaccrtgaatctccacatgctgccctgtccatctgagtgagagctacaagctagtcctgcctcctatccaccatcttcctgtttaagcctccacatttgtctttaaataattaggcattttggtcactgatttgtttttgttat

SEQ ID NO: 155382 - DNA, 290 bp, Homo sapiens
gaggagccacacggagaagccctgtgactgcctgaccagttcccagatgccgctgacattccagctccaactaccatctgactgcatcctcacaagggscctcgacccagattcacccagctaagcctctcctgaattgctgacacacagaaaccatgagaaaaaaataaaatcattattgttgttttaagcccactaattttggactggcttggtaggcagctgtagataaccagagcctttgtccacagccttgtcccatctgtgtctcagaagacagaaaatggtaa

SEQ ID NO: 155383 - DNA, 290 bp, Homo sapiens
gcctcccagggagaggaaaaggcaggtgcaaaggccctgcggcaggaatggattccatgcatttgagaaactgagtgtgttagcctgttcttacattgctataaagaaatacttgaggctgggtaatttataaagaaaaaaggtttaattggctcacggttccacagsctgtacaggaagcatggaggcttctgcttctggggaggcctcaggaaacttacaatcatggcagaaggcaaaggggaagcgggcgcatcttacatggccagagctggaggaggagagggcaa

SEQ ID NO: 155384 - DNA, 574 bp, Homo sapiens
cctctgaagcctggagaacggaatccctgagttcatcattttctttcctcacttcatctactgaacttaggggcaaccaaccagcttcattatgttccttggttctccaaatatggtcaaaagtattatgtatagagtcactaaactccttgcctctcacgagcagtgaatcaggagtgtcagatggatttattttgtgtaactctctaaacagttcctcccaaggactatcagtgttctccatactattagaagtagagtccttagcatttttgagtctaatcatcttaagtagccaactccagaaaccccaaagccaatgaaaaactccatccttaatattctgttcctctagaaccactcctggtaccaaaatctgtattagtcagggttctctagagggacagaactaatcggagatatatatatacacatatgtatatatatattttatatatatacacatatgtatatatatattttatatatatacatatatatattttatatatatacatatatatatatatatawaaattaacttacatgatcacaaggtcccacaataggccgt

SEQ ID NO: 155385 - DNA, 581 bp, Homo sapiens
tgaagcagcctgctgagccagcattaactaggagcccagagaggctccctaatgcagggaaagagtgagagactcccagtggttcacattcccaccctggactcccacagtcctagccatgggacagccccattaaccctcaagggctctaagactaacaaagagagctgcctggaggtcgtacaatggcattgctccagagagagacatctcgctgagtcccacaracccccaagacctaagcagctacagtagagcaccattttgaaaactcaatctggaccagactatgtcctgccccagggcgcaacagctccccactgcatcttcacatccctagaggctcattgacgttcccctctcacagttgcagctgccagtgccaaggcagaagccacagtgacccttctcctcctccctccccattgtagaggagaagctgcacatttttatgcatcctaaggacaaattccacctcccacagcctctacagctgtgatttgctgtgaggcctcagcaaagcatatgcccccagccacctagctacagctactgaaagcaacccccacatttttcagtcg

SEQ ID NO: 155386 - DNA, 581 bp, Homo sapiens
tgaagcagcctgctgagccagcattaactaggagcccagagaggctccctaatgcagggaaagagtgagagactcccagtggttcacattcccaccctggactcccacagtcctagccatgggacagccccattaaccctcaagggctctaagactaacaaagagagctgcctggaggtcgtacaatggcattgctccagagagagacatctcgctgagtcccacagacccccaagacctaagcagctacagtagagcaccattttgaaaactcaatcyggaccagactatgtcctgccccagggcgcaacagctccccactgcatcttcacatccctagaggctcattgacgttcccctctcacagttgcagctgccagtgccaaggcagaagccacagtgacccttctcctcctccctccccattgtagaggagaagctgcacatttttatgcatcctaaggacaaattccacctcccacagcctctacagctgtgatttgctgtgaggcctcagcaaagcatatgcccccagccacctagctacagctactgaaagcaacccccacatttttcagtcg

SEQ ID NO: 155387 - DNA, 627 bp, Homo sapiens
tctacataatgtatgggacaccataaaagtataaaatttttcgcgtcccagaggcaaagagacaacaatagtgttggaaaacctatttgacaaaataacagatgcacacttcccacgtctaagaagagatttagacatccagatataggaggctcagatatccctaaatacatacagtaaaaaaaaaaaaaaaaaagatcttctccagggcacattataatcaaactgtcaaaagtcaaaaccagagagaattctaaaaatagcaagagaaaagtatctgccccaacatattaatagtgagtttctcagcaggaaccttagaggccaggagagaatgggataatatattcaaagtgctaaaagaaaataaaaataaagcctgtcagccaagaatactatacctagccacactaaccttgataaatgaaaatgacataaatgctttcccagataaatgaaagctgagaggatttatcaccactagagcagccctacaagaaatgcttaagggagtcctacacctgaaaatgaaagaactgaaagaacatatttaacatcatgaaaacacataaatattaaaaaaaaaaaamccctggttgagcaaacacataaacaaggaagagaaaa

SEQ ID NO: 155388 - DNA, 574 bp, Homo sapiens
acccagaaatagagccacgcatatacagtcaactgatcttagacaaagccaacaagaacatacactgggggaaagacactgtcttcgctaaatggtgctgggaagattggatcaccatatgcagaataataaaaccagaccccctatctctcaccatataccaaaatcaactcaagatggattaaagaattaaacacaagacaggaaactataaaactactagaagggccgggcgtgttggttcacgcctataatcccagcactttgggacaccgaggcaggcggatcacatggtcaggagattgaaaccatcccagctaacacggtgaaaccccatctcttctaaaaatacaaaaaattagccgggcatggtggcacacgcctgtagtcccagctactcgggaggctgaggcaggagaatcgcttgaacagggaggcagtgagccaagattgcgctactgcactccagcctgagygatagagcgagactctgtctcaaaaaaacaaaaaaacaacaacaaaaaaaaactagacggaaacatttcaggatggtggcctaggcaaagatgctgtg

SEQ ID NO: 155389 - DNA, 633 bp, Homo sapiens
catggcaaaggaaattaatgatgcagatggaatgaagtttgctactcagctcaacctaaatgaaggaagaatattatggattattcttgtgggtgcaatataatcacaagggtccttcaaagtagaggagggaggagaggtgagagtagtgtgttgtgagaagaactcagactgctgttgctggctatgaagatgcagggaaaggaccacaagccaagaactataggaagcctctggaagctggaatgggcaaagaaacagaatctcccttagagcctccagaaagatatgcagccctgtgacaccttgactttagtccactgagacatgcgatgaacaagtgtcagatgataaatttgtgttgttttaagccattaggttggagrtaatttattagagcagaaataggaaactaatacagaccccaacaatcagcttgacatggaaatgtgaagtttttgcattaagctttgtcttgagtcatgatcaccaggaaatcaacaatcacttgggaaaaagaaaatggaattccttgcttaagttgaagacatgctattgtttctgcctggctagctagctagcacgctggttcatctcctgcattttatgtggtaccctgtttgggatgagaac

SEQ ID NO: 155390 - DNA, 610 bp, Homo sapiens
ttacaactgaactaacagagggaagaaattggtatggaaatgattttcaatatgttttgtgttgctttttaacttttcttttaaaacatttttaaatcaagmtggccaactaactgatccaagatttattaacctgcaagcaccacacaaaatagaaaacaaagagaaaaagaaatgtagaggataataaaagtagttttagtaatagaaaaatttctgatgaaaaggcctacatgtttacattaaaccacatcatttaaatgttattaattttactgagcacctctctgtatggggcacagtgtaagttgagtattgagaatgactaaagcatatggctcctgacttcaagaaattctcttcaggctgggcacggtggctcacatctgtaatcccagcactttgggaggccaaggtgagtggatcacctgaggtcaggagtttggtaccggcctggtcaacatcatgaaaccccatctctactaaatatacaaaaaactagctgggtgtggtggctggccagtgcctgtagtcccagctactcaggaagctgaggcaggagaatcgcttgaacccagaggacagaggttgcagtgagccgaaatcatgc

SEQ ID NO: 155391 - DNA, 610 bp, Homo sapiens
ttacaactgaactaacagagggaagaaattggtatggaaatgattttcaatatgttttgtgttgctttttaacttttcttttaaaacatttttaaatcaagctggccaactaactgatccaagatttattaacctgcaagcaccacacaaaatagaaaacaaagagaaaaagaaatgtagaggataataaaagtagttttagtaatagaaaaatttctgatgaaaaggcctacatgtttacattaaaccacatcatttaaatgttattaattttactgagcacctctctgtatggggcacagtgtaagttgagtattgagaatgactaaagcatatggctcctgacttcaagaaattctcttcaggctgggcacggtggctcacatctgtaatcccagcactttgggaggccaaggtgagtggatcacctgaggtcaggagtttggtaccggcctggtcaacatcatgaaaccccatctctactaaatatacaaaaaaytagctgggtgtggtggctggccagtgcctgtagtcccagctactcaggaagctgaggcaggagaatcgcttgaacccagaggacagaggttgcagtgagccgaaatcatgc

SEQ ID NO: 155392 - DNA, 595 bp, Homo sapiens
tttctcactaccataagtaaccactattccgattccataaccattgattagtttttgccagtcttaaatttcaaagaaatagaaattattcaggatgtactctctcatgtctggtttctttccttcaacacaataagtttgatccatattgtatgtaccagtagtttatttctttttattgttttacggcactccagttatgaatatataatagcataatgtattcattctcttattgatgaatatttgttctcttcttccagttttcagctgtaataaaaaaaatactacaatgaacactcttgggcaggtcttttctgttggcacatgattgtaaaaagagctctcttttatcccaatcatcaaaaggcaaaaatgaaacaaaatacacacaatcaacatacactcttatgatatttaggagtaacctgtcaattctcaacaaaccaaaaagaaatcagaatagcattagatgtttttgaagaaatgaaagaacatcctacktgatgactgaaccagaacatagatagcatcctgttacagatggaaaaacttgaaaatctagtgaaatggaaaactcagtagatatggtggt

SEQ ID NO: 155393 - DNA, 595 bp, Homo sapiens
acatttgtataaaatctcccaaatcatgaaagatttataatttgaaatgtatttggatttttctccagttaatcaggtggataaaaattaggagtactgtaactagaacaattaattgagttgagctgagtgttatraaaaatgaaaaaaatttcatggcgtgttttggttacataaatgaaactaagcgcctgttcactaacacagaattggcgtgatgagagctgcctgtgtccttttcaggagcccaggttaataattgaaacatagatcagaagaagaggggtcaggaggtgcattcttgatattaagtctattgctggccctttatgggcttgtgtaggttaattaactctggaaagactcagttgccactcctgagaagtataatgaaaaacagtcacttgccattcatttcagcaactaagtatgaatgctgatgacagtggtgtgcagtagatgtagcaaagccctagctgctgggggatggagacaggcaggggaaagcatggtgccaaagtagcacaaagagagatgtgctccataacactgacatgcctaccacttgtttgggaagtacaggagacctagttga

SEQ ID NO: 155394 - DNA, 595 bp, Homo sapiens
acatttgtataaaatctcccaaatcatgaaagatttataatttgaaatgtatttggatttttctccagttaatcaggtggataaaaattaggagtactgtaactagaacaattaattgagttgagctgagtgttatgaaaaatgaaaaaaatttcatggcgtgttttggttacataaatgaaactaagcgcctgttcactaacacagaattggcgtgatgagagctgcctgtgtccttttcaggagcccaggttaataattgaaacatagatcagaagaagaggggtcaggaggtgcattcttgatattaagtctattgctggccctttatgggcttgtgtaggttaattaactctggaaagactcagttgccactcctgagaagtataatgaaaaacagtcacttgccattcatttcagcaactargtatgaatgctgatgacagtggtgtgcagtagatgtagcaaagccctagctgctgggggatggagacaggcaggggaaagcatggtgccaaagtagcacaaagagagatgtgctccataacactgacatgcctaccacttgtttgggaagtacaggagacctagttga

SEQ ID NO: 155395 - DNA, 454 bp, Homo sapiens
caaataaatggatggctcatgactaaccagaacaaatactgagcaatcagccttctgcttragatcattttctatgaaactgagcttcttgggtctgaccttcatagcttcacttgggctccccggaaatctctctttctaattatttacagtattaagtcttttcagtcattctggatttgatttccttaatttatcattacttccaaccttaggttattcattgggtagccaaaagggcaaagggaaatttttatgcaggtcatgccttcacctgaataagaattcttgatggcaatgaagtcagcttccttctaaaaagattaagagccttttgtctggagagttatttaataaaaagtgaacattcatacgttgtcttgctggcttttaaaggtaattaaaggtgcaagtgagctaacagtgaaggttcttcattgactggaatggttgc

SEQ ID NO: 155396 - DNA, 451 bp, Homo sapiens
ataaatggatggctcatgactaaccagaacaaatactgagcaatcagccttctgcttgagatcattttctatgaaactgagcttcttgggtctgaccttcatagcttcacttgggctccccggaaatctctctttctaattatttacagtattaagtcttttcagtcattctggatttgatttccttaatttatcattacttccaaccttaggttattyattgggtagccaaaagggcaaagggaaatttttatgcaggtcatgccttcacctgaataagaattcttgatggcaatgaagtcagcttccttctaaaaagattaagagccttttgtctggagagttatttaataaaaagtgaacattcatacgttgtcttgctggcttttaaaggtaattaaaggtgcaagtgagctaacagtgaaggttcttcattgactggaatggttgc

SEQ ID NO: 155397 - DNA, 582 bp, Homo sapiens
accttaataatcaatgcagatcactgcatgatcgattcagcagcagggatgggaattaatcataacgacagttttctagactatggtccaatgtagtacccactaatagaggtgggcttatgccaaggattattttcacaggactgtttctgaagtttccctctttggtcttccttttgttcgtttagctagaatgtcagttcaagttttaaaacatcataaacaacactgtgtttatgatatcatccttagatgacacaactgatttgaccattaggataggaaatgcatttttttaaaaaaagacagcccagactagattagatttctaatctgaaaattatagcttagaaattaaatcttttaaatgacttgacagaytttttttccacttctggttctattgaacaaattgagatgataaacacctgctgggtatgtatacacccttgtacacactgtttgatcatttctaagttccacatatttttgataaagcatatacttaaaatatgggattgattattttctgaagatttatttcccttcaactttgtagactttctgatgttagttttgctg

SEQ ID NO: 155398 - DNA, 600 bp, Homo sapiens
catttgccaatgggaggattttttttcttagtccacaatttcattgactgaatagtcatctgtaggtcccaattctatgtgaggatctcatgccagctgtctggtctactttctgtgaagactggcattttcccatccctaggaggctattggtgatcagaactggcatgtgtcttaagggcacccattgagtcagcttcattgtctactttggtttgaaatcctctgtcatcactggatcctgagaattttctttaagttattgcaagctcagctctgcatttaaaagaatattattatattgtatgcagtatttctagatgttctctatcaggaagatttgcaggatatgtagccagaaatagaggttcgcaggtgcttagaatatctgctgactaaagctacttgagtygatctccccagcctaataaactgaaaaatgtagaatttgtgtgaaacaattgtgtgtgcaatcatttggactattgttaattctcacaaggtagtttgatattagttttgtgtgtttcagtgaactctttccacttaaattataatttcttccagttcgtggactgcatctgttttttcttctgtatg

SEQ ID NO: 155399 - DNA, 633 bp, Homo sapiens
cacacacatacgcacacacacatatggtgtttgcagttaaataaaacacttgaaaatcataagcatagatcaaatatgtcttttgttactatataataaagttaaagtagcccagtattagaaataaaaaaaaaaatcacacacaagggcaacaatccttgatttcagtgtttccaaccctggaataatctggtaccaaatgttcagcttccttccaaatcattggtcaattgttggaatgtgtgtgatgcatgcatgtgtatgtgtgtgtgtgcatgtaaaaagcaatcttatttgcaaaatatgccaaggcaaatattttgaaatgaagtggaaaatcaaggtgttgtccacagaattttgcatttttatcaaaaagacccttaagcattcccagaaactggcrcttccacagtgccatgagaagtgaaaacatgtttttacccaatctgtagccattttatttcacttccaaagtattattctacaatctttttcacaaatatgagagtaactatattgtatacaggtgtattattcatgttttactgaattttcataaggaataaaaattttaaaacagaaaggtggatcgatcatgtgaggagataaaacattcccattcaaccgcaa

SEQ ID NO: 155400 - DNA, 633 bp, Homo sapiens
cacacacatacgcacacacacatatggtgtttgcagttaaataaaacacttgaaaatcataagcatagatcaaatatgtcttttgttactatataataaagttaaagtagcccagtattagaaataaaaaaaaaaatcacacacaagggcaacaatccttgatttcagtgtttccaaccctggaataatctggtaccaaatgttcagcttccttccaaatcattggtcaattgttggaatgtgtgtgatgcatgcatgtgtatgtgtgtgtgtgcatgtaaaaagcaatcttatttgcaaaatatgccaaggcaaatattttgaaatgaagtggaaaatcaaggtgttgtccacagaattttgcatttttatcaaaaagacccttaagcattcccagaaactggcacttccacagtgccatgagaagtgaaaacatgttttkacccaatctgtagccattttatttcacttccaaagtattattctacaatctttttcacaaatatgagagtaactatattgtatacaggtgtattattcatgttttactgaattttcataaggaataaaaattttaaaacagaaaggtggatcgatcatgtgaggagataaaacattcccattcaaccgcaa

SEQ ID NO: 155401 - DNA, 633 bp, Homo sapiens
cacacacatacgcacacacacatatggtgtttgcagttaaataaaacacttgaaaatcataagcatagatcaaatatgtcttttgttactatataataaagttaaagtagcccagtattagaaataaaaaaaaaaatcacacacaagggcaacaatccttgatttcagtgtttccaaccctggaataatctggtaccaaatgttcagcttccttccaaatcattggtcaattgttggaatgtgtgtgatgcatgcatgtgtatgtgtgtgtgtgcatgtaaaaagcaatcttatttgcaaaatatgccaaggcaaatattttgaaatgaagtggaaaatcaaggtgttgtccacagaattttgcatttttatcaaaaagacccttaagcattcccagaaactggcacttccacagtgccatgagaagtgaaaacatgtttttacccaawctgtagccattttatttcacttccaaagtattattctacaatctttttcacaaatatgagagtaactatattgtatacaggtgtattattcatgttttactgaattttcataaggaataaaaattttaaaacagaaaggtggatcgatcatgtgaggagataaaacattcccattcaaccgcaa

SEQ ID NO: 155402 - DNA, 633 bp, Homo sapiens
cacacacatacgcacacacacatatggtgtttgcagttaaataaaacacttgaaaatcataagcatagatcaaatatgtcttttgttactatataataaagttaaagtagcccagtattagaaataaaaaaaaaaatcacacacaagggcaacaatccttgatttcagtgtttccaaccctggaataatctggtaccaaatgttcagcttccttccaaatcattggtcaattgttggaatgtgtgtgatgcatgcatgtgtatgtgtgtgtgtgcatgtaaaaagcaatcttatttgcaaaatatgccaaggcaaatattttgaaatgaagtggaaaatcaaggtgttgtccacagaattttgcatttttatcaaaaagacccttaagcattcccagaaactggcacttccacagtgccatgagaagtgaaaacatgtttttacccaatctgtagccattttatttcacttccaaagtattattctacaatctttttcacaaatatgagagtaactatattgtatacaggtgtattattcatgttttactgaattttcataaggaataaaaattttaaaacagaaaggtrgatcgatcatgtgaggagataaaacattcccattcaaccgcaa

SEQ ID NO: 155403 - DNA, 511 bp, Homo sapiens
tttagctggcttgtttcatttagcgtaaggttttcaagatgtatctatgttgtagcgggtatcggaactctactcctttttgtggctgaaaactcctccagtgtatgcatatatcacattgtgatcacccactcctctgtcatagacactgggttgtttccactttggggctactgtgaataatgctgctatgagcactggtctacatgtatctgttcaagtccctgctttctattcctttaggtgtatacccagaagtggaagagcagggtcaaatggtaacttgacgtttcatttatttgaggaactgctaagctgtcttccacagcaactgcaccattgtacattctcaccaacagtgtacaaggrttctggtttctcgacatcctcagtagcactgactgttttctatttttctttttacataacacattctaatgggtgtgaagcactatcttattgtggttttgatttgcatttctctaatgatcagtgatgctgaatgttattt

SEQ ID NO: 155404 - DNA, 510 bp, Homo sapiens
atgagcagacagcaccaacaatgagcgattatttgtggagcacgcattacatttactcagcatcaccctggttactgggggacatgcacatagagtatggagcccacaggtagtaagtgctttattagagtttgttaagtaaacatgtaattacatagaagataaactaaagtttttattatttttatatgaaagttatcaaacatacagaaaagatgaaagatttttacagttaagacccataaacccatcactagattctacaattaacacttaatttaattctctttatcagaaatttacctgctactcatccatcaatctgacacttttgattgtataaaggtagattctacttgaggaaacatgatgtatacgcatgaaacaattactcagtattttctaggacracgctaaatagtgagacagaggcacacgtctggatggagttaagaaggtgatcatccgtgaggaataatatgttcagagactgtgtcatggagggaagtg

SEQ ID NO: 155405 - DNA, 595 bp, Homo sapiens
gcatttattcaattatcaggccaggtttttttgaggctctactatgtgtcagaaattgtgctaagaggttgaaatgatacaaagattaaagtattaatttcttcctgttctttcctcaagtctaggggatgaagacagatgtgtcacacacagtgtgacacaaagagggggaagcatgtcgtgtgggagtgaccacgaggaggtggccaggtccattgaggagaatagagagggcatgcaagagggccrccatccaaagcaggtctcataggataaggcactgagggcatggaagaggaaagaggccacacatagtagatatatgtagataaatcaagaagtagggaggaaatatgcaagtgtagaaaactggcccaggttggatgcaggtgcagcctggaaaggcagttttggccaacttacggtgatgttcacgtgctcagctaagaagtgtgaacttacactgaataaggaggtgggcagagagaagagtgacaggcgtaccaacagtttcagcttgggccgccaggtggttgagatgctatcgatcccaataataacatcaaggggaggagaaggtttgagaataacgttt

SEQ ID NO: 155406 - DNA, 573 bp, Homo sapiens
ttacgtgctaatattgaaattgaattgagactggaaaacaagtctactgatcatttcgccaccaaatgcaatcagaaaaggatataatgagaacaacatttatttttatctttttttccacttgcacttctctgctaacattcctcccaatcttccaacccactctttaattcaaattctgtttaaaaggacattatatcaaaaacaagactttaaatctgttcctttgatttttaaatcaagttattttaaaagttcaagtttgtttggaaaatcttatggtaagaccagtggtcctttctttgcctcacccaagatgttccccatccctgtccccacacacaatggaagtttagactgaatctgtttattgagtctaactgtgtcttatacacatgcacctgattttgcyggtaagtctagttggctccccaagcatagtgagtagaaaataagaagtcatcagccaatgttgaaggtggcagacaggctatggtgtttgatgggtagaagggagttcagggagaggcaaccgtgtgtttgacaaagattttcatggcttcttactcagca

SEQ ID NO: 155407 - DNA, 557 bp, Homo sapiens
tatctttctattctttctataggaaatggtaacataaaattctttgcatctgaagatgtgataaaaagtatatagctaagaatataggaaaatattacagaagtgcattggggagatatttaataacaatattattttcctggagtttctgatgtttgtgggtatattttagcctttaaaaaattattacttgtgatttctcattttaattaaatactcacatccatacctaattttatatttgtaattgcrtattcttttcttaaagagcacctcaaaatggcataatattcaagccccactgatctgggcccatgttcatacctagaccagaggcttcactctgaaaggcaatgtgaacatattaactaataaagtactggagttggtattatctcccagcatgaagaaatcacgttcagtgtaaaatgactcatctgtgttgcaattctggggaggatagggaatcagaggataccagagcgagataagacaagatgaggaatgagaacagctaagatgaatgtcaccttcttcagtggcttcagagacacata

SEQ ID NO: 155408 - DNA, 581 bp, Homo sapiens
tggccccggtctacctgctaaatcccacacaggacttggcccttccgatgctaggggaacagaagatggattcaacacctcaagacttcaaagtgcacagtgggttcaggggacattaaatagatccatgtgtctggagcatgaatatcaagttgaaaaaaatgggaccagatgatgggggctttgagtaccatgatgtgaacgttaatttgcagggagtgagcactgagtatacgcagatctgtactagattctgtgaacaaactgaatacataaaagtgtagtcttaagctgcaaactgtttggcctcttgtctaggaataacaaacctgtatgagagaagcaggaaaagaagcaacttagggccaggtgtggtggctcatgcctgtagtcctagcactttgagaaactgaggcaggcagatcgcttgagcccagragctcaagaccagcctgggcaacacggtgaacctcgtcactaccaaaaaaaagaaaaaaatacaaaaattagctgggcttggtggcacatgtctgtagtccctaggctggggctggggtgggggtgctcaagtgggaggatca

SEQ ID NO: 155409 - DNA, 718 bp, Homo sapiens
gaaatttaactatagaaggcgaataatcattgagtaccagtattatcaaaacatttgcttaacactattacatacgcaaagtttgaagaaatgcagaataactatttgcctaattcgttttaaacattaaatgacttttgccaaatctagacctacttactttgcttctcattttcagttgtaatcttttaaagaagtcttgagacttcaagaatttaatgttaatatttaactcatgatgtgtgcttgtacaagtttgtgctcagcctggttcaactgagagtttcatgctggtattgctttcctcaagtgagagaaagcatttagtatttgctaaatagctttatgtccattgtaaaactgcctgcatttttgtttatcttgaccttttctttctctttattattatttacttcataaacattccatgatgatgagaacatttatctttcacaaatatctctatttctaattttttagaatatatctttgtccatctttaatattttgtgggattagccgtyccacttcagcagaacagaatacagtatgacaatgtaaaggtaagcaacccagtaacctttataatagtaaacaaaatagtcatttacctggattagatggtagaaatttgtctttgtagtagactaccaagtccacgtggtacgaagaaataatactgtctcaaattatttaaatgctaatatgatcagcatgt

SEQ ID NO: 155410 - DNA, 573 bp, Homo sapiens
gttttcttctttaaagaaaaccaaatggctaactcagatagtcatcccaaatagcaagtgagtttatgatgaattatgtatgaaaaatggcactttcaagtcctctacttgagaactagttgtttatcttgagagcatgtatgcaaaaggttatatctgcttggctctgcaaagggtgagatttcttcctaactctatgatctcttagcggattscctgtgatcccctaatactcttgtttattgcttaccgaataataaaacttctttactgcccttctacttttgtggacaggctttctggtttggaaggagattttatttttaattatatttccccaacacttccaactgctgattaaactattggaattacgaaattaataatggtgaggttttttttttaactttcccgaattggctcttattctaacctttaaagtttcaaatatttctaaaatatgagttgcaaaccttgatctatcaaaatttgaatattcatcttctaaataaggatgttttcactctttcttttttattattattatttcattggctaatggaaacagaagat

SEQ ID NO: 155411 - DNA, 529 bp, Homo sapiens
ctggactaattttgtgaagaacagaagattcacagcaacccatcagaagaagcccaacttacttgagctgtcatgataaggaagtcccatctgctttaacactatagaaaagtaactttcaaaagactagtcagcttctttttttctcatttatgctttcttcagcccttttctgccctaaaaccaaccccttttgctcagctcatcagagcactcattctattttgtgagatgctgcttgatttcaaaatcactgggaaaagccaattaaaaaaaaaaaytaaatatattgacattttgtctgttgacaatagtggttaattctaaaacttcttgacttacttttattttctataccattgtagtaatcagtgtgttcagttaactaaagcagcagatgtgatacatgcctagaaacaaagtaaaatcaattgacacctgaatttccatagtcattacttttcattttttcattgtgtttgagataatagtattaaatgtgaaaaattaatattcatagacaaatatt

SEQ ID NO: 155412 - DNA, 508 bp, Homo sapiens
tgatgctcattattagaggactgacttcttatatgcctccaatattcataggtaccaaacctacaataatcatatagaagagatatacttggaaagttatgttataaggtagaaaaatatcgaaaaggaaagttttgcctcttaatattttgctggttagaaaaacaagaatctcagatgcaagacttmtttaatgaagctaatacatctttgctgtgtatggtattatacagaatgacaataaagtaaaatcttcattagaagattatatgtatttctgttttgattaaatcaataatcctttaaaatatttaaaattactttcactcagtgttattatttcctatagaatgtaatgaaagcaatattttgtaaactgtactcattaaaatcctgtctctaatgttcattgcgtgaactcaccatgtaggtaaagataaactctaatgaggtcctttgatgatttctgtagctaatcccctctggtaccacaggataaattggcctt

SEQ ID NO: 155413 - DNA, 508 bp, Homo sapiens
tgatgctcattattagaggactgacttcttatatgcctccaatattcataggtaccaaacctacaataatcatatagaagagatatacttggaaagttatgttataaggtagaaaaatatcgaaaaggaaagttttgcctcttaatattttgctggttagaaaaacaagaatctcagatgcaagacttatttaatgaagctaatacatctttgctgtgtatggtattatacagaatgacaataaagtaaaatcttcattagaagattatatgtatttctgttttgattaaatcaataatcctttaaaatatttaaaattactttcactcagtgttattatttcctatagaatgtaatgaaagcaatattttgtaaactgtactcattaaaatcctgtctctaatgttcattgcrtgaactcaccatgtaggtaaagataaactctaatgaggtcctttgatgatttctgtagctaatcccctctggtaccacaggataaattggcctt

SEQ ID NO: 155414 - DNA, 514 bp, Homo sapiens
cttctgagctgttctaacactaaataaaactctttttcttcaccmttcacttgtctgtgtaactcattcttcctagacacaggacaagaacctgggcaaatgcactgaggccacagtggcttctgactagaaaaatcaacaccccagacatctcgtaacactaagggtagcatgggcatttctactgcagaggcagtagagagaggctttcagtttccccatgggccagagctgctacttgcttgatatctctggtggtgtgtggctggaggaccaggtatggagaaccctaccagcaaagagatgtaggaatgggcactgatatagcagtttggccgttttctgtagggctgctgtggtatgctgggggcctgctctactccctagtcatctcagattttccagtacctggaggtaacaacaatgaaggctgtataacagcaaagataactgcctgcccctctctgggagctctgtcccagggatttaccaaactgctgccagcccaaatgca

SEQ ID NO: 155415 - DNA, 261 bp, Homo sapiens
ttggttgaattaagacatattttaagctattttttgtgtagaggtaaaaatagaaatttaaaatatggaaattaaaaagtctgattttcctcctaggtatattatwtctctagctaacattatatttcatggatttttttctctgtcatgttggcatagattcatattcctgttaactgtataaattataatgtaatgttcttttttaaaaaaaattgtgtcagggtggttgcttttgtgcccagagcaatatgacaagtg

SEQ ID NO: 155416 - DNA, 384 bp, Homo sapiens
catctttattggaatttacactgttctggatatgggtgtctgaccacccattctctgccaaaattcccgcttaaggcttacagaatgtctgactttcattcataggttcctcataggatctcaggtggaatttacattaatgagattttcaccatcaaccaagagatatattttctgataattggaagtgcaaaactgtgcatgaccacaagatctatgactctgtacatcctcattsagaagcagtcattctaatagaaaattgaaatagtctattaaaggttcagataaaaccccaacttagatataataccctgagagattagggtgctttcctaatggagttgatgcataggacatacaacaaatatatgatgttgagtt

SEQ ID NO: 155417 - DNA, 549 bp, Homo sapiens
aaaagaataagcacaaataagcacagactaagaagaccacaataaacacctaactcttcaatgccagcacactgacatccacaagcatcaagaccatccgggaaaaaatgaccttactaagaaaactgaatraaaccaatgactaattagggagagacagagtattcaaaatagctgtcttgaggaagctttattcaagataacacagaaaagaaattcagaacctatgagaaattgaacaaagagatcaaaataattaaaaagaaacaagaagaaattctggagtgaaaaaacgtaattgacattctaaagaatgcatcagagtctcttaacagcagaattgatcaaacagaaaaaataattagtgaacttgaagacagactatttgaaaatatacagtaagaggagacaaaaggaaaaaaagaaaaaaataacgaatgaagtatgcctgaaagatttagaaaatagcctcaagagcacaaatctaagagttattggccttaaagaggaagaagagggagagagattagggtagaatgtttattcaaa

SEQ ID NO: 155418 - DNA, 509 bp, Homo sapiens
tattggaaaaaatcttataatccaattaaaaatgagcaaaaaatctgaatagacattcttcaaaagaaaacatacaagtgataagtaggtatatgaaaggtgctcatcattgattatcagagaattgctagtcagaactacagtgagatatcttctcatctcaccccastaatagtagctttttttcaaaagtcaagcaataacaaatgctgctgagtacaggagaaaagggaactcccatacattgttggtgggaatgtaaattattacaaccactaggaagaacagtttgaaggttcctcaaaaagccaaaaatagaactactatatgatctggcaatcttactgctagatacatacccaaaagaaaggaaattggtatatcagctagctatctgtacttgcattttattgcagcactgtttacaatagccaagacttggaagcaacttaagcatccttcaacagataaatagataaagaaaaggtcttacatatataaagtggagt

SEQ ID NO: 155419 - DNA, 430 bp, Homo sapiens
gcaggaagaattcatttcttttcagagggacacttgcaaaccaatgcttaaagtttcagccactgtgatgccataatcatttctgaaaaagacaatcaaactgtcccagggaaggctagctaaaatttttacttatttataatttcatctkcatcattatattattgctagcataaaaacaagtaccaggttcctactttataaacactgtttaatgaagtggcctagcctctatgacatcaccaaataaatatatcatgcttcattttaggattcttatgaaggacagactctgtgagttaacctgtgtgagaagctttaggcccaaagttttatagactttcattacacacacacacaaacacacacacacacaaaacaaaacaaaaaaaacaaaatctttttcttccatatacagtttttaaaatct

SEQ ID NO: 155420 - DNA, 490 bp, Homo sapiens
agtcaaaacacacaacatatttatcgattaagtttgcagtcttatatgggcatagtttgtgatgcccccaaacaattacaataatagcataaaggatccctaattgtgacgcagagacatgaagtggcacrtgctgttggaaaacagtgctgatatatttgctcaaggctggattgtcatgaattttcgatttgtaaatatgtaaaatctgcaaagcaaaataaagaaaataataaagtagttattctgatagttgaccagtgctatcacataataagttctggtatactgctatgccaccttgtgttataagagacaactaaagcctagctaatggctttgcttgaaactttttttaaagtatggcaaaaatgaaaaatatagaaaaattatgtttttaactccaggtacagttaatagaatcattcaacttaataaaaatcaattaagtatattacaaataatttattaaaacatatatatgtatata

SEQ ID NO: 155421 - DNA, 490 bp, Homo sapiens
agtcaaaacacacaacatatttatcgattaagtttgcagtcttatatgggcatagtttgtgatgcccccaaacaattacaataatagcataaaggatccctaattgtgacgcagagacatgaagtggcacatgctgttggaaaacagtgctgatatatttgctcaaggctggattgtcatgaattttygatttgtaaatatgtaaaatctgcaaagcaaaataaagaaaataataaagtagttattctgatagttgaccagtgctatcacataataagttctggtatactgctatgccaccttgtgttataagagacaactaaagcctagctaatggctttgcttgaaactttttttaaagtatggcaaaaatgaaaaatatagaaaaattatgtttttaactccaggtacagttaatagaatcattcaacttaataaaaatcaattaagtatattacaaataatttattaaaacatatatatgtatata

SEQ ID NO: 155422 - DNA, 490 bp, Homo sapiens
agtcaaaacacacaacatatttatcgattaagtttgcagtcttatatgggcatagtttgtgatgcccccaaacaattacaataatagcataaaggatccctaattgtgacgcagagacatgaagtggcacatgctgttggaaaacagtgctgatatatttgctcaaggctggattgtcatgaattttcgatttgtaaatatgtaaaatctgcaaagcaaaataaagaaaataataaagtagttattctgatagttgaccagtgctatcacataataagttctggtatactgytatgccaccttgtgttataagagacaactaaagcctagctaatggctttgcttgaaactttttttaaagtatggcaaaaatgaaaaatatagaaaaattatgtttttaactccaggtacagttaatagaatcattcaacttaataaaaatcaattaagtatattacaaataatttattaaaacatatatatgtatata

SEQ ID NO: 155423 - DNA, 568 bp, Homo sapiens
gctttcttgcctgctgccatgtaagacttgcctttactcctccttggccttccaccatgattgtgatgcctcctagccatgtggaacttgagtccattaaaccccttatctttataaattacccagtcttgcacttgtctttattagcattgtgagaacagattaatagagtcatcttactttgaattcctaggcaaaaattttcataattttactaagttctatggacagaatatagagaaaagagaaaaggcttagtacaggtttctttcactacttaatagtaaaaatggttaacggaggagggcagaaactaagataacattctcctaaagatgcttcccctgyggatcacctggatgctgctgtgttgacataaacatcataacagtgattatctttattaatttaataatctggttaaaatcaacctcaaatagaaaacagatttgattgttattgataaatgaggaaaacagatcaaatgtatcagagatcaagtgggtttggcttggaactgacaacaaatgccagaaaaatccacccaccatcatttgccccaattata

SEQ ID NO: 155424 - DNA, 570 bp, Homo sapiens
ttttctatgtataggcagtatattgcttctaatttttcatgattatgaacaatgttgttttaaataattgtgcaaatgtttccccatgttacattttctagtatctctaagatacattcctgtaaattgagtagttaatcttaaggtgtaaacatacttaattattgtaaagcttgctgaattgctcttttaagtgacttacaattttccactaccatggcagcatattgagggcttttgacttcccaaattcttatcgaaactcttctacagactttggaaaaaattggcaatctggtgagtgttatatttttaacaccattcctaaatcattggtgagtttgtgcgtatgtgtgcaatatttgtgttttcyttttcattgttttctctctgtctctttaatttacaagtggctcttaaatattttgaatactaatcctttgtcgcttttatgtgttgcagaaagagcacgctcccgttatttggtttctgtgatgtgaaagttaattcccacatatctggaattgttctcagttgttttactaaaataagaacagtacttgcacagta

SEQ ID NO: 155425 - DNA, 577 bp, Homo sapiens
tggaaagaagcactaaacaaataaatggagaaatacgagaaaaactcagtaaatgagagaatttaaggaagaaaattattttaaggacagaatgataactgtgttcaacatcaaaattcaatttgataaatactagagtattcctggcataacattaaaatggctgagggcaacattatttaaaayatggcattatttaaaatatacttaatagctttttaaaatctcctttagtttaataagataaattcttctgaaatttaatgttacattcgtaagttagttaatgaatggtttgccttttataacatgatttaataatactgatgtgtgcataaaattgttaacaaattaatgacagtcaagttcttccagccattctatcttgttttcctcactgtccatttgaatgtttttgtacatacttttaagcctactgatgtaattactgaaagaataaaatttatacttaaaattaatctatactttgtctcactggagaaaagtcagtaaaattattttttccatctttcttcaggagaaatgaccaaagagagtatttagcatttagaaggtg

SEQ ID NO: 155426 - DNA, 577 bp, Homo sapiens
tggaaagaagcactaaacaaataaatggagaaatacgagaaaaactcagtaaatgagagaatttaaggaagaaaattattttaaggacagaatgataactgtgttcaacatcaaaattcaatttgataaatactagagtattcctggcataacattaaaatggctgagggcaacattatttaaaacatggcattatttaaaatatacttaatagctttttaaaatctcctttagtttaataagataaattcttctgaaatttaatgttacattcktaagttagttaatgaatggtttgccttttataacatgatttaataatactgatgtgtgcataaaattgttaacaaattaatgacagtcaagttcttccagccattctatcttgttttcctcactgtccatttgaatgtttttgtacatacttttaagcctactgatgtaattactgaaagaataaaatttatacttaaaattaatctatactttgtctcactggagaaaagtcagtaaaattattttttccatctttcttcaggagaaatgaccaaagagagtatttagcatttagaaggtg

SEQ ID NO: 155427 - DNA, 494 bp, Homo sapiens
ttaacatttgtctcgcattctttgtgaatagcaaacatttccaaattattggtctgattaatgtggactactatttccagatgtatgctggaggaaaacagaatatgtcatccccaaatgcctcttcaacataagcttattttaagctgaagacaatcaagaaggagcaaatgcaggaaaaggtctctctaactttttctgcttaaacacaggataaaaattctcctttactggagacaattctagagtattatcagtccagacttagcaccagasggatgtgcaaacaaaccttactccattagtttatttccatatatttaccttcctaatatttcccacttttgaaagcctaaaactacttcactttgtactgtaatttctctaaatgtactgttctttgttgaagatgctagataagccagggttttaagccatcactttgagttacttttagatgaagtttatcccctgtgatgtgagctgcaagtatt

SEQ ID NO: 155428 - DNA, 581 bp, Homo sapiens
tgagcttttttttatttacacataataacaagctattatgtgaagagatttattccagtgattttattctttccttatcttaatgggatattcctcagaattttattttccctttacctatcaagaaaagattatttttaaagttatattagctcaacttcacaacttagatgtacgaaagtggtttgtgagtatattttgaggcgttgyaaattaaatgcataattttagattgctcaaactaaaaatttcaaaatactctaaacctgacactaagatatcattatatctaaattttaaattttacaccaaattaggttttgtggagtaaatgaaggcaagataacttaatgttctactaatggccacagaataaaatttctcttcattatagaagtccttgtggttggaaaataagtttcatttgagtttgagttttacttgtatatatatttttatttttatttacttttattttttgagacagggtctcactccagttgctcgggctggaaggcagtggtgcgatctcggctcactgcagcctcaggtgattctcccacgtcagcctcccaagtagt

SEQ ID NO: 155429 - DNA, 510 bp, Homo sapiens
aaaaaaaaacctaaaactttttatggttctcactcagcagagcagcctccrcactggcatactcaggtctgtcctgaacttagggctgttgttccctgaggatggcccctgatcagcatcacctgtgcacttggtagctttgcaaattatcagccgcacctatccaaatctacataatctgaactttaaggttggaggcctagcagtgtggatttaagaattgctccaggaatcccaatgtttccaaagggtgaggatgataatctttgaaccaatggttttccatatttccttgaaaatagaatcctcaccagataattttaaaacttcagaaacaaggttttattataagagattctaaataatttgagatgaggtgacaactaaacaacacgtgttttcaagcccctttagggggtccaatgtgcaataattttgagaaacactgctttaggttcatcttgcccaacattaccaaacgcagtggaaaagtttttgccttctaagaaa

SEQ ID NO: 155430 - DNA, 510 bp, Homo sapiens
aaaaaaaaacctaaaactttttatggttctcactcagcagagcagcctccgcactggcatactcaggtctgtcctgaacttagggctgttgttccctgaggatggcccctgatcagcatcacctgtgcacttggtagctttgcaaattatcagccgcacctatccaaatctacataatctgaactttaaggttggaggcctagcagtgtggatttaaraattgctccaggaatcccaatgtttccaaagggtgaggatgataatctttgaaccaatggttttccatatttccttgaaaatagaatcctcaccagataattttaaaacttcagaaacaaggttttattataagagattctaaataatttgagatgaggtgacaactaaacaacacgtgttttcaagcccctttagggggtccaatgtgcaataattttgagaaacactgctttaggttcatcttgcccaacattaccaaacgcagtggaaaagtttttgccttctaagaaa

SEQ ID NO: 155431 - DNA, 544 bp, Homo sapiens
gtaaggagatagtcagctttgctaggtgtggcagtggtttttgtctttcacactgtgagtgtgaagtgaagaaactcaagaaaatatcttcaaatggctattcaatttttgataactgttatcttcccgaaatcactaatagtttgctgctttggttctataagtctttaacccatgaaattggacacatacttggactctgacattaccagtggctaatcctgatataaggctttagctacctgaagaccatcagcctctagaccttttccccaactgttkaggcaggatacagtgtgctgctattcacttcaacactttagaatgagccaaagcaattgtgaggtggattaatgatgaatctactagcatacctggagtaactccaaaatatagttgtcaggataatatgaatttgataaaacctgtggacgcctttgaaaaattgaatgagttgtatagtgaacagtcttgctgttctctaaaataagaattttcaaatagttctaatcaaaataaaatacttgcatattaaaaaataatc

SEQ ID NO: 155432 - DNA, 544 bp, Homo sapiens
gtaaggagatagtcagctttgctaggtgtggcagtggtttttgtctttcacactgtgagtgtgaagtgaagaaactcaagaaaatatcttcaaatggctattcaatttttgataactgttatcttcccgaaatcactaatagtttgctgctttggttctataagtctttaacccatgaaattggacacatacttggactctgacattaccagtggctaatcctgatataaggctttagctacctgaagaccatcagcctctagaccttttccccaactgtttaggcaggatacagtgtgctgctattcacttcaacactttagaatgagccaaagcaattgtgaggtggattaatgatgaatctactagcatacctggagtaactccaaaatatagttgtcaggataatatgaatttgataaaacctgtggacgcctttgaaaaattgaatgagttgtatagtgaacagtcttgctgttctctaaaataagaattttcaaatagttstaatcaaaataaaatacttgcatattaaaaaataatc

SEQ ID NO: 155433 - DNA, 564 bp, Homo sapiens
tcttttaaaaaagtcttacctcctttcgccacctcaactcttttatttcactcggttgagtgatgcctgcagttgagtcaatgcctgcagaatcaatttgggtcttgtgcctctgcaagattatccagtacctcactttagaatatgggggctcttggcatttagggtttggcctttggttcagtctgtggctaaaatctcatgtgaaagaacatgttgccttcaacatacagttcagtacaggttttcagaggtgtatctgacccatttccccttcattctctacaccttaaattataggcactgtgggtgcatagaacactctycctgtgcagtaaggagacaggcctgaaagaaccacaaagcagtagtggctgcatgctgctgtgggctctgattcaccctcaaggagaggttcacctgcccagtaggacatggcgctggcacctccatctggcttgaaacttccaactcatccattttaagaacacagggtttgggtccagctcttctgtgttccaatatgagctcattctcctattggctctgaggcctgtgaaaagt

SEQ ID NO: 155434 - DNA, 676 bp, Homo sapiens
agctcaacacagaacttaagtctgataagaaacatttacaatctattctctctgaagcctgctgctttcaggcttcatgtgcatgataaaaccttggtctccataaccccttatcataacccagacgttcctttctactgataactctttcaactaattgccaatcagaaaattttaaaatctgcttataacctggaactccccaccatgatcctgccctggatccctccagttgtcctatctttctgggctgaagcaatgtatttcttaaatgtatttgattgatgtcttatgtctcctgaaaaattataaaaccaagctgtgcccggaccaccttgggcacatattttcgaggtcccctgagggctgtgtcataggccatggtcactcacatttggctcaaaataaatatcttcaaatattttacagtttgactcttttcatcaacagctggaatgggtacactaatgttagaaaaaaagtagcctttaagaaaaagagtaataactagagataataaggggtatttcattattaaaggatccatttaacatgaataccaataaacctgaatatttcagtacctgatgawagaacttcaaagtacatcaaaatgaaacctggtgggtatttcttttttttttttttttgtaatttgtggctctctgctgaattc

SEQ ID NO: 155435 - DNA, 535 bp, Homo sapiens
tttgaataatcttttcagaaaaccagttattgatttcattactttcctcttttgttttgtgttttcaatttaatttatttctgctcatatctttattatctcctttctgattactttggattcatttttttcctagtttcttggagtgggtgcttgaattgttgacttaagactccctttttttgtaatgaaagcatttagtaatataaatttcactctcagcactactttagatatgtcccacaaatgctgatatcttgcatttttcattcagttttatgtattttttttttacttccctcaagatatcttctttgacctatgcaatattgagaagtatgttatttaatttstaagtgtttggagagtttcctgttttctttctattattgacttctggtttgattccattttgatcaaagaatatactttgtatgatttcaaatctgttacatttttcaggttagttttgtggcccagaatatggcctgtttttgtatatgtttcctatggaaatatgcattctgctgttggc

SEQ ID NO: 155436 - DNA, 559 bp, Homo sapiens
tcatattattctgttttctacattcttggatgtactaatttyccccagttacagtatctgctggctcttgcttatgacacattatttccttgtgtgtcttagaattcatcagggttttgcttctcttagaagaaattcttgttgccttatttatagaagtgattttcagaatgctctttcatttgtttctaccaggcatccctgataatcactgctccacaactcaatagttcaggcagagatgtttccttgctcccttctggggacctatatgcagactttttctagttctcctttcactgatggtggggacctttgtgagacttggtttatatacaggtctcagtttcaaatctttaacttgtctcttgtttcttttgagttttaaagtccaaatccctaaatgttaaggcctatttcttcttaatgcccagaagtttcccattcctttttgcaagctcaccttggtatttacaatataatttattttatcttgtttaacagttctaagtaatggtaggaagggttctttattagtttaggccaccacacccccaga

SEQ ID NO: 155437 - DNA, 584 bp, Homo sapiens
cagcctcttcccttctccatagaaggttccaagttaactattctcagcctctatgtggaaacatggggatataacatgatcatttgaatcacagcaagtttttggaaagaattactcatttcgataaagcayagtaaattttggattcttgctacaacatcaattttattcattcatatgtacttttgtccaagtgggagttaaagaggaatggaattacactgagaaagctgggaactgaacacttcaaataaggatccaatatagtgcttatctttacccattatgtatgaagaaggtagtatttttttaaaaaaggttatattattcttgagactgaaaagaaggagacagaagctctggacataactgtttgtaaaaaatctaatagtttcaactgccaatttcatacaagcatagaaatttgctaacataagttaaaaagtaaacatactatgtattataatttaaacactaaagttttttatattctctcaatatttacctgttccccttgttactactgtctgtggtgtagaggtctgaaaaataattgtttaaaaacacaaattttaaaattttga

SEQ ID NO: 155438 - DNA, 584 bp, Homo sapiens
cagcctcttcccttctccatagaaggttccaagttaactattctcagcctctatgtggaaacatggggatataacatgatcatttgaatcacagcaagtttttggaaagaattactcatttcgataaagcacagtaaattttggattcttgctacaacatcaattttattcattcatatgtacttttgtccaagtgggagttaaagaggaatggaattacactgagaaagctgggaactgaacacttcaaataaggatmcaatatagtgcttatctttacccattatgtatgaagaaggtagtatttttttaaaaaaggttatattattcttgagactgaaaagaaggagacagaagctctggacataactgtttgtaaaaaatctaatagtttcaactgccaatttcatacaagcatagaaatttgctaacataagttaaaaagtaaacatactatgtattataatttaaacactaaagttttttatattctctcaatatttacctgttccccttgttactactgtctgtggtgtagaggtctgaaaaataattgtttaaaaacacaaattttaaaattttga

SEQ ID NO: 155439 - DNA, 584 bp, Homo sapiens
cagcctcttcccttctccatagaaggttccaagttaactattctcagcctctatgtggaaacatggggatataacatgatcatttgaatcacagcaagtttttggaaagaattactcatttcgataaagcacagtaaattttggattcttgctacaacatcaattttattcattcatatgtacttttgtccaagtgggagttaaagaggaatggaattacactgagaaagctgggaactgaacacttcaaataaggatccaatatagtgcttatctttacccattatgtatgaagaaggtagtatttttttwaaaaaggttatattattcttgagactgaaaagaaggagacagaagctctggacataactgtttgtaaaaaatctaatagtttcaactgccaatttcatacaagcatagaaatttgctaacataagttaaaaagtaaacatactatgtattataatttaaacactaaagttttttatattctctcaatatttacctgttccccttgttactactgtctgtggtgtagaggtctgaaaaataattgtttaaaaacacaaattttaaaattttga

SEQ ID NO: 155440 - DNA, 352 bp, Homo sapiens
catccatccatctctgactctttgtctatttatctctcttttggttccttggtctttttcttttctcctttttatatttttgcaacagtaccagggcttaataacactggcatttttttgtggaacgagcaaatttmatctctggatgagtcagagtgaagacactgtaagcctgtggctactgcactcaagaattttactgattatctcctaccatggtgcttacattattattaaaatatgtttcccactaccttactcttaaatgtgaatagacagttgaaagatcagtagacatttgagaaaagcctacaacatgaatatgaaagacaagaagaaataaaaaaaaatg

SEQ ID NO: 155441 - DNA, 552 bp, Homo sapiens
ttgttggtgggaattagtacagccactatggaagagtacagacgttcctcagaaaactaaaaatacaaataccatatgatccagcaattccaytgctgtgtatatactcaaaagaaagaacaccagtatgtcaaaaagctatctgcactcccatgcttactgatgcactattagcaatagccaagatatggaagtaacctaagtgtccatcaatagataaatgcataaagaaaatgtggtacagatacacaatgggaaactattcagccataaaatagaaggaaatcatgtcatttgcaataacatggatggaactggaggacattatgctatgtaaaataagccagtcacagaaaggcaaagactacatattctcactcatatgtcggagctgaaaaaaaactgaaccaaattactgttggcacatcttcagggagaaaaattacatatataattgtatatatatacatacacacacgtatacacacacacatacacacacatatgtgtacatatgctttctccatggttttaaaagcagtttctatttag

SEQ ID NO: 155442 - DNA, 515 bp, Homo sapiens
cagatctcaagagaactcactcactattatgagaacagcagcatcgggttaaccgcctccatgattaaattacctcccaccgggtccctcctatgacacgtggagattatgggaactgcattcaagatgagatttggttgcggacacagccaaaccatttcacaaaccaattyttatttcttaaaaagagctgatgtgattcaactgaatgtattatgtgctaatatgaaccagtacattagttgatggaatatttattgaaaaccagagattattgagatatttttgttatattttaagtgatttcctttgaaaataattttatactttttgaataagattaagttgttttgttaataatgatcaaaggtgagggttaatagatgaagaaattactgcataaacttaggcatattaatcagaagacaaggaagtaatgtgcaagggcagattacccagtgaagtttggctcacatggggcagtaactttacaccgttgactgcatgttcaggaa

SEQ ID NO: 155443 - DNA, 447 bp, Homo sapiens
ggatgagggaagattagcgagttggaaaaatcaagacagatttttttgaataaggtagcatttggtctggagttggcttaaaaattttttttcttttctttcytttcttttctttttctttcttttttctttatttttattttttaagatggagtctccctctgtcacccaggctggagtgcaatggcgtgatctcggttcactgcaaactccgtctcccgggttcaagtgattctcctgcctcagcctcctgagtaactgggactacaggggcacaccaccatgcccagctaatttttgtatttttagtaaagacggggtttcgtcatgttgaccaggctggtctcgaactcctgcaactcaggtaatttgcctgcctcggcctcccaaagtgtatttttttaaattttctaacaaataaaaatttaaggcttttgtgtaagtaaa

SEQ ID NO: 155444 - DNA, 447 bp, Homo sapiens
ggatgagggaagattagcgagttggaaaaatcaagacagatttttttgaataaggtagcatttggtctggagttggcttaaaaattttttttcttttctttcttttcttttctttttctttcttttttctttatttttattttttaagatggagtctccctctgtcacccaggctggagtgcaatggcgtgatctcggttcactgcaaactccgtctcccgggttcaagtgattctcctgcctcagcctcctgagtaactgggactacaggggcacaccaccaygcccagctaatttttgtatttttagtaaagacggggtttcgtcatgttgaccaggctggtctcgaactcctgcaactcaggtaatttgcctgcctcggcctcccaaagtgtatttttttaaattttctaacaaataaaaatttaaggcttttgtgtaagtaaa

SEQ ID NO: 155445 - DNA, 617 bp, Homo sapiens
ctgattagggatccactggtgaatcagattcctgagccattgctccagacaaaagccctttgatggccaaggacagattttgaatcttaagggatgagtattctctctgaagctggggtacagccccacgcttcttttgaaaggaatcctctgggcaggaaggtcttcgtgtgggcttcttgttctgagtgggcaattctctgagtccctagactagaagtctcttctttctggcttyctttttctgagtgaggggttattccctgattccctggcctataaattgttcttcccggctctctataaaacctctctgctctttctcttctctctattggatcctgcttctcccatgggaactctgtcacctgaaacccctcttctcaagtctctgctgactatttctctgtccactcttgccagacccgtttcttttctgctgaacttcaggactcctatcctaccctcctttgagggggctctcaagggactaagaggcccctcaaaaacaagcacctggggctgataataggagaaaaaaagaaactatttggaaactgagaaagcaaaaaaaaaaatcttaaaaaacctcctccacaaatattggtaaaaagctt

SEQ ID NO: 155446 - DNA, 617 bp, Homo sapiens
ctgattagggatccactggtgaatcagattcctgagccattgctccagacaaaagccctttgatggccaaggacagattttgaatcttaagggatgagtattctctctgaagctggggtacagccccacgcttcttttgaaaggaatcctctgggcaggaaggtcttcgtgtgggcttcttgttctgagtgggcaattctctgagtccctagactagaagtctcttctttctggcttcctttttctgagtgaggggttattccctgattccctggcctataaattgttcttcccggctctctataaaacctctctgctctttctcttctctctattggatcctgcttctcccatgggaactctgtcacctgaaacccctcttctcaagtctctgctgactatttctctgtccactcttgccagacccgtttcttttctgctgaacttcaggacycctatcctaccctcctttgagggggctctcaagggactaagaggcccctcaaaaacaagcacctggggctgataataggagaaaaaaagaaactatttggaaactgagaaagcaaaaaaaaaaatcttaaaaaacctcctccacaaatattggtaaaaagctt

SEQ ID NO: 155447 - DNA, 617 bp, Homo sapiens
ctgattagggatccactggtgaatcagattcctgagccattgctccagacaaaagccctttgatggccaaggacagattttgaatcttaagggatgagtattctctctgaagctggggtacagccccacgcttcttttgaaaggaatcctctgggcaggaaggtcttcgtgtgggcttcttgttctgagtgggcaattctctgagtccctagactagaagtctcttctttctggcttcctttttctgagtgaggggttattccctgattccctggcctataaattgttcttcccggctctctataaaacctctctgctctttctcttctctctattggatcctgcttctcccatgggaactctgtcacctgaaacccctcttctcaagtctctgctgactatttctctgtccactcttgccagacccgtttcttttctgctgaacttcaggactcctatcctaccctcctttgagggggytctcaagggactaagaggcccctcaaaaacaagcacctggggctgataataggagaaaaaaagaaactatttggaaactgagaaagcaaaaaaaaaaatcttaaaaaacctcctccacaaatattggtaaaaagctt

SEQ ID NO: 155448 - DNA, 549 bp, Homo sapiens
tgtttactcataggatacagaatcatggatatcaaacatcaaaaataaattrtaaaaataatgtctcattttctgttgcatattattagcctgtctctcattccaccatttgttcttttgaactggaaaattgtgggctcctagtcactgcactaatctatctgaatatccaactaccagaaagggtttatcccatctcaagtttgtcagttgctttatatcgttaagggtgtttttgccaccctggttgtgttcataattaccattgagaaatgtcactgttattaaaatacattctgtgttccaactacctgcctctctgccctagcagtttctctcttacctccctcaaatcattgactagggtctttccagcagtagcttctagctattttctggaaactggcctctggtacaccttaaaaatattgttaattattccatatttgctaaagtgtttatatttcatggtctctctgctctaacacatctgccttccctgcaactagatgtcatcattagattggagagccgccaaacacctaaact

SEQ ID NO: 155449 - DNA, 549 bp, Homo sapiens
tgtttactcataggatacagaatcatggatatcaaacatcaaaaataaattataaaaataatgtctcattttctgttgcatattattagcctgtctctcattccaccatttgttcttttgaactggaaaattgtgggctcctagtcactgcactaatctatctgaatatccaactaccagaaagggtttatcccatctcaagtttgtcagttgctttatatcgttaagggtgtttttgccaccctggttgtgttcataattaccattgagaaatgtcactgttattaaaatacattctgtgttccaactacctgcctctctgccctagcagtttctctcttacctccctcaaatcattgactagggtctttccagcagtagcttctagctattttctggaaactggcctctggtacaccttaaaaatattgttaattattccayatttgctaaagtgtttatatttcatggtctctctgctctaacacatctgccttccctgcaactagatgtcatcattagattggagagccgccaaacacctaaact

SEQ ID NO: 155450 - DNA, 541 bp, Homo sapiens
cccctggcctgcctacatacctaggagaggggaagccacggccaggcccaaggcctagacccagggctccctataacgtctgagctcagctacacagtggaaaatggaaaatatctgctcggcctgcagcttcgggcggggtggctgtaaatcatccaggaggctgtgagagctgcccttgggcctccttggcttgcrggtgagggccgtgggtgggccctggggagcccaccatccaaaggtcaggccaggccagccgtgggagagacagagtgagggtcagcgggccccagagactggccactcctaccatctcgttgcacagaaggggaggggcagtggtggtgacttttccagggacatacagcctgatcaaggctgaggtgcagctggccttcctctcccctctggaggaagtggacacgatgactgggggccaggccctttctgtgcccaatcctgcatgatcttccctgcaccctcccccacccccacactggcaggtttccttttgctcatggagctgtggttggccatgtga

SEQ ID NO: 155451 - DNA, 578 bp, Homo sapiens
tcccggtgggctggtgtggtcagctgtctctgggtataagggtcagttgaggctggccgtggtctttggcccccctgccaggccccatggccagcagggagctgagtgggccaccttccctggcttatccgagtttctctgctggggccacacacttttgccttggacctgatgcacccaggtgtgactaagtgggcaattactcttatttaagtgattttcaggamggctgttgatgctgctgggcttgttttatggcccagcatccagaacaaccagttcccctcagactttgtccagagagcagagctgagttcccctgacagcctggttcacccaggaagcggggtgcaggctgaccacccagatgtttttcagatggttcaggagtgtactgcaaggttggacgcctggggcggagatgaggttggagacttcttcctgctcccagcagagtctagtgggaagagcatggcttggggtcaggcagatctgggctcttcttaccctctgcttaccagccgtgtcttctgggcaaatcaaggaacttctctgagattcgtgcagtggcgatggta

SEQ ID NO: 155452 - DNA, 619 bp, Homo sapiens
gtctcgctctgtcacccaggctggagtgtagcagcacaatcttggctcactgcaacctccgcctcccgggttcaagtgattctcctgcckcagcctctgagtagctgggactacaggcgcccgccaccatacccggctaattttttgtatttttagtgcagatggggtttcaccacgttagccaggatggtctcgatctcctgacctcgtgatctgaccacctcggcctcccaaagtgctgagattacaggcgtgagccaccatgcccagcctaatcgactatctttttggtgctcaacagaaccttctaggctgcctgatggtgactcctacaggacagatgaattcataaatatcttcttaaacaatctatagtgggatgtcttggacatcatccaattccaggcctgaaaaacatttagaaaacatttcctaaaaaggttacatgaatatactgcctcaaatagtatgtattaatacttataaattaaaatctgcttaaaaatgataaattggagctttaatatagaagagaagttaagctttttgagagtattcacttagtcatccaactggtgacaaagtcaacagtactctcagaaccagcatttttgaaaca

SEQ ID NO: 155453 - DNA, 563 bp, Homo sapiens
tagtagtaattgttttataaatttgggagctccagtgtcaggtgcatatatatgtagaattgtaatatcttccggttggactaattgttttattgttatataacgtctttctttgcctatttttacagctgttactttaaaatctgttttgtctgatataagaatagctactcctgcttgcttttgatttccatttggtgaaatatctttttctacccctttaccttaagtttatgtgagtccctatgtgttcagtgagtctcctgaaaacagtagatacttggttggtggatttttatccatttcaccatgctgtatcttttaagtggagcatttaggccattacattcaacattagtattgagatgtgaggtactgctctattcatcattttagctgttgcctaaatactttttttwaattgtgttattgcgttataggccttgtgagatctatgctttaaggaggttctatattggtgtatttaaacattgtattttaagatttagaactccttttagcatttcttgtagtgctggtttggtaatggcaaattctctcag

SEQ ID NO: 155454 - DNA, 563 bp, Homo sapiens
tagtagtaattgttttataaatttgggagctccagtgtcaggtgcatatatatgtagaattgtaatatcttccggttggactaattgttttattgttatataacgtctttctttgcctatttttacagctgttactttaaaatctgttttgtctgatataagaatagctactcctgcttgcttttgatttccatttggtgaaatatctttttctacccctttaccttaagtttatgtgagtccctatgtgttcagtgagtctcctgaaaacagtagatacttggttggtggatttttatccatttcaccatgctgtatcttttaagtggagcatttaggccattacattcaacattagtattgagatgtgaggtactgctctattcatcattttagctgttgcctaaatactttttttaaattgtgttattgcgttataggccttgtgagatctatgctttaaggaggttctatattggtgtayttaaacattgtattttaagatttagaactccttttagcatttcttgtagtgctggtttggtaatggcaaattctctcag

SEQ ID NO: 155455 - DNA, 356 bp, Homo sapiens
agatcttctaaaaagttgtgtatcccaagtccattattgcatttccctgtgcatcagtttccagattacactgcaaattgttgcttctaagtttccaaattaagcatacttagtggactggagcagggaggtctacattatcaatccttagtcaaacagtactgagtggaggagaagttaacttgatgggaaagaagaaatgagaatcagaatcagtttcctatcctgaccacctgacttcccattgctccaccatctctgcaattattaaagccagttttccttctaaaaggacttccaagatcaagcagstgccatgataagaatggagaaagagaagggctttaaatgacttc

SEQ ID NO: 155456 - DNA, 529 bp, Homo sapiens
tttcttaaaccttaccttagttagcaaattaaggagatactttacttcctgattaatttaattctgtttcacagagcctataagaaggaacagttctctcttttcttggctagggtagaaattcacaactaatatacttacttactttacctagactttctctctaygacagctagaacttttttactcttgaataattctaatttaatactgtagaattagtctctcgcttataattattttgagttaaacatttaaatctctaaaaattcaaaatctaagctctggtagtacagaatgcagtaataattcaataaacaaatattcctgggaaaaaattgagaaggtgaaaacaagctaagctacattccagtattagatggacctctatctcttggtccaacaacctgcccatttttttttacatacaggtcagattgctccaaaaaaacaaaaaaaatgccttttcaaaataagcaacgctgctggtctagtctatcttgggactcattgttaaaaattcttccct

SEQ ID NO: 155457 - DNA, 529 bp, Homo sapiens
tttcttaaaccttaccttagttagcaaattaaggagatactttacttcctgattaatttaattctgtttcacagagcctataagaaggaacagttctctcttttcttggctagggtagaaattcacaactaatatacttacttactttacctagactttctctctatgacagctagaacttttttactcttgaataattctaatttaatactgtagaattagtctctcgcttataattattttgagttaaacatttaaatctctaaaaattcaaaatctaagctctggtagtacagaatgcagtaataattcaataaacaaatattcctgggaaaaaattgagaaggtgaaaacaagctaagctacattccagtattagatggacctctatctcttggtccaacaacctgcccatttttttttacatacaggtcagattgctccaaaaaaacaaaaaaaatgccttttcaaaataagcaaygctgctggtctagtctatcttgggactcattgttaaaaattcttccct

SEQ ID NO: 155458 - DNA, 621 bp, Homo sapiens
ccaactgaattttctttgtcatcagccacccacataacctctggtggtttattacccagcagaaaacaagtctgcaaaatgtcagtgtcaccaaattgtaacaatgatctataattttgataaataaggttgatataatgggcttattgttaaaaatcaactagaagttaatatataaatataatccaggtaaaattatctgataaataaataccatcattaaatagtattgggaacatgatccattatgatatcatcacgtttccgtcccggttgacatttaattggtgtttgcagataacagtagcaaaagcttattaaaaactgaaagtatttccacacattgctacakttgttcctttttcttgatttctagagaatgctccaaagtttaggagaagatggaagaattggggagtaggagacagcagcagagacatcctggaaaggttggaaaggactggctagagaattgcaatcatcatggatgactgaggtggacatgcctaaagttatggagaaaaatacttagaagaacttttagagaagtaaataacagcacatggtaattcagatacagcagaaaagttaatgtctgagaagtttctctacagcaagggt

SEQ ID NO: 155459 - DNA, 647 bp, Homo sapiens
gggaatccagctactaataatatatgttagacatttatgacatattacattaaatatctatgcatagtatatattagtcactaataaatgtgaaatgacttataagtgctattgaatgtgataatcagaattaaataaagtaaacatcaccagggtctcattagttctctgaaaagttcatattataaatgggccattaaagttacatggaaagtaagagtagagtttggaagaaatagaattaatctgcctgattctctacaacctaaagttatgggatattactggagtgagagctttagttatatgaatggcactataatatcaggtggttttaaaatcatccttccattattaagatccacttgtaatactaaaagagtttgtctttttgtaaggggaaggacattactaccctaaaaacaacatatattctattgtgctacgaatcaagagtatacaagtagaaagaacatggcacatcaaggctgaagaaggggctgatcstttatagcttagttatatttttgctacactgtttggattctgaaataaagatatatggttaaagaaatatgttgtgtagccgcttttattgacagaatgagaattgattttgtgcatgccatgcagtccaatgatataca

SEQ ID NO: 155460 - DNA, 538 bp, Homo sapiens
cctaggaaatgcaggttgcagtgagctaacatcacgtcactacactccaggctaggtgacagggcaagactccatctcaaaaaaaaaaaaaaaaaaagtcatataaaggaaaaaatgcagtttattttaattagtagttgacaatttagcaagggacatttcccactccaggcctagtagtctcaattccactgtttacagtgcttctggcttctgtaaagataatttctgttttccagcacacagcagcttacattactaaatattttagatgagctctgtaatcttgaggtcattttcatccacttcaaaatgactatttctcccaaaagcttgtgagaggaaagagtaaatatagtacaatcttaaacccttcatattcayagcaatctctaaataaatatttatatttcttaatttgatagtaatgacaatagtggcataggaaagtggttatgaaaatgacattttcactatagtaaactatgaataaaaatatattactgtttctgtttttggaataggaagtttaatgtgc

SEQ ID NO: 155461 - DNA, 474 bp, Homo sapiens
tccatggtcagagatgaataataaacagcagcagcaaaacaaaacacaacaaacaccaattcaataaaataataaatatggtaatatgttctgaagaaaatgaaagatgatacgaartacagtgactaaagtgtagagatggaataagccctatgttaggtaggctggatcttccagaggaagtgatatctgaactcagacttgaagtaattcatcgatacaaatagctgggataagcaaagtctaagaaaagagaacaacatgtggaaagaccttcaaaacaataaaaccttcagagtggctggaacatagtcaggggtgcgtggagagagttggtttaaggtaaaattgaaaagtcaatagggccaggtagtgtataacaataacttttctattagcaagaagaacaataacagtaataataataaatatacaatatgccaaacactatttcaaacaagcatttactggttt

SEQ ID NO: 155462 - DNA, 506 bp, Homo sapiens
ccacttaataattatttttagatgtaagggcatttctaaaaggattttagggactcatcaaaatgagcgttgtttgtgtgtatgcttttatgcatgaaaaaatcgaacacttgttttgaaaaaaaacagaatttcttgcataaatatatgttatttgtgaaataaatattaaacaacatgtttacagacaggtttaaagtcaattcatagaaatagttaaacgttactattaacaatgatacctttttatgaaagaaaatgtcctttatggtaatacaaattagacaagttgttttttccagatctaatatgcacctattttatattatttttaatttttgttgtccttcttatatatgagaaaaacaaagttyaaaccttctatatagaagaattcaactatctacattcaaaaaagagaaataaaaggaagaaaaatactttaaaaagaaagaaagaatgaaagattgaaggaaggaaggaaagaaggagggaaaagagggagg

SEQ ID NO: 155463 - DNA, 506 bp, Homo sapiens
ccacttaataattatttttagatgtaagggcatttctaaaaggattttagggactcatcaaaatgagcgttgtttgtgtgtatgcttttatgcatgaaaaaatcgaacacttgttttgaaaaaaaacagaatttcttgcataaatatatgttatttgtgaaataaatattaaacaacatgtttacagacaggtttaaagtcaattcatagaaatagttaaacgttactattaacaatgatacctttttatgaaagaaaatgtcctttatggtaatacaaattagacaagttgttttttccagatctaatatgcacctattttatattatttttaatttttgttgtccttcttatatatgagaaaaacaaagtttaaaccttctatatagaagaattcaactatctacattcaaaaaagagaaataaaaggaagaaaaatactttaaaaagaaagaaagaatgaaagattgaaggaaggaaggaargaaggagggaaaagagggagg

SEQ ID NO: 155464 - DNA, 509 bp, Homo sapiens
gttgccacaaacattcaatatgttacaaatgcagcatctgtgaagcacaataaagcaaagcatagtaaaatgargtgtgcctgtatctagaatacctggacttagagaatgtaggtcttcaggcttatttgatatggttacagtttttcttttttctttttttcctttttgtaccagcagtgtattggagatctcagtgtgggacgtctttgctaatacttggtattgtttgacatttaaattgtagctattcagatgggcatgaattggttctgattgctgtttttaagatgtggcctgactgtcaagccttcagagaacaggtaagctgctgggcctgttttgttatttgtaaagcagagtcatgaaattgtggccataatatgctcttgtgtattcagagttctggagacccacatagaaagagaacaatatgaagaactttatgagatacttgtatggttcctctgtacagtagtagttggctgtattacatcattgatgatttt

SEQ ID NO: 155465 - DNA, 509 bp, Homo sapiens
gttgccacaaacattcaatatgttacaaatgcagcatctgtgaagcacaataaagcaaagcatagtaaaatgaggtgtgcctgtatctagaatacctggacttagagaatgtargtcttcaggcttatttgatatggttacagtttttcttttttctttttttcctttttgtaccagcagtgtattggagatctcagtgtgggacgtctttgctaatacttggtattgtttgacatttaaattgtagctattcagatgggcatgaattggttctgattgctgtttttaagatgtggcctgactgtcaagccttcagagaacaggtaagctgctgggcctgttttgttatttgtaaagcagagtcatgaaattgtggccataatatgctcttgtgtattcagagttctggagacccacatagaaagagaacaatatgaagaactttatgagatacttgtatggttcctctgtacagtagtagttggctgtattacatcattgatgatttt

SEQ ID NO: 155466 - DNA, 509 bp, Homo sapiens
gttgccacaaacattcaatatgttacaaatgcagcatctgtgaagcacaataaagcaaagcatagtaaaatgaggtgtgcctgtatctagaatacctggacttagagaatgtaggtcttcargcttatttgatatggttacagtttttcttttttctttttttcctttttgtaccagcagtgtattggagatctcagtgtgggacgtctttgctaatacttggtattgtttgacatttaaattgtagctattcagatgggcatgaattggttctgattgctgtttttaagatgtggcctgactgtcaagccttcagagaacaggtaagctgctgggcctgttttgttatttgtaaagcagagtcatgaaattgtggccataatatgctcttgtgtattcagagttctggagacccacatagaaagagaacaatatgaagaactttatgagatacttgtatggttcctctgtacagtagtagttggctgtattacatcattgatgatttt

SEQ ID NO: 155467 - DNA, 561 bp, Homo sapiens
atggccttgccaagttgacacataaaattaactatcacaggctcttaatcttcaacctggacaggacacatctgacttctgctcatgggtcattgactaaagtatatcacatggccacatctaacttcaagggggcagagaaatgcaaatcctaccatctacccagaaggagaagagtcagaacatttgtgaacagccctaatgtccaccataatcctcatttcactaaggcagtgcaagcacattctgagtcaatttggcatccctttctttccctgggttccatctatggaggtggtaggaggactcacatatgccatggcagtagatgattcctggacctggttcattatctattcaggttggcatgtcttgagacatccatctgtttgcggttgtctgcctaccccatttcagtttacagggctccatgagagccagccgctgttgtgggyatataagcacctttctgggacaagcaggaattatactgttcttcctgggccatcctaggacacaataaattatttgaggttggggtggtggagactgctagttgcc

SEQ ID NO: 155468 - DNA, 574 bp, Homo sapiens
tatgttgtagatattagcatttttcattgtggtaaaatatgttacatatgtaayataaaatgtatcattttaagcatacaagtttagcagcattaagtacattcatgttgctgtgtgtattagtgagtattctctatagaaacagagccaataggacatgtatcattgtgatgcttaatttgaggtgtcaacttgactggattaaggaatactaagaactgggtgcggtggctcaatcctgtaatcccagcgctttgggaggctgaggggtttggatcacttgaggccaggagttcgagaccagcctggccaacatggggaaacctgtttctattaaaaacacaaaaattagccaggcatggtggtgtgtgcctgtaatcccagctacttggaaggttgaggcatgagaattgcttgaacccaagaggcagaggtttcagtgagccaagatcgctccattgcactccagcctgggtgacagagcaacactctatctcaaaaaaaaaaaaaaagcctggtaaagtattatattttggggtgtgtctgtgatggtgtttcaagaggagattagcaa

SEQ ID NO: 155469 - DNA, 593 bp, Homo sapiens
gaaggtctggttacattaatagagattgtctgcagatccaaattttccctacaaaagatggytttgtggggccatttcaaaatataacaaaaaatatattttggggtaaaatatgtttgtttccttcagggtctgctatctgtagttaggttagaaattaagtcaaattgtaccagcttaatttaaaaaaaaaaaaaagcgccagttttacaaaattttttggtttgtaggatgggacttaacctttgccttgcatggccttttatttgtttttaattagccacaaagggactgttttgttattcttgtgatctctattttaacctgaatgctggtcagttgtgcttaaattccaaaaggaaggagatataaagaagagggttcaacatcccttcccatcacagccaggaattcaggttttcaggtttttctggggtcctcttggccaagagagagtctgtttggtctgttgggggccttagggttttatttttggtttacagtatactagatcaggggtccataaactacagcattgggctaatctggctttctaagaactgtttttgtaaagaacacagctacatctattt

SEQ ID NO: 155470 - DNA, 593 bp, Homo sapiens
gaaggtctggttacattaatagagattgtctgcagatccaaattttccctacaaaagatggttttgtggggccatttcaaaatataacaaaaaatatattttggggtaaaatatgtttgtttccttcagggtctgctatctgtagttaggttagaaattaagycaaattgtaccagcttaatttaaaaaaaaaaaaaagcgccagttttacaaaattttttggtttgtaggatgggacttaacctttgccttgcatggccttttatttgtttttaattagccacaaagggactgttttgttattcttgtgatctctattttaacctgaatgctggtcagttgtgcttaaattccaaaaggaaggagatataaagaagagggttcaacatcccttcccatcacagccaggaattcaggttttcaggtttttctggggtcctcttggccaagagagagtctgtttggtctgttgggggccttagggttttatttttggtttacagtatactagatcaggggtccataaactacagcattgggctaatctggctttctaagaactgtttttgtaaagaacacagctacatctattt

SEQ ID NO: 155471 - DNA, 593 bp, Homo sapiens
gaaggtctggttacattaatagagattgtctgcagatccaaattttccctacaaaagatggttttgtggggccatttcaaaatataacaaaaaatatattttggggtaaaatatgtttgtttccttcagggtctgctatctgtagttaggttagaaattaagtcaaattgtaccagcttaatttaaaaaaaaaaaaaagcgccagttttacaaaattttttggtttgtaggatgggacttaacctttgccttgcatggccttttatttgtttttaattagccacaaagggactgttttgttattcttrtgatctctattttaacctgaatgctggtcagttgtgcttaaattccaaaaggaaggagatataaagaagagggttcaacatcccttcccatcacagccaggaattcaggttttcaggtttttctggggtcctcttggccaagagagagtctgtttggtctgttgggggccttagggttttatttttggtttacagtatactagatcaggggtccataaactacagcattgggctaatctggctttctaagaactgtttttgtaaagaacacagctacatctattt

SEQ ID NO: 155472 - DNA, 593 bp, Homo sapiens
gaaggtctggttacattaatagagattgtctgcagatccaaattttccctacaaaagatggttttgtggggccatttcaaaatataacaaaaaatatattttggggtaaaatatgtttgtttccttcagggtctgctatctgtagttaggttagaaattaagtcaaattgtaccagcttaatttaaaaaaaaaaaaaagcgccagttttacaaaattttttggtttgtaggatgggacttaacctttgccttgcatggccttttatttgtttttaattagccacaaagggactgttttgttattcttgtgatctctattttaacctgaatgctggtcagttgtgcttaaattccaaaaggaaggagatataaagaagagggttcaacatcccttcccatcacagccaggaattcaggttttcaggtttytctggggtcctcttggccaagagagagtctgtttggtctgttgggggccttagggttttatttttggtttacagtatactagatcaggggtccataaactacagcattgggctaatctggctttctaagaactgtttttgtaaagaacacagctacatctattt

SEQ ID NO: 155473 - DNA, 561 bp, Homo sapiens
aaatgagtctgtgataggaaatatgcttttagtaattgttaaaattctgagcagagtttgctgtttgtctggggtcctgtcatctacacgagtcatgtttccactggagaaaaatgattttgtgtggggtctcaagatattcgatgcccattgaggaagcttgccaggagaaatgtgtgcttttgccaggatgtgtagtcagagatttattttactgagagggggaaaaacatgttggcagcagatcagtctgacactgctgagaagatatagatatacgccctgggagaatcacaaatctccattaaagtttcaagtctcctgttgagttgttaagaataatcagattggccaaggagcagtcggaatttacaagtaagtctgccagtaaggctgaactctaaacctacaacttaacatcaatcagtgttagaacatgaatgtggagagtacattttttattgctgtggttgttttcttcaaactagtgaccctgcctcacttctcatcaygattaaccaaattttcctcatctaacatcatgggcaatttgaaagtcca

SEQ ID NO: 155474 - DNA, 602 bp, Homo sapiens
tgaattatgaattcctcccaaacaatattagttttacacacacagacacaaatgcacacacatacacatayagatagatagatagatagatagatagatagatagatagatagacagacagatagacatatcaggcagtgaaagaacgaagaaggagtatgtttcagagatttgggttgaaattctgactcttctacataacagtatttaattttggagctggttacattagctatctgtaatttacttttgtcatctgaaataattttttaaaaatcctacatgtccaaaataagttgttttaatatcaaatactataatacatattaaaaatgaagtaccttccacagagtatgtatccaataaagtgatcttgagtatgatgatgatggaggtaacgtaactaccatgatttagtaagcattttttaattctccaccctacctacatttcatcctgttatcagatactaccattaaccatcaaaatggctgtgtactctttttagaagaaaatattaaaatttccttatttacccaattactttgaataagactgagtatatatttggtatttatgtatctcattgaattagtgtctaa

SEQ ID NO: 155475 - DNA, 572 bp, Homo sapiens
cacctcttctatgaattatgaattcctcccaaacaatattagttttacacacacagacacaaatgcacacacatacacatacagatagatagatagatagatagatagatagatagatagatagayagacagatagacatatcaggcagtgaaagaacgaagaaggagtatgtttcagagatttgggttgaaattctgactcttctacataacagtatttaattttggagctggttacattagctatctgtaatttacttttgtcatctgaaataattttttaaaaatcctacatgtccaaaataagttgttttaatatcaaatactataatacatattaaaaatgaagtaccttccacagagtatgtatccaataaagtgatcttgagtatgatgatgatggaggtaacgtaactaccatgatttagtaagcattttttaattctccaccctacctacatttcatcctgttatcagatactaccattaaccatcaaaatggctgtgtactctttttagaagaaaatattaaaatttccttatttacccaattactttgaataagactgagt

SEQ ID NO: 155476 - DNA, 547 bp, Homo sapiens
ctggatgagacaacaaagcaagaatagagtaaaatcccagaggttaatcacccacacataatgaaaagaaaaaataagaagatgttaaggtagtaaggctatgatgaaaggaagccatcccagtatcatgaactgattaattgataaaatgtgatatatccatataataatattggtatttatatgtcartaaggatgaatgaaggaatgatacatggtacacgaggaataaaccttaaaaatatgaatgtaactgaaagaagacagtcataaagagctgcatatggcataattcaatctataggaaatgttcaaataggaaaatccatagaaatagaaagtagattagtgattgctagagactggggggaggaaaatcagaaatgactgtgtactagatttccctttggagatgatgaactcatttcagaaatgaacagcaatgatggttagacaattctatgaatatactaaaaacaatgaattgtacactttaaaaaggcaaatttcatagctgtttttatcacaaggaggaaaaaatgggtaa

SEQ ID NO: 155477 - DNA, 586 bp, Homo sapiens
atagggattgttagatattgacaggattgagtcattcctgagttaaaggtcacgacgtcatctcataacaccatcaatttccactctacttccccaaacctcccatcctaatatacacacactaaccccaatgggaattcaatggttccaggttttcactgattctatatcccatcagtaagatgctttctctctttcgtccacaatagctttatgagggagtcaacaataaaccagactccagtcattgctatgtaatgtacacacacaccttggaggtctgtatcacaggaataaaaataatgttctctatgtcacaaaaaagtagcctaagccaatattaaataattaatttagattgataaaatcytaaaactctaagtagtcataaagttagctgatttctagagtgttacataaaacagcagcctttatgctcctacatattctccatggcagccagccagacagaggctttggaagacagaaaactcatcctggagccattgaagtttattcctgcccattctgaaaaattggctgatattgataattgttataaaaagtttaccccatgagtctcaca

SEQ ID NO: 155478 - DNA, 586 bp, Homo sapiens
atagggattgttagatattgacaggattgagtcattcctgagttaaaggtcacgacgtcatctcataacaccatcaatttccactctacttccccaaacctcccatcctaatatacacacactaaccccaatgggaattcaatggttccaggttttcactgattctatatcccatcagtaagatgctttctctctttcgtccacaatagctttatgagggagtcaacaataaaccagactccagtcattgctatgtaatgtacacacacaccttggaggtctgtatcacaggaataaaaataatgttctctatgtcacaaaaaagtagcctaagccaatattaaataattaatttagattgataaaatcctaaaactctaagtagtcataaagttagctgatttctagagtgttacataaaacagcagcctttatgctcctacatattctccatggcagccagccagacagagsctttggaagacagaaaactcatcctggagccattgaagtttattcctgcccattctgaaaaattggctgatattgataattgttataaaaagtttaccccatgagtctcaca

SEQ ID NO: 155479 - DNA, 616 bp, Homo sapiens
tctgccctcccactttctgactacaagtatcacattagttttccttgtggaaatgttcccttctcccatctcaggaagacaaaaaccctcgttacgggaaataaagatagtactgagagatgagtctgcataaacaaaccttactaaataactcttctcatcgtagttttcccatatatttcctagtcattttcckaaatatataatcctttgttaaagtagtatataagcccctgagtctaataactccgttaggtttttcacttcttttctgtgtggttccaatgcatgtaaaattaaaaacattaatacaatttgtatgctttaattcacatgccacagctccaaacgtaagagggcagaggaaagtttttcctcctctacacatgttctaagtttccaggaaagagcatataaaataggaaataatatattctagaagatgaatttttgctcttgattcttaaattggaaataaatttccccatcaatatccatttggaacatcagataccaaagtaagagaagaaaagtaatgagatcctgacatcaggctatagtcatgtcctttctagtttagaggtgtgaaaacctagatattaatgcagaagttaga

SEQ ID NO: 155480 - DNA, 586 bp, Homo sapiens
ttacatagtaagctttccatggatagttattgaatgaatttatgattaattaacctagtattttaacataaaaagatcatgttaacgttatggctaatatcatgagcctttgattctgatcccagctctgttattatccagcagatctttagcaaattatctgaactttctatgcaattatctcatccacaaaactaataacgcataaaaggttaaattttaaaaatctctctctctctctcgcacacacacacagatacacacaccccaacacacataaacacaaagctagaggaagtgctgtttgaaacttcttggaatgaaatgcagtaatatgcctcaataacctctamaaaattaatatcacttgatacagtgatttatcagaaatgcagccacagttttaagggcaaggatgatcatcgcaacattgtttataatagtgggaaattttaaattaacctaactctccaataacaggaaacaggatattttttggggcatgggatgttgccccataatttggaacatttttctgaaaacaaataccacaattcattttataagtgaataactaataaataca

SEQ ID NO: 155481 - DNA, 381 bp, Homo sapiens
tctctgtattttcaccaataaaggaagaataacaccaactactgttgtgtgttaagaataaaagatataaggattaagcgtgtacaagtaaagactttggcacaaaatacatgcagtttaaataattagctgtttttatttttatttctaatgtttcccktttctgaaatctggaaagtcttcaatgggtggaagagatcagttcacttaaattcaatggtcttcaaccctagctgcacattatctcctggggagtttgtaaaactccaaagctggggctatacctcaggccaattaaatcagagtttctgcaggagagggcctcagcataaacaatttgtaaaactctccagatgattctaatgccatagccaagagtga

SEQ ID NO: 155482 - DNA, 394 bp, Homo sapiens
agaaatgctagcagaaaatacacacatacttatgaggtttgcatgaaatattttctargtgagatcatatgttaggccacaaaacatgtttcaatgaatggaaaagtattgaaattataaaaagtatgttatttgacccaaatgaaattatattaaaaatcaataatggaaggcaatttgggaaattcacaaatatatagatactaaacaacagttacctaaataaccaatgaatcaagaaataaataacaacagaaataataaaatgctttgagaagaatgaaaatgaaaacacaaaatacaaaaatttatgatatatagtaaagaagaacttacagggaaattattagctgtaaaaatctatattaggaacgaaatagagtgagaaagtaaa

SEQ ID NO: 155483 - DNA, 394 bp, Homo sapiens
agaaatgctagcagaaaatacacacatacttatgaggtttgcatgaaatattttctaggtgagatcatatgttaggccacaaaacatgtttcaatgaatggaaaagtattgaaattataaaaagtatgttatttgacccaaatgaaattatattaaaaatcaataatggaaggcaatttgggaaattcacaaatatatagatactaaacaacagttacctaaataaccaatgaatcaagaaataaataacaacagaaataataaaatgctttgagaagaatgaaaatgaaaacacaaaatacaaaaatttatgayatatagtaaagaagaacttacagggaaattattagctgtaaaaatctatattaggaacgaaatagagtgagaaagtaaa

SEQ ID NO: 155484 - DNA, 394 bp, Homo sapiens
agaaatgctagcagaaaatacacacatacttatgaggtttgcatgaaatattttctaggtgagatcatatgttaggccacaaaacatgtttcaatgaatggaaaagtattgaaattataaaaagtatgttatttgacccaaatgaaattatattaaaaatcaataatggaaggcaatttgggaaattcacaaatatatagatactaaacaacagttacctaaataaccaatgaatcaagaaataaataacaacagaaataataaaatgctttgagaagaatgaaaatgaaaacacaaaatacaaaaatttatgatatatagtaaagaagaacttacagggaaattattagstgtaaaaatctatattaggaacgaaatagagtgagaaagtaaa

SEQ ID NO: 155485 - DNA, 454 bp, Homo sapiens
aatcctccctttgggaggcctaggtgggaggattgcttggggtaagttgttcacaaccagcctgggcaaaatagtatgacacaatctaacaaaaaattaaaaatttagcyagacatggtggctcatgcctgaagtcccagcttctcaggaggctcaggtgggaaggttgcttaagcctgggagattggggctacagtgagccatgatcacaacactgcactccagcctgggcaacagagtgagactttgtcaaaaagaaagaaaaatagaagagaagaaaagaaagggagggagacaggaaggaaggaaagaggggagggagtggggaagggagggaggaagtcttgtgtggtggctcacacctgtaatcccaacactttggcagaccaagacaggaggatcacttgagcccagaaggtcaagatcagcctaggaaacatagtgagaccacagt

SEQ ID NO: 155486 - DNA, 454 bp, Homo sapiens
aatcctccctttgggaggcctaggtgggaggattgcttggggtaagttgttcacaaccagcctgggcaaaatagtatgacacaatctaacaaaaaattaaaaatttagctagacatggtggctcatgcctgaagtcccagcttctcaggaggctcaggtgggaaggttgcttaagcctgggagattggggctacagtgagccatgatcacaacactgcactccagcctgggcaacagagtgagactttgtcaaaaagaaagaaaaakagaagagaagaaaagaaagggagggagacaggaaggaaggaaagaggggagggagtggggaagggagggaggaagtcttgtgtggtggctcacacctgtaatcccaacactttggcagaccaagacaggaggatcacttgagcccagaaggtcaagatcagcctaggaaacatagtgagaccacagt

SEQ ID NO: 155487 - DNA, 521 bp, Homo sapiens
accattttatacaattgatttatcaaccctgcctagtggtaagattattcctaaagttaccagttgtcatgactttatcgtgattgaaagaaaactggttaaaaaaaaaaaagatacagatgtttagcattttaatgcatctaacggagctaaatataccactctctctatttcataattttatgtaatttcacatatatagttagaatatatattaatacagctttatgagagcagtattattagtctcatttcacagaggaaggaactgaggctcagagacattaaatatcttgcccaggaacataatagctaagaagtgcagaaatgagattccaaatacccagtatgtctgcctgcaaagcatatgctttctcatttattacattttggcagaacacgtcactatattagaggtttttggtaagaacgagggagatacattctactttgttatacatgtggaagaaatatgtaaatgmaataatgataatgttgcattttttagtagatttcgcatg

SEQ ID NO: 155488 - DNA, 377 bp, Homo sapiens
tttaagtaaaaattccacaaataaacatagatttttatatatataaaaaactaaaggatcattatttattttcacatttctttaaaaggtattttgaatggaattmtcagctagtaatattaaaaacaacaatggattaggagtcaagaaatgttttccttagtctcaagactacactagatttattgagcaagtctctttatttctctgggtctcagttgattttttacttttttaaatttcaactgaagtaggagacagggaaaatgctttctagctctataatgagctgtcattatcatttaatgtttaccaaaaattgaacttccttgaatgctcacgcatgtttcacaagcaaactaaaatactaatttaat

SEQ ID NO: 155489 - DNA, 624 bp, Homo sapiens
aaccatgtagacaagagaccagtcattccaaggggctattattggctctataaaatcaatcttaattcctcaaagcattctggtcatatctaaagrtatgcccttccagctgaagccatgctaaattaaccactatctctatttatgtcctgttaaaaatgaaacagattcttactcaacttacacaaataactatattgccatgaattaagaatacttacaaataatttccaaattctggagaaatcagacagaaagaaatatgcttctaagtttgtttacaagagtatatttactcagttgttaaaagctataaatagctcaaaagaaaaaagttttcttgactctgaaaaacaaaacataaagaatcagcaatgttttaaacaaaaaaagtcataaaaaattatttcagtatctaatagtccagtcccatgcaattaactcctgttcttcccgatattacactaacaatcctcattaacactttagctctccagtgaaagttctggaagttttttctctagtccaatggcacaatctccaaaattaacagaaacctgctttcaagcatgcctatccaggtcctttctatgaactccccataagaagcaagttttgtactct

SEQ ID NO: 155490 - DNA, 625 bp, Homo sapiens
tgaatgccagtcttaggatattacttatactttaaattttaatgtcaactcaagttaaagttttgtttaaacttttgtttctgagctttggtattccatgacttcttgcacaattacctttataattatgtttttaaaacatggaatgtcaacctgttagattccagttgatttcattttgctagctttgatgtgtcatttcagccttttgattctgagcattgattctagaattcaccataattgcttgctcttccagatttaaattgttcataagttatatttgtaaaaaatcctctctacatcaattgamgttattgacggaaagtaggaaggcacttgagcagaattctgtgagtgatctcaggttctttccctccaagttgacctaaaattttaatcagcatttagactgtgattgtccacctgggtaaacatgaacttaactcttttaaagccattacttctcttctttattccccaaacatttcagacaacattaaagcatgtattgataaaataaaaatgcattctctattaatatttgcattttggtgaatggattaatacaacaatctgtcaactgagaatctgggtttggtttgacatttcatggttttaagga

SEQ ID NO: 155491 - DNA, 620 bp, Homo sapiens
cagatgaataagtattttaatagattttctaaaatccagtaaaacatactttggaaaaggacaataaaagtttttcttaaaatttttatttacatatcaacttaattaaacgtgttagctgatttccatgtatatatggaagatcagagaactaaattcttcaggtaatctatttttgcacatctttgggaaaaagatttctgtttgattgcctctaaagcgtagctcattcacatttaattatcttaagaataggccacttgtaacattaatccacaaagctgaatttataatttgtaagagatggcacctttgaagttgacatttcttttatatcaatgagattgcagctgcagatgaagtgcaaatggcaaattatgcaaaataaaataatcacgaggggaaacttcagttgaatatttctgtttgattaataatctatcagcagataccatctaatttaaatttgcacaaaagcataactgctgttgaaaaattgctgctgtttaacggggacacmaattcacatttctttccctcctcctctttgtgtagccaacgattgcagttacttggttttgaattgggctttttagagttaatgccttgaaaatagaaaa

SEQ ID NO: 155492 - DNA, 600 bp, Homo sapiens
gaaaacagatatggatacagacatagtcataagcatcaatatagacataaagagattgatcatgaggaattggcttatggacatatggagttgcagcagtctcacaattggctgtccacaaactgaagattcacaaaaactaaactggtggtgtagatccagtcaaagtctgaaggcctaagaaccaggagtacaaatggtgtaagtcccagaggaccagaagagactgctgtcccagctgaaacaggaaggaagaataaattatctttttctcacttttttattctattcaggatttgatgcattagattaatgcccacccaccctggggatgacaatctactttactgggtctctggattcaaatgctgatctcttttggaaaccccctcacagacayaccctgtatttaacctgatatctgaaataatatttaacctgatatctgggcatcctgtgaatgagtcaagttgacacattaaattaaccatcacgagttcactccctgtcaacttgccactcatatatatctccttaacagtccttactcttcaagtaaagacagtaatgtcataattctgccaaacatgatacaactgt

SEQ ID NO: 155493 - DNA, 320 bp, Homo sapiens
tacttaaaatagtcatctctgtaactggtcacattgtcgtagttggtatttataactacctacttccatcctttattctatttgccttccgcatatacctctgctggtcatgtttctttacctggtrgggtaacccaaaccttcaagacgggtctgggccgttagtgatcctgcctggagtggtcgttgtagtattctgttgaccttaattgcagggcatggtaatactaagagttgccctaaatgatcgcctgtactccagaagtactcttccttagttccattgtgcagtagtcgtccaatttgcccttgttagtcag

SEQ ID NO: 155494 - DNA, 501 bp, Homo sapiens
tcatttgtgaaatagagaaaataacagtatctacctcaaagagtttctgtaagaattaatgcagctagtgcatagcaagtacatatgagactttaaagggtatttttgaccatttcctttataatctgatcttcttcacttgaygatgcagcaccatgctacagggcacttgattgtgccaggccagtgacaagctgcaccaaatccagagcaatttgagaagagctacatgtttgatattcatgatagaggcaggggatatggagatatggaaagtggaatgaaaagatagaactctatcaataattcgtgatagtagaattagtctgctggactctgtgaacatagatatttcttcctcttatagtttagtttatccagtattttatttgagcaactgataaagtcagtaaataaaagtatgcaagcttaaatcccaaactgaaagacttgagtgtttgaataatacatttgtaccccaaactaaaacttagtgggact

SEQ ID NO: 155495 - DNA, 486 bp, Homo sapiens
  misc_feature (1)...(486): n = A,T,C or G
aagagagataaaaagataaaaggacagaaagaatatttaaagaaataatggtccaaaacatcaattcacttgatgaattacatccaagaggctcaacaaactctaagtaggataaacataaccagattcacaatgagacacgctataatcaaactgtcaaaagcaaaagatgaagaatcgtaaaagcagcaggagagangcgagtcattantgcacaagaaatcctcataagatacggctgaatgttaccacagaccatggaggccagacatatgaaatattcaaagagctaaaagaaaagaccatcaaccaagaratctatatttgataaaaactatttttgaaaaataaaggagaattttttaatagaaaatcaatattttaataaataatagcattaaagtaccagttttacatatatacataaccgacctgtaactttaagtatttggaatagatggcttgagttatgcatataagtgcttt

SEQ ID NO: 155496 - DNA, 460 bp, Homo sapiens
ggtaaatacatgaacaattataaaaatttgtattattgtaactttggtctgcagctayacattttgttttctacattatttaagatattaatgcattaaaagtaattattggttcatatatctggacccacaatgtggaaagatgtaattttgaagcatcaataactgaaaaatgaggtctagtctgtaaaggagcagaatctcatatgttactgaagttaagctgttataaaatcaaattagagagttataactttagcatgttaaatgtaatccccatggtaaccaaacagaaaatgcacatagaataaaaaccaaaggaaatgagaaaatacttaaaacatttaactacaaaaaacatcaactaaacacaaaaagacagtaatgcaaagataacaattaggactataaaagctataaggcatgtagaaaccaaatagaaaactgacagaagtgcctc

SEQ ID NO: 155497 - DNA, 460 bp, Homo sapiens
ggtaaatacatgaacaattataaaaatttgtattattgtaactttggtctgcagctatacattttgttttctacattatttaagatattaatgcattaaaagtaattattggttcatatatctggacccacaatgtggaaagatgtaattttgaagcatcaataactgaaaaatgaggtctagtctgtaaaggagcagaatctcatatgttactgaagttaagctgttrtaaaatcaaattagagagttataactttagcatgttaaatgtaatccccatggtaaccaaacagaaaatgcacatagaataaaaaccaaaggaaatgagaaaatacttaaaacatttaactacaaaaaacatcaactaaacacaaaaagacagtaatgcaaagataacaattaggactataaaagctataaggcatgtagaaaccaaatagaaaactgacagaagtgcctc

SEQ ID NO: 155498 - DNA, 485 bp, Homo sapiens
gaacaatgctataaaccaactaaaactacagacatatatagaacacatcactcaacaatagcagaatacaagttcttcacaagtagacatgaaacattctccaggayagaccacatattaggttacagatgatagtctaaactggttatgtggtatatggaaactccatttcttatttttgcaattttcctgtaaacctaaaactgttaagtaaaaggttatttttaaacaaattctctaggaggcaggtttcagggttttaaccacaattccttagcaaaaagcagagaaagtagcaatcatggcctagaactaaaaataccgtttctcaataatggtgtaggctatatcaccagacagagtgcatcctcaatgcatcacagtggggggaagttgccagaaacactaggcttaaatggagaatgaaaataaaggcatttcagtatattgaaaggggtctcaaataaggtctcatgatgagggtt

SEQ ID NO: 155499 - DNA, 485 bp, Homo sapiens
gaacaatgctataaaccaactaaaactacagacatatatagaacacatcactcaacaatagcagaatacaagttcttcacaagtagacatgaaacattctccaggatagaccacatattaggttacagatgatagtctaaactggttatgtggtatatggaaactccatttcttatttttgcaattttcctgtaaacctaaaactgttaagtaaaaggttatttttaaacaaattctctaggaggcaggtttcagggttttaaccacaattccttagcaaaaagcagagaaagtagcaatcatggcctagaactaaaaataccgtttctcaataatggtgtaggctatatcaccagacagagtgcatcctcaatgcatcacagtggggggaagttgccagaaacactaggcttaartggagaatgaaaataaaggcatttcagtatattgaaaggggtctcaaataaggtctcatgatgagggtt

SEQ ID NO: 155500 - DNA, 488 bp, Homo sapiens
taacaaatgtttgctgatgtagtttactgagcattgtcctagggactgcatctacaaagattagtatacactgtcccccatttcaagacactgtagcagggacatcagaggtgaacacaactaatatgatactattctaagaagtccaacaatagcagaaaggggaaagagctggcaataccagataccagaagacagtaggagaatattttcgaagtaccaagttaaaattattttgccatagaagtcctagaagttttatataccagctggaaaatgaaagacatttttagatgtgaaaaaataaagtttacaagattcaaactttttctgaaaggattactggagaaaacactccagcaaaataggaaatgaacccaatttaaaaaataaraactagagatataaaaatggatttaatggataatgtaaacttatacaaataaatgtaatatatatataaacatatatgtatatatataaatata

SEQ ID NO: 155501 - DNA, 612 bp, Homo sapiens
gtttgtcaatgataaatattagggaccttcctactgtaaaaaagagaaggggccccacaatatttatggggatacatgtcattcatgtgccacatctaaattaatagagtgtattgtgcacctttaatagtgtcacttggtttttctgttttccttctataataaaattctatagaggtgactcttgctgtctcatttcctggcagctacraaaacaccccaaatatctgcttaataaaaaagccctttgttgtctatgaaggtcttaaggctttccttgatcctgttatataatccatgacgatgttatttgctgactttgggggaggggaagaaatgccacctgattcatagttgtcataaaaatatccaagattctctgcatttagtttagcaacaggaacgagggaacagttcacaattgtgccacagaattattagttcccaaaactcctgcatggactttctacctgaatgttgtatgcagttgattcatttatcaactgtatgtgcctggattgtgaatttcttgtttttccccctcacattaccattatccttactaccaaaactaaaaaggaggagagagaaaattctctgaaattgttcttg

SEQ ID NO: 155502 - DNA, 612 bp, Homo sapiens
gtttgtcaatgataaatattagggaccttcctactgtaaaaaagagaaggggccccacaatatttatggggatacatgtcattcatgtgccacatctaaattaatagagtgtattgtgcacctttaatagtgtcacttggtttttctgttttccttctataataaaattctatagaggtgactcttgctgtctcatttcctggcagctacgaaaacascccaaatatctgcttaataaaaaagccctttgttgtctatgaaggtcttaaggctttccttgatcctgttatataatccatgacgatgttatttgctgactttgggggaggggaagaaatgccacctgattcatagttgtcataaaaatatccaagattctctgcatttagtttagcaacaggaacgagggaacagttcacaattgtgccacagaattattagttcccaaaactcctgcatggactttctacctgaatgttgtatgcagttgattcatttatcaactgtatgtgcctggattgtgaatttcttgtttttccccctcacattaccattatccttactaccaaaactaaaaaggaggagagagaaaattctctgaaattgttcttg

SEQ ID NO: 155503 - DNA, 612 bp, Homo sapiens
gtttgtcaatgataaatattagggaccttcctactgtaaaaaagagaaggggccccacaatatttatggggatacatgtcattcatgtgccacatctaaattaatagagtgtattgtgcacctttaatagtgtcacttggtttttctgttttccttctataataaaattctatagaggtgactcttgctgtctcatttcctggcagctacgaaaacaccccaaatatctgcttaataaaaaagccctttgttgtctatgaaggtcttaaggctttccttgatcctgttatataatccatgacgatgttatttgctgactttgggggaggggaagaaatgccacctgattcatagttgtcataaaaatatccaagattctctgcatttagtttagcaacaggaacgagggaacagttcacaattgtgccacagaattattasttcccaaaactcctgcatggactttctacctgaatgttgtatgcagttgattcatttatcaactgtatgtgcctggattgtgaatttcttgtttttccccctcacattaccattatccttactaccaaaactaaaaaggaggagagagaaaattctctgaaattgttcttg

SEQ ID NO: 155504 - DNA, 383 bp, Homo sapiens
aaagtatacaggagaggttgggcatggtggctcacacctgtaatcccagcactttgggatgcctaggcgagcagatcacctgaggtcaggagttccagaccagcaacatgacaaaacctcatctctactaaaaatacaaaaaaaaaaaaaaaaaattagcttggcacggtagcatgytcctgtaatcccagctactcgggaggctgaggaacgagaattgcttgaacctgggaggcgaaggttgcagtgagccgacattgcaccactgcactccagcctgagtcacagagcaagactccatcttaaaaaaaaaaaatagtaaaaagagtataccggagaatgtgcctaggttataagcaaataccaaaccattttatatcagg

SEQ ID NO: 155505 - DNA, 444 bp, Homo sapiens
ttcatgagtaagaaatagaaaggcttgttagcataagccactgagttttgyagttgtttcccagaattagtgcagtgataactgattaatgactacaggggtgcatcccctgtcccaggccttcaacaccagggtggggaccatgacccaagcttggtcaggaagcgtatctgtgccgacgactcctgatttcccatctcacccactgtccattctctgcccaaccctcacctgctccaagcccaggccccttcctccactgcagcccccacctgactctggtaatgcagtttcctttcctgcctctcaagccaatgggaggcaagagagtctccctgtggctaggtgcaggtgctcaacacccttgtgggctcccttgtctcacatcttagacctttcattcatttatattccaaatccccaccgcacatactggatggttcc

SEQ ID NO: 155506 - DNA, 513 bp, Homo sapiens
acaccaccaggaccttgggtccaaagcatagcgctatgcggagtctcagcagagtggctctggtatgcacagagacccaggaattttgcatactctggccctgggaattccagcaaggcgggaaatccatccatgccttcccctaggaagggggctgaatccagggggccaagcagcatcgttctgcaggccccactcccatggcacctcacatgttaacacccactggcttggaattccagctggccagtggcaggaagctggagactgcctgaaatgaaccaagttcctgaggggcttgggagtgggggcagctgccatctctgtggttccagcctgccggctcctctggggagtccaggaggtctggaacgggaagagttttccacaacacagcagactgtggtcagactgctcctctaagtgggaccctgcttcatccctcctcactaggtggggcytccctgcaggaatttcagctacactagcctgagttatatgaacagatctctg

SEQ ID NO: 155507 - DNA, 632 bp, Homo sapiens
atctaatacttaaatagactaatctgcgttggtaatttcatattttcaaatctagaaaataggagaagtggcattcagtttcatttccatttaaaacctgtcaggctttatgagtaaaacaagatctcacatcttgtaatctttcaaaccaagaacacgtaagttatctgcaaacatgcaaagggaggaattacaaaagcaggactgtcctaaaagaaaacacaaagtaccaaaaggaataaaagaatttttcaaggggaactgcaagargaagatgtcatgctccacttcaagtaaaatgcaactgagggatattttagtcttcacataccatctaccattaatgtttactattttcctatcaaagaaaagtcaaaatcaaaagaggttaaaaacaacactcaaggctgggtgcagtggctcccgcctgtaatcccagcactttgggaggccaagactggtggatcacctgaggtcaggagctccagaccagcctgaccaacatggtgaaaccccacctctactaaaaaatacaaaattagcagggcatggtggcacatgcctgtaatcccagcttctcaggaggctgaggcaggagaatctcttgaacacaggaggcggaagttgcagtg

SEQ ID NO: 155508 - DNA, 448 bp, Homo sapiens
aactagaatgaccataatcacggtatgcatagtctctatgtggtggagcataatccctggtttctcgggaacttggatgatttctgcgtgcacgagttgaagcaaggaattttaaattgtcaccttctagtatccaaaacataactacattacaacttaaacacaattaaattgccaaacatctaaataaaatgcccacagagcccaaatgcccaaaatgcccaaatgcccaaaaagcacatgaaacagatactcataatcagtgattcaggaaatgcatttcaaataaaaaaggagcttccacacttcacacacacacacactggaagggcaaaaaayttacaaaagcaggaaataacaagtgtttgagaggatgtagataaattgcagccctgatacaatgttagttggaatgaacaatttaagaaatctatttgataaatccaga

SEQ ID NO: 155509 - DNA, 467 bp, Homo sapiens
tctagaggaatgttcatcccaactagaatgaccataatcacggtatgcatagtctctatgtggtggagcataatccctggtttctcgggaacttggatgatttctgcgtgcacgagttgaagcaaggaattttaaattgtcaccttctagtatccaaaacataactacattacaacttaaacacaattaaattgccaaacatctaaataaaatgcccacagagcccaaatgcccaaaatgcccaaatgcccaaaaagcacatgaaacagatactcataatcagtgattcaggaaatgcatttcaaataaaaaaggagcttccacacttcacacacacacacactggaagggcaaaaaacttwcaaaagcaggaaataacaagtgtttgagaggatgtagataaattgcagccctgatacaatgttagttggaatgaacaatttaagaaatctatttgataaatccag

SEQ ID NO: 155510 - DNA, 467 bp, Homo sapiens
tctagaggaatgttcatcccaactagaatgaccataatcacggtatgcatagtctctatgtggtggagcataatccctggtttctcgggaacttggatgatttctgcgtgcacgagttgaagcaaggaattttaaattgtcaccttctagtatccaaaacataactacattacaacttaaacacaattaaattgccaaacatctaaataaaatgcccacagagcccaaatgcccaaaatgcccaaatgcccaaaaagcacatgaaacagatactcataatcagtgattcaggaaatgcatttcaaataaaaaaggagcttccacacttcacacacacacacactggaagggcaaaaaacttacaaaagcaggaaataacaagtgtttgagaggatgtagataaattgsagccctgatacaatgttagttggaatgaacaatttaagaaatctatttgataaatccag

SEQ ID NO: 155511 - DNA, 464 bp, Homo sapiens
actccctagtttctcgggaacttcgaygatttctgtatgcataagtttaagcaacaaattttaaattttcaacttgtagtatccgatatatgactaacttacaacttaaacaaaattaaaaggccaaacatctaaatagatatttctccaaataaaatgggcaaacgcccaaaaagcacatgggacagatactcatattcagtgattcagaaaatgcatttcttttttttattatactttaagttctagggtccatgtgcatgatgagttaatgggtgcagaaaatgcatttcaaatccaaaatgggatatcatatttcacacacagatgaatggcaataaattttcaaaagcaggaaataacaagtgttggagaggatgtagataaattggagccctgatacaatgttagttggaatgaacaatttaagaaatctatttgacaaatccacaaaaagttacagt

SEQ ID NO: 155512 - DNA, 443 bp, Homo sapiens
tcgggaacttcgatgatttctgtatgcataagtttaagcaacaaattttaaattttcaacttgtagtatccgatatatgactaacttacaacttaaacaaaattaaaaggccaaacatctaaatagatatttctccaaataaaatgggcaaacgcccaaaaagcacatgggacagatactcatattcagtgattcagaaaatgcatttcttttttttattatactttaagttctagggtccatgtgcatgaygagttaatgggtgcagaaaatgcatttcaaatccaaaatgggatatcatatttcacacacagatgaatggcaataaattttcaaaagcaggaaataacaagtgttggagaggatgtagataaattggagccctgatacaatgttagttggaatgaacaatttaagaaatctatttgacaaatccacaaaaa

SEQ ID NO: 155513 - DNA, 446 bp, Homo sapiens
ttctcgggaacttcgatgatttctgtatgcataagtttaagcaacaaattttaaattttcaacttgtagtatccgatatatgactaacttacaacttaaacaaaattaaaaggccaaacatctaaatagatatttctccaaataaaatgggcaaacgcccaaaaagcacatgggacagatactcatattcagtgattcagaaaatgcatttcttttttttattatactttaagttctagggtccatgtgcatgatgagttaatgggtgcagaaaatgcatttcaaatccaaaatgggatatcatatttcacacacagatgaatggcaataaattttcaaaagcaggaaataacaagtgttggagaggatgyagataaattggagccctgatacaatgttagttggaatgaacaatttaagaaatctatttgacaaatccacaaaaa

SEQ ID NO: 155514 - DNA, 448 bp, Homo sapiens
tttctcgggaacttcgatgatttctgtatgcataagtttaagcaacaaattttaaattttcaacttctagtatccgatayatgactaacttacaacttaaacaaaattaaaaggccaaacatctcaatggatatttctccaaataaaatgggcaaatgcccaagatgcacatgggacagatactcatattcagtgattcagaagacgcatttcttttttttttattatactttaagttctagggtccatgtgcatgatgagttaatgggtgcagaaaatgcatttcaaatccaaaatgagatatcatatttcatacgcacacactggaagggcaataaattttcaaaagcaggaaataacaagtgtttgagaggatgtagataaattggagccctgacagaacgttagttggaatgagcaatttaagaaatctatttcacaaatccag

SEQ ID NO: 155515 - DNA, 448 bp, Homo sapiens
tttctcgggaacttcgatgatttctgtatgcataagtttaagcaacaaattttaaattttcaacttctagtatccgatatatgactaacttacaacttaaacaaaattaaaaggccaaacatctcaatggatatttctccaaataaaatgggcaaatgcccaagatgcacatgggacasatactcatattcagtgattcagaagacgcatttcttttttttttattatactttaagttctagggtccatgtgcatgatgagttaatgggtgcagaaaatgcatttcaaatccaaaatgagatatcatatttcatacgcacacactggaagggcaataaattttcaaaagcaggaaataacaagtgtttgagaggatgtagataaattggagccctgacagaacgttagttggaatgagcaatttaagaaatctatttcacaaatccag

SEQ ID NO: 155516 - DNA, 449 bp, Homo sapiens
gtttctcgggaacttcgatgatttctgtatgcataagtttaagcaacaaattttaaattttcaacttctagtatccgatatatgactaacttacaacttaaacaaaattaaaaggccaaacatctcaatggatatttctccaaataaaatgggcaaatgcccaagatgcacatgggacagatactcatattcagtgattcagaagacgcatttcttttttttttatyatactttaagttctagggtccatgtgcatgatgagttaatgggtgcagaaaatgcatttcaaatccaaaatgagatatcatatttcatacgcacacactggaagggcaataaattttcaaaagcaggaaataacaagtgtttgagaggatgtagataaattggagccctgacagaacgttagttggaatgagcaatttaagaaatctatttcacaaatccag

SEQ ID NO: 155517 - DNA, 448 bp, Homo sapiens
tttctcgggaacttcgatgatttctgtatgcataagtttaagcaacaaattttaaattttcaacttctagtatccgatatatgactaacttacaacttaaacaaaattaaaaggccaaacatctcaatggatatttctccaaataaaatgggcaaatgcccaagatgcacatgggacagatactcatattcagtgattcagaagacgcatttcttttttttttattatactttaagttctagggtccatgtgcatgatgagttaatgggtgcagaaaatgcatttcaaatccaaaatgagatatcatatttcatacgcacacactggaagggcaataaattttcaaaagcaggaaataacaagtgtttgagaggatgtagataaattggagccctgayagaacgttagttggaatgagcaatttaagaaatctatttcacaaatccag

SEQ ID NO: 155518 - DNA, 479 bp, Homo sapiens
gtggagcataatccctagtttctcgggaacttcgatgatttctgtatgcataagtttaagcaacaaattttaaattttcaacttctagtatccgatatatgactaacttacaacttaaacaaaattaaaaggccaaacatctcaatggatatttctccaaataaaatgggcaaatgcccaagatgcacatgggacagatactcatattcagtgattcagaagacgcatttcttttttttttattatactttaagttctagggtccatgtgcatgatgagttaatgggtgcagaaaatgcatttcaaatccaaaatgagatatcatatttcatacgcacacactggaagggcaataaattttcaaaagcaggaaataacaagtgtttgagaggatgtagataaattggagccctgacagaacgttagttggaatgagcaatttaagaaatctatttsacaaatccagaaaaagttacagt

SEQ ID NO: 155519 - DNA, 589 bp, Homo sapiens
ccctggcctgaaggggataaagggaggaggcagttgtcagaacccagcagaaaagagtcttgcagaagagccattctgagatgaatggaggtctcttgttaaggacacatcagccacaagggtctttctgggaggacaggaaagggaggactgaagaaataagagccccagtcgcatcatgctccatctcctaccatgccccatgggctgaacccagccagaagccaccagggagctctaagaagtccctagaggtcatatcccagggcagagggcagggggaaaggagggaaggggcaaccaaccatgcaytgacaacaacaggacagggtacctatcatgctggtgctgaataatgaccacagcactaccaccatgctgccaagtggacttcatccatacaagcaagaaatgaaccgatattgtgatggaaatttggggttattccttttatagaggctgtgcctcttcacacagggtaggcagccacaagcctggctttactcttacttcaaatcgacatgcctaaaaatgaattaatgttttcctaaaagccacctgctcaagatttccctcttgtcatcctctt

SEQ ID NO: 155520 - DNA, 315 bp, Homo sapiens
ttgcatttttccccaaaacttttatctgcaaaagaagcctcgtcaagttgtaaagcaattgcactgagacttcttccaggtttgctttcatttcaatgctgtttcccctgagaaccgctcattgcagaagttcgagggctttgggcagagttggcctttcacgtaggtmctgaacatccatggaagtgtgctcctagatggtttgtttggggtggtatcctcaatgggtgtcttccttacattttccaaggcttaggaaagctatgtgtggaatgctgtggggcctgcccctcccaggccacatcacagtggttt

SEQ ID NO: 155521 - DNA, 561 bp, Homo sapiens
gtatgtctttatcagcagcatgaaaatggactaatacaggagcccrggaaaatgggaacagcacagctgcagggtgcattttgtccctcaaaatcagcatttccagaccaactcccaacatagcaagagaagacagctaggtgggcttgttcctcccttggatgaaacaataccaggggaacatgtccccctgtcaagtaagattaataaaagctctgccagcaaaggtaaccatggggggcaccatcccctacaaagagatatgtggtgagtggacagaacctgaggagggaccccactacacctcacacctgggatctcaggccaagagacacccaggtcaagagccatgtgctcatcaatagcacatggctcatgaaatgttctgaggcccccacaggaagggggatgccatcttaacaaacacttagccatggaagcctcttcacttctgcagacctgaaactcctctccacaggaagagacatctgggcagcccagcctggggatatcccttccagcccccaaggcagcacccagcagcactggagaaaccaaaca

SEQ ID NO: 155522 - DNA, 576 bp, Homo sapiens
acatggctcatgaaatgttctgaggcccccacaggaagggggatgccatcttaacaaacacttagccatggaagcctcttcacttctgcagacctgaaactcctctccacaggaagagacatctgggcagcccagcctggggatatcccttccagcccccaaggcagcacccagcagcactggagaaaccaaacagatcaaagtagyactgcaagatctctgaaaattaaatcttcatttgaacaacaggctatgtaaatagtctataacctgtgtgctaaacttaaacaggttgactgcctgctgaaataaaacagttatttatgactcagagtctcctaaaataatagacaaaatatccaggatacaatcaaaagtcacctgtcatatcagaaactgagaaaatcacaacttgaatgggaaaggacaaacacctgatgccaacactgagatatatcggatgctggattatcttaaaaggattttaaagcagccttcctaaaaatgtctcaacaatcagttaacaacttctcttggaacaagtgaaaaatgaaaaactatgggaagaaacaaaag

SEQ ID NO: 155523 - DNA, 547 bp, Homo sapiens
attccagttttgaccactgggagcagcttcggtgtccatttggctcctgtcgtctttagacacatcctcatcaattttcaatcagtttttcattttctcacatcataaaatgttcctgaatcattttgcattttgcctgctcttgccctggaatcaactgcctctcaaaagatttctcattccttgtattggggaatggtgtttagaaatcaaaatctggatgcttggtgtgtgtgtagcaatttagatgtcgctgaatctaggcctccgcaatcagcatagttgggcatatgtgtttgtataccaacacccatatccacacatccatatctgtatctatatattaatttactcgtctatgtgtttaaaaccttcagatcatattgattmcctgaattccaatccagcaccataagatttgcctcttgctctcactgtctacaatatatactcacttatttgttcaattcctagcatacacctaaagtagttacagaattgctaactcatatatttgtgagaaatagatttactaactcaactacag

SEQ ID NO: 155524 - DNA, 576 bp, Homo sapiens
gttctattgaaacaattcttgtgggaaatagaaacagaaattacaatttttaaaaaatgatgaaaacactacatatcaaaatttaagggatgcatttaaagcagtaatcagaggaaaaycattgcacaaaacacatttaataacaacactgaaaaaaagattaaatatccaattataaaaactagaaaaaaacaaagtccaccaaataaaggagggagataatgaagttaaagcagaaattaatgacatagagaatataaaaacagtatattaattaaccaactcccagttgttgttttgaaaaaaattaacaagatggacaaaccacaatctaacttgattaagtgggaaaaagggggaaaaagcacaaatattcaaaataagaaagaacaacaaggaaataatcattgaaacagaagtaaaatttaaatcataaatgactaatttggaaacttctgtgaaaataaattttaaaccctaggtgaaatggatagttccctagagaaatacagattgccaatattgaccccatctgatttagaaagcttaaacagacctatttccaaagaaataaaa

SEQ ID NO: 155525 - DNA, 576 bp, Homo sapiens
gttctattgaaacaattcttgtgggaaatagaaacagaaattacaatttttaaaaaatgatgaaaacactacatatcaaaatttaagggatgcatttaaagcagtaatcagaggaaaaccattgcacaaaacacatttaataacaacactgaaaaaaagattaaatatccaattataaaaactagaaaaaaacaaagtccmccaaataaaggagggagataatgaagttaaagcagaaattaatgacatagagaatataaaaacagtatattaattaaccaactcccagttgttgttttgaaaaaaattaacaagatggacaaaccacaatctaacttgattaagtgggaaaaagggggaaaaagcacaaatattcaaaataagaaagaacaacaaggaaataatcattgaaacagaagtaaaatttaaatcataaatgactaatttggaaacttctgtgaaaataaattttaaaccctaggtgaaatggatagttccctagagaaatacagattgccaatattgaccccatctgatttagaaagcttaaacagacctatttccaaagaaataaaa

SEQ ID NO: 155526 - DNA, 592 bp, Homo sapiens
ttaggaatttgtccatttcatctaggttatccaattttggggcatacagttgttcatagtattttcttataatactttttattttttaaaaattggtagtcatgtccctgattccatttctgattttaataatttgagtttttccttagtcagtctagctaaagwtctgtcaattttgttaatctcttcaaaaaaccaacttttggtctcattaattttctttatttttaaaattcactacagatctcctctctaatatttattatttctgttagctttttagtttagtttgttctcctttttccagttccttatcgtataaaattaggttgctaatttgtgatctttcttcttttttaatgtcagcatttacagctataaatttcccttttagtactgctttcactgcaccacataaattttgatgtgttatgtttcattttcatttgtctcaaggtattatattagtttgctagaattgccatcacaaaatgccagactgtgtggcttaaacaacaaaaattaattttctcactgttcttgaggctagaagtccaaggtcaaggtgctggtatggttggtttcttctgag

SEQ ID NO: 155527 - DNA, 543 bp, Homo sapiens
gtagttgtagtcagaaatccttcctgttggtttctgcacaaaaagtgcctctttcaattaatgtccacatcagcaaagcagcaactttgttgggttggttttgttgacattagtttcagtcacaaatgaaaattctttgttttgttctagttgaaaacatattatatccctatagtttccagaactttttttaatcaacagaatgaaattttacaaaattgtattctgacttatcaatatgaataaaaccaatgctacatgtacctgcactattggatacaggtcctaaaggaagcagctggataaattgtcccattttagtgctcacatgatgaaactgcctgatacttatcattgggatactgcagcwtaacaacgaatagaatgagaagacagacaaaagagactttcccagtgtcaaggtaactgaatcaatattttcagtttggttcccctaattgcctaggttagtacagataaaagagaaaaatattaagaagcaattagggagagtgaaataagctataaagaagatatacagaa

SEQ ID NO: 155528 - DNA, 571 bp, Homo sapiens
gcagggtcagggaatggtacagccctacaaatatgccattagaaggcagtaactaaaactttcaggacactcaagggttactgtgcttagaggctggtaagtttcaccaaatatgaagacctctaatgagaacacacagacacagacacagaggcaggatttttgtccttgataaacacaagtaccagttacccaggctgtcccctgaatgccagctcattcacattctaaagcactcacattgtcagagaaagacagtggcaggctgagctcccgggatggactgagagacagctgcatcgatgcacatgccctgagcacactcaagtatggtctctgtggccttgggagtggcggactggactgagctctgccccgaggactgcacaggctcatggagaakacagctcacatacaactgccgtgatggacctgtgacggctatgctagcctcacacaccaaggtatcataggggtctctcagctaaatccatactcttgctgaggccatgggggaaccaaccagagcttaactgaacattggagctcttctgtggtctcaagcatcttt

SEQ ID NO: 155529 - DNA, 571 bp, Homo sapiens
gcagggtcagggaatggtacagccctacaaatatgccattagaaggcagtaactaaaactttcaggacactcaagggttactgtgcttagaggctggtaagtttcaccaaatatgaagacctctaatgagaacacacagacacagacacagaggcaggatttttgtccttgataaacacaagtaccagttacccaggctgtcccctgaatgccagctcattcacattctaaagcactcacattgtcagagaaagacagtggcaggctgagctcccgggatggactgagagacagctgcatcgatgcacatgccctgagcacactcaagtatggtctctgtggccttgggagtggcggactggactgagctctgccccgaggactgcacaggctcatggagaatacagctcacatacaactgccgtgatggacctgtgacggctatgctagcctcacacaccaaggtaycataggggtctctcagctaaatccatactcttgctgaggccatgggggaaccaaccagagcttaactgaacattggagctcttctgtggtctcaagcatcttt

SEQ ID NO: 155530 - DNA, 571 bp, Homo sapiens
gcagggtcagggaatggtacagccctacaaatatgccattagaaggcagtaactaaaactttcaggacactcaagggttactgtgcttagaggctggtaagtttcaccaaatatgaagacctctaatgagaacacacagacacagacacagaggcaggatttttgtccttgataaacacaagtaccagttacccaggctgtcccctgaatgccagctcattcacattctaaagcactcacattgtcagagaaagacagtggcaggctgagctcccgggatggactgagagacagctgcatcgatgcacatgccctgagcacactcaagtatggtctctgtggccttgggagtggcggactggactgagctctgccccgaggactgcacaggctcatggagaatacagctcacatacaactgccgtgatggacctgtgacggctatgctagcctcacacaccaaggtatcataggggtctctcagctaaatccatackcttgctgaggccatgggggaaccaaccagagcttaactgaacattggagctcttctgtggtctcaagcatcttt

SEQ ID NO: 155531 - DNA, 462 bp, Homo sapiens
ttgccttgaaatagttacagaatcttcctgtaaaagggtaaaaagtgaaaagaacataacagaagtaggagaggagaattttgcctgggaaaatggagaatgagagtaatttaagccycaagcagcatagccatgttttaccatgctttaccttcccctgcctttcatcttattcatgcacgagaaaggaatgcagatttgatttccatacaaactgccaaacagccacagttctagaatgtggaacagcttggaaactttcttcattggccacatctccaatcaatgaggctgcccttagcggttgagaagacggtgtttaagagacaaagaaacatggaggaactggaaaacattaggacattatgcttagtgaagtaagccaaacacagaaagacaaatgccctgtgatctcacctgtttgtggaatcttaaaaaaaaaaaatcaaactcatagaagca

SEQ ID NO: 155532 - DNA, 420 bp, Homo sapiens
atctatctattcattcaactgtctgtttaaccatctatccatctagttatctattatccacccacccatccatctatgagccatctatccacccatctgccaatccttttatctatctatctatatmtatctatctaacatagctacctatgtgaaactcaccttttagttaataataaattttgaaataaattctcttcaatacatatagacctgcctcgctgtttttaaatttgagcaattctttatttaaagtcaacaaaatgaaaacctaggtattagaattgcgtagatcagtgaactttcataaaatctatacacccaccagccaaataaagattaccatcctcatgaccctgtttcatgtgctgccactcctataccacccctctgccgaggtggtcattatcctgatttcta

SEQ ID NO: 155533 - DNA, 603 bp, Homo sapiens
aaagcattcatgcaagctaaaatgtatggaaatgaaaaattaggttagatgcaaaattttggggggacasaggaggaatctggtgaaaattcatgatccagatacaaatttgaagtggcacattgtattagttcattctcatgctgctaataaagacatacccgagactgggtaatttataaaggaaagaggtttaatggactcacagttgcacatggctggggaggcctcacaattatagcagagggcaaatgaagagcaaagtcatgtcttacatggtggcaggcaagagagcgtgtgcaggggagctcccctttatgaaatcatcacatctcatgagacttattcactatcacgagaacagcatgggaaagaccctccctcatgattcagttagatctcaccgggtgtctcccatgaaatatggtaattatgggagccacagttcaagaggatatttgggtagggacacagctaaaccatattacacatggatccatttgctaatgttaaatcatcagttattcatttcattttttcctttttctgatttgctaaaatatttggaagtttgtcttgccacagaaggcaaggacattttca

SEQ ID NO: 155534 - DNA, 603 bp, Homo sapiens
aaagcattcatgcaagctaaaatgtatggaaatgaaaaattaggttagatgcaaaattttggggggacagaggaggaatctggtgaaaattcatgatccagatacaaatttgaagtggcacattgtattagttcattctcatgctgctaataaagacatacccgagactgggtaatttataaaggaaagaggtttaatggactcacagttgcmcatggctggggaggcctcacaattatagcagagggcaaatgaagagcaaagtcatgtcttacatggtggcaggcaagagagcgtgtgcaggggagctcccctttatgaaatcatcacatctcatgagacttattcactatcacgagaacagcatgggaaagaccctccctcatgattcagttagatctcaccgggtgtctcccatgaaatatggtaattatgggagccacagttcaagaggatatttgggtagggacacagctaaaccatattacacatggatccatttgctaatgttaaatcatcagttattcatttcattttttcctttttctgatttgctaaaatatttggaagtttgtcttgccacagaaggcaaggacattttca

SEQ ID NO: 155535 - DNA, 603 bp, Homo sapiens
aaagcattcatgcaagctaaaatgtatggaaatgaaaaattaggttagatgcaaaattttggggggacagaggaggaatctggtgaaaattcatgatccagatacaaatttgaagtggcacattgtattagttcattctcatgctgctaataaagacatacccgagactgggtaatttataaaggaaagaggtttaatggactcacagttgcacatggctggggaggcctcacaattatagcagagggcaaatgaagagcaaagtcatgtcttacatggtggcaggcaagagagcgtgtgcaggggagctcccctttatgaaatcatcacatctcatgagacttattcactatcaygagaacagcatgggaaagaccctccctcatgattcagttagatctcaccgggtgtctcccatgaaatatggtaattatgggagccacagttcaagaggatatttgggtagggacacagctaaaccatattacacatggatccatttgctaatgttaaatcatcagttattcatttcattttttcctttttctgatttgctaaaatatttggaagtttgtcttgccacagaaggcaaggacattttca

SEQ ID NO: 155536 - DNA, 549 bp, Homo sapiens
cagttgtgctattcatttattaccaaaattttctttgcagaaggctagtcctgaaaataactgtgcttgatccatttggcagcttcttagtaggttacgtcgaatctttttttctgaaatatcaaaatgattcattttgttgaatgtccagcatgatgcttgagaaagaatagaagacacactaaaaayatcatctttagaatttccattgtcatcagagaaatatctgatttttctcttttactaagagggaaattataaaacagagacccatgtagataaattttataactcatataaactggtaaagaaaaccactgattgtgctaaacatgatagctatagcaaaagttgtagttgattccctttttagctatttacagaaaggcacaatgaagaaaaatgtaataatttgtaaaatggaaaacatctttttttgccaaatatgatttccatagaaaaaataaactattcatattaatacccaatttggatggcacatttcatgtgaaatgcactttactaatcattgccataaaatgaaagtga

SEQ ID NO: 155537 - DNA, 604 bp, Homo sapiens
ctgtcaggatcctagtgaaaaagaggccatagagacgtcaaccatcctggatgacctaaggttctaccactattaggtgagagacactgtagcttccccaaaggttggtactataaaggagagttcactagacttctaaagataaagggcaattttataagacagaactgaaaggactcaaataaaatataatgacttttaatttataaaggcactggtggattgttgcctggtgtcaaccagaatcttgtacccagttaagaggaataagttcaattgttcagaaagaaaaaatatatttttaaaaattcgttgttttagtgatcatttaataattgttcattgcaatagttacaaagaaatcaatttaactttaattctcatgtctccaraaggaaaaagaagatagctttataattattttacatgaaatctttagagcaatttataagcactgcacatttgaaacaatgaaggaaaaatctaaggcatttcctactgcaagattcaattgtatgaaggcaaaaggggctaggagtagtatattgcccaaatgagcataggatgtatatactcaaatcaactaagagtttataggagctgg

SEQ ID NO: 155538 - DNA, 555 bp, Homo sapiens
tttattgtaatatatgttatagtgtaggcaatttaggatagtttttgaaatcaaatggacatgtatgtatcccatttcagttctactactttactagctgtgaattcttagacaattggatgcattaatttctctgagctttactgtccctaccatacaataggcataatagtatctatcttggagtgttgtgtggattaaattagtgcctcacacagggcttttcccccacataacaaaaaggtagttcccaaaacatttattttaaagtcaatagttaagaactcagaaaggagggagctgaggttctactaaaccttctgagatgccccacaattttcagtgttctgaagttttggttaccttacagaaaaaccacactgaacagaagccagctgtccttagaggtgaggacatcccacctgaatatctgcttgagatcaatgtcagctttatttttkaaagataacctgaattttgtttccacatcccattctgccagggacagcagtaggatttaaaataaccagaaagacacacagaataattctttga

SEQ ID NO: 155539 - DNA, 555 bp, Homo sapiens
tttattgtaatatatgttatagtgtaggcaatttaggatagtttttgaaatcaaatggacatgtatgtatcccatttcagttctactactttactagctgtgaattcttagacaattggatgcattaatttctctgagctttactgtccctaccatacaataggcataatagtatctatcttggagtgttgtgtggattaaattagtgcctcacacagggcttttcccccacataacaaaaaggtagttcccaaaacatttattttaaagtcaatagttaagaactcagaaaggagggagctgaggttctactaaaccttctgagatgccccacaattttcagtgttctgaagttttggttaccttacagaaaaaccacactgaacagaagccagctgtccttagaggtgaggacatcccacctgaatatctgcttgagatcaatgtcagctttatttttgraagataacctgaattttgtttccacatcccattctgccagggacagcagtaggatttaaaataaccagaaagacacacagaataattctttga

SEQ ID NO: 155540 - DNA, 587 bp, Homo sapiens
gctgttgtgacaatcaaatgaaaatatatatgtatgtatgtatatgtgtgtgtgcatgtatgtgtataagatatgtatgtgtaccctagcacatgctatgttctcacaagtattcactccattaaagcagcagataagaataagcagtaaatgtgttagaagaagaattaaaactgtatttcamagtatggtttttattcaagaaagaaagggagacagagaagactactagtattttcccttatcagtgagccctggcttcactcatgtgaactgcaaagtagtcagggtggagtgaggggtggctatggctgtgggatagaatggagccaagtggaccatgtgaggtacactcatgacctttgtcttctaacactcaggacctgcactctctcccacctctggaaatgtttacagtccattatgtaatcagatgcacacatgctatctagcaggaaactgtgcctcttcacagaggtctggcttttggtatgttttgtttaaactctttagagataaactgccatttacctgtttaacagcccacataatatgtagactagagctgttccctaaagatgctcaga

SEQ ID NO: 155541 - DNA, 587 bp, Homo sapiens
gctgttgtgacaatcaaatgaaaatatatatgtatgtatgtatatgtgtgtgtgcatgtatgtgtataagatatgtatgtgtaccctagcacatgctatgttctcacaagtattcactccattaaagcagcagataagaataagcagtaaatgtgttagaagaagaattaaaactgtatttcaaagtatggtttttattcaagaaagaaagggagacagagaagactactagtattttcccttatcagtgagccctggcttcactcatgtgaactgcaaagtagtcagggtggagtgaggggtggctayggctgtgggatagaatggagccaagtggaccatgtgaggtacactcatgacctttgtcttctaacactcaggacctgcactctctcccacctctggaaatgtttacagtccattatgtaatcagatgcacacatgctatctagcaggaaactgtgcctcttcacagaggtctggcttttggtatgttttgtttaaactctttagagataaactgccatttacctgtttaacagcccacataatatgtagactagagctgttccctaaagatgctcaga

SEQ ID NO: 155542 - DNA, 587 bp, Homo sapiens
gctgttgtgacaatcaaatgaaaatatatatgtatgtatgtatatgtgtgtgtgcatgtatgtgtataagatatgtatgtgtaccctagcacatgctatgttctcacaagtattcactccattaaagcagcagataagaataagcagtaaatgtgttagaagaagaattaaaactgtatttcaaagtatggtttttattcaagaaagaaagggagacagagaagactactagtattttcccttatcagtgagccctggcttcactcatgtgaactgcaaagtagtcagggtggagtgaggggtggctatggctgtgggatagaatggagccaagtggaccatgtgaggtacactcatgacctttgtcttctaacactcaggacctgcactctctcccacctctggaaatgtttacagtccattatgtaatcagatgcacacatgctatctagcaggaaactgtgcctcttcacagaggtctggcttttggtatgttttgttkaaactctttagagataaactgccatttacctgtttaacagcccacataatatgtagactagagctgttccctaaagatgctcaga

SEQ ID NO: 155543 - DNA, 596 bp, Homo sapiens
ccatgacataactgaacaagcagaaataaggggggtgaagagggagtcgaggggttggggagaagtgtctctgcagatttggtggtccaggcaacctcactggaaactgagtatcaacggttctttaatatataaaactcagacacctgcagggctggacagtgaggggaggcaagaggatgcagactgagcagacgggccttttcacttgagccaaagtctccctacattcacttggtacacagtggaaaaatagcaatggaaaaaatctcacagagattttgctaccaaattactactgggacatcacattgtgatcraaaaattttatttggagctgggtgggatctctgattacaaacggtctctttctcttctcagttttgattgtattgcaagacattttgctagtgtcacaaaaatttaataacttcagtgtaacaattatcatttttcctcttgacagaactctcagacaatgggaagcagcagtactcagcacaattattgctgcttagcagagaggccagcaggggtgggcagaattctgcaagagacagtccatgccctgaaagctaggaatctaatttacccaa

SEQ ID NO: 155544 - DNA, 596 bp, Homo sapiens
ccatgacataactgaacaagcagaaataaggggggtgaagagggagtcgaggggttggggagaagtgtctctgcagatttggtggtccaggcaacctcactggaaactgagtatcaacggttctttaatatataaaactcagacacctgcagggctggacagtgaggggaggcaagaggatgcagactgagcagacgggccttttcacttgagccaaagtctccctacattcacttggtacacagtggaaaaatagcaatggaaaaaatctcacagagattttgctaccaaattactactgggacatcacattgtgatcaaaaaattttatttggagctgggtgggatctctgattacaaacggtctctttctcttctcagttttgattgtattgcaagacattttgctagtgtcacaaaaatttaataacttcagtgtaacaattatcatttttcctcttgacagaactctcagacaatgggaagcagcagtactcagcacaattattgctgcttagcagagaggccarcaggggtgggcagaattctgcaagagacagtccatgccctgaaagctaggaatctaatttacccaa

SEQ ID NO: 155545 - DNA, 628 bp, Homo sapiens
ctagaaaacagtttatgaaattgaactgcaaaatatgctctttgcctcatatacaatgttatattgtgtttataactgtaaacaccctgcagtcatcgccatgtgcgtgctggattggagaaacagttgaaacttgtacaatggtgatttttttctattgatttacagattgaaataacagaagccatctctgatttttgaaagtacaagctgaagaactgaaaagatgagaactccttcattgcctgggagttagaatcagagataatgacacaactggaaaaccaagaggaaaacatatgagactgatattctcaaagtataatcttgaaaaagaaatgagtcaagcacatgcatggtcaggcaatgtactcatgcrgtggacctctggtgttctggctggccagagtcaccttttccttgttctggtagccatagctttggtttcctgggaggaatcacctcccttaacctcagtgtacactgagattgggcacactccagcacctgaaggagacgtgtaacccaagcttttgccatgaacatatttcctctctttggccacagtgattgtctcaggagaaggcacaaaactccactctggtcagtaataatcagactgagctgc

SEQ ID NO: 155546 - DNA, 571 bp, Homo sapiens
aaaacaggagtaaaggagccacaccagargcatgcaatggtctcctcataagaaaacgtgctgttacaaagcagtaaggtattggtgataccagggcagaccctagaaccactttgcttgtttccaatccagttctgctgtctattactgtgtggccctggacaagttatataacctctctgtgattagttttttcatctgtagaatgagactgatgctagtccccccctcctagttttgttgaaaagtttaaagagttaattcatatgaaatgcttaaaacagaccctgagtgcttcttaaaacaaactcctggaagactgacatatccatcacctagcacagtgcctggcacatagtaggtcaatcaatatttgttggatgaatattggatgttatttcattgagtgccctagttggttcaggtgtgacccatgaagcaatgactgaagcactctcagcctcaggtgtggacttgactactgagagtgggcagcactccaagagaagttttatccaactgcaattttactttttctacggatttctatgttgtcttcttgattaacaat

SEQ ID NO: 155547 - DNA, 526 bp, Homo sapiens
ggttatagtttatgcaaacgcaaggagagtgtgtaaaagatcctgaaagtggttttaagtggaaagacccatgccacatgcatcagaactacatagtcattggaaaccrctgcagcatagtaataatgcttagaactgacagtcctgcagcgtttctacattctcctctagagcctgcatgttttccagcctcacatgcatttttaagcagttattaggatgcctacttgttaactgatctcaaataaatcttaattcccattcccaggcatcatagaaccacatccaaatgcccccttcccctgactgcacagccagtttaggccgatggtgatgtaggtgaagtcaacaccatttctacatttctctctcccaacttcctcatattttacccttcattttcctcctctttagggttaaaattattaacaaaagctgaaagtatagcctctccctctgataatgccaaggtagatttcagagcatggcctcaataagcctgcggtccatttacatatgcttgtct

SEQ ID NO: 155548 - DNA, 526 bp, Homo sapiens
ggttatagtttatgcaaacgcaaggagagtgtgtaaaagatcctgaaagtggttttaagtggaaagacccatgccacatgcatcagaactacatagtcattggaaaccactgcagcatagtaataatgcttagaactgacagtcctgcagcgtttctacattctcctctagagcctgcatgttttccagcctcacatgcatttttaagcagttattaggatgcctacttgttaactgatctcaaataaatcttaattcccattcccaggcatcatagaaccacatccaaatgcccccttcccctgactgcacagccagtttaggccgatggtgatgtaggtgaagtcaacaccatttctacatttctctctcccaacttcctcatattttacccttcattttcctcctctttagggttaaaattattaacaaaagctgaaagtatagcctctccctctgataatgccaaggtagatttcagagcatgrcctcaataagcctgcggtccatttacatatgcttgtct

SEQ ID NO: 155549 - DNA, 570 bp, Homo sapiens
taaaccacgttttacccataagcaaagtgcatttctcataacttgtaagaaatatcttgcctcaccgtagcacacatacttaacattcttttaaaagctactcaatttgacatcagtatttgaattcttctatcaccaggaaattaggggacaacagagttgcaaatatcartttataaatgtgcagttagtaagattataattctattctaaatggccattctgccaattaacatttttttcaggaggctgggcatcatattgaaaaaatttacctaagttaagattgcctgggggcattggttaagaaaaggatagaaagcataaatttgtgtccaaaggtaagtacttacatagcagctgtttctatcagttactttgttgcaattaaggttttgtaataaataatgctgctattttttattcctgtggcattaaaatgtgtgaggcttatcagtctggtaattatgtaaatcctaaaataatttatcctttttagtgtctggcagtctgaccctgttggaggttattgaaccactgcttgatgagtatgtcagtcagtgtaccttc

SEQ ID NO: 155550 - DNA, 576 bp, Homo sapiens
cctctgtccttggcacaactttaaggatatcagtgaaagttagtattatttcataaagaagatcagattgtagaagttacatgtacatctaagaagaggcaacaaccattttagtaamtgtgactgaaggcaacatgaatgggctagataaaaccattgttgatttgggtagacaacatttgaaaatgcatttttaagtatctttaattaactgtaatcctttttatggaatatgtaaaatgttgaatcagctgcttaacacagtgggaagtatcaaagactggaattaggagaggtgggttttatctttggttttggtcaagtcatttgatctctttgggtttcactccttcatttattcatttataattatttatatacttattccacaaacattcaacaagcttgcactatcatcaccccctcccagttttcctcttccatagactgacagtgtcaccaagagcctttgcagctcttgcatgcaccattgaatagtaaaagctgctttatgagggacatcacagaaaggagaatcctgaactacttttgaaggcttggaggaatacagtttgg

SEQ ID NO: 155551 - DNA, 576 bp, Homo sapiens
cctctgtccttggcacaactttaaggatatcagtgaaagttagtattatttcataaagaagatcagattgtagaagttacatgtacatctaagaagaggcaacaaccattttagtaaatgtgactgaaggcaacatgaatgggctagataaaaccattgttgatttgggtagacaacatttgaaaatgcatttttaagtatctttaattaactgtaatcctttttatggaatatgtaaaatgttgaatcagctgcttaacacagtgggaagtatcaaagactggaattaggagagrtgggttttatctttggttttggtcaagtcatttgatctctttgggtttcactccttcatttattcatttataattatttatatacttattccacaaacattcaacaagcttgcactatcatcaccccctcccagttttcctcttccatagactgacagtgtcaccaagagcctttgcagctcttgcatgcaccattgaatagtaaaagctgctttatgagggacatcacagaaaggagaatcctgaactacttttgaaggcttggaggaatacagtttgg

SEQ ID NO: 155552 - DNA, 473 bp, Homo sapiens
taaaagctgctttatgagggacatcacagaaaggagaatcctgaactacttttgaaggcttggaggaatacagtttggataatggaaaaaacgttgattcggacttagaaaaggcaggtacaaatcatgaggccagccagaggtctaggataccttgaactgtgcgtgaagactgagaagtaaccaaagttggaaaggagctaaaggagtgaaattgactaataagaggcctcatggtggaggcagtaaatgcgttccggagaagaacacagggcacacatgggggctgtggacagcctcagttttagctttaggtgaatctaactagattggtaaaatgactacagggaaaatggtgtaaaatgattttactatcataaaaacaaaaacaagaacctatgactaggttacttaatttgccttcacastattttcacgtcacaataacatttgcagacaggtcattgctaaac

SEQ ID NO: 155553 - DNA, 392 bp, Homo sapiens
ttttacatatcctcagacaactctttgtcttttgatggtgaatttgatttttggaaacagctaatagtcacttgaagccaagtctgcgggttatatctgggtgatgtttggggaaaagaatgaggtgtgaaaacaatgtaacaagattgattttctaatgtggctcataaacttttcctgactacagttctaaaagaggagtttcaaaaattttttgaactctgggagcaataataaaatgagtttgcagcctcccaaggtgactrctttgaatgcaacactcattttgggaatataaattctggtctatgtggtaaaatgaaactagttccattgctctatagttatacattgttttcagcataataatttagatccatgtctaggaattc

SEQ ID NO: 155554 - DNA, 392 bp, Homo sapiens
aattccataacgggaattgtatctttaataacatgaaaccaatcagtcaactcttgggtatttataacaggaagaactagtgtttaagatattctaaatcactaaatatttttaagcggtgtttttattttcaaacaaaatgatgtgatttataaacatttttgggtcctgcttacctcctaatgctgctgtaatgagtctagaacttaragttggcatgtcctcagtaaaggccaatggcatgggggcctggaggcaatttaagaaagggatatggagaagtagaaagttggctcaggttgaagaatgtactgtgactaatccacaaaaccaatcatccacaggtggacaatattttagaaatggcccaggggatgctgctctggtctttt

SEQ ID NO: 155555 - DNA, 392 bp, Homo sapiens
aattccataacgggaattgtatctttaataacatgaaaccaatcagtcaactcttgggtatttataacaggaagaactagtgtttaagatattctaaatcactaaatatttttaagcggtgtttttattttcaaacaaaatgatgtgatttataaacatttttgggtcctgcttacctcctaatgctgctgtaatgagtctagaacttagagttggcatgtcctcagtaaaggccaatggcatgggggcctggaggcaatttaagaaagggatatggagaagtagaaagttggctcaggttgaagaatgtactgtgactaatccacaaaaccaatcatccacaggtggacaatattttaraaatggcccaggggatgctgctctggtctttt

SEQ ID NO: 155556 - DNA, 563 bp, Homo sapiens
cagtcactgaagaagtcatgcgtattctcgcctagtccaacatctgtctccttctcatcagagaaagatgtagcactttataagctaaatgtgcgattaccaaattttaaggttttaagaaaatgactkgaaatagtaattgactctctattatagaaccatagaaatactcttgaggttggtaatattttgaaattactactttaatgctcccaacagttcccttgtgggcttgaaaagttcatctattttccagaattaaccatgcctcatggtagttcactccactctaacccacattcagtggcgctgggatcctgcttcccatccgcagagtgatgcacagtgcctcttgcgctggaacacaagagtcctgttgcgtagctcagcactagcaacacctcgcgactctcttgtgtcttgaaccagggagtagcttaagatcagggagaagctggttaagtaacagtaatataattttgagttctttgaatcatgtgcatcatttagactgcctctggtttagaacaaatcactctgtatgctaatatgtttccaattta

SEQ ID NO: 155557 - DNA, 563 bp, Homo sapiens
cagtcactgaagaagtcatgcgtattctcgcctagtccaacatctgtctccttctcatcagagaaagatgtagcactttataagctaaatgtgcgattaccaaattttaaggttttaagaaaatgacttgaaatagtaattgactctctattatagaaccatagaaatactcttgaggttggtaatattttgaaattactactttaatgctcccaacagttcccttgtgggcttgaaaagttcatctattttccagaattaaccatgcctcatggtagttcactccactctaacccacattcagtggcgctgggatcctgcttcccatycgcagagtgatgcacagtgcctcttgcgctggaacacaagagtcctgttgcgtagctcagcactagcaacacctcgcgactctcttgtgtcttgaaccagggagtagcttaagatcagggagaagctggttaagtaacagtaatataattttgagttctttgaatcatgtgcatcatttagactgcctctggtttagaacaaatcactctgtatgctaatatgtttccaattta

SEQ ID NO: 155558 - DNA, 553 bp, Homo sapiens
tattcaatgggaacctctttctgataaaaaggtatccaaggtagatatctrtattgccttctggaatttatcatagacatattggggtgcagcatacatagagtgaaagtttttcccaaatttcccaccacttttttgcattttcttgtctgtgccattttattgttagtagggattcctgcaactagttaaatttctggcactttgaaaaggattccattttcctgaagtccctcttttctaagacaggctataaaacagggtagaatttctataagtatgtaactgtcaaataagtgccaattagttctgattctctaggtccaagttaaacagtcattcatgacccaatatgcaagagttccatttttctcaacattcctctgagttattttgatagtgagtaattgatttgtgtgcacttctcagagatagagtctggttagaaaagcattgaaatgagagccatggataagcttgtcagtcatgggcaagtcactgaaccctcttaccagcagggctggagtagatctatagaagactggatccacac

SEQ ID NO: 155559 - DNA, 440 bp, Homo sapiens
gattgcaggtctgaactaccgcgccagaccctagaagggttttaagttggtattttrtattcttttttgagaaagaatctagaatcaaagtcatcagtaaaagggcatgtgctggcacttgtgggtgtgccttctcacaagagtacccttaagtaattattcagcctctaggtgaacaccttctagacaggaagctcatcatctctcaacgatacctaagtcactttaagactactcttagagtgttagaaaaattctttcttatactgatctgatgcaaaaaccagagcttcctcacttccaaatcattgttcctttcattctagtaaactcagtttcaaagaggtcttcagatatcaggttccattataaacataaataatttctaaataaaatgcaaaagattcctcgtagatcccattaaaatgatgacaattttt

SEQ ID NO: 155560 - DNA, 562 bp, Homo sapiens
gaagaccctggctttaaattagctgtcagcttcagccatcttactcactagctcactctggagttagcaacagtgcaaagagattataaatggatgcctatgtcttgattaatgccctctttagtaaacagactttacacatagagctgtggcatagcagatgccctgttataaaggttaatcttcacttcaatagcacattcaagacatcatgctttttcacagttcttctcttttctttttgaatttcaaattctcttagaataaatgagaaagaggaaacctaatagcagaatcaggatctattgttagaaacttcctgtgtaaataaaggatcattcctgaacatctgactgtttcacaggacaaaggaaatcctctgtacgagtccaaattgaagactttcctccttggcccataaaaaaaaattgctttaacagggaaggcccacacataagtgacccctctgtgcttctagcttgggakaattagcttgatggaatggagcatcaggctggaacggaggttttgcatcaagtagtctaatgttaggtgccagcaa

SEQ ID NO: 155561 - DNA, 562 bp, Homo sapiens
gaagaccctggctttaaattagctgtcagcttcagccatcttactcactagctcactctggagttagcaacagtgcaaagagattataaatggatgcctatgtcttgattaatgccctctttagtaaacagactttacacatagagctgtggcatagcagatgccctgttataaaggttaatcttcacttcaatagcacattcaagacatcatgctttttcacagttcttctcttttctttttgaatttcaaattctcttagaataaatgagaaagaggaaacctaatagcagaatcaggatctattgttagaaacttcctgtgtaaataaaggatcattcctgaacatctgactgtttcacaggacaaaggaaatcctctgtacgagtccaaattgaagactttcctccttggcccataaaaaaaaattgctttaacagggaaggcccacacataagtgacccctctgtgcttctagcttgggataattagcttgatggaatggagcatcaggctggaacgraggttttgcatcaagtagtctaatgttaggtgccagcaa

SEQ ID NO: 155562 - DNA, 559 bp, Homo sapiens
atgttgattggtagagtgaaatttcacttataatatgaacttttttcctggtacctaagaaagctgaagaaatatttacatgcagacaagtaagatctttagaaccagacattatttaaataaactgtacctacaaataaaatacaaaacattttatttgcttattgacatattaggtgaaactacaatgacagaagagaaccagaaaaatattaagatgaaaaagaaataaaagatgacaacaaaaaatatttatagaggaggtgacattagcaagatggcatagtagggagccctagaccctcctttcccscaaaaaacatactgactcagcaacaaattcactttctgaaaagtttacaaattccctttctgaaaaattcaaaaactaattgaaaggctactgcaccccaggtaaatgcaaaaccagactctaaagttggtagggagatttgggacaccctctcaccagaatccctaaccctggcacagtgctatatgatctggaagagactacctagccccagcttctctcagagtaaaaaaagaaatcatgtaa

SEQ ID NO: 155563 - DNA, 604 bp, Homo sapiens
taaggacaggcaaaaattttatcatgaagatgccaaagcaatcgcaacaaaagcaaacattgacaaatgtgatctattaaacttaaaacctggctgggcatggtggctcatgcctgtaatcccagcactttgggaggcagagatgggcggatccckaggtcaggagttcgagaccagcttgaccaacatggagaaattcatctgtactaaaaatacacaattacctgggtgtggtggcacatgcctgtaatcccagctgctcgggaggctgaggcaggagaatcatttgaactcaggaggcagaggttgcagtgagccaagattgtgccattccactccagcctgggcaacaagagtgaaactccgtctcaaaaaacaaacaaacaaaaaaaaaccgtaaaagcttctgcacaacaaagtaaactatcaacagagtagatagcctacagaatggggaaaaatatttgcaaactatgcatccgacaaaggtcagcatctgtccagcatctatgaggaacttaagcaaatttaccaaagaaaaacaaataaacccattaaaaagcaggcaaaggacatgaacagataattttctaaagaaaacata

SEQ ID NO: 155564 - DNA, 604 bp, Homo sapiens
taaggacaggcaaaaattttatcatgaagatgccaaagcaatcgcaacaaaagcaaacattgacaaatgtgatctattaaacttaaaacctggctgggcatggtggctcatgcctgtaatcccagcactttgggaggcagagatgggcggatccctaggtcaggagttcgagaccagcttgaccaacatggagaaattcatctgtactaaaaatacacaattacctgggtgtggtggcacatgcctgtaatcccagctgctcgggaggctgaggcaggagaatcatttgaactcaggaggcagaggttgcagtgagccaagattgtgccattscactccagcctgggcaacaagagtgaaactccgtctcaaaaaacaaacaaacaaaaaaaaaccgtaaaagcttctgcacaacaaagtaaactatcaacagagtagatagcctacagaatggggaaaaatatttgcaaactatgcatccgacaaaggtcagcatctgtccagcatctatgaggaacttaagcaaatttaccaaagaaaaacaaataaacccattaaaaagcaggcaaaggacatgaacagataattttctaaagaaaacata

SEQ ID NO: 155565 - DNA, 510 bp, Homo sapiens
catatggaattatcttccaagatatatcgttaagaaggaaaaacaggggtcaaagtggtatcatattgtgctgccaggggaatakatagaaactattctatcaaaaaatggttagcttttagtagggaaattcagtatctgaggagtaaaactgaagtatgactatgaacattgagaatactctgttcgtttaatggagtgttgtctgtcttcttagtttcaaagcatagtccaacaatgtttgagtaaagtccaacaatggttgagtagcttggtctcacctttttatttatttatttatttttatatttatttatttatttatttattttgagatggagtctcactctgttacccaggctggagtgcaatggcgctatctcggctcactgcaagctccaccccctgggttcatgccattctcctgcctcagcctcccaagtagctgagactacaggcacccagctaattttctgcatttttagtagagacagggtttcaccatgttag

SEQ ID NO: 155566 - DNA, 599 bp, Homo sapiens
gtaagaactaccagcagcaatatcagtatctaaagcaacacctaaccttacgtgcacattcccacaataacaatcatttgacagacaaaggggaagttacaaaagtgattctggaataacttagtgcctaagtataatggctatgaacactttttttttttttaacagaaccttaaaaactgaagttgtataattttttcagaaaccataatagagttgtaaaaacaaagattttaaaaatcctctgaattgtctgtcataatgagaactataatagccagttaaccaaagcttaatgtaaatgtgcttcagaatgctacataaattctgagttaagactataggttgtatatattggaaagtttatagaaggcaataaaatttttgaatctacttactgtttttcagtgtgaagagacaaaacagtagtaagtatgtaaaaaacatggaaggaaagaacttttcataaaaaytcatttctcagaataagtaccagaacaatgcaagtattattccagaatatttacaaacaaaaccaaaatccccaattacccaaccacaaagaaatagcaacaagacaaaatactttaaattacatt

SEQ ID NO: 155567 - DNA, 496 bp, Homo sapiens
gtttttattttgagatgaggtcttgcactgtcacataggctgaagtgcagtgaaggcacaagccaccaaacctggctttttttttattttttataaaatagccaggggtcttactatgttgcccaggcttagttaggtttttaatgacttcctttaaaagtaaaaactttccagttaaccatttatatcatttttataaatttaatgccagttaagactagtaagacattctagtaccaaagaaacgtcaggttagsttaataaatattggcagttaatgaactggcgcatctgaatcctaatcctttgtaagtgattccaatataattttaaaaaatttaaaaatgttcaaacattcataaaagatgacagtcataatgaactccaatcaccaatattctaaaatataagatttctgtcactccaagtaatcttaaatacatattattcagattgctttacattctcttaaatattgataataatgcttacttaa

SEQ ID NO: 155568 - DNA, 586 bp, Homo sapiens
ttgggctggcctctgaatccatcactggaggggggctgctgaaccatgggcagacccacgagggcaattccagacgagcccccaaatttgtaactgcccagtgggttcaccttgcctgctgtctagacactggcagtttatcaagacaggggaattgcaatagagaaagagtaattcacgcagagctgactgtgcaggacacaggagttttattattacttaaatcagtctccccacaaactctgggatcagggtttaaaaggataatttggtgggtagagggccaatraattgggagtgctgattggttggttcggggatgaagtcacagggagtcaaagctgttcacttatgctgagttgagagacaggactagctggatttcctatggctaagatatcctaagcctagctgaggaaggtgactgcacctacctttaaaacacagggcttgtaactcagctcacacctgaccaataaggtagtaaacagggctcactaaaatacaaattaggctaaaagcaggaggtaaagaaatagtcaaatcatgtatcgcctgagagcacagggggagggacaatgattgg

SEQ ID NO: 155569 - DNA, 533 bp, Homo sapiens
gtcccatcccatcatcactctgccctctttgtcctctggccatcctctgcccttctctgactgagtctagggcttttatggacctcagagtggaggaagtctgtgctgactggtccatgggtggtcatgggcacaggactctgttcacctcccactgccattcattgcctcagggcttggctccaacccctctccgagatcagtacacctaactgctgttagcatagggacaatgactgctcttaacagcttcttgctaacaaagggtgttgtttcaggaaaatgasagttaggtctctctctcagaggcctgtctcaggatccccagtacaaaggagccatcatctgaagcatgatttgcatgactatttggagtttgatggcccatccctgtttcttctgagctgcagtcagagatcactggttggttcaccctagatttgtcaaaagctaaaaatagctcaaaagagaaatgttatcaattctaaaaaacaaaacataaagatcagcattgttccatgcaaaaagcaaaa

SEQ ID NO: 155570 - DNA, 643 bp, Homo sapiens
  misc_feature (1)...(643): n = A,T,C or G
tgcgaggttatagtaaagaataatagaaatttgattctcttcagaggaaggtgcagaatcctatagaaaagttaaacacatgacactggctagataaaaggataaattaaatatctaatgaatcagaagcaagtataaatggaaagataggaaaactgtggaaagtgtcagacaagtcctatgtttttctaaaggtgataaggtgtttttcctcataagtcagtattaacatcaatttctgtaatactgtacaatccccaaatcacattgacaccaattagtttctttcatgtatgttttatttacattttttattttttgtagagaaggggtcttcctatgttgctaaaactggtctcaaatttctgggcttcagtgaccctcccaccatggccttccaaagcactgggattacrggcataattacaggcataagcacagcctgtaattattagaccctgaggaaaataaaaatttgttcttcttctgttgtggactgcattgtgtcctcccaaaattcatatattaacttcctatctcccaacatgatagtgcttggagatagggccttgagggaagtaactgaaattaaacagggccatanatgaggtccctagtcctataagactgatgtcctttgaag

SEQ ID NO: 155571 - DNA, 409 bp, Homo sapiens
gcttcctgcctcctattctactttcattcttatgatcctatgctttggtgcttcatatttaggttactaatcctgatattacagtttagttttataatgcattagcagaaggcatcagtgaatgtgggagactagaaactgaagcaataagtttcagagataacagtggattgaatcagaatggtggtagtggagagaaagagaagtgaattaacttgaaaaaaatatgtataaaatatgtataggttaawctcacaagcattcatgataaatagacatttggatatatgattctgtgcttaaagtgcagaatcagaagaggtcccaaaatagagcactccaagatttagacattgcagagagagaacgaggctaatatggaggatcaagagggagaaaaaaaaaacaa

SEQ ID NO: 155572 - DNA, 576 bp, Homo sapiens
ttcccatgtttttatttcaataattttgttttatttccaacaatagacattttaaattaaaattatttttcaaagttcatgaagaattttataatttatttgtatatatctgaattgttttttcaaaagaatcatgttaccatacagttccaccaataatatacaagaacatttatttcattgaattataatggaatttaggtttttatttgttattaacttttctcctttgatgaacaaaagttttttaaaacctgtttttcatgtatattccattattaagaaaatttaaaatattcccataaagttgtggtatttttgtctttttgtgaaaattrtctatataatatgtattcattttgaatgaatatatcttcctacaggtataattttattcatccagccagtattgattagcatctattttatgtagaatgcactattttatgagttgtaaataaagcagtgcacaaaatagatataaatgtctacccacgtagaacatataaacaatacataaactgaactagcagagtgttagttatgttagatgttattaagttctgtggaacataa

SEQ ID NO: 155573 - DNA, 585 bp, Homo sapiens
tctcccatccttctccaaacatatctattgccatttaccagagtgacttcatttgagaaagcaaactaatatgacttttcagagattattcaaatttcaggggaaaaaaatttaggtccaagaggctactgtgttacattatgtagatcaagttatcaatggagttttagctcaggtacatctcacagtgggtctctaaacccaccctgtagttatttcctaagttctggaatgtttagctggagtagaaatactcagcaactaaaagaataggtacattgttcccctgacctgtggagttagggctgttttgttgtactatatatatgtggttaactaaaagaagtaataatggattccagagggattgcaaggatttgaaagattccgatgttgtgagtcccaccaaatctgtattcagctctcctatttgacaaatgcaacaaacaaatggatcatggagaatgagagtggataatcataaattttatcaggtgggtgatttcatttgcagatgctgtgctcgatgttacttcattgctcwtgcaaattaatacatcccttcatatgtggcatgcatctatt

SEQ ID NO: 155574 - DNA, 533 bp, Homo sapiens
cccatatcctatgacctatttccagcaatttatcctaagaaataatctgacatactgaccaagatgcagtcacaaagatgttctttgcagcacaatttacaattgtaaaaaactggaaacaatgttaatgctgaacattasgagaagggttcagtaagttatgtttcatcctatcagaaggcatattctacagtcataaagctttagcagacattgcagtgaactcatgcagtcctgactactcgggaggccaaggtgggaacatcacaaggtccagtccagcctgggcaacaaagccagaacctgtcccaaaaaataaaaaggcctcatagacaggcatcatttttaatgacatgttaattggtaagagcaaaggacattattatatatctaataaaatgttaaaatacacattaaacactgaaatgtgacaagtgaaaaagcggtaggaaaatgagtgtcttctttcctgctttatgacttttatattttctataatggctttatgttgactttgaaattttgaaaaatgt

SEQ ID NO: 155575 - DNA, 542 bp, Homo sapiens
acccatatcctatgacctatttccagcaatttatcctaagaaataatctgacatactgaccaagatgcagtcacaaagatgttctttgcagcacaatttacaattgtaaaaaactggaaacaatgttaatgctgaacattaggagaagggttcagtaagttatgtttcatcctatcagaaggcatattctacagtcataaagctttagcagacattgcagtgaactcatgcagtcctgactactcgggaggccaaggtgggaacatcacaaggtccagtccagcctgggcaacaaagccagaacctgtcccaaaaaataaaaaggcctcatagacaggcatcatttttaatgacatgttaattggtaagagcaaaggacattattatatatctaataaaatgttaaaatacacattaaacactgaaatgtgacaagtgaaaaagcggtaggaaaatgagtgtcttctttcctgctttatgacttttatattttctayaatggctttatgttgactttgaaattttgaaaaatgttaggaaaa

SEQ ID NO: 155576 - DNA, 570 bp, Homo sapiens
caacaacccaaactgtcagaattctgtctgagagcagtgctttaacacctctagctgaagcagataatgaggatatgcttctccccacctcccacagtgcctaaatttctttgaaatctcatattttatcttttcaatgcatggaaattttgtattttstgccatgatatatattttattatttcatttcccccttcgaatcatctaataaatttgaccttcctggcaatcatgcatacgtatactgtaactttctataatccctccatactctccggggtaacataccccagtttgagaaggacaatactaaagaaatctggcagctccaaaaagcaaattgataaggtcccttcactttccattctgtccaattaccccacaaccagacatacaagtatttctgcagcagaacatatgaacagtcactgtaaatgggatacatttacagggtcacgctctgctgcccaggctacagtacagtggcacaatctcagctcactgcaacctcagcctcccaagctcaaacaatcctcccacctcagcctcccgagtggctgagactacagg

SEQ ID NO: 155577 - DNA, 584 bp, Homo sapiens
tatctccagtgcgtattataacataatatagtatactataacaatcaaaaccctggataatcatttcctcagttctctagccaccaggagtaagtagctttactctctttaaagttatgggatttgcttctacatcagatttgcctaggctttagaactatttattttaatttattattttttaatttaacttttatgttcaagtgtacatrtgcaggcttattatacagataaacttgtgtcatggggttttgttgtacagatcatttcatcacccaggtgttaagcctagtacccattagttatttttcctgatcttcttcctgccaccatccaccctctaataggccccattttctgttgttcctttctacgttccatatagaatttttttttccagtcagatttagttagattcgcaaaaactattttggccattttctatttcaaagcatgtgcacacacatacacacacaaataatattagaaatactcaatgcatagatcttttgctcagtcctttaaacatttaaaacaatatacaatagtaaatattgtataattgaagcttgtaaaacataagc

SEQ ID NO: 155578 - DNA, 598 bp, Homo sapiens
tttttttcatcaacaatttatgagacacgttttaaaacaatatgcatgggataaagttttagaaggaaagattaaataggaatctggcagagatttataattatattagatgtctgagaaatttccagaattaagaaaatatacaagttcttaattaaaacaacatgccaattcttaagtagaataagaaaacacacattcagttagacacatcataataaaactatttttaaaagcagaaatttactaaaaaattatagatgtcataaaggaatttttagtaaatagataatagacttatcagcaacaacaaaacaagaaagtattaaacttaattgtctaaataattgaagagagaaaaccaaaccaaactaaaacaaaacaaaaacaaccccaggggcttagaactcttaatccagctaaagtatcattcaagattaagagcaaaataaagataattacagttaaagacaaataataattttgtggttgaaaataagctgatattaagatacaagcaaaaggacacmgtatacaggaagagaatattaatagttgaagcacttaagattgttgtactctactgagattagagctg

SEQ ID NO: 155579 - DNA, 508 bp, Homo sapiens
atctgctttgttccatccatgccctttcctaggcctctgtatagcctggccacataaaaagcttaatatgtagaaaaaaaatctccaattcagaagaaatcatttttgtatcccctggtggaatcatttatccattttgtccaaatgaataaattaaaaactgttggctggaaatttcttatgtatrgacgattgggtttgatagaaacagatgtcatcccagtcttctacaccaagattcccaggcatgagtattctggctaatggagaaacaaaccacatattaatagctgaataagggcgtatatcttatcactgatataaccctattcttgcaaattgctgtaagacattcagctgtaattgaaaccaggcaagctttgcagtggcaatatccatattgttgatcctatactagctttccgtcaaaatagctcctttttgtaatgacaagcacagatatggtgaattaaaaaaggttgtggcaggactactactttccaaaagt

SEQ ID NO: 155580 - DNA, 508 bp, Homo sapiens
atctgctttgttccatccatgccctttcctaggcctctgtatagcctggccacataaaaagcttaatatgtagaaaaaaaatctccaattcagaagaaatcatttttgtatcccctggtggaatcatttatccattttgtccaaatgaataaattaaaaactgttggctggaaatttcttatgtatagacgattgggtttgatagaaacagatgtcatcccagtsttctacaccaagattcccaggcatgagtattctggctaatggagaaacaaaccacatattaatagctgaataagggcgtatatcttatcactgatataaccctattcttgcaaattgctgtaagacattcagctgtaattgaaaccaggcaagctttgcagtggcaatatccatattgttgatcctatactagctttccgtcaaaatagctcctttttgtaatgacaagcacagatatggtgaattaaaaaaggttgtggcaggactactactttccaaaagt

SEQ ID NO: 155581 - DNA, 508 bp, Homo sapiens
atctgctttgttccatccatgccctttcctaggcctctgtatagcctggccacataaaaagcttaatatgtagaaaaaaaatctccaattcagaagaaatcatttttgtatcccctggtggaatcatttatccattttgtccaaatgaataaattaaaaactgttggctggaaatttcttatgtatagacgattgggtttgatagaaacagatgtcatcccagtcttctacaccaagattcccaggcatgagtattctggctaatggagaaacaaaccacatattaatagctgaataagggcrtatatcttatcactgatataaccctattcttgcaaattgctgtaagacattcagctgtaattgaaaccaggcaagctttgcagtggcaatatccatattgttgatcctatactagctttccgtcaaaatagctcctttttgtaatgacaagcacagatatggtgaattaaaaaaggttgtggcaggactactactttccaaaagt

SEQ ID NO: 155582 - DNA, 597 bp, Homo sapiens
cctttgcctcccaagtagctgggaccacagacatgcaggacctggctattttctttcttttctttttatcttttttctctgtagagagcaggtctcactatgtttctcaggctcgtttccaactattgggctcaagcgatcctcctgcctcagcctcctaaaaggctgggattacagacatgagccactgtgtgtggccctttgcagattttttaatcacgtcatttttttttcttattgtaaaagtttgttacatattttggatattaacgccagactatcagatagattgcaaatttcccctcccattctgtaggttgtctcttcactctgtcaatttttaaatttgctgtgtagaagcttttttgtttgctacagctctatttgtttatttttccttttgtgtgtgattttagtatcatagcaaataaatcattgcctataccaatgtcagaaagctatttaccttgtgttttttctaataatttatgttaccaggttgtacatttaaatctttaattctttgagttgacttttgtgtgtggtgygttaagtgtccaatttcactcttttgcatgcagatattcaactttattc

SEQ ID NO: 155583 - DNA, 571 bp, Homo sapiens
atataatctattctgtacttatttttataattagtccataattgctcttatgactacattttttaayaaatgagaaccaaagtaaatatttctgtgactcatataattttgttttacattttaaacacttaattttgaaatatattgattgtaaaatagaagagatgaggaacagtattttatgaataacgatacattaaaaagttactcagtacccagattaagaaattatcaacatctttggaactacatttgtgccctacaattttatttttgtctgtcccatgccagacttaatcattattctcacatttgtgctatatattgtattatttactctgtagaaattttactaaaaatatattttttagttctttatatttgaaaaaatatatcactagatgtatgcttgtgttctctgactcacttgtttggttcaattgtttttagggatttatccatattaaaacacgtttttgtatttccttttatgaattatgacaatgtatattttcttctggaaatggtcatatagaatgttctcaaacgttaagctgttaagatcaatgct

SEQ ID NO: 155584 - DNA, 436 bp, Homo sapiens
acagatatgcacatgaacacacacacatgtagtctggaaacaagtcttttgctaaatgtawgtattgcaaatgttttctttcagcctctagcatgcctcttaatttccctaaatgtctttttcaatatttagaggtttttaatttttatctcatctaatttatcaacttacttatgttaagtacttccagtgaatatattttcttaaatgtgtatactaattagagccatatcccatattttaatgaatattaaaaataatttgaactctatttaagattcttctaggtcataacacccacctagctttgattgctaaaaacactcacaatcctattataagaatgcatcctatagatattcaatcaacactttaatatttaggtggtatataataaaaatattcatttataatttttaaaaattccttaattttg

SEQ ID NO: 155585 - DNA, 438 bp, Homo sapiens
acagatatgcacatgaacacacacacatgtagtctggaaacaagtcttttgctaaatgtaagtattgcaaatgtttyctttcagcctctagcatgcctcttaatttccctaaatgtctttttcaatatttagaggtttttaatttttatctcatctaatttatcaacttacttatgttaagtacttccagtgaatatattttcttaaatgtgtatactaattagagccatatcccatattttaatgaatattaaaaataatttgaactctatttaagattcttctaggtcataacacccacctagctttgattgctaaaaacactcacaatcctattataagaatgcatcctatagatattcaatcaacactttaatatttaggtggtatataataaaaatattcatttataatttttaaaaattccttaattttgtt

SEQ ID NO: 155586 - DNA, 438 bp, Homo sapiens
acagatatgcacatgaacacacacacatgtagtctggaaacaagtcttttgctaaatgtaagtattgcaaatgttttctttcagcctctagcatgcctcttaatttccctaaatgtctttttcaatatttagaggtttttaatttttatcycatctaatttatcaacttacttatgttaagtacttccagtgaatatattttcttaaatgtgtatactaattagagccatatcccatattttaatgaatattaaaaataatttgaactctatttaagattcttctaggtcataacacccacctagctttgattgctaaaaacactcacaatcctattataagaatgcatcctatagatattcaatcaacactttaatatttaggtggtatataataaaaatattcatttataatttttaaaaattccttaattttgtt

SEQ ID NO: 155587 - DNA, 589 bp, Homo sapiens
cctgcaccaagaatgtcaagtgaggcaattataacattgtctctctaaaaatgataatttggcagcctgcaccatggaaaaaagattctaatggctcatagccgtaaacattaaagtgttaattgaatgcaggtgccagagagagcaaaaagggcttccactgaaatatcaggacaagtgagcctgacatgcacattaaaagacaaggtggtggagtatgacgttctgagagcacaccacaggaaaagggcagaaagtctgaaatgggcacgcatacaactccctaaacacactgcacatgctcacttcccaaaggtaaggagggcactgtgcatgcaggaaaccccacctttccaaaggaagaatcataaaaaaggggtgcaaagtgcctggaggkaagctagcctataaaatcgtaggatcaaagttaaacactacacttgtccttcaagtcacccacttgggtctttcttccaagcgtactttcctttctttcctattctaaagactttttaagtaaactttcactcctgctctgtaacttgcctcagtctctttttctgccttatgcctctcagtctaattcttt

SEQ ID NO: 155588 - DNA, 608 bp, Homo sapiens
gtgtttaatattgaaattttaattacgttaggcctgctcacaaaaaawcattaaaaatatctgtcattgatgtatatgttatgttctattttattttatatattaaactaatgtatttgatagaggaaaatatagtctctgaccaccaggtctacaaaaagtgacagaagcagcgaggaataaaacctttagcaaagtaaatacatgattcctaaaggtaaaggtaattggataattggtcttggtttagtttttctaccttgtccttctgcttttaactctggaatgggaaattgtgttctgaaaagcttaaaaaattagtttgtgaggagtgatttgcatctgattggtgatgagcacatgactctcttgggcaattttcctgctaaatgtggatgtattttcagagagatatataagatagatcgaaatctctgaaaccaataagatcatgtgtaaatttcagatgatggcaatatgggcatttattttaaagtaaattagaagttttaaaaaattaccaagtattgatttatgatagtatgtgctagacttaattagcagctttattaatatgcaattgaataagctgaatcacttaaggcagc

SEQ ID NO: 155589 - DNA, 511 bp, Homo sapiens
ggagcttgcagtgagctaagaccgcgccactgcactccagcctgggtggcagagcaagactccgtctcaaaacaaacaaacaacaacaacaacaacaaaaaacaaaaccccacataatttcgtatactttcttctctttcaaatgtacacaatcccttttggtcactaaatagaagttttatcagatttattatycaggaatgtgtttctcaggaacctgggagacatttctttgaaatataaacatcaaagataatattatccttatctcctaatttttgtgggacggtagaaacctaacttaggcagaaaccttgttccaagttgtataactaccttttgttataaagatatgagaagtttgtttctcctctggataaacccaatcagctaacacagatggtcaccccaattaccaccaaataaatttagatgaactatatgtgataaatgctggtgtcaagtcctgttacctgaggactagttattgtttatgttgaaaacatgtgtg

SEQ ID NO: 155590 - DNA, 568 bp, Homo sapiens
aatccaaagaagccaagaaaatgattcaacagttgaaaaattacatagccattttaagaaagaactaagctggactactggaattgaaaaattcatgataggaatttcatattaccattggaaaaattaacaacagaagagaacaacctcaggaaagagtctcagaccatgaatatcaatcttctgaatcaacctagtctgacaaaattgtttttaaaattttaaaaaatgaacaaaacatctgagaaatatcagattatatgaagagaccaaccctgtaacccattgacattcccragagaaaataagagagagtaagcaacttggaaaacatactagagtatatagtcatgaagatttcctcaatataactagagagattggcatgcaaatttaagcaattcagaggacttctatgagttactatgcacaatgaccatccccatgatacacagtcatcagatgcttcaagttcaacatgaagaaaaatccttaaaggcagctagagaaagagtcacatcacttacaaagggactccaatcaggttaaaaattactttttagcagaa

SEQ ID NO: 155591 - DNA, 552 bp, Homo sapiens
ggaaagggttaacttggcaggctgaggttgcttaaaccttgaacattcaaaaccaggactagcctttgtctggctcctagaagataccctctgaaacctcggaatattctgcttgataggattgtgtttttatgcttgagcctttgaaaaagctataccagtttgaccaattaagttaattctgttaatgaagtctgtggtaaaaggcctatttttgctgaggctgaaggtggggttgragaagggatgcagctggaacatgagaggctgaggctggtaaaatgggcaccaggcaccaggcaccagcagtactgcatagatgataggtttcatctggtgttgacccatctgttataatctgttctaaggttgcaaaataaagttgtaatacatttctgccccttaggtaggtgtatgtcatactactttaagactagataactaaatcctgctggatcagccaaatcctatacccaccactcaaaaaccattcctaagcatatggataattgatgatccattggtgatataatcattttacaagaaaaacaa

SEQ ID NO: 155592 - DNA, 501 bp, Homo sapiens
catctaatgggaactgttgatgtgccagagaccttacatttcaaaaagcatgagcaggtttttagaaattttagtgccctaaatacattctatattctgcaccaaatttttgtaaattagccactccatccttcaagatatacaaatactgggacaaaagtagggctcttacatttcacagatacttttttccgaaaatagttcttttagtattgtgtctatagttcttttaagtttgggtgtatgtgggttaatgtgattaattacaacctgtattttaattaattgatgaaaaactcttacagagacatgagacttccagaacattagtgtgaggaacttggggaaaactcttccttgatatggcatctattaagctgttcaaaatttgyaaatacagtcattaaaaacttctggagtttctttcatgagcttacaacaaattgacaaaattggtaaaatttagtaaaaatctaaagagctcaatagggcagcttgagg

SEQ ID NO: 155593 - DNA, 502 bp, Homo sapiens
tggcagtggggcaatgatgccattcttctacccccagttcccaatttctaatgagaaccctagtggggcagctgttgaagagtggagttcttatctcctacagagctctgtgttgcaggacagttgttccagtgagctagagagtcagatgtcagctctaatttcttccagcttcctatggcagaagtattattcctagtaaatttggcagtcactaaacaagatatatcccatattcccagttctggtctggggaaggtccatattggacagttcccactgtctctccacccatacacacagctattctccatatgggaggtatctatgaggcagtgggggmagatcaagctctcacaaaatgtcctcaacccacagcttctccgtgtggctcacggtgtgttttcagaggagggtatgagcaagcctcagacactaacaacatcctcagctcttgccaagacacccagctttaactgcattagattgtgaagcaatttat

SEQ ID NO: 155594 - DNA, 388 bp, Homo sapiens
aaaaactggaaacaagcacaacatctttcaataggtgaatgcacacaaactatactatatatccatggactgttactcagtgataaaaagaaacgagttatcaagaygtaaaaaggcatgaaagaatctcaacgcatattgcgaagtgaaagaagcaagtctgaaaaatctctctctccatgatgccaattatgtgacattccagaaaaggcaaaactatggagacagtaaaaagatcagcaaagagttcagaggtctgtggaaagtttgaatatttaaagcacaggagatttttcagagcagtaaagctattttgtactggaatgatgaatagaaaacattaagcatttgtcaaaatgcatagcatgttcagtacagatagcaaaat

SEQ ID NO: 155595 - DNA, 441 bp, Homo sapiens
ctattctcaatatatttcatgtatatagatgaaaaaaattcttctaattttttattttttgtgtgtgttatgtaattgctcctccatttccaccaagatgtctggatttgattactctggtacatagtaacaaygtggctatgtagctcctgtcaccaccactggacactacttacatctcacttactgaaatgttactgttagaaacagaagaatgaattctaaactgtttctgtttctttttgctcctgattttcttttgctttattaaagtcttcaaggaaaaatatgattatcttagcttacgttagatgtgtacatgcatgctgtatctcactttctcagactttccaagagtgttccagcatgtgcaagttccgtgctcatgaaaaacgtatactatgatggctttccaaaatatactgcccatgatctgaattc

SEQ ID NO: 155596 - DNA, 539 bp, Homo sapiens
atatcacttaactacttttttaaagctatttttagattgtaattttaaaagtgggccgggtgtgatggctcacacctgtgatcccagcagttttggaggccraggcaagtggatcacttgaggtcatgagatcaagaccaggctggccaacatggtgaaaacccatctctactaagaataccaaaaaaaaaaaaaaaaaaaaattgctgagcgtgcacacgcctgtaatcccagctacttcagaggctgaggcaggagaatcacttgaacctgggaggcggagtttgcagtgaaccgaaatcacaccattgcactccagcctgggcgacagagggagactctgtctcaaaaaaaaaagaaaaaaagtgtaagacacaattcaaattcttgcataacagctacaaaatcttcataaaaaacgaatcaggagtcaattattgaagtttatgcttattctacacaagactgatctaaggaaatatgtgtcaggggcgttagacatatagaagggaatttaaaagcatattgtatttctgtaa

SEQ ID NO: 155597 - DNA, 539 bp, Homo sapiens
atatcacttaactacttttttaaagctatttttagattgtaattttaaaagtgggccgggtgtgatggctcacacctgtgatcccagcagttttggaggccaaggcaagtggatcacttgaggtcatgagatcaagaccaggctggccaacatggtgaaaacccatctctactaagaataccaaaaaaaaaaaaaaaaaaaaattgctgagcgtgcacacgcctgtaatcccagctacttcagaggctgaggcaggagaatcacttgaacctgggaggcggagtttgcagtgaaccgaaatcacaccattgcactccagcctgggcgacagagggagactctgtctcaaaaaaaaaagaaaaaaagtgtaagacacaattcaaattcttgcataacagctacaaaatcttcataaaaaacgaatcaggagwcaattattgaagtttatgcttattctacacaagactgatctaaggaaatatgtgtcaggggcgttagacatatagaagggaatttaaaagcatattgtatttctgtaa

SEQ ID NO: 155598 - DNA, 488 bp, Homo sapiens
aattttaagtggttatcttattaatagtggttaaagaaccatcactggggctaaagtccagtgtgtgggatcacattaaatcacttgcaatctatgtgaatttaaacaaggggcttgaatcttctgcatctttaaaaggaaacataaatcaaactcacctcataggtcaagaccacctacataaactgtgggctcargaaaaaataaaaatgtagggcccttactcaaacatcatgaccaatttcaagttggcagtagcagagcattaatcactgatggcagagcttgaagccgagattggagctcttctaaacacagagccttgtgcaacccaccttggaagctgttgtgaagagtaagtttataaactgcttattagcacatattatgcactcaaaaataattttaacaattattttctacaaaatttttatttgaggtgctctggttataatatacttttttggaggagaggggaggaccttaac

SEQ ID NO: 155599 - DNA, 472 bp, Homo sapiens
tctaggtgagctaaaaaatgctctagctcagcggtccccaacctttttggcaccaggaaccagttttgtggaagacaatttttccatggatggtgggcrgtatgtgtgggggatggttttgggatgaaattgtttgatctcaaatcatccggcattagttagattctcataaggggcacgcaacctagatgcctcatatccagagttcacaatagggttcactctcctataagaagtgcccctgctgatctgacaggaggcagagctcaggcagtaatgttggctggctcatggctcacctcctgctgtgtgacccagttcctaacagactgcaaactggtactggcccatggcctagggattggggacccctgctctagctgacgaaaagaggattacttccagggctctgtacttttggtagagacatccccccgcccccaccccgcatataccctcccgcctcaccctc

SEQ ID NO: 155600 - DNA, 472 bp, Homo sapiens
tctaggtgagctaaaaaatgctctagctcagcggtccccaacctttttggcaccaggaaccagttttgtggaagacaatttttccatggatggtgggcggtatgtgtgggggatggttttgggatgaaattgtttgatctcaaatcatccggcattagttagattctcataaggggcacrcaacctagatgcctcatatccagagttcacaatagggttcactctcctataagaagtgcccctgctgatctgacaggaggcagagctcaggcagtaatgttggctggctcatggctcacctcctgctgtgtgacccagttcctaacagactgcaaactggtactggcccatggcctagggattggggacccctgctctagctgacgaaaagaggattacttccagggctctgtacttttggtagagacatccccccgcccccaccccgcatataccctcccgcctcaccctc

SEQ ID NO: 155601 - DNA, 399 bp, Homo sapiens
tttctcctgcctctgccatccctgagatagaataaccagttccttcttttcctcctccttttcagcctaatcaatgtgaagaagatgaggattcagatcctataatgatccacctccacttaatgaagagtaaatatattttctcctctttatgattctcttcataacattttccaaactctagcttactttaagaatacagtacatgatacatayacaaaatatgtgtgaattcacactttatgttatcaataaggcttccagtcaacagcaggctattggtagttaaattattggggagttaggagttttccttgaatttttgactgtggtggggagtcagtggccctaacccccatgttgttcaagggtaactgtattacaatttctgaacacatc

SEQ ID NO: 155602 - DNA, 580 bp, Homo sapiens
ccttttatttccttcttctccacttcttagtttgcatccttactgcttctcatatgaagtacctgaccttgctccatacaggatagacygccactccactcagcaagcaaataaacacccagaaagtgaaatgacatatgggatgtacttctcatgcttgggggcaattttagggacttttgaacaatttaaacattacaagtgattttccctttccatgtgctctttagactcaacccacgaatgaagagactccaccctgattgcacacttggttctctgtctcacaagtagctttaattcctcagagacaacagtgccagctagacctcccagtgacaaaagagtcatacctctttacctccatcacctttcacagcactttgtgcactgtgcactcaccttgagtttttttgttttttcttaaaaaaaaaatctctatccattttatttcccacacaagtttacactaagttttccattttaagctcccatttactatccatgacacagcactctaaaccatggataagcaaaggctatgagtgacatcagactgcttagtatccttgcaccacca

SEQ ID NO: 155603 - DNA, 580 bp, Homo sapiens
ccttttatttccttcttctccacttcttagtttgcatccttactgcttctcatatgaagtacctgaccttgctccatacaggatagactgccactccactcagcaagcaaataaacacccagaaagtgaaatgacatatgggatgtacttctcatgcttgggggcaattttagggacttttgaacaatttaaacattacaagtgattttccctttccatgtgctctttagactcaacccacgaatgaagagactccaccctgattgcacacttggttctctgtctcacaagtagctttaattcctcagagacaacagtgccagctagacctcccagtgacaaragagtcatacctctttacctccatcacctttcacagcactttgtgcactgtgcactcaccttgagtttttttgttttttcttaaaaaaaaaatctctatccattttatttcccacacaagtttacactaagttttccattttaagctcccatttactatccatgacacagcactctaaaccatggataagcaaaggctatgagtgacatcagactgcttagtatccttgcaccacca

SEQ ID NO: 155604 - DNA, 580 bp, Homo sapiens
ccttttatttccttcttctccacttcttagtttgcatccttactgcttctcatatgaagtacctgaccttgctccatacaggatagactgccactccactcagcaagcaaataaacacccagaaagtgaaatgacatatgggatgtacttctcatgcttgggggcaattttagggacttttgaacaatttaaacattacaagtgattttccctttccatgtgctctttagactcaacccacgaatgaagagactccaccctgattgcacacttggttctctgtctcacaagtagctttaattcctcagagacaacagtgccagctagacctcccagtgacaaaagagtcatacctctttacctccatcacctttcacagcactttgtgcactgtgcactcaccttgagtttttttgttttttcttaaaaaaaaaatctctatccattttmtttcccacacaagtttacactaagttttccattttaagctcccatttactatccatgacacagcactctaaaccatggataagcaaaggctatgagtgacatcagactgcttagtatccttgcaccacca

SEQ ID NO: 155605 - DNA, 396 bp, Homo sapiens
gacaccattatacacctattagaatggctaaaatccaaaacgctgacagcaccaagtgctgacaagggtatggagcagcggagactctccttctttgctggtgggagtgcaaaatggtgcagccactttggaagacagcttggcagtttcttaccaaaccaaacattctcttactagatggttgctatttaccaaatgcattgaaaacttacagccgcacaaaatcctgtrcacaggcattcagagcagctttacttatacttaccaaaaattaaaagcaaaaattgagagaagacatgtcctttgataggtgaattgataaacaaactgtagcccctcaatacaatgtaatatgactaagcaatgaaaagaagtgagccagccgccatgaaaaga

SEQ ID NO: 155606 - DNA, 543 bp, Homo sapiens
acaatgagtgtggctggacagtcactctgtatcaagattactcacgggtttagtcagccatctcagcagaatccaggaacagagatggggttgtgcyagcagaaacactgttcatttgagttaaagagaacagagaaggtgggataggatgaaagaaggctgtctgacttctgggatgagacagtagaactctttagcttcagtcaagccttatccttcaagaaaagagaatgacctcaaagacaattcagagatcatcggggtgcccctcccatcatgggtgtgggggtaaggctgtttcctcctcagcttccacaaccagaatgtcatttccctagggggaggtcccctgcagagccatggggtggggccctcacagatacaagggggtgagtccaccatctagggtgatggggtgatgcctccaaggggcccagagagcagagccaaagaggattgttctgagccttgcgggctgatgaagtttgccttgcaggttctgggcttgcttaagactcagcaccagtttttcctttcctattt

SEQ ID NO: 155607 - DNA, 481 bp, Homo sapiens
gagaaaacatgttctgaagagaacaatgagtgtggctggacagtcactctgtatcaagattactcacgggtttagtcagccatctcagcagaatccaggaacagagatggggttgtgctagcagaaacactgttcatttgagttaaagagaacagagaaggtgggataggatgaaagaaggctgtctgacttctgggatgagacagtagaactctttagcttcagtcaagccttatccttcaagaaaagagaatgacctcaaagacaattcagagatcatcggggtgcccctcccatcaygggtgtgggggtaaggctgtttcctcctcagcttccacaaccagaatgtcatttccctagggggaggtcccctgcagagccatggggtggggccctcacagatacaagggggtgagtccaccatctagggtgatggggtgatgcctccaaggggcccagagagcagagccaaagaggattg

SEQ ID NO: 155608 - DNA, 532 bp, Homo sapiens
cattaggagaaaatgtgctcaccaatgagtgcatactgaaattagcaataaaacatttgtctctccatttcacatacaatttggcctaagaagaataagacaaacagaccctctatggcagggcagtccctgaaaattcctccacaacccaagagtatccaggatttgaggaaaatacatgtttcacctgtcttttgaaaaactcagtacattaattatcccaaaatagagaaactaagakaaattaagcatgcatggttcatatgacaatgaatttcattatacaaagattccaaacagcacgttactaatttccaaattttaaaaagaaaaaaaaagacactctgagatatatatatatttttttatgaggccatgcacgtgataaaaacatagattaggctatgaatatatattcctttacttttaaaattaattgtgcatacagacaaaatttttacatttcaagggttgagttacataaccatacaacccagggcatatttttttaactttctaaataagaaattaa

SEQ ID NO: 155609 - DNA, 562 bp, Homo sapiens
cacagactacttcatgtttggacattattatttttccagctatgttctgtaattcactaaattgctattcttttttttaagagaatccttctcagttattacctctttgtctagagaaaactttatttagaagtccccaaaattaggtcaactatcttatcccagcaaacacaatggagactttagaaacatcatagaaaagaaagaaattcgaagccacctttccagctaggaataagaagctgggaagaagccttcaaggcaccactctggacagagcaacaagacaagaagctgactgaytggggcttttgcttttctaagaggaagaagcatctgctggaaggccccttggtccctaggccctgccctccaatttcttcctggaatgcagacaagatggctgaggttgcagcagccatgttgagaccatgaggtgacaagcatgaggataaagaaccatcaagacaggaaacccaaaatccaggaaggcattgcacagcagctgcactaccccatattactcacctttgacctgctgctccatgagaaaagccacctc

SEQ ID NO: 155610 - DNA, 518 bp, Homo sapiens
taatgtaaaaggaaacagagaygcaatggagaagacaggcaaagcctcaaattctacacctaggtatatatcccagacacagtcttacacatgtacatcagataaaatagacataaatgactgtaatacattactaaaattgagataaaaatggcattagcaaaagttacagataataaaaattgactcaaagagaaacagaaaatctgaatagccttctacattttacataatttgaattaatatttaaaagccttcccataaagaaaactctagtctcagatggacttactagttaattgtaccaaaaatttcagaagtaatatttccagtaatacatgacagttttcagaaaacagagattaaaaaaatcacttcccaagtcatttttaatatttttaagtcagaatttccctgaaaataaacatattaaaagataagaaaactaaagacaagaacatagaccaaaaaattttaaacaaaatattagcaaaccaaatctagcaatataaataaca

SEQ ID NO: 155611 - DNA, 545 bp, Homo sapiens
tactctggaaaataaaattggatttttctacttcatttttacagtggcttcgatagctagttttattcttctcttcctcctgcttctcctccttcttcaatagttataagatgactataatatttgcccttcctttcaaactgtcagtgttctccatctcttccctgaatatactttgcacactcaggcttttgtactcacacacatcccattatttctgcctgaagtgccatttcccacactcctaatgcccaggtaatatacatcctttaaaacccagtttacatactatctcgacatatataaataagcattctcaattctgcaattcagtggcattgcatatatcttaggyggtgtttatgacttcatatttataatttggcattcatgtgtttatcttctttttttgactgaaagcatctttaaggcaagagtcttggatttccattttggttctactatgtcaactgcagtgtatacacacccagataaatgtttattgagtggagtaatattaaggtgtgaaagggagagtttccatc

SEQ ID NO: 155612 - DNA, 566 bp, Homo sapiens
  misc_feature (1)...(566): n = A,T,C or G
agctagatgacaactctaagaaagaatcaaaaagagatgctagaaattttaaaaacagcatcagaaatgaagaataccattaataggctcattagtacaactgaccatcatgaaataatcatttaacttgaagatagattaatagaaactttccaaactgaaacacaaagaaataaaaacagtacagagcatctaagaattacagaacaatagtaaaaggtgtaacatatgtacaattgaaatgttagaaagaaatgagagtgcaggaaaaaacaatttttcaagaaataatagccaaaaactgtaaaaacttaatgacagacaccaaactttgggtctaagaagttcagagaatactaacaaggagaaacaccaaaaactccatacctacgcatatgatattaaactgtagaaaaccaaagacaaagtgataatcttgaagaaaatccagatgaagcaaaaaccttgcccacagaasaacaacaatacaaatttgggcaactttcatcagaaattatacaggtagaaataaannnnnnnnnnnnnnnnnnnnnnnnnnnnnnnnn

SEQ ID NO: 155613 - DNA, 623 bp, Homo sapiens
caaataacattattgtttaaattttaatttcagattgtggctaacataaaatgcaatatagtttgtatattagtcctgcatcttgcaaacttgataatgtaacttattagtctagttgttttttttgacaggctcattaaattttctaagtaggcaatcatgccttctatgaatgaagagaattgtacttttcctgtatagtctgtttgccttttatttctttttctgcctgaaattctggctagattctccaatataatgtaaaatagaaatgctgagaacaagcattcttaatattatggggcaagtcattcgttgattaacattaaacacgatgtgatcaatacatttttcatgaatkccttttatcagcttagggaagatccctaattttccaggtttaatggcagtgtttttttttttttttcaattaggatagatgttgaattttgtgaaaagtttttttcttattctcttcagatgatttttttttcttcagtctgttattattttgaggtacactgactgattctaatggtaaacaaacaaacaaacaaaaaacgctttcatttctggcataaaaacccaacttggccattatgtattttctatttgtgtatttt

SEQ ID NO: 155614 - DNA, 596 bp, Homo sapiens
ttaagggttcatacctttctcacaataaaccaggccctaattggctggtgttgtacacaggcggaggctggaggagggaatggaggttatatgatgggtgcagcaaagcagaaaagagtcagggtgaaatgtcatcaatttcatgttatctagagtcaatacgaggcagtataatattcaaacgagattgggtgcgttcggggtagtatgggtgtagacaagattaacttttcagttgagcagcacaatattcaacccgcctttttacatytttttttttttttttttggcagaagcagaagtatccatcaccatatttattgtaaaaagggatcttctcacaatatatgcaaagtagacaaatttaagaaaaccataaagggactatttctaaactggtcacatttggtgtggacaggcaggtgtgtaaggaaacattatgctctaaattctataatagacagatgaacaaaaccccatgaaagacctaaagaagaaaaaattagcaccaaaagcagggattggaaaatcctttgtacacagaaaatgttacaacattggattccatagtcctaaacttcagacgagggtgagga

SEQ ID NO: 155615 - DNA, 285 bp, Homo sapiens
acatgaaaaatgctcaacatcgctagcccccagggaaacaaattggaaaccagagtgaagaacaattccacactcartaggatagctaaaattaaaaagattgacaacaccaagtgttgagaatgtggaacttctggaactcttatttactgacagaagtgaaatggcacatccattttgaaaaacattttggcagttttctacaaaggtaaatacatgctttacatatgaccaaaaaattccacttccagatattaaccccccaaaaataaaaatatagatcta

SEQ ID NO: 155616 - DNA, 479 bp, Homo sapiens
tccttctccagcctgggcaacataactaaaaccccttttctacaaaaaaattaaaaattagccatgcatggtggctaatttttaaagtagtaacatttaaaaattttacacacctatagtaccagctactggggaggctgagatgggcgcatcatgtgggcccaggggttcgaggctgcagtgagctattattgttccactgcactctagcctgagcgacaaagacactgtctcaaaatatatagagagagtaaaagacgtcacataagaaagaccacatagtgtgtgactttatttrcataatatataaaatagtaaaagataatcaatagtgatagaaagatcagtgtttgtctgggggcactttattgtacataaagtatattttaaaaatgtctgactttcaggccaggtacgatggcttatgcctgtaatcccagcattttgggaggccaaggttcacagatcacctgaggtca

SEQ ID NO: 155617 - DNA, 591 bp, Homo sapiens
aatgatgaatgacagaatcttcaggtgtgtgcgttatagagccaaggttkggggtatcttttaaaaagtcctctataggataatacatattctattttaggagttcaacacacattttatgtctcttgttttgttttgtttttggagacagtcttgctctgctgcccaggctggagcacacgatcatggttcccacaacctttgcctcccaggctcaagtggtcctccctcgcctcagcctccagagcagatggtactacaagcatgtgccaccatgcccggctagtttttgtattttctgtagagatggagttttgccatatttcccaggctggtctcaaaatcctgggctcaagcatactttggcctcctgaagggctgggattacaggcatgagccactgtgcccggcctctttttcttctcaatatatcatcctgtactacattgtctgatatttatccattttttttttacttagataattgaaaagacaggctattttcaactttgctaaaatcataatcataagaaatatgttctctgattcaaagtgaaaatgccaccacaccttagatcagcatgtataagc

SEQ ID NO: 155618 - DNA, 642 bp, Homo sapiens
agacagtgacaacacttagctggccacaggtcactgggcaggagtttattaaaatgagactgctactagtgagacaaccgcagcatgatcctgggtgacagaacgcattcactcacacgctgtgagaggcgggatgacagggcaccctctgcaatcacagatgcaagattcttggttttaaacatttgcygtattcaacatcttttgtttggtgtccatttactcctcctaaactctcttgctggcttctagtactatttcttcttgctctgtaccaaaggggtctactttgtatcaacagggctgcagagtagggatagagaggatattatgtcaggtagactccaggaagcaatttcacaacaggagaaaaggttcaataaccctggatcaggatgcttcaaagcaggcaaggcaaaaatgtctacggcagtcagagagctaaggaaagcttcagaaagctcatttctatgagaagcgttgaaaatctttgaagatatttctctctcttactcagggtttgctattaggttatgttccttgaacaggtcttttgaaaacattcaagaattttccctgtccaggcattgctcaactctaaaggtaagtgatctctgtgttatataagcccaggaactttct

SEQ ID NO: 155619 - DNA, 641 bp, Homo sapiens
aaccatgatctgatttaggcaagatggctccatggcttctcaacaatggcgccagttccagaaacgtatttcaccattgatagaaagaaaaaagacctttaaaccttctataggtgaggctttaggaaacaacttaactgttwtgtacaatttttttaatgttcataactcatgacacttgagtggtgtgatacagtttggatatgtgtccccgcctgaatctcatgttgaattgtagttcccaatgttggaggtggggcctaacaggaggtgattggatcatggcaggtggatttctcatcagtgcttagcacccttcacttggtgctattcttgtgatattgagtgagttctcacaagatctggttgtttaaaagtgtgcaacacctcccgcctcctctctctggctcctgttcccaccatgtgaaacacctcacttcccctttgcttctagccgtgattagaagcttcttgaggcctccctcaaagcagaagccactatgcttcctgtacagcctgcaggaccaagagccaattaaacctcttttctttataaattacccagtctcaggtatttctggatagcaaagtctgattggactaacacatggtaagaagcatttcatgctaaattaacccta

SEQ ID NO: 155620 - DNA, 511 bp, Homo sapiens
cgtttattaagtgttcttaaataattgaaactggcccaatactcccatagactgttcttttggataaacatagaaaagattctgctgttaaagcttgaaatttgtatttgttttatgtgagttccttcctcaagaaaagaactttaagcctttcaaaaaaagtatcaaacaaytgaagctcaccagatcacacactagatgcctccttgccccttcctagttcttgttttcttacacattgtcatatttcttccctgctatataaacccctcattttagtcagtcaaggagatgtatttgagagtgagctcccaattcctaggttgcagcacctgattaaagccttcttccttggcaatacttgctgcctcagtgattggctttctgtgcagtgagctttaggatctagaccaaacccctggtgtttcagcaacataattttataaactgaaaagaaaataagggatatttagaagctacaatctcactgaagttgaaaacagtaaagtac

SEQ ID NO: 155621 - DNA, 511 bp, Homo sapiens
cgtttattaagtgttcttaaataattgaaactggcccaatactcccatagactgttcttttggataaacatagaaaagattctgctgttaaagcttgaaatttgtatttgttttatgtgagttccttcctcaagaaaagaactttaagcctttcaaaaaaagtatcaaacaattgaagctcaccagatcacacactagatgcctccttgccccttcctagttcttgttttcttacacattgtcatatttcttccctgctatataaacccctcattttagtcagtcaaggagatgtatttgagagtgagctcccaattcctaggttgcagcacctgattaaagccttcttccttggcaatacttgctgcctcagtgattggctttctgtgcagtgagctttaggatmtagaccaaacccctggtgtttcagcaacataattttataaactgaaaagaaaataagggatatttagaagctacaatctcactgaagttgaaaacagtaaagtac

SEQ ID NO: 155622 - DNA, 584 bp, Homo sapiens
gccttccagaagcagggcctagtaccctgatagttagctccagacaacttgaaaaattcataaatcaatgggtggccacaggaccatttagggatcaagccttgggcactattttaagggtatggtaaggcctcactggtttcttattccattggcatataaatatgcagaatgtctctaacatgtttttaaagaaatcatttctcctgaaaacttaaaattttgccaagcagtgaaattatcctaatttataagtcacccacttcaccaatacaagcaaatttctgctcaatctgctaatttccatayggattgctaattgaaacacaaaaaacagaagcacttctgttagcctcctgtggaatatggacttcctgatcagaactccagctggctctctttggacttctgtactattgattagcacttgggtaattgcttaacctaaagagatctgcataacctatataaagggagttataaacattgaataccagatgtttactcttcttccacatgattcctcttcttacccttgtattttctatgcattctgtatttctatggagatgactggaagttcc

SEQ ID NO: 155623 - DNA, 584 bp, Homo sapiens
gccttccagaagcagggcctagtaccctgatagttagctccagacaacttgaaaaattcataaatcaatgggtggccacaggaccatttagggatcaagccttgggcactattttaagggtatggtaaggcctcactggtttcttattccattggcatataaatatgcagaatgtctctaacatgtttttaaagaaatcatttctcctgaaaacttaaaattttgccaagcagtgaaattatcctaatttataagtcacccacttcaccaatacaagcaaatttctgctcaatctgctaatttccatacggattgctaattgaaacacaaaaaacagaagcacttctgttagcctcctgtggaatatggacttcctgatcagaactccagctggctctctttggacttctgtactattgattagcacttgggtaattgcttaacctaaagagatckgcataacctatataaagggagttataaacattgaataccagatgtttactcttcttccacatgattcctcttcttacccttgtattttctatgcattctgtatttctatggagatgactggaagttcc

SEQ ID NO: 155624 - DNA, 584 bp, Homo sapiens
gccttccagaagcagggcctagtaccctgatagttagctccagacaacttgaaaaattcataaatcaatgggtggccacaggaccatttagggatcaagccttgggcactattttaagggtatggtaaggcctcactggtttcttattccattggcatataaatatgcagaatgtctctaacatgtttttaaagaaatcatttctcctgaaaacttaaaattttgccaagcagtgaaattatcctaatttataagtcacccacttcaccaatacaagcaaatttctgctcaatctgctaatttccatacggattgctaattgaaacacaaaaaacagaagcacttctgttagcctcctgtggaatatggacttcctgatcagaactccagctggctctctttggacttctgtactattgattagcacttgggtaattgcttaacctaaagagatctgcatawcctatataaagggagttataaacattgaataccagatgtttactcttcttccacatgattcctcttcttacccttgtattttctatgcattctgtatttctatggagatgactggaagttcc

SEQ ID NO: 155625 - DNA, 584 bp, Homo sapiens
gccttccagaagcagggcctagtaccctgatagttagctccagacaacttgaaaaattcataaatcaatgggtggccacaggaccatttagggatcaagccttgggcactattttaagggtatggtaaggcctcactggtttcttattccattggcatataaatatgcagaatgtctctaacatgtttttaaagaaatcatttctcctgaaaacttaaaattttgccaagcagtgaaattatcctaatttataagtcacccacttcaccaatacaagcaaatttctgctcaatctgctaatttccatacggattgctaattgaaacacaaaaaacagaagcacttctgttagcctcctgtggaatatggacttcctgatcagaactccagctggctctctttggacttctgtactattgattagcacttgggtaattgcttaacctaaagagatctgcataacctatataaagggagttataaacattgaataccagatgtttactcttcytccacatgattcctcttcttacccttgtattttctatgcattctgtatttctatggagatgactggaagttcc

SEQ ID NO: 155626 - DNA, 245 bp, Homo sapiens
cgctgggatttgttttcaatagaactgggttatttttcygtatatttcccccattttttttcttggtttttacctttgttttactggagcaaatcttcaggtaacctccttacagaagtacataagagaaagtttctgaaagtctgaaaatagctatattttaccatcacacttgattgccaagtgactaagcctagaatttttctcagagcttcaaatgcattgtttcattgcttctcagatct

SEQ ID NO: 155627 - DNA, 245 bp, Homo sapiens
cgctgggatttgttttcaatagaactgggttatttttctgtatatttcccccattttttttcttggtttttacctttgttttactggagcaaatcttcaggtaacctccttacagaagtacataagagaaagtttctgaaagtctgaaaatagctatattttaccatcacacttgattgccaartgactaagcctagaatttttctcagagcttcaaatgcattgtttcattgcttctcagatct

SEQ ID NO: 155628 - DNA, 443 bp, Homo sapiens
tcaagatggatcaaagacttaaaactaagacctgaaaccataaagattctagaagaaaaaatcattctagatattggcttgggcaaacccttcatgaccaagaacccaaaagcaaatgcagcaaaaacaaagataaatagatgggacttaattaaactaaaaagcttctacatagcmaaggaaataatcagcagagtaaacagacaacccatggagtgggagaaaatattcccaaactatgcatacaacaaaggactaatagccagaatctacaaagaattcaaacaaattagcaagaaaaaaaacaagcaatctcatcaaaaagtgggccaagaacatgaatagacaattctcaaaagaagatatacaaatggccaataagcatatagaaaaatgctcaatatcactaagtactagggaaatgcaaatcaaaagcacaagga

SEQ ID NO: 155629 - DNA, 443 bp, Homo sapiens
tcaagatggatcaaagacttaaaactaagacctgaaaccataaagattctagaagaaaaaatcattctagatattggcttgggcaaacccttcatgaccaagaacccaaaagcaaatgcagcaaaaacaaagataaatagatgggacttaattaaactaaaaagcttctacatagccaaggaaataatcagcagagtaaacagacaacccrtggagtgggagaaaatattcccaaactatgcatacaacaaaggactaatagccagaatctacaaagaattcaaacaaattagcaagaaaaaaaacaagcaatctcatcaaaaagtgggccaagaacatgaatagacaattctcaaaagaagatatacaaatggccaataagcatatagaaaaatgctcaatatcactaagtactagggaaatgcaaatcaaaagcacaagga

SEQ ID NO: 155630 - DNA, 443 bp, Homo sapiens
tcaagatggatcaaagacttaaaactaagacctgaaaccataaagattctagaagaaaaaatcattctagatattggcttgggcaaacccttcatgaccaagaacccaaaagcaaatgcagcaaaaacaaagataaatagatgggacttaattaaactaaaaagcttctacatagccaaggaaataatcagcagagtaaacagacaacccatggagtgggagaaaatattcccaaactatgcatacaacaaaggactaatagccagaatctacaaagaattcaaacaaattagcaagaaaaaaaacaagcaatctcatcaaaaagtgggccaagaacatgaatagacaattctcaaaagaagatatacaaatggccaataagcatatrgaaaaatgctcaatatcactaagtactagggaaatgcaaatcaaaagcacaagga

SEQ ID NO: 155631 - DNA, 601 bp, Homo sapiens
gataatttttaaagtaggccaaaaaactgaacagacatttcaccaaagaagatatacaaatggaaaataagcacacgaaagaatgttcagtatttagtcattaggaaaatgtcaactaaaaccataatctgataccactaccccactcattgattaaaaattgaaaaaaaaaaggaaaaaaggaaaaaacagacaacatggcaaggatgtggaacaactgaagttctcaggcattgcgggtggtcatgtgaaatgacacagccactttgaaaagttgtttggcagtttcctaggaattaagtatrtacttaaccacacaaatctaaaaatcttgcttcatgactcttacccaagaaaaatgaaaacttctgtccccacaaaaactgaatgtttacagtggtctttactcacaatcactaaaaactagtaaaagcccaaatgtccttcagctggtgaattcataaatacactgtgtttatccatacaatggaatacagataaaattcagccagaaaaacaaatttgtaatacagatgagaaaaatgaatttcaactgtattgtggtgacagaatccagacccaaaaggcctcatactgtacg

SEQ ID NO: 155632 - DNA, 639 bp, Homo sapiens
agtatttttagtattgctgatttatagttatcaaaaggctatgattgcagatcatgcacagtgcatccatctgggcaattatcttttggttctaatggttagaactgtggcagtttctgaggtgttagagttcaggttcaattcaaagcatcaatgatgytcttcatactagaccaggatctgcctctgtaagacagactcaattcccttctcttctttttttgcaacaaccacagccattaccccagcctcaaattcatatccattggttcagaagccctaaggaagggcattgatttcagagaggaagcccaacatgtgcaggattttttgccctggatccagtgatatctttgagaatcagaaacacttattctaatgtattttaatttacttttcaaatggagcatttaaacaaaaactgtttattgggttcaaattcagagccaagttgtgtgtcgagagagtcttaatttttcataacaggacatgtttggctctaatgtgtgggttatgagtcaatatatcaaatttgactaaagtatttgctctaagtagggagcaagccatttagcattacaaatcctgaactttttgcaggaaggagggaaataactttgatttctaagctctcttatt

SEQ ID NO: 155633 - DNA, 211 bp, Homo sapiens
ctggaatggctaagtcacccaaacagcaatgatggtggcccaccccctctgtgagctccatccctgggaagttactaatctctgttggccagagaacacctttaggggagaggtggctggaggcaccccagttgggaggtcctgtccrgtgaaaaggaatgagattggggacctgcttatagtagtagtctggccatgtttggtacagcag

SEQ ID NO: 155634 - DNA, 623 bp, Homo sapiens
accaatagcatccactatagaagttactcaatatcttccctgaaagcctttgaacatagctaggcctctaaatagtctgcttaaactccagttcttttggaaaatggcagagaaaatgattatcagattttaagtctatcaaaattccattcagcattgaatacatataaagtataaggtgagttacgaatatatccaaaaatttgtattcaaaaygtaagacaggaaatgttcatttttataatttactcttataaatcagtctcagtaaggcagctggggttctcttcctgtctcaaatattgagcccaaaattttcccagctttgtgacagtattaggttcacaccaactcttttggatgccttcctctcaaaatcaaattcaatatagagggacagagactgagaagcctaggatgagccagaaagtttgtgattggcacatacttgcctggggcccaagtcaccagaagtcaaaagtttcctcaggaaataatgtgttgtcaaatggccatcctccagtcaacggggcctgttaagtcaaaaacacatcagtattataaagcaccacacacactgactcatctagtctcaagatatgcaggatctaaattattatatc

SEQ ID NO: 155635 - DNA, 434 bp, Homo sapiens
ttgcttgaaatttcattgcttatatctaaaagaaactcctatttttargagaaatgttgaatctttgcaacgtggtagacgctcccacaaaactttctcctgaaataggagataaatgttggaaagaggcaatgtattgagtatgctgatagaggtggagttcagagacaggcaagcatacataagagtcaggatgtttttcagtattatctttacaaatgagtttcttacagtggtcaatgacaaaccaatttcattcaaagcttgcttcaataggcaatggtttgatgccaatatgttagctatttactttgaccaccgtatgcattaaaaagaagaaaaattaagaatactcaagcagaacctccaacttagatagcactttccacaaaaagtaatggagggatagactgaagttaaatgggatcaggtat

SEQ ID NO: 155636 - DNA, 434 bp, Homo sapiens
ttgcttgaaatttcattgcttatatctaaaagaaactcctatttttaagagaaatgttgaatctttgcaacgtggtagaygctcccacaaaactttctcctgaaataggagataaatgttggaaagaggcaatgtattgagtatgctgatagaggtggagttcagagacaggcaagcatacataagagtcaggatgtttttcagtattatctttacaaatgagtttcttacagtggtcaatgacaaaccaatttcattcaaagcttgcttcaataggcaatggtttgatgccaatatgttagctatttactttgaccaccgtatgcattaaaaagaagaaaaattaagaatactcaagcagaacctccaacttagatagcactttccacaaaaagtaatggagggatagactgaagttaaatgggatcaggtat

SEQ ID NO: 155637 - DNA, 434 bp, Homo sapiens
ttgcttgaaatttcattgcttatatctaaaagaaactcctatttttaagagaaatgttgaatctttgcaacgtggtagacgctcccacaaaactttctcctgaaataggagataaatgttggaaagaggcaatgtattgagtatgctgatagaggtggagttcagagacaggcaagcatacataagagtcaggatgtttttcagtattatctttacaaatgagtttcttacagtggtcaatgacaaaccaatttcattcaaagcttgcttcartaggcaatggtttgatgccaatatgttagctatttactttgaccaccgtatgcattaaaaagaagaaaaattaagaatactcaagcagaacctccaacttagatagcactttccacaaaaagtaatggagggatagactgaagttaaatgggatcaggtat

SEQ ID NO: 155638 - DNA, 434 bp, Homo sapiens
ttgcttgaaatttcattgcttatatctaaaagaaactcctatttttaagagaaatgttgaatctttgcaacgtggtagacgctcccacaaaactttctcctgaaataggagataaatgttggaaagaggcaatgtattgagtatgctgatagaggtggagttcagagacaggcaagcatacataagagtcaggatgtttttcagtattatctttacaaatgagtttcttacagtggtcaatgacaaaccaatttcattcaaagcttgcttcaataggcaatggtttgatgccaatatgttasctatttactttgaccaccgtatgcattaaaaagaagaaaaattaagaatactcaagcagaacctccaacttagatagcactttccacaaaaagtaatggagggatagactgaagttaaatgggatcaggtat

SEQ ID NO: 155639 - DNA, 513 bp, Homo sapiens
ggggtggtgcaaggctgaggctgctagtagccatgtctcctgttagcagagaaggccaacttccagaagagagtgaagccaacatatgmggaggagggatgagaggcaaatggagagagaatccaggaggtaaggagttcctgggggtgttggctccagcagctttcttcaatgctgagcctaccccagtaaacataatagtttcctttttgctttagtttgagttgagcctctctgttgcttaaatagggtcctaacccaggtgactttcttaactccagactctcctcactcatcattacagctggcaaaccgtggcaggaaaatcttttaaaaatgctattttctgaatattcttttcataaaaacttgtatgatactactctctattatattgagtctatagtcttttggattaatttcaaagccaaagaaaagatattgatgacctttcagactttcaaagcactaaatgatctagggtataatctaagaatagagaaacctcaaatg

SEQ ID NO: 155640 - DNA, 513 bp, Homo sapiens
ggggtggtgcaaggctgaggctgctagtagccatgtctcctgttagcagagaaggccaacttccagaagagagtgaagccaacatatgaggaggagggatgagaggcaaatggagagagaatccaggaggtaaggagttcctgggggtgttggctccagcagctttcttcaatgctgagcctaccccagtaaacataatagtttcctttttgctttagtttgagttgagcctctstgttgcttaaatagggtcctaacccaggtgactttcttaactccagactctcctcactcatcattacagctggcaaaccgtggcaggaaaatcttttaaaaatgctattttctgaatattcttttcataaaaacttgtatgatactactctctattatattgagtctatagtcttttggattaatttcaaagccaaagaaaagatattgatgacctttcagactttcaaagcactaaatgatctagggtataatctaagaatagagaaacctcaaatg

SEQ ID NO: 155641 - DNA, 579 bp, Homo sapiens
tttacagtattaatggggcagtagaatataatctccaaatgcttggctgattttcaggagactggttgtttagcactcacaaaaatgccttctttaaatttacgcacagagatagacctatccagcatgtgttggatttagactgtcatgattttttgcttaaatatctgggagttggcagcatgttttccactaagcagacctgccttgtttttttgaaccaatgagttatttgaatgtattaggattcacatgtttttcattaattcacaattaactcatatcaagatgttattttatgagagmattttaacatccatcaaaccctctgagtatttctaaaatgcactctaagctgccttttaaccttagaatatgttaggcatggtatcaaaggcagttgtttcaaaggtggagacgtggatctggcagagagacaagggcagaacatcacagtgttaaatgaagagccaataaagcttcactttattagtagttaactagaaattgaagctgggtaccaatttagttgtgagataatgggcttttcttgcatttactttcttatctatataatgg

SEQ ID NO: 155642 - DNA, 601 bp, Homo sapiens
aagaagatgaccatcttattgtctgcactgctcccttctcttgtatagcagtcattccaaccttgcctgcaattagaattacctggggagcwttaaaaaacatcttattgccaagagtggcaccagaccaatcagatatctctataggaggcatctaggcacaagtagaagcctgattttgccatctcttaatcctggcagatgttgggtgctatctgcagctattgacattctaaaacgttctaaaacgttaggatacttctgtcctgtcgtttccagtcatggatcctagccagtcattcagggaaaaattcccttcaatatcctgttccacaaggatgaaatgacatgcttgagtatagacaatgaagtgaaaagagggccttttgctttcctcagctatggcctctaaaagggaggttaccataaaattcaccaccaccaagtatttgtgctacaaatgagttgtatgaaccagtgcaacagcttgctttctattccttcatttccaggacaaatatggacagacaatacgtgtggttagttttctctctctctccctttttgttgaaggaatgcataatgctgaggcttgtttgtt

SEQ ID NO: 155643 - DNA, 601 bp, Homo sapiens
aagaagatgaccatcttattgtctgcactgctcccttctcttgtatagcagtcattccaaccttgcctgcaattagaattacctggggagctttaaaaaacatcttattgccaagagtggcaccagaccratcagatatctctataggaggcatctaggcacaagtagaagcctgattttgccatctcttaatcctggcagatgttgggtgctatctgcagctattgacattctaaaacgttctaaaacgttaggatacttctgtcctgtcgtttccagtcatggatcctagccagtcattcagggaaaaattcccttcaatatcctgttccacaaggatgaaatgacatgcttgagtatagacaatgaagtgaaaagagggccttttgctttcctcagctatggcctctaaaagggaggttaccataaaattcaccaccaccaagtatttgtgctacaaatgagttgtatgaaccagtgcaacagcttgctttctattccttcatttccaggacaaatatggacagacaatacgtgtggttagttttctctctctctccctttttgttgaaggaatgcataatgctgaggcttgtttgtt

SEQ ID NO: 155644 - DNA, 433 bp, Homo sapiens
attgcctggcaggtctcttgaattctgataacattttcctgaatgcttatgttttacatatatttttaatttaacttgcctttttaaaagagaaattgctctgtacacatgcttaaagagatagtatgaaacaaaggcaatcagtgcctctactagcaasacatgtagaaacacaggaaacacatggagaattaatttccaacatccaggttctgtcgattatgaataaagttgctatgagcactaacatacaaatgtttgtgtggacatatgttttcatttatcttgggtaaatacttatgagtggaatttctgggttagatggtaaggatgagtctgactttataagaaaatgccaaactgttctccaaagtgtctgtaccactttgcattcccaccagcagtgttggagatttccagttgctccacagca

SEQ ID NO: 155645 - DNA, 502 bp, Homo sapiens
ttcactgtcatcatttcctgagttataattttgcaaaggtggcttcatctttagcccaatgtgacaaaaatacgagtctcttgtttagaataatgttggttactgaaggagataccatgacatcggttcctgtggtcatcttgggaataaraaacctctttgccatgtttgagaatgttgaaaccaagttattttgttctaagttagaaggtcagagctcagacttaaaaataccagccagtaatgaaaaacagagcggccgcatttaggttaccagcagtgaataaattcccagatagttgaaacaccgctgtatactggtgacctttaaacgtataatgagtaaatagtttggggggaaaaaaaggaattcacatggatctcaaattgtattctctttcaatctgtaacagatcagcttttctgttagaggtcagattgttaaaattttgacaaatttggctgcctagaacatctatggccttagctgtcaaatcagaag

SEQ ID NO: 155646 - DNA, 502 bp, Homo sapiens
ttcactgtcatcatttcctgagttataattttgcaaaggtggcttcatctttagcccaatgtgacaaaaatacgagtctcttgtttagaataatgttggttactgaaggagataccatgacatcggttcctgtggtcatcttgggaataaaaaacctctttgccatgtttgagaatgttgaaaccaagttattttgttctaagttagaaggtcagagctcagacttaaaaataccagccagtaatgaaaaacagagcggccgcatttaggttaccagcagtgaataaattcccagatagttgaaacaccgctgtatactggtgacctttaaacgtataatgagtaaatagtttggggggaaaaaaaggaattcacatggatctcaaattgtattytctttcaatctgtaacagatcagcttttctgttagaggtcagattgttaaaattttgacaaatttggctgcctagaacatctatggccttagctgtcaaatcagaag

SEQ ID NO: 155647 - DNA, 621 bp, Homo sapiens
aatgtatagtttgagaacttttaaagaaatgctaataatttcagtggatttgggatgcccaatttacaatatgaattaattttggaagtaagacttaccagggaaatagacactaatagaaatatggcaatttataacctttatgaaaaactatcatgaatcactaagaatgcacgctgcgcgcatatagggtgaacctcttaatggtgaccactgtcattctaaatacaaaaggtctcatgaattgccttttaaatgggttacattaagaggaccatgcttgaaacagattaaaatatattgaaccatgataaagtgtgatttctacgaacataaatagcacactgattctagagaaacctatctatgcaagagcaatccagaattctctccctctccaatatgggagaagtacttcatgagtaccctctgtttagctctattatgacagtcaccatattggaatataattattaatatgaaatacayattttctcttcttcagatcattttctctgagaggttttgggatattatttatgctggtgcctacttttgtaatattcctcctggggctcaatattactgagctcccaccaaagtataatgctgggcaccatg

SEQ ID NO: 155648 - DNA, 528 bp, Homo sapiens
atttgctgtagtgtgcattttgagaacatgtgtttgcagtaataaaaatgaccaccccagaatgaatggaatgagaaaaccccccagggtttttattgtctgtctggattaaactatagctcattaagcaaagcacatctcacaaratgctccagaagaacaagggggtggatagctcattacaaccagcatgaagaacagaataggaaaggaggctggtgaggaatgtcattctaatgactgtcatgtggacccacagagagaatcacaggctaaaacaggctcatgatacatgggtggcatatggaaaaagagacaggaatggggctaaggatagacatgcacacatgcacacacacacacacatatttacatatgcttatttaatagagttccaggcatcctaagcacatattaaatttctaatttctggtataaatccagtcatctgaatacactatcatgcactaagctccagtagataaaaattcctattgaggatcagcattttctccccagatctcagag

SEQ ID NO: 155649 - DNA, 550 bp, Homo sapiens
ggttatattatgtgcaaggcattgagccaaatattaaagctaccattgcagtaattttaagtaatccatctttgatatagtcaaattttaattttataaaaatgaagcaacatcaaggctgaaaaagtttagtatttagtgaagaaaagataaataaagatctctctgggaccatagctattgaattctcattgcacaactgccgtgaatttctaaaaaaggcactgtaaagaaatacctatgcaggaagaaaaatccaaagtttatccactcttaaatttcataacacaaatagaaagatcttatatgtttagaaaatattaacaagtattaaaaattaaataaactttctgctcaatactttattaaccagaaaattctattaatcaaaacattactttcctctgcattctggttggtttaggttttgttgtaataaaatatacatgagaaaaaatgatttaaacatttttagagcataatgatattattgataataattcttcactagtaatgatgaatacatytttgaattatccataaagggacc

SEQ ID NO: 155650 - DNA, 613 bp, Homo sapiens
taaaaatagtaatagaatatcatgacatttgtctaatcatccccaatataaaacacactgcaaaatcagatgatctcctgtctgtatttcctgtaaaaaaatctgttgcataccttggataattttagaaacagaattagctttcaatttgttggcacattactgaggagaaaaaagtaaagaaaaatgagacattcaaattaaattagcccccatattgatattcaacctcactgtcgagcacatagtgtccgtacacccacagatccaagagttaatcaaattcccaataataaaacatgtttcttcaggttgaactgattattcattagaaaataaaagtgggtggcagaaccacccagaatcctaaatacacttatgcaaatagacatataccagctgccacacttcactggctttaggraatactctctattggggagcctgttctctccaaattggaggccctagttatgaagttatgaagttatgaagttatggcttctcccctgccctcaaggcctacacagtgtggtccagagaaacatggaaaattctgtcaccgagtgaacatgctgcaatgaaagcgtatgccagccggaatacgaggtca

SEQ ID NO: 155651 - DNA, 560 bp, Homo sapiens
ccccatagtgttcatatagccttctgttgaaaatatagcctacagatattctgaccattactgagatttgctggaagtaagtgaaattcagctagatcagagcagttcagcaacttagaaatcgtcacaatcaacctctccatttgacagatgacaaagctgagtttcatagaggtgatgtgacttgcccaaagccatactgatcaggttcctactggtctgtggcccattaggaactaggctgcacaacaggaggtaagccatgggccagcaagtaaagtttcatctgtatttacagtagctccccatttcagtcttacattaccgcctgagctctgcctcctgtcagttctgcctccattagaatctcataccagcaggaaccctattgtgaactgcatatgtgagagatctaggttgygccctccttatgagaatttaaagcctgatgatctgttactctgtcctatcacccccagatgggactatctagttgcgagaaaacaagtttagggtttccaccgattccacattatagtgagttgtataattatttcatt

SEQ ID NO: 155652 - DNA, 556 bp, Homo sapiens
aaatttgtaacccaaagtagtccacagtttgcttttataaagagtaacactgaggctcaggtgttatctatacaattctatggaggctgccttgtgtgttgcaaaatggatgctgcattgaaggctgcgcagactgaattgaaagtctggcaggtaaatttagttgtgatactatcgctttctagcatctgagtcaattgctctcaaggaatttcaatttccccatttataaaatcagaataacaatacatattgagatgaatgttgtgaggactaaataaaagtaaactaaatatacataaagagaaacctccaaatatataaaagtatattcaaaggataccttttaaattagctcagaaaatatagattattcaataaatagtgttgagacaattagttaactatctagaattacaaaattggatctgtaactcacrttatagatgagaataaaattaggagaaattaaacatttaaatataaaaagtagagaaaatataaatatgttagaaaaaatttttatttattcaataaatatttactgaatgcctac

SEQ ID NO: 155653 - DNA, 587 bp, Homo sapiens
cgttttttgtttctgtttttattttttgtggttccaacatttaacatgaggtctaccctcttacgaaattttgaagtgcatgataactgtattaagtatgggcactgtgctgtgtagcagatttctwgaacttactcatctagcataattgaaactatacctatggaacaactcctctttcacccactcccacagcccctggcaatcactattgcattatctccttctgggagtttgactagtatagataactcatataaattacattgcacagtatctgcctctctgtgactagcttcatttcacttagcataatgtcctccaggttcattcatgatgttgcaaatagcagcattttttaaaaattttaaaggatgaatagcattgtgtttatatatatatatatatatatgtatgtatataaaatactgtgtacacacatatatacatactacacacacagagacacactctatctcacacacaacacactacattttctttattcattcatccattaatgaacacataggttgattccatatcttcactattgtgaataatgctgcaaaaaaaaaaagtgggag

SEQ ID NO: 155654 - DNA, 591 bp, Homo sapiens
tgggcatctatttctaaggaacattcagggctaaaaatctgtaaaagtcagtgaaagcatgtacatttgataccactttcttttctttaaattgaaaaactggtgttgtgttaagtcctcagagcttaactctgtgctccttggatggtttgcttttwcgcaaatggggtgaatctccttccaaggagctagcaccaaggcacaatgtcctggaatggggtggagaaatgcacagctgttttcctttgtagctggaaactagcatggaagcagggaaataattcaaggcaggacaaagggagaaggaaagccttaggtttctgcaggtctgtggaaggtaggaaacaggagacaaagacaaatcataaagatcagagtgtaagaagaaatgacttatgcagtcagcaaggaaggtcctttttactggagatagtggcttgaatagggagctacttagccttataaaaaggccaactcctatccctggtcatcatttgccgtaatgtgcccttagcaaatatttgctgaattgaattgaacctcaagagtcactgagaaaaacgatagctcaatttgcaaactagatatatt

SEQ ID NO: 155655 - DNA, 617 bp, Homo sapiens
actattaaaaccacacataatgggacagagagtaaatgctatagaactgcagcaaaaatgatagcttgagcatagggtgaacttaacgttaactggctaatttaaaggcttccactttttgttggggcccagagttagaaaggcctctataagaggtccaaaaaccagtgcaaacctctgatgacatgagctttatgacctggtggattccatggtgttgagatattagtagattacaatagtgtgaggggtcttcaacaagcctattgggaaagtcacagtgcagacctagaattctaaagcaatgccatcacctctgcagaagagaaatactctccatttgaaaatcagcttctggcagtggaaacagcatatgaacaaaaacaccaagtatttatgctactgatgtctcttctttatctcaccatggcctaataagagaaagtgggatatttcgtatcatcaattgacagataagaaataatttagctgcttcattaagccacactttcgggttctgaaaagctayataggagaggtagataggcagatatatgaccattggaaggctgtccacttgacatgcaggaaggggtgaactgagatacggacataca

SEQ ID NO: 155656 - DNA, 623 bp, Homo sapiens
ggaaacaatcatatcttttttattgggcaatttttcaaaagtagcaagacagcatataaagaaccagtatatcatttagcatgtgatatacagtcagtggggtcccaactcccaggtatcgtgaaagctgtggatatcctaacatcagaatctctagcttccttctgtttaagttctagacaggagaaccatacattagaggggacacgtggtgtctgccagggacaatacattttaggagtggcatccacatggaaagggattgacatttcaggcacccaagtggtccattctctcccaaatgcctgatacctcttagagaccttatttcattcatcaggactgtcttgctgggggacatctcccatgtgctgcatctacctctgctctccttttgtaagacaaatgagtaaatataactcataaccacttttagctgtacagaaaaagtagttaggtatttaatttggcaatcctgcccaatgaacttctcctaaatcttaggatcaagctctgtgaataaattatcatttccaaccttctgtgtaggatattcttttccattgawtccaggaatatatctacataaatatgaatatcaacatgcaaattaatggaaatga

SEQ ID NO: 155657 - DNA, 576 bp, Homo sapiens
ctgcctctgtgtggtgtattcttgccttagaaagccttatgttcctttgagatgcatttttctttcttcttccacactgggcactactgcagcaggaagatccagtaggaggaggaggccmactcacccctgaaaggctgagcaagaaaaaaaaagcctgggatagtaggcagcccctcagctggcttatatgatctttggtgtcttctgtggtctaagaaagaaatagcccctttccttggggagctgggtttggtcacacgagttatagctatttcttctgatccaacccagcctcccagcactgggattccctatagagattacacaccaaagcgaaatagtcataaatggtgattttcttttcttcagaaagtcccctgcagttactttgcatatgatagtttacataaattggcagctgcatggagagaaggcagtttgacattgcttgaatatatttttctctcattccaaggaaactctacaaactcaatatttataaaggagcagtaatgtaattgtgtgtctaaagagctcctatcatctagatttctgtatcttcaaaatttatta

SEQ ID NO: 155658 - DNA, 576 bp, Homo sapiens
ctgcctctgtgtggtgtattcttgccttagaaagccttatgttcctttgagatgcatttttctttcttcttccacactgggcactactgcagcaggaagatccagtaggaggaggaggccaactcacccctgaaaggctgagcaagaaaaaaaaagcctgggatagtaggcagcccctcagctggcttatatgatctttggtgtcttctgtggtctaagaaagaaatagcccctttccttggggagctgggtttggtcacaygagttatagctatttcttctgatccaacccagcctcccagcactgggattccctatagagattacacaccaaagcgaaatagtcataaatggtgattttcttttcttcagaaagtcccctgcagttactttgcatatgatagtttacataaattggcagctgcatggagagaaggcagtttgacattgcttgaatatatttttctctcattccaaggaaactctacaaactcaatatttataaaggagcagtaatgtaattgtgtgtctaaagagctcctatcatctagatttctgtatcttcaaaatttatta

SEQ ID NO: 155659 - DNA, 586 bp, Homo sapiens
ccttgtggaaggaagtgctgtgggaggcaaagggacagaatgacccaccctaacagtgtcactggggaggcagtctgcaaagccaccttcaactggccttgaggatgagtcccaataacccatggctgggttctgagccagcatcctgactttggccttctgttcatgttgtttcctctgcctggaatccatcccctcccctccttccagacacgacctgcccaacacaggtcaaacaacatcctcttttatgagcttcgcctaaggtacctagtcagaattaaagtgttcctcctgaaggagagctcacagcaggctgctggttgctctatttagctctcatttgattttctcttgtgttagagtctgtcgtttacatgtgtaagtggactcctgcctcgtccatttccttagttcctacagccctaggtaagaatcattgcatctagtgagcaatcaattartagccactgaattaaattatattcacagtcaatccttgctcaaagactgcagctgacgttccctcttagactatgcacagagaggattctaggatgtaatacatgattcttttggtgcccca

SEQ ID NO: 155660 - DNA, 558 bp, Homo sapiens
atattcacagtcaatccttgctcaaagactgcagctgacgttccctcttagactatgcacagagaggattctaggatgtaatacatgattcttttggtgccccacaacctcargctttctactcatgcccctccatacttccttcaattgctcctccattaatcaggcctctgtaagcctgactatttcataccctcgaaatgtgtactgctgggatcccctttactcgcacactgattctattccttacgttgcctgtgactattctattctttgcttttctcttatcttttcaagcaagttacttctacttctttcccactgctcttcttacctgtatcgccctcctcttgttgtggtctggatttgtttcacttcttcctgttcagtttacagcactctacttccttcttctggtgatttttctctaaaaaataattgggttttttttttcccctagatctgtattttactgtcttcttttttcctggacgctactcagatgaagcaacagaaccctaaccctcatcgatgctgttaccagagaggatgtgatcc

SEQ ID NO: 155661 - DNA, 558 bp, Homo sapiens
atattcacagtcaatccttgctcaaagactgcagctgacgttccctcttagactatgcacagagaggattctaggatgtaatacatgattcttttggtgccccacaacctcaggctttctactcatgcccctccatacttccttcaattgctcctccattaatcargcctctgtaagcctgactatttcataccctcgaaatgtgtactgctgggatcccctttactcgcacactgattctattccttacgttgcctgtgactattctattctttgcttttctcttatcttttcaagcaagttacttctacttctttcccactgctcttcttacctgtatcgccctcctcttgttgtggtctggatttgtttcacttcttcctgttcagtttacagcactctacttccttcttctggtgatttttctctaaaaaataattgggttttttttttcccctagatctgtattttactgtcttcttttttcctggacgctactcagatgaagcaacagaaccctaaccctcatcgatgctgttaccagagaggatgtgatcc

SEQ ID NO: 155662 - DNA, 600 bp, Homo sapiens
tgtctttttacatgatttcatttgctatattgtccccaagyatagattctgaattcagatatgaggaccaatggcttctttttatttgttgaaaaaatattcaaagaaaataaggctataaatttcttaagggcatattgatctgcataatgaaattatagggctttgcaaagatatgattatggcaagtggattacgaaagatttggaagacttaatcaatggtgatagtaacttagttgctaggataattctttgcttattggaaattaggagaagttattttgaacacaaaggaagaagtgggcactggatgatctttagcttccctcactttcttaccctgctgtgtgctctgggaagctgaccccaaaggatggcttcaacctcactcccttaccctcctgctgaggtcggatttagccaatgggagtaccagcaggagatggtaagggtgaggggatagaatctgaggtctttattcccctgggctgtagttggtagtggggtgttcttgcttaaggctaccactcctatgggtccttccctagagctataggtcagctatagctctctttctaagtccaataactattttttc

SEQ ID NO: 155663 - DNA, 384 bp, Homo sapiens
tcaggtagggagatttatgcaattaactctgagtccttgtttcaatgcatgataagtgtgcttgaatttttttcccggagaacagtgcatatttctgtgttagagaaatagacaaggcatcctggaggaattcaggccttggaatatagtgaggcttttctgctatggagaatagaggaggtcttttatattggggatgaaggaggggagttgcattgggagccaaggcaaraatgagctttgttatcaacttagcgtatctactaattgaactcaagtatttctactgatgaaaactacatgaatagccacccaatgtcattaacatagaaacacagtttcataataatgtacaaagctttggggcttgatgtgctttagaat

SEQ ID NO: 155664 - DNA, 384 bp, Homo sapiens
tcaggtagggagatttatgcaattaactctgagtccttgtttcaatgcatgataagtgtgcttgaatttttttcccggagaacagtgcatatttctgtgttagagaaatagacaaggcatcctggaggaattcaggccttggaatatagtgaggcttttctgctatggagaatagaggaggtcttttatattggggatgaaggaggggagttgcattgggagccaaggcaagaatgagctttgttatcaacttagcgtatctactaattgaactcaagtatttctactgatgaaaactacatgaatagccacccaatgtcattaacatagaaacacagtttcataataatgtacaragctttggggcttgatgtgctttagaat

SEQ ID NO: 155665 - DNA, 552 bp, Homo sapiens
ctggtatataatgggtgcagcacaccaacatggcacatgtatacatatgtaacaaacmtgcacgttgtgcacatgtgccctagaacttaaagtataattaaaaaaaaaaaagaatagtacctggtatatcatgagcactcaagcaatgttggctattaatattaccttgaagcaaaagaggaaaaattaaataatttccagcagatgtgttccaagacatatatccatttagtttgaatactttggctgtacccatatagggctttataggtgtggtggtgggggaagaaacgtgggtggagagagactgcatacagagcctttcaaggttctctttttcaggcagtctcttaaatgagcttctcttcatcatttgctgcttcaacagtcccagctattcttgataaaatattccgataatgtatagagtacgtttgacagctctgaactggtaagtcgctctcagtacatccccatgcttctgctcccaaggggagacttgatgcttcctaaaaagcacttgtgtttgtttcagttgtactgtttatatgt

SEQ ID NO: 155666 - DNA, 552 bp, Homo sapiens
ctggtatataatgggtgcagcacaccaacatggcacatgtatacatatgtaacaaacctgcacgttgtgcacatgtrccctagaacttaaagtataattaaaaaaaaaaaagaatagtacctggtatatcatgagcactcaagcaatgttggctattaatattaccttgaagcaaaagaggaaaaattaaataatttccagcagatgtgttccaagacatatatccatttagtttgaatactttggctgtacccatatagggctttataggtgtggtggtgggggaagaaacgtgggtggagagagactgcatacagagcctttcaaggttctctttttcaggcagtctcttaaatgagcttctcttcatcatttgctgcttcaacagtcccagctattcttgataaaatattccgataatgtatagagtacgtttgacagctctgaactggtaagtcgctctcagtacatccccatgcttctgctcccaaggggagacttgatgcttcctaaaaagcacttgtgtttgtttcagttgtactgtttatatgt

SEQ ID NO: 155667 - DNA, 488 bp, Homo sapiens
tgctttggaaagactggatttgatagaatattkgataaaggtagtttttataatttaagttaaatcagtaaaagatgggattaggaagtaaaaaaaaagttcaagagtcggtattcttattgcttttccaagcatctttacatttctactctactttcaagaaactcacattggaaatcaaagaccatacattatgagtgtgatttatgcaaataagactggagcaaactataatcaatctggaacccatcttcaaatcaaggccttggctgtacatctgaaccttggcaaacaacaacagatttttatgttttaagttaacctaaaatatttataagctgcttagagtgtatatgcattatttttatgatcctctcttaaactggttcttttgattaattagccaacagtggcagccctattttattcacaataagggcttctaatgaatttagagactgtttcaagtcactgcttctctaagaatt

SEQ ID NO: 155668 - DNA, 488 bp, Homo sapiens
tgctttggaaagactggatttgatagaatatttgataaaggtagtttttataatttaagttaaatcagtaaaagatgggattaggaagtaaaaaaaaagttcaagagtckgtattcttattgcttttccaagcatctttacatttctactctactttcaagaaactcacattggaaatcaaagaccatacattatgagtgtgatttatgcaaataagactggagcaaactataatcaatctggaacccatcttcaaatcaaggccttggctgtacatctgaaccttggcaaacaacaacagatttttatgttttaagttaacctaaaatatttataagctgcttagagtgtatatgcattatttttatgatcctctcttaaactggttcttttgattaattagccaacagtggcagccctattttattcacaataagggcttctaatgaatttagagactgtttcaagtcactgcttctctaagaatt

SEQ ID NO: 155669 - DNA, 488 bp, Homo sapiens
tgctttggaaagactggatttgatagaatatttgataaaggtagtttttataatttaagttaaatcagtaaaagatgggattaggaagtaaaaaaaaagttcaagagtcggtattcttattgcttttccaagcatctttacatttctactctactttcaagaaactcacattggaaatcaaagaccatacattatgagtgtgatttatgcaaataagactggagcaaactataatcaatctggaacccatcttcaaatcaaggccttggctgtacatctgaaccttggcaaacaacaacagatttttatrttttaagttaacctaaaatatttataagctgcttagagtgtatatgcattatttttatgatcctctcttaaactggttcttttgattaattagccaacagtggcagccctattttattcacaataagggcttctaatgaatttagagactgtttcaagtcactgcttctctaagaatt

SEQ ID NO: 155670 - DNA, 499 bp, Homo sapiens
ttttaataatcaatcaattagatatgttaaacatgacattataatcacattatagtaatgaaatgaccatagagcaggcacccagaggcaaaccttaatgctcaaggggcctggtcaaccccagctgactggagtctggtaacacagcacaggtgawtccgtcagctagtctgtcacatctgctagcctttgtaataatgaaactcccagcaacagtgccattaatatcagggaacaattctatttggatcacaatcccaagatgaccgtttgtggtatttatcacaactataactcattaattcagaagatcatgtctttttcaatgccgtcctccattcttcaatgtaaactccataatgacaaggaccacttggggttgtccttagcacctggcaaagtgtctggaccattgtaaatctaagacaaatctatgctggagatatacttgtatgaagaaatgaataaataaaagacctgggtcagcagttggaaatac

SEQ ID NO: 155671 - DNA, 584 bp, Homo sapiens
ccctagtgccaatgttgagaagccatgttttaataatcaatcaattagatatgttaaacatgacattataatcacattatagtaatgaaatgaccatagagcaggcacccagaggcaaaccttaatgctcaaggggcctggtcaaccccagctgactggagtctggtaacacagcacaggtgaatccgtcagctagtctgkcacatctgctagcctttgtaataatgaaactcccagcaacagtgccattaatatcagggaacaattctatttggatcacaatcccaagatgaccgtttgtggtatttatcacaactataactcattaattcagaagatcatgtctttttcaatgccgtcctccattcttcaatgtaaactccataatgacaaggaccacttggggttgtccttagcacctggcaaagtgtctggaccattgtaaatctaagacaaatctatgctggagatatacttgtatgaagaaatgaataaataaaagacctgggtcagcagttggaaatacaaaaacacagtctggagcacaagagaggagtttgtaatattttaagttttttgaagta

SEQ ID NO: 155672 - DNA, 499 bp, Homo sapiens
ttttaataatcaatcaattagatatgttaaacatgacattataatcacattatagtaatgaaatgaccatagagcaggcacccagaggcaaaccttaatgctcaaggggcctggtcaaccccagctgactggagtctggtaacacagcacaggtgaatccgtcagctagtctgtcacatcwgctagcctttgtaataatgaaactcccagcaacagtgccattaatatcagggaacaattctatttggatcacaatcccaagatgaccgtttgtggtatttatcacaactataactcattaattcagaagatcatgtctttttcaatgccgtcctccattcttcaatgtaaactccataatgacaaggaccacttggggttgtccttagcacctggcaaagtgtctggaccattgtaaatctaagacaaatctatgctggagatatacttgtatgaagaaatgaataaataaaagacctgggtcagcagttggaaatac

SEQ ID NO: 155673 - DNA, 584 bp, Homo sapiens
ccctagtgccaatgttgagaagccatgttttaataatcaatcaattagatatgttaaacatgacattataatcacattatagtaatgaaatgaccatagagcaggcacccagaggcaaaccttaatgctcaaggggcctggtcaaccccagctgactggagtctggtaacacagcacaggtgaatccgtcagctagtctgtcacatctgctagcctttgtaataatgaaactcccagcaacagtgccattaatatcagggaacaattctatttggatcacaatcccaagatgaccgtttktggtatttatcacaactataactcattaattcagaagatcatgtctttttcaatgccgtcctccattcttcaatgtaaactccataatgacaaggaccacttggggttgtccttagcacctggcaaagtgtctggaccattgtaaatctaagacaaatctatgctggagatatacttgtatgaagaaatgaataaataaaagacctgggtcagcagttggaaatacaaaaacacagtctggagcacaagagaggagtttgtaatattttaagttttttgaagta

SEQ ID NO: 155674 - DNA, 561 bp, Homo sapiens
aattgaagtcagtttttttttgkttttgtttttgtttttgtttttataggggcttactcttttaccctggctggagtgcagtggtgccatcactgctcactgcagcctcaacctcctggggtcaagtgatccttctgccttggcctcccgagtagctgggactaccagcactcaccaccacacttagctaattctagtatttttttgtagagacaagttttttctgtgttgcccaggctggtctcaaactcctggggtcaagtgatccatctgcctcagtttcccaaggtgctgggattataggtataagccactgtttgtggcctgaaatcacattttaaaaaaaattcttatatgtcacattctgaagattattaaaggatagactactaggatttttgtccaaggtggtggcaccaaatacaaatttgagaaggtttaagacattgtgaacaatgacttcagtacatcttataaaatcgatagttatcacacattataaggtggaaaatagcatcacttgatctatgctgaagaaagacgagtgaatactagccaaac

SEQ ID NO: 155675 - DNA, 549 bp, Homo sapiens
tttttttttggttttgtttttgtttttgtttttataggggcttactcttttaccctggctggagtgcagtggtgccatcactgctcactgcagcctcaacctcctggggtcaagtgatccttctgccttggcctcccgagtagctgggactaccrgcactcaccaccacacttagctaattctagtatttttttgtagagacaagttttttctgtgttgcccaggctggtctcaaactcctggggtcaagtgatccatctgcctcagtttcccaaggtgctgggattataggtataagccactgtttgtggcctgaaatcacattttaaaaaaaattcttatatgtcacattctgaagattattaaaggatagactactaggatttttgtccaaggtggtggcaccaaatacaaatttgagaaggtttaagacattgtgaacaatgacttcagtacatcttataaaatcgatagttatcacacattataaggtggaaaatagcatcacttgatctatgctgaagaaagacgagtgaatactagccaaac

SEQ ID NO: 155676 - DNA, 541 bp, Homo sapiens
gtcagtttttttttggttttgtttttgtttttgtttttataggggcttactcttttaccctggctggagtgcagtggtgccatcactgctcactgcagcctcaacctcctggggtcaagtgatccttctgccttggcctcccgagtagctgggactaccagcactcaccaccacacttagctaattctagtatttttttgtagagacaagttttttctgtgttgcccaggctggtctcaaactcctggggtcaagtgatccatctgcytcagtttcccaaggtgctgggattataggtataagccactgtttgtggcctgaaatcacattttaaaaaaaattcttatatgtcacattctgaagattattaaaggatagactactaggatttttgtccaaggtggtggcaccaaatacaaatttgagaaggtttaagacattgtgaacaatgacttcagtacatcttataaaatcgatagttatcacacattataaggtggaaaatagcatcacttgatctatgctgaagaaagacgagtga

SEQ ID NO: 155677 - DNA, 561 bp, Homo sapiens
aattgaagtcagtttttttttggttttgtttttgtttttgtttttataggggcttactcttttaccctggctggagtgcagtggtgccatcactgctcactgcagcctcaacctcctggggtcaagtgatccttctgccttggcctcccgagtagctgggactaccagcactcaccaccacacttagctaattctagtatttttttgtagagacaagttttttctgtgttgcccaggctggtctcaaactcctggggtcaagtgatccatctgcctcagtttcccaaggtgctgggattataggtatragccactgtttgtggcctgaaatcacattttaaaaaaaattcttatatgtcacattctgaagattattaaaggatagactactaggatttttgtccaaggtggtggcaccaaatacaaatttgagaaggtttaagacattgtgaacaatgacttcagtacatcttataaaatcgatagttatcacacattataaggtggaaaatagcatcacttgatctatgctgaagaaagacgagtgaatactagccaaac

SEQ ID NO: 155678 - DNA, 565 bp, Homo sapiens
ttttttttggttttgtttttgtttttgtttttataggggcttactcttttaccctggctggagtgcagtggtgccatcactgctcactgcagcctcaacctcctggggtcaagtgatccttctgccttggcctcccgagtagctgggactaccagcactcaccaccacacttagctaattctagtatttttttgtagagacaagttttttctgtgttgcccaggctggtctcaaactcctggggtcaagtgatccatctgcctcagtttcccaaggtgctgggattataggtataagccactgtttgtggcctgaaatcacatttwaaaaaaaattcttatatgtcacattctgaagattattaaaggatagactactaggatttttgtccaaggtggtggcaccaaatacaaatttgagaaggtttaagacattgtgaacaatgacttcagtacatcttataaaatcgatagttatcacacattataaggtggaaaatagcatcacttgatctatgctgaagaaagacgagtgaatactagccaaacaacatgttcatgctgtt

SEQ ID NO: 155679 - DNA, 503 bp, Homo sapiens
caaacctgtacccaactagactsttatcctactctctcccagtttcttaattcccagagtccaggctcccacaatgaatgaactcgaaaatgagtgattgcttgagcatttcccatgctccaggcaatgagcaattttgcttgctttattgcatttaccctcacactaatactgcaaggtagacttgagactttattttccaaccgaggaaattgtggttcacaaaggtgagaaaattggctccaggccacccagagagtgggcatcagagttagaatttaagctgggcctgtctgactccaaagccagtctcctaaccactgtgctgcatgctgcgtcagctccctgcttctccctcacactctgtgactgggttcagcaaagctgtctccaaagcgtggcccaccgaagtcagggatgacagtagcagtgttttgtgcacaccacttccaaggccagtcattcacatggtcatgccactgatgatactagcgacctctgcc

SEQ ID NO: 155680 - DNA, 551 bp, Homo sapiens
aggatggagtggaatattggaagtgttaagagacaaaagccaccaaccacgaattatgtaccctgtgaattgatgcttcaaaagtgaaagagaaatagagtttctaagatgaaaattgaagacatttctttccagtggaactgcttttcaagaaaaaaatttatttagagaaaaggaaaataatatagattacaaacttggatctagataaagaaagaaaagcatcaaaaaaagcataagtgaaggtaaartaaaaactgtaattgtttttattcttaattggtctaacagaaaataatttgttcaaaatagtaagtgtaataatttattcaaatatgtacatatatacaaacatatatagacatgtatatatgcttagatataagttaaatgaatgacagcaatggtccatggacgggaggaaataattaggattactttgttattataaggtactcacactttccataaagaggtatagggctattagaaagtgaacttggattagtcataaatgtatatcacagactctaaggcaaccactaaaacaa

SEQ ID NO: 155681 - DNA, 599 bp, Homo sapiens
taagtgtaataatttattcaaatatgtacatatatacaaacatatatagacatgtatatatgcttagatataagttaaatgaatgacagcaatggtccatggacgggaggaaataattaggattactttgttattataaggtactcacactttccataaagaggtatagggctattagaaagtgaacttggattagtcataaatgtatatcacagactctaaggcaaccactaaaacaagtgaagaaaagtataactgatatgctaagaaatgagagaaaattggaatcatataaaatgctcaactgaaaccacaaaaggcaggaaactgcaatgaataactttcacaaataatgtttgtctttttcttgttcacggccttagagattgtacttttctgggttgaccctttgtaccctgtcttacgcttcacttggatccatagaccactgctagtccagagccyttcatgggcttgctccagtccctgctagataagatgaaacacttagaattatgatagggtaggaatgaatcagtgagtgaaggaataaatgaatacacaaatgaatgtctttattttacacatgggaaaatgat

SEQ ID NO: 155682 - DNA, 452 bp, Homo sapiens
ccttcctttaaaactgaatagtactccatggtatgtacatgttatagtttctttattcattcatctcttgaggggcatttatgttgcttctactttttgactattgcaattattgctgcaatggacgtggatatgcaacaatctctttgagaactttctttcaattcttgtggatatrtactcaaaactgggattaatttttttaattgccatgctcatttccatagagttgcataatgttatcttcctaccaaaaatacacaagggtttcagtttctccacattctttaccaacactagttatttgcttaaaaattattcattaatttttattgacacataataactgtagatttatggagtacaagtgaccttttgatacatgcatacaatgtgtaacaattaaatcagagtatttacaatatccaccactttgaatattttgctggaaa

SEQ ID NO: 155683 - DNA, 452 bp, Homo sapiens
ccttcctttaaaactgaatagtactccatggtatgtacatgttatagtttctttattcattcatctcttgaggggcatttatgttgcttctactttttgactattgcaattattgctgcaatggacgtggatatgcaacaatctctttgagaactttctttcaattcttgtggatatgtactcaaaactgggattaatttttttaattgccatgctcatttccatagagttgcataatgttatcttcctaccaaaaatacacaagggtttcagtttctccacattctttaccaacactagttatttgcttaaaaattattcattratttttattgacacataataactgtagatttatggagtacaagtgaccttttgatacatgcatacaatgtgtaacaattaaatcagagtatttacaatatccaccactttgaatattttgctggaaa

SEQ ID NO: 155684 - DNA, 398 bp, Homo sapiens
tatgtttgcatataacaggctgatagaaattgtaaagaaccaatgaaggaagatgatcctttgggtgtttagcaggcagagtgctttcattctgcatattctcccctcagctgtgtaacacctttgctcggtgagccatgctctctgattgctataagaagcaccttgtttttcatgctacctttagcaaagtctgcaatttgctacattgctaaaaaagctccctccttttccacttgcaggtgatgagtctatgaagcaaggtgttctctttatacaactatctggacccccggtacatttgaaggctgaatgcctttgttgtggggaagagctgctccgacagagaaatggctttccttgagaaaatggctcrctgctgaagaagtctccattat

SEQ ID NO: 155685 - DNA, 534 bp, Homo sapiens
atggaacttagcaaataggaagaactcattaatgttataattattctggtgattaccaaaagtgtaatttgaaatgcagtttcatttcaggagcaaagctaaagtccagctcccctcactgggattcatgtctgtcaatcattttcttggtcctaagccacctaatctggagccttttaaattgctcatgctaatttgagatgtgtaaggtggggtgaagcttgtgcagagagaaatagatgcttgaggtatgggttaaaaagagatgtagaaggtagaaaataatactcttaatcactctgatgcatgcccttgatagcatttgtcttctagggaatctggtctattcacaggatatgtgtgttaccctaaattatcaggtttgtaagaaagctgagagataaagaagggcatctttaaacattctagaatggctattttctttcccagaagcataatctatgtgacmaatttatctattttagtaatgtgactaatttacctattaagttcacttaatgaaattaatagcat

SEQ ID NO: 155686 - DNA, 635 bp, Homo sapiens
ctttgtcaaaaataagttggctgtaaatgtgtggatttatatctgggtcctctattctattccactggtctatgcatctgttgttatgtttgtaccatgctgatttagttactatagctttgtagcatattttgaagtcaggcaatgtagtgccttcagctttgttctttttgctcaggattgctttggctcttcagggtcttttgtggttccacataaattttaggatttaaaaaatatctgtctgtgaagaatgtcattggtaatttgatagggattgtattgattctataagttgctttgggtagtattatattaacaatattaattcttcaaatccatgagcataaaacattttcaatttttttttgtttttccaatttctttcatcagtgttttacactttccttgtgtaratcttttactttggttaaattgactcctggtgatttgtagtgattagaaatgggattgcttccttgatttcttttagatagttccctgttggcatacataaatgctactcattattgttatgttgaatttgtatcctgcaactttgtgaatttttgcatttgtcgtaatcatttttttttttttggtgaagtctttagatttttctaaatgtaaagcca

SEQ ID NO: 155687 - DNA, 635 bp, Homo sapiens
ctttgtcaaaaataagttggctgtaaatgtgtggatttatatctgggtcctctattctattccactggtctatgcatctgttgttatgtttgtaccatgctgatttagttactatagctttgtagcatattttgaagtcaggcaatgtagtgccttcagctttgttctttttgctcaggattgctttggctcttcagggtcttttgtggttccacataaattttaggatttaaaaaatatctgtctgtgaagaatgtcattggtaatttgatagggattgtattgattctataagttgctttgggtagtattatattaacaatattaattcttcaaatccatgagcataaaacattttcaatttttttttgtttttccaatttctttcatcagtgttttacactttccttgtgtaaatcttttactttggttaaattgactcctggtgatttgtagtgattagaaatgggattgcttccttgatttcttttagatagttccctgttggcatacataaatgctactcattattgttatgttgaatttgtatcctgyaactttgtgaatttttgcatttgtcgtaatcatttttttttttttggtgaagtctttagatttttctaaatgtaaagcca

SEQ ID NO: 155688 - DNA, 564 bp, Homo sapiens
tagaagcagtcagaaagaaaataaatcacctatttaraaaacaaacagataaaagtttaattgacagaattttgatagcaaatgtcctctgccagaaggcagtaaaaaatatgtatacaactgataacttacacatgtggatttattcaagttatctttaaaaaacaaaattgcaagaggaaaatcaattttcagttaaattagaattgagaaaattaactgtaacagaacttattgtgaagcaacttccaagtttatattccaagaaaagaaaaataaactcagaagtgatacctgggattcacaaaggaatacgcaaagaaattggtaaacgtgggtgaacctaaaagaatattttccacacataatgttaaaaatatttaatttgcagaataaaatctataagtatgtaaaattgggataagaataaaatataagcttgagggggtgattagagccaaaagcattctaaagtgtgtacattttcaggagaatgtatataggataacaataattttagatttttgaaagatacttataaaaactttcaagcacatacaacaa

SEQ ID NO: 155689 - DNA, 629 bp, Homo sapiens
gtctgccttttctttacatagatgatctcattgccctccaagaacatagtcacgtttagtccttattatcgacacccataggccactttgcacaaagctgcacgatgaggctcaaaatgaaaggcactccttcattaaattatttctatttaataaaaggaaaatgtattcrtaataatggtatcgtaattggattctcacctgagagtagcttgtaagaattattgccttatttagttttccaagcatttaacatttaattctttggtgccattcctcccactaccctgctttctccatgatctagatgggattggcttgcgttcagatcacctgcagcctatctgctagaggttagcagctccctcatgacaccagttaaccactgattcacaaacagaatattttattttccagtaagttaacattgaaaagccgttttatcattaacatgcataaaattttgtgccagattaatgttctccaaaatgtttttatttcagaacttcatgtaatataacgtttccccataatatttctattgtctcattttagtcctaatctcaccgtcatctccgataagtaccaaaatcttatatttaacagtccatccagccagtgtcatctca

SEQ ID NO: 155690 - DNA, 423 bp, Homo sapiens
cttggccttagatttcaaaacaaacacaaaaaccataagtttgccaaaggtaacacctctgcagatcaggttaggcttgtgatttccaaccactttgcagacatccggagacaaatgggatagatctagctaatattttcaaattttattttataggtatagtccaaagaaatttggcaacttgccatgatgtcacgcaataatttcttgattgaaccaggcaaaaatgcaaatcaactaaatctctactgagagttattaagaaggcatgaaaaataataagttgctttttcatgtgatagtttaaaaagcattttcatgggtattttctcattgccaattaaatcctaaggccygatcatggcggactggggaaagaatgactcctcatgttttatgatttttctctttagtagttcccca

SEQ ID NO: 155691 - DNA, 561 bp, Homo sapiens
ccttccattctacttgtacttcagtcacacactcccactgtcacaccctggaacttgtccttagtgaaaacttcaccttctccattcaaacagggttgagtatcatgctaacaactacccctatttttccagttcgcttcctttcttattctggctccaagaataatataatctgaccagtgcctgcaattcattgatacttaactcgtcagaatcctaaatacttgctgagttgtcatatatttctttgtacaagttaggttccatgatctattcaaaataaccagccaaacaaaaaaccttacttggatattttttctactccactgcccctttctcttttgcttatttgactagaaaaatctcaacttcagttaaaaccaacattttatctactctgctcctgtccagctgaatgtgattggataaaactataaatatcatgcagactgatttcatagtatgttcatgactagtaatctcaagtggactagtggtgtgcacagaaatcctacakttccctgctccactctttcattctcttaacaaataattcacaac

SEQ ID NO: 155692 - DNA, 567 bp, Homo sapiens
atatttttatcacagtgaatttatgagagtcttgttggacaatgtggatactatttacctgcaacctcttaaatttgtatgcctaatgagaagtcttatggtaataaacattatttaagggaattaatcattgctgagggatcttttcactttgccaaccttggaagttggctagaattaaagacttggaaagatatagctattctactgctgacatttctgcagcaccccctgtggtacagattcactttgcattttattctttcctctatgatcacttctttcaatcrttacatgtcctcatctatgtgttgggatcccagtggtttcactgggtttctttcatagtagtaaaaaataatctttcatgaagaagacaccctatatgacaccaacactttttcctatttttgaattaactgcctatgaagtctttaaaactgtcaatgaaacaataggttttctacagcctgtagcccatattgctcttttatgttatttttgtggttttcctgtcaaatagtttttggtgtttattttctttaagcatcactaggcatttgttag

SEQ ID NO: 155693 - DNA, 581 bp, Homo sapiens
ctctgttcatctttataagacctgtatgcacctagcaaattcctgaagtatgaatgaataaaagaagaatgagttaacaatatacaatgartatgaatcattaacattttcaagtttctgtgacaaaatttgtgacagtctttactgtaagcaagcaaattcaggtgtaggttttacataatgcacttttatttatttgttataaatgggctaaaattaagaatctcagttacagataattactcatctatctttttctacatttcatatgttcactaaggacaaaagctaatttttacttacctttctgtaatcagcaattagtacagagccagaaatatagcaggtactaaataaatcaattatggagtacaagaacagagggaacattttgatctctggttaggaaatccaaagtgcccttcaatctcatagggcatgacgttgtaatggaagcaagtccagatattgtttttggaaataaaacacataacactatggtgtaaagatttgtacagcagtggaaaagctatagggaatagagactataaaccctctgttttagtttgccaagacaaaga

SEQ ID NO: 155694 - DNA, 452 bp, Homo sapiens
gaagtaacctatatggtatataggaaatgaggtggcttttgtataaatcctacagataaatttcatttcctgatcctattattttgactcatrttagcccaagaagagtattcagtacttcatatccctgaaggtaagacagagtggtattagattcactatttggcaaataaaagggatcaagtcctaagatcaagctgatgaatcaacacctcataggatatgtcccaaccaattatatggcttcccctataaataaaatctagttctcttctctggagaggaacagtgaagaatatcataacctatgctacaaactgcttgagtaggagctacttctctccaaggctttatatcattcattctggcaggcccctctgtttgttctcaccagctcctgggaaatttatttctcctctagtgatataaaagctctctgtttgagatgaagg

SEQ ID NO: 155695 - DNA, 452 bp, Homo sapiens
gaagtaacctatatggtatataggaaatgaggtggcttttgtataaatcctacagataaatttcatttcctgatcctattattttgactcatattagcccaagaagagtattcagtacttcatatccctgaaggtaagacagagtrgtattagattcactatttggcaaataaaagggatcaagtcctaagatcaagctgatgaatcaacacctcataggatatgtcccaaccaattatatggcttcccctataaataaaatctagttctcttctctggagaggaacagtgaagaatatcataacctatgctacaaactgcttgagtaggagctacttctctccaaggctttatatcattcattctggcaggcccctctgtttgttctcaccagctcctgggaaatttatttctcctctagtgatataaaagctctctgtttgagatgaagg

SEQ ID NO: 155696 - DNA, 416 bp, Homo sapiens
catcaacaaatagggcagtggaaaacatggtaatcactaaaaatgctcacatgtcatatattaagacttgataagtaaaccacaataataaatagaaaagaaatagttgtctaaaaagggattctcacctttcaaaccttaccataaaaatggaatataaaagaaggaagaggaggagaaatcaaattatatcataaaattttctgggcraaaatattacagaagaaaataagaaagatttatggagttgactgaaacatttttgaatcctatacataaaaatatcgttaattaaaaggaaaaacaaagaaacagatttgggaaatatttgaaactgtttttttttttagcatttaaaaatgtaatacaaatggattatttaaactccattgcaaaaatacacaaaggacattgac

SEQ ID NO: 155697 - DNA, 615 bp, Homo sapiens
tttaaggaatgggatcaacggatcttggtaatttattcaatgaggagaggaggagttatgaagaatacttagatttctggctaaatggaaggatggtggtgctatctacygaggcaaagagcactgaaggagcagcaggtctgagacagaagacaagtgcaaatttggagaagttaggtttaagatgcaaaacagacatccaaagatatccacgtggagttctctcttggtagctggatatacagagcctggcctggagacctagatttgacagttattagctattagcacattaataaaaattacagctagagtatgagatgattttctatatattttaaataggatgcatagaatcataatggaagagagcttaggatatcaacaattaacaaatggatacaaaagagtgaatttacaaaagaaatattgaaaaaatgtttcaaaggaacagaagaaaaaccaagaatgtatgatgtcacgaacattagaaaaaccggatgtttcacataggaagaaatgaatatcagcatcaaatgctgtttccatgtctgtctaatacaataagaattataaacgttttactgaatttagtgtcatgtaagtttctgctga

SEQ ID NO: 155698 - DNA, 615 bp, Homo sapiens
tttaaggaatgggatcaacggatcttggtaatttattcaatgaggagaggaggagttatgaagaatacttagatttctggctaaatggaaggatggtggtgctatctaccgaggcaaagagcactgaaggagcagcaggtctgagacagaagacaagtgcaaatttggagaagttaggtttaagatgcaaaacagacatccaaagatatccacgtggagttctctcttggtagctggatatacagagcctggcctggagacctagatttgacagttattagctattagcacattaataaaaattacagctagagtatgagatgattttctatatattttaaataggatgcatagaatcataatggaagagagcttaggatatcaacaattaacaaatggatacaaaagagtgaatttacaaaagaaatattgaaaaaatrtttcaaaggaacagaagaaaaaccaagaatgtatgatgtcacgaacattagaaaaaccggatgtttcacataggaagaaatgaatatcagcatcaaatgctgtttccatgtctgtctaatacaataagaattataaacgttttactgaatttagtgtcatgtaagtttctgctga

SEQ ID NO: 155699 - DNA, 548 bp, Homo sapiens
actgttaatatcaaatagcacaaacagaaagctttccttatttgaggagaggaaaagaagatgtgtctctgctattgaagttatggaaaacaattaaagagaaacatatttgaaaagtactattagggtgtcttgcacaacataccttaaagagacgtcttattacaccatctaagacatcccacttggtttttccactaacaccaatggatcctatcaaatatgcctgagatttttggtcctaaataagaacaaaataaagtaagataaaatccaaccgtgtatcttttttattactacattttctactaaaattagttaatgtagttgttgttaagactaaactatttgttaaacctgtggcttctatagtaacmgacacacatggtggattatataacataaaacatatttcagccaactaaccaaccaaacaaataaagtaacagcaatagcaacagcaacaagaaagaaagagatgagataaagcagcatgtcgaggaaaactgatccatgacctgttctgtagaaggcaaaggtgaaggaat

SEQ ID NO: 155700 - DNA, 584 bp, Homo sapiens
gccaaattgtccacggtttatattcacctcacttcctctagagttcaccttgcagaaacatgaaagagtgtggaattacaaatcaagggaatgaaggctgatcagtattttaaaatattacctgtataaacattttttaagayaaaaagatatttctttcattatttgtagaaagcactccagtaaaatcctctgataattatgtctggatttcatcaagagttgtatttactcaaaatctacatttttttttttttggtattaaaagaaatcattgactccattgtttttaaattttttgcagtaacagtatcttcccctgggctatttagctattgatcaatatcataaattatatcactagcaaacttaaggtacagttctgttaaagtgcatttctatatttctgctatattctcttggttaaaaacatcaagcagacactaatgtggttgatttcttttagggtgaaactattcacacggtaagccctgtcgattccaaaggtggaatgagagtttcattgtttattctttccctttattaactcccattctcctccttttcctccaagaccactatca

SEQ ID NO: 155701 - DNA, 584 bp, Homo sapiens
gccaaattgtccacggtttatattcacctcacttcctctagagttcaccttgcagaaacatgaaagagtgtggaattacaaatcaagggaatgaaggctgatcagtattttaaaatattacctgtataaacattttttaagacaaaaagatatttctttcattatttgtagaaagcactccagtaaaatcctctgataattatgtctggatttcatcaagagttgtatttactcaaaatctacatttttttttttttggtattaaaagaaatcattgactccattgtttttaaatttttygcagtaacagtatcttcccctgggctatttagctattgatcaatatcataaattatatcactagcaaacttaaggtacagttctgttaaagtgcatttctatatttctgctatattctcttggttaaaaacatcaagcagacactaatgtggttgatttcttttagggtgaaactattcacacggtaagccctgtcgattccaaaggtggaatgagagtttcattgtttattctttccctttattaactcccattctcctccttttcctccaagaccactatca

SEQ ID NO: 155702 - DNA, 413 bp, Homo sapiens
actatattcatgaatttgttttctaaaaagatcaaattttgaacttactaggagatgcctcacatatcgtgtgtgtatgttagtgtgggtatatgtgtatgtatatatatacatacacatttggtatttttctatacttgtttgatgagataaagatttacaatttttagatttttaatttcaagtatgtatttgtaaactatcaggaattatagtttgttgcaattatgaaatattttgtcagttaggttttcctgctgacaagatagatgataaaacctttttactgaaactatgcttctttatgaarcttaattaaatatccaggagttccttactttttacagaacaaaactctatcatttgtttctctaagagtatattttactctaacgtcagacacgttggactag

SEQ ID NO: 155703 - DNA, 554 bp, Homo sapiens
aaattgagaaacatcccatgtttatggatcaaaagaattaatatcattaaaatgaccatacttcccaaagcaatttccacattcaatgcaatttctaccaaattaccaatgtcatatttcatagaattagaataatcctaaaattagtatggaatgagaacagagcccaaatagccaaagcaattctgaacataaagaacaaatctggtcctgasttaatcactatgcaatctatgcatgtaacaaaattgaacatggactttatcaatttgtacaaataaaaaaatgtaaaaaaagaacaaagctggaggctatagtagccaaaacagcatggtatttttagacaaatggtatggaatagaaagctcagaaataaagccatatatatatatatattgtgtgtgtgtgtgtatacacacatacatgtatatataatgtgtatatataatgttttctacatgttctaatatttatattccattccattatacatattccatttctgtatataggttatatagaattggaagactatctgccattaaaaagaatga

SEQ ID NO: 155704 - DNA, 554 bp, Homo sapiens
aaattgagaaacatcccatgtttatggatcaaaagaattaatatcattaaaatgaccatacttcccaaagcaatttccacattcaatgcaatttctaccaaattaccaatgtcatatttcatagaattagaataatcctaaaattagtatggaatgagaacagagcccaaatagccaaagcaattctgaacataaagaacaaatctggtcctgagttaatcactatgcaatctatgcatgtaacaaaattgaacatggaytttatcaatttgtacaaataaaaaaatgtaaaaaaagaacaaagctggaggctatagtagccaaaacagcatggtatttttagacaaatggtatggaatagaaagctcagaaataaagccatatatatatatatattgtgtgtgtgtgtgtatacacacatacatgtatatataatgtgtatatataatgttttctacatgttctaatatttatattccattccattatacatattccatttctgtatataggttatatagaattggaagactatctgccattaaaaagaatga

SEQ ID NO: 155705 - DNA, 554 bp, Homo sapiens
aaattgagaaacatcccatgtttatggatcaaaagaattaatatcattaaaatgaccatacttcccaaagcaatttccacattcaatgcaatttctaccaaattaccaatgtcatatttcatagaattagaataatcctaaaattagtatggaatgagaacagagcccaaatagccaaagcaattctgaacataaagaacaaatctggtcctgagttaatcactatgcaatctatgcatgtaacaaaattgaacatggactttatcaatttgtacaaataaaaaaatgtaaaaaaagaacaaagctggaggctatagtagccaaaacagcatggtatttttagacaaatggwatggaatagaaagctcagaaataaagccatatatatatatatattgtgtgtgtgtgtgtatacacacatacatgtatatataatgtgtatatataatgttttctacatgttctaatatttatattccattccattatacatattccatttctgtatataggttatatagaattggaagactatctgccattaaaaagaatga

SEQ ID NO: 155706 - DNA, 554 bp, Homo sapiens
aaattgagaaacatcccatgtttatggatcaaaagaattaatatcattaaaatgaccatacttcccaaagcaatttccacattcaatgcaatttctaccaaattaccaatgtcatatttcatagaattagaataatcctaaaattagtatggaatgagaacagagcccaaatagccaaagcaattctgaacataaagaacaaatctggtcctgagttaatcactatgcaatctatgcatgtaacaaaattgaacatggactttatcaatttgtacaaataaaaaaatgtaaaaaaagaacaaagctggaggctatagtagccaaaacagcatggtatttttagacaaatggtatggaatagaaagctcagaaataaagccatatatatatatatattgtgtgtgtgtgtgtatacacacatacatgtatatataatgtgtayatataatgttttctacatgttctaatatttatattccattccattatacatattccatttctgtatataggttatatagaattggaagactatctgccattaaaaagaatga

SEQ ID NO: 155707 - DNA, 614 bp, Homo sapiens
acatcgttagtcatcagagaaatacaaaataaaatggtaatgagatactactagataggcttttacagagactgacaataccaagtattgacaaggatatggagcaactgaaattctcattccttgtggtaagaatgtacaattatataaccacattgaaaaaacaagttttcagtttctttattcacccaaaatatatgtcttttggaaaaawttttttccagtctgtgggttgtcttctcattctcttgatatatgtcttttcaaagaggctgagctttactttagacagtggtcatcaaagtgtgtatatttgtgtttttataatttatatgcatatattcctgtgaaaagatactgtatgcattgttcaacatgtacaaatataagaaagatatagtaaagaaatatatatttctaaatttataaatgtatttattggtgttccacgttgcaaactaaataatctacgttggctaatttaaggaattaaactatagtagaaggttctcatttattgggatgattagaaccagcctttttgcaggctattagcgaatcatagcactagggcttcactgctacctccactgacacctctgacacttgaaact

SEQ ID NO: 155708 - DNA, 266 bp, Homo sapiens
tgcttttccagaaaaaaaattatatgtgtatatatatatatgtgtgtgtgtgtatatatgtgtatatatatatacatatatatacacatatatacatatatrcatatatatacacatatacatggaattatattcgatatatagatatatttaattatttatatataattatttcatagaatattgtggaataaaaatatttctgaacatggagacagcaactgaattttagcatatgttaagcaaatgcattaaatttgagaaga

SEQ ID NO: 155709 - DNA, 391 bp, Homo sapiens
tcaaggctatgtcttttctattgcaacccttcccactatattgagtagggcttttagcaattgaaaacaattattttggtcatggtttcatataagctaatgatttcatatcaaacaccaagtttttgtttcctaacctatatagtgataagagaatttacctataatgccaaagaatgtatagcttttatttgctttaagatgcagttgattttttaaaaaagcgaaaagcctaacactttaacttcaaaaaatgaatttaaaatgtttgtgtaggtcataggaatatgaaaaaattttatacaacatctaaaacacacccaaatcacytaaagtgctataagcttgctaagtacttcatgtctcctatcaattctttcattaattgacg

SEQ ID NO: 155710 - DNA, 596 bp, Homo sapiens
tgtccttgctgaagcttttttaactatagacaattgcagcagattttaaaytgatcttactctgtcgactcccttatgtttcaacattttcacccattggaaggtataaaagaagatattcctgtccgtgtcaacataatctcatgtacctctccagatcttagaaacacgtatggcttcaaatcaggcattttgagatctttatgctgtatggttttagagtgttatatatgcttgttctaatatcataatatttaaagatgtttttattgtatttacatttcactcttaatctctgttcattgggcaagaaaatgagtactcttaaaatgcaataataaattaaagttactttattattaaattttaaatatatatatatatacttaccttaaatatgtcctcttgttgtcttttagcatcacccatttttgatttgaccattatcttttctgaataatcagtaagatacaggattattattaatgttcaaaagttgcagtattcatgttttctttattctttctaccaattaaaatgtgttaatatataaaatttttagaaattttactataaaaaatcacaacatatattag

SEQ ID NO: 155711 - DNA, 596 bp, Homo sapiens
tgtccttgctgaagcttttttaactatagacaattgcagcagattttaaattgatcttactctgtcgactcccttatgtttcaacattttcacccattggaaggtataaaagaagatattcctgtccgtgtcaacataatctcatgtacctctccagatcttagaaacacgtatggcttcaaatcaggcatttkgagatctttatgctgtatggttttagagtgttatatatgcttgttctaatatcataatatttaaagatgtttttattgtatttacatttcactcttaatctctgttcattgggcaagaaaatgagtactcttaaaatgcaataataaattaaagttactttattattaaattttaaatatatatatatatacttaccttaaatatgtcctcttgttgtcttttagcatcacccatttttgatttgaccattatcttttctgaataatcagtaagatacaggattattattaatgttcaaaagttgcagtattcatgttttctttattctttctaccaattaaaatgtgttaatatataaaatttttagaaattttactataaaaaatcacaacatatattag

SEQ ID NO: 155712 - DNA, 614 bp, Homo sapiens
ttcatgttttctttattctttctaccaattaaaatgtgttaatatataaaatttttagaaattttactataaaaaatcacaacatatattagaaaattaagatcactacaatatgtcatatttagtagactactgtgagctactgccacagtaaactatggttcgtgtgtcgttcccagcatgctarccctagtagaaaccattcccattcaagaaagactaacaaagtatagcttacataaatcaaaaagtctttggatgaaacttcatttgggaaaataacccaatcgctacccttcaattttttatgaatgaaaaaatggaagaataaaggcctctaagatccattcaaagccaggagacacacaagaatttctaaatagaagagaaacagaagaggtcatagttcttgtgagccatctcataacctggtgagactcattgtcatgcctccatgcatgataacaatcgctcagattcatttttcatcttgccacaagggttacatgcaggaacattaatgtcaacctgtcacttctaatatccatctaatattctctaaattcgatggatccttttgcatatggtgattgttaaacacctttgcataggaa

SEQ ID NO: 155713 - DNA, 614 bp, Homo sapiens
ttcatgttttctttattctttctaccaattaaaatgtgttaatatataaaatttttagaaattttactataaaaaatcacaacatatattagaaaattaagatcactacaatatgtcatatttagtagactactgtgagctactgccacagtaaactatggttcgtgtgtcgttcccagcatgctaaccctagtagaaaccattcccattcaagaaagactaacaaagtatagcttacataaatcaaaaagtctttggatgaaacttcatttgggaaaataacccaatckctacccttcaattttttatgaatgaaaaaatggaagaataaaggcctctaagatccattcaaagccaggagacacacaagaatttctaaatagaagagaaacagaagaggtcatagttcttgtgagccatctcataacctggtgagactcattgtcatgcctccatgcatgataacaatcgctcagattcatttttcatcttgccacaagggttacatgcaggaacattaatgtcaacctgtcacttctaatatccatctaatattctctaaattcgatggatccttttgcatatggtgattgttaaacacctttgcataggaa

SEQ ID NO: 155714 - DNA, 598 bp, Homo sapiens
tgactaccaggtgaggactctttggcaataagcaataagaaaataaattgttattaaaaattacagacttaagatacttctttggaaatataacatgtttgtgacttttgaccatctcatcatgatatgctcatcttaaacagagtagaaaatcatttcatataattaactttatggtgggctgcagataccatgtatgttacattgtgtttagttataaaaatgtttattatacactatttccttataatctaactttgataataatgatggtcctaatcatgaacttacatcaattaagagcttgaagtgactgagagtatttgcctggaagcatttaaagcccttcttgggaaatttagatgttttatattttactttctttttgattttgctttttccattaaagtgattactatttttaaagagaaaaccgaaaactctagaaagaccatcttttcttcataacaggtagcagaaaacaccatgttattacatttctagcaagagcagtagaggtgacttgttggttttgtgtactgttgctttagaaattgacgtaaggcttsccataaacgtgccagaggaaaagagggac

SEQ ID NO: 155715 - DNA, 589 bp, Homo sapiens
taggttaggtatagggtaatgcctagagataatttcactccccagcaagcacattaacaattctcttaatttttacctacttacagacttagtattatataacatgtcttcttttagcagctattgggaatactgcttaactttcagaaaatgctgccagattgatcactattttttattttttatttttgtaatttttatttttttgagatgcagtctctctctgtcacccaggctggagtgcagtggcatgatctcagctcagtgcaaccttcacctccagggttcaagcaattctcctgcctctgcagatgtttcctttgagaatgcacatgacattgtactgagtctaatagcatgataattttctgccttctaagttattcatacatgtcttttctttcttaccaggctataagtatataaaaccagtgttctgccacacaaatttggcaagagattcmgtgttatttggcatctggaaataggaaaagtgttaggagtgaatccctctctattcaagggagttattttggtctataaatcaaatgacaattttgatgtagtttcaggctattaatgccatgtg

SEQ ID NO: 155716 - DNA, 573 bp, Homo sapiens
tatactttcatgatgacctttgcagatattgttagctgctctattgtaatgatacgctccatcaagtgtcagacatctgctgacagctagaacattatctttactctttttctacttacaaagaattgaattgaaaagagttatctttactttccaaactcttttcaataaaagggcttttctacttcatattcccttcaatgaaggaaatacaggtaagccagttagaaataataytccatcacattttatttcacagtaagcttttgtggctttcaggttttattttaaatattagagaattatacatattgtagtacataactataactcttaagattaagaagtatttgacgattttattaaagctcaaaaataggccagtttccatttgcatgcccttatgcaacaacttgaacccaaaatgttaaaatgaagaggcacttcaatctctcaccacggcctgaggtagaactgcaagtacattatctcaaacttataaaattttattgtgtccctaaaaggatataaggatttaatattttgcaaactaagtctataataaactatacc

SEQ ID NO: 155717 - DNA, 573 bp, Homo sapiens
tatactttcatgatgacctttgcagatattgttagctgctctattgtaatgatacgctccatcaagtgtcagacatctgctgacagctagaacattatctttactctttttctacttacaaagaattgaattgaaaagagttatctttactttccaaactcttttcaataaaagggcttttctacttcatattcccttcaatgaaggaaatacaggtaagccagttagaaataatactccatcacattttatttcacagtaagcttttgtggctttcaggttttrttttaaatattagagaattatacatattgtagtacataactataactcttaagattaagaagtatttgacgattttattaaagctcaaaaataggccagtttccatttgcatgcccttatgcaacaacttgaacccaaaatgttaaaatgaagaggcacttcaatctctcaccacggcctgaggtagaactgcaagtacattatctcaaacttataaaattttattgtgtccctaaaaggatataaggatttaatattttgcaaactaagtctataataaactatacc

SEQ ID NO: 155718 - DNA, 580 bp, Homo sapiens
aaaatccttgattatatttaaaatatcctataaataagtaattttaccaagtccctataatcaatttaagtacatgcatgttaaaaatatgtgtatattacatacattaacagatattaattcagatgaaatgaaacattctgaatgaaatttaaacacagcacttcttacaactgaggaaaaatcaagtattaactaaattatttgatggctgattatgatgcatgaaatctaaaatgacattataaagcaaacacaaagaaaatgaatgagttcaaaatgacttgtaattaataggtgacttgasagtaattcaaattcctggatatgtaaaaatgattatttccttaagaacaaaaatgtccagatatatacaaaattttacccccatagttataacaatattattaaaatgtttaaaatataactgacattaaaattgtttaatagtcatttatatacatatctatttatataaattcccagatactgcattagtctaaaagagaattttaataaacttttttttaaaagtagatgttaatgcatatcttcattacctgtaccttttgactgtcat

SEQ ID NO: 155719 - DNA, 619 bp, Homo sapiens
tgcatttccagtttttaactattacaagtaaagctgctatgagcattcgtgtacatgtctgtgtgtgaacacagttttcatctctctgagataaatgcccaaaagtgcaattgctggatcatatggtaaaagcatgtttagtttttaaagaaactgccatgtgctttcccagagtggctggccagtttacatgccaacctgcaatgtatgagtgatccagtttctctgtatcttcatcagcatttggtgttgtcactacttcttattttgccattgtaataggtatgtactgatatatttttgtggttttgatttgcatttcctaatggctaacgatcatctttttcatgtgcttgtttaccatctgtacagcctcatctgtgaaatrtctgttcacaccttttgcccattttctaattggattgtgtgttatttcactgctgacttttgagagtctttattaatctagatactagtactttatgagatatgtggtttgcaaatatttcctcctatccactagcttgtctctttgtccccctcacagggtcttccacagagcaaagttttcaattctaacgatgtccaatttaccaatttttctttttctggatcatat

SEQ ID NO: 155720 - DNA, 534 bp, Homo sapiens
caaaacaaagttcatgttcactgaaccatcagaaagcaaaggtgccctgtctcagccacgcatgtggacggtctgtggtggtttggcatcactgtcattcctgactgaactgatacgctaccaagaatcattgttgacatgtgtacaaacagaagtatttcacagtaaaaaaaaatgacataccagtcatacagtgaaaaaatattacgttaagggtaaggaagcacagtagcatcgccagaacagctgggggtgctgaggaaactgccatgagcctgtgttttgagtgtgacccaccacatgaggtcagatgtggaattttccacatgtggcatcctgytggtgtttaaaaagtttcaaattttggagcatttcagattttcagattagggatgttcaaagaatatatacatatataattttggctcttaaatcagattttgccttcataagcaaatcagcaaacacagtcaccactaagcactcacttcatgtgtgactcacactgtgaagggatttcaagtcttttgacag

SEQ ID NO: 155721 - DNA, 444 bp, Homo sapiens
gtgggagccagaaaatcaaactgaagccccagttcaatctcttcctacctgtgtgacttttggtaagtcttttagcctctgcccaacagttttcacatctgtaaaatgaagatgccatgaggttggtttttttttttaacctactttatggattttgtgaggacccagtgaaatgttttagagaaggataaagaaaggctaaatccatatcctctaggatttcaaaccctcttcataaaaatccacttacaagaattggaaacaacacaggggggaaagcaaagggtatgaaaatgaagccattttaagcaacaagcgtattgccacacatagccagactccatacattatatttcttgaatgaataaaaagaaggtatagctgattctgccaccatttactattctgtgccttgggaaawctcaaacagccttacacttgggt

SEQ ID NO: 155722 - DNA, 505 bp, Homo sapiens
ttgtaagaaacttcccaactattttccaaagtggctgtatcatttttcattcccaatagcagcgaatagagttcctgttgctccacatcttagccagcatgtggagaagtcagtgttctggattttggtcattctaataggtttatagtagtacctcattgttttaacttgaatttccttggtaacgtatgatgtggaggattttttcatatgcttatttgcaatctgaatatcttgtcttgtaaggtgtctgttaaggtattcagctcactttttaattgggytgtttgtgttcttattgttgagttttgagagtccttgtgtattttgaataacagtcctttatcaggattaaagaagaaaaatcatacgatcatatcagtagatgtaggctcctttagctcagaggagtttgttattacccaccgtctgaagcctacttctgtcaattcgtcaaactcatcatccgtccagttttgttctcttgctggcgaggagttgtgat

SEQ ID NO: 155723 - DNA, 517 bp, Homo sapiens
ttttgacaaacatttagaaaycaaattaagaaaatttatatttatctactaaagatcacttattttagaatatgaacaaatgatttacatcctctagcatcattttaaataaacattctagaatcaaattttattagaattatttttacataataaaaaaatacttgtttgatttcttaaaataccctgaagagggaaacagtaattcaagttttagtagcttttcaaaaagattaaactctaaagagtttctgaatattatttggaagtgcaactttaggtattgtgattttctgcttttatcaatactaaaacatcaaagagaagaaaaattcccttaccagttaagaaaatagggagaggaggatagttttccatggctgcaacacaaagtttatttaaaacacacacacacacccccgtatgtgcacacacacatactccctatgtggacatagacataatttctttgctggaatctgcccaatgtacaaaattaacttctttatgttagcca

SEQ ID NO: 155724 - DNA, 517 bp, Homo sapiens
ttttgacaaacatttagaaaccaaattaagaaaatttatatttatctactaaagatcacttattttagaatatgaacaaatgatttacatcctctagcatcattttaaataaacattctagaatcaaattttattagaattatttttacataataaaaaaatacttgtttgatttcttaaaataccctgaagagggaaacagtaattcaagttttagtagcttttcaaaaagattaaactctaaagagtttctgaatattatttggaagtgcaactttaggtattgtgattttctgcttttatcaatactaaaacatcaaagagaagaaaaattcccttaccagttaagaaaatagggagaggaggatagttttccatggctgcaacacaaagtttatttaaaacacacacacacacccccgtatgtgcacacacacatactccctatgtggacayagacataatttctttgctggaatctgcccaatgtacaaaattaacttctttatgttagcca

SEQ ID NO: 155725 - DNA, 532 bp, Homo sapiens
attattcagatactcaggaagaaaggtgaactaaggtagggtgagaggtattagaagtctagtcttttaccttctatttctctacagcaatattttagacaatgggttaacatctacagattttaaaaagaaaagcatgacccactctttacagccagtcgagatgtcatctgcatattcgtctcactcactatctgtatatgcacatacacacacacacacacacacacaactccaagaaaacatcaatgattttttttcaacttyctgggtttgtgatttgaggctgtttttatttacttccttccttctatttgcctgtctcatttacatttcttatctgtctaccttcattattaagaacacttaattctttgataaaaacaaatgaagtgacttttttttcctcttaaacaaaaatcttcagtttgatggtaaacgatttcactatactttaatatagggtcctcttatagcatgttttgttaataaaacaaatctatttaaatgtatgtaacatgtcaactatatt

SEQ ID NO: 155726 - DNA, 634 bp, Homo sapiens
gttcaggtttatggtttcttggtgggtaaatatttctattcaagtatattaaagtttctaatttatgaagtctaaatatcaaagtgtctcatttatatatctattggtttttatcagttacattgttttagataatttttcatttcatattcattttcaaatttgctttaaattgttcatacactttgcttaatatatttgtttgcagtgtctttgttgatagccttggcatctgacatttttcttgttcaatctttataaaattgtttattatatcagtcttttaaagaacttcctttttgatcttttctctagcactttgctctattttgattaatttatgttcctgttacatatttgcctatttctatttttctgagttactgtacctttctcagtaaatagcaactgtcctctgttaaatgctcaaactcaaaacttgaagtcatattttgattctctcaaaactcacatctaatccagcagaamtcctgtcagctttgtgttcaaaatattatggatgggataacttttacttctatgaatgatgggattttgaaagtcagtcctccatggggaataactaaaaacaaccctgataaatgaccaaagatataaatatttaaaagcatca

SEQ ID NO: 155727 - DNA, 595 bp, Homo sapiens
ctcatggtgaaagtagaggtgcaaaggtaaacaagtccaattatctaagtatgtgcgaagtctctatttgtgtcttgtttacaaacagcacgtggccaaagctatgaatcacaacattaagggctgagtaaaatttcctgcccagacttggacagtacttgaaacttgtatacgaaaagaacagatataaagaggggagaaagaatttgggctgaaattcaatctatcacactttcccaacctaatagctcatatttctttttgtttgatgagttagttcatcagtacaatgctgataggaagactgatagttaacatttatgtcgtgtttctatatgtaataggaaggatctggagtacatttttgatgaatataaaattttaagtttatggttttcttctttcagctcttcaagcattttttcctactgtctaatgaacagtctgtattaattttagttttgttcctgtctttataagtttacctgttctctctttytcaaaataaactgttaattttagagccattttagatttacagaaaaattgtgaagagagtacagagttgccattacccccataaatgcaggttttt

SEQ ID NO: 155728 - DNA, 494 bp, Homo sapiens
acttttattacatatcctttatttgcctagcatcatatcaggtataaacaaaattttaataatggcagagtatttgatcttatagagcttacagcctctgtaaaggtgttgtgaaggtttccattcatccatttattcaacaaataattactgaatttttgttatgtgccaggcaaattacaggcattttgaataagacattgaacaaaacagacaaaattcttttttcagagcttagattccaacaaaggagactgattataagcaaagtatacaaataagtatgcaatgtgatatgctgattatatctttgrttttaattaattatttcactagagccaagcctcttttagtgtgacattgcacaacagttgaatctgaactagtttttaacttgttttggaaaatagaatgtgatggaagtgacagtgtggtggttccaaacataggcctcaagaagtcttgtagagactgggaaggattgtggggaggga

SEQ ID NO: 155729 - DNA, 647 bp, Homo sapiens
tgtgtgtcccagatattctggtatgttgtatctttattctcattagtttcaaagaacttcttgatttctgccttaatttcattatttacctaaaagtaattcaggagcagattgtttaattttcatgcactgtatggwtttgagtgattttcttagtcttgaattctatttttattgtgctgtggtctgagagaatggttggtattattttggttcttttgcattgatgaggattatttcatgtctgattgtgtgattgataaaatctgaagtttctgagcactaacaaacatgatgctcaaaggaaattctcattggagcattttggattttagatttttgaattagggatgttgagccagtaagtacaatgcaaatatgccaaaattcaaaagaatccaaaatcttaaaaacttcttgttgcaagcatttagaataacagatacttaacttgtatctgtgatactgaagttagataatgaagaacgttgtaaaccattttaaagaattataaatattatagtacctaatggggagaaagaagaagattttgaacacaagagtgacagtctgagttgcatttttaatagtgtggagcgtggacataggagtaagtgaaactcgagacatgagaaacattgagaggc

SEQ ID NO: 155730 - DNA, 601 bp, Homo sapiens
gaaaataatgtcatatcatactatatgggaaatttttcattattttaagacctttaaattcaggttttgtttctataaaaatggtattttttcaagttccaggaattaccttgacaatcaaaatgttctcctgtgagcacatttcagagaatatccattcatccactaaaatgaaattctcacttaaactttctattatcatgacattttagagataagaatttagttttacagattccaaaactaataacataattacaaaaagacaaaatcagaataactgcaacatagttgtaaatgtatataatcccccaaatgacttggaaatgttgatatatgttacacatttgagggaatttggctgatgtttttaaaaatttcttttttgttttgtatgtgaataaaaatagcacagacccaagaacaaccacatggtgccatgagagaacagaagtcacaaagcacacaattaacaaaacagtatcaagtcaatacaaatcasttaattttgctaatgactgtcatgcatggtaaaaatagacaacaagctcccttctggcagaattaacaagcacactacctaatatggaacatagaaatt

SEQ ID NO: 155731 - DNA, 637 bp, Homo sapiens
atccccacatagtaaccataatttaacagccatcatgggaaaaaagtgcctttgtaggagctttaggatccaggtaggaggttgcaaaaacccagtggagcccaagactgaggaaggtcattttgagaaggcaggaccaagcctaagtgacaggctttttgactatgtcctggaaacagacccagaaatagtcctgtcttcctgtggactctatggcttcatttggcattgatgcttccaccagtgcatgccactaaggggactgagasaagtcacacccattgtacctcagataacagaaggtcctgactgtggaccctgaggtggcccagtaatttggcttcaggtccaggaacagtcctgcctgtccagggagccccaaggggatctgactgcagatcctgaagcagccccctgtgattcagtattagccccttttagtcatggtccagggtcaatgctgcctgcccaggaaccttcccagtgaattggcaggaaccctcccagggatctggcagtagccacactatctgtacatgtgataacaggccggctatctgtgggctcaactgcacaccctgaagtgtgccaatcaagtgttacatatcatttctactgaccaaggtgcaaaaggcag

SEQ ID NO: 155732 - DNA, 623 bp, Homo sapiens
gtgataagccagaggtatctagaggaatactaatcactatctatgtagtacgtttcctagagaaaacttcggcctctcttcacagaaacagcaggtactttttagccatgtcagtgtgtatctatttctacagcttacagatgtcagttgtattatgatctacataaactgtgaactactgattttagacattctttgggaatttttagaaacaggagagtacttagcacactgatccagacatctctcytgagaaaagtgacaggatccaccataaaataggggctgacatgcttctataagcagtacctttcaagttggcttttcctggtcagtgctatgcagttatacagatttaaggttagcatggattttctttcattattagaatagttcactcatatcatacagcaaaggcttttattctgcaaaacagagtcatacatcctgagagatctcaagatatacagacagagataaatgttagtattttcataaataaaattgttcttttgcaatcatgaatacatccattccttttgattttttttctgaatttcaaaatcaaagattaagtcattatttaaaaactctcaaaactctgtgaatcatagctgttaaga

SEQ ID NO: 155733 - DNA, 623 bp, Homo sapiens
gtgataagccagaggtatctagaggaatactaatcactatctatgtagtacgtttcctagagaaaacttcggcctctcttcacagaaacagcaggtactttttagccatgtcagtgtgtatctatttctacagcttacagatgtcagttgtattatgatctacataaactgtgaactactgattttagacattctttgggaatttttagaaacaggagagtacttagcacactgatccagacatctctcctgagaaaagtgacaggatccaccataaaataggggctgacatgcttctataagcagtacctttcaagttggcttttcctggtcagtgctatgcagttatacagatttaaggttagcatggattttctttcattattagaatagttcactcatatcatacagcaaaggcttttattctgcaaaacagagtcatacatcytgagagatctcaagatatacagacagagataaatgttagtattttcataaataaaattgttcttttgcaatcatgaatacatccattccttttgattttttttctgaatttcaaaatcaaagattaagtcattatttaaaaactctcaaaactctgtgaatcatagctgttaaga

SEQ ID NO: 155734 - DNA, 508 bp, Homo sapiens
tatatgtgaccaagataaaatttgagctaaattctaaactgactagctctaaaggctgtgctttctccaaaggaacagaagaaaaacaaatgccagaaaagaagggaaagacgcagaggagcagatataagagagggaacaaacaaccaaataagtttccatggtaggctttattgaaattaggaaatttctaagagaaattattgtggtgacccccaaagcacagaataggggctacagtacatgaggcaatgtagtttgtctgtaaaatgtgttgtgatcatgtctgtaagaatctgctatttcctaagaaagagtacagctctggtatttcattctggcattaaccccacagagctacagtgacwtatcagcatgcctttatccattagtataacagagagaacaaaaatatccgctagccattcatttctgcaaacagagctcaagtgttttgcaacaaagttattttcctatgcttatgccaactagagacgttttgactcct

SEQ ID NO: 155735 - DNA, 537 bp, Homo sapiens
gatagacaatactcatgctctttttctaattcagaaagttgatactaatatttataataatcattatggattgaggtaaatttgtttgggtgagagggtgtagcctcaacaggagtctgagcaatgattgtattggtcagaaatgagacctacaggatccctatgcaacactcaatcaattggcagagagagaacaattgctkttaggacatattagttacataactgacgactgctgaacactgtgattttaattcattaaaatcatttaagttccattaattttcttcagagttccacagcatttttaatggtaaacttatagcacttattatagggcttttaagattagatgttcaattttctagtttattataatagataaagatttggcttttctggatattttttgccttttggtcaaaaacgcagatgataaatgtgtcaaatagccatttttggtatcagttgtataaaggccaataatgagatacatcttacaaatgttctttaaaaaacacctctaaatcttacata

SEQ ID NO: 155736 - DNA, 521 bp, Homo sapiens
cataagttgtttacattagcaaatatgtttcaactaaaacacatgttggcagttagcactctctcagctcctcatataagccattctgtagagagtgagacttcgttagaagagtttgaatttgaaaagtgtctttttaaaatttatttatttaatatttatttattttatttaatttatgtatttattttttgagacagagtcttactttgtcacccaggttgcagtgcagtgctgcattcttggttcactgcaacctctgcttcctgggttcaagccattctcctacctcagcctcccaagtagctgggattacaggcacccgccaccacacccgtttaatttttatatttttagtagagatggggtttcaccatgttggccaggttggtctcaawctcctgacctcatgcgatctgcccgcctcagcctcccaaagtgctgggattacaggcatgagccgctgagcctggctagacataaaagtgtctttcatatctaacaaatgaagaactcaatac

SEQ ID NO: 155737 - DNA, 521 bp, Homo sapiens
cataagttgtttacattagcaaatatgtttcaactaaaacacatgttggcagttagcactctctcagctcctcatataagccattctgtagagagtgagacttcgttagaagagtttgaatttgaaaagtgtctttttaaaatttatttatttaatatttatttattttatttaatttatgtatttattttttgagacagagtcttactttgtcacccaggttgcagtgcagtgctgcattcttggttcactgcaacctctgcttcctgggttcaagccattctcctacctcagcctcccaagtagctgggattacaggcacccgccaccacacccgtttaatttttatatttttagtagagatggggtttcaccatgttggccaggttggtctcaaactcctgacctcatgygatctgcccgcctcagcctcccaaagtgctgggattacaggcatgagccgctgagcctggctagacataaaagtgtctttcatatctaacaaatgaagaactcaatac

SEQ ID NO: 155738 - DNA, 588 bp, Homo sapiens
ggttaccagaggcagggggttggggggaatcaggagatgatagtcaaagacacaaatccggagatgatagtcaaaggatacaaagtctcagttagataagaggaatgagtttaattttttttagatcaatagtaccgcatgctgaatatagctaataattaaatattgtacctttccgtatcactaasagaataaattcctaatgttctcatgacaaaagaagttaaatatttgaagtaatagatatgttaattagcttagtttaatcattccacattgtattcaaaagtcataagaccatttatataaatatatacaactataatttgtcaatatacaatttaaaaaataatacaatctactttgcacaaaatgaaaagaaaaacaaccaaaaaaaaaacctttgtcgagattagacaacagaaccagatccagagatgattcagctattagaacgatcagacaaggacatttttgagatcataattaatatgttaaaggatcaagaggaaaaaatgggaaacatgcctcaataaattaggattttcagcacagagattgaaactataaagaagagccaaatgcaaa

SEQ ID NO: 155739 - DNA, 588 bp, Homo sapiens
ggttaccagaggcagggggttggggggaatcaggagatgatagtcaaagacacaaatccggagatgatagtcaaaggatacaaagtctcagttagataagaggaatgagtttaattttttttagatcaatagtaccgcatgctgaatatagctaataattaaatattgtacctttccgtatcactaagagaataaattcctaatgttctcatgacaaaagaagttaaatatttgaagtaatagatatgttaattagcttagtttaatcattccacattgtattcaaaagtcataasaccatttatataaatatatacaactataatttgtcaatatacaatttaaaaaataatacaatctactttgcacaaaatgaaaagaaaaacaaccaaaaaaaaaacctttgtcgagattagacaacagaaccagatccagagatgattcagctattagaacgatcagacaaggacatttttgagatcataattaatatgttaaaggatcaagaggaaaaaatgggaaacatgcctcaataaattaggattttcagcacagagattgaaactataaagaagagccaaatgcaaa

SEQ ID NO: 155740 - DNA, 449 bp, Homo sapiens
gttgtaatagcaatccctgtgcagaagggcttcagaaggatttcacctctataatgacaaagctggtagtttgtagtaatagtaaaaaaaaatcacaaaaactgttaacaataaacgtttttttttaaaaggcccaaaggtggaaaaaacaygctggatccacagaaaaacttatacacaaatgtttatagcagcattattcataacagacaaaaggtggaaatgatccaaatatctatcaactgataaatggataaacaaatggtggtatatccatataatgggatatgatttggcaataaaaaggaatgaagtagagttacatgctatatcatggatgagccttgaaatcgttatgctaattgaaaagtcacaaaatactgcatatacacttttatttatgtgaaatgaccagaagagacaaatctatagaggtagggaatacatta

SEQ ID NO: 155741 - DNA, 449 bp, Homo sapiens
gttgtaatagcaatccctgtgcagaagggcttcagaaggatttcacctctataatgacaaagctggtagtttgtagtaatagtaaaaaaaaatcacaaaaactgttaacaataaacgtttttttttaaaaggcccaaaggtggaaaaaacatgctggatccacagaaaaacttatacacaaatgtttatagcagcattattcataacagacaaaaggtggaaatgatccaaatatctatcaamtgataaatggataaacaaatggtggtatatccatataatgggatatgatttggcaataaaaaggaatgaagtagagttacatgctatatcatggatgagccttgaaatcgttatgctaattgaaaagtcacaaaatactgcatatacacttttatttatgtgaaatgaccagaagagacaaatctatagaggtagggaatacatta

SEQ ID NO: 155742 - DNA, 512 bp, Homo sapiens
ggcacaagagcgaaattttagatgatcagaaacaactattgagactaaattttttgagagagagccttgctctgttgaccaggctggagcgcagtggcgcaatctcsgctcactgcaatctccgcctcccgggttcaagcgattctcctgcctcagcctcctgagtaactgggattacaggcacatgccaccaggcccggctaatttttgtatttttagtagagacgaggtttcaccatgttggtcaggctggtgtcgaactcctgacttcgtgatccgcctacctcggcctcccaaagtgctgggattacaggcgtgagccaccgcgtccagccagattatgttcttttaattagacaagtatgtgcattccagaaaaggctgaggattcaagaatatagaataagcctttgcagttgacagcctttttccttcttgtagaaaagtaacacaatataaactttttaaaaatttgtgctcgtcataaaaattaaaattttccctaggcattt

SEQ ID NO: 155743 - DNA, 601 bp, Homo sapiens
aggcaggcaaaaggtcgctaaaccctgaagtagaggaaggaggaggagaaagaacaagaaataaattactatggtagaggagtatattagtttggtgtttatattaggctagattatgctgcagtaacagacarcctcaaaatctcagtgatttacaataacaaaggggtatttctcatttacagcacatgtgtactctgtgctggctaagttctattccatgttgtttttatcctggaattcaggctcatagtgcggcctctatctggaatactgctgcatctaggagcagaagaaacacggagaacatggcaaaccaagtgctggctctggacgtttctgcctaaaattgacatacatcattttcactctgtttcactggccaaagcaagtcacataccatgctagactacaatggggtaggatatagaatcctcttccagaccagggcaattactatttatgaacaataacacaggctaacacatagcctacccttagtgccttcagttgcttaggtttggttattcctgaaccaaagtttattttattcttcaaactagtgtcttaagtagggatggggagatataatagtaacaat

SEQ ID NO: 155744 - DNA, 446 bp, Homo sapiens
taatagttattcgattactgtaaaacccaatttctattcttctaatctctataatcaaatctttactttcatgatttgctattaagcctgtattttaggattataaaactagatattcatcttctgtgacttgttactatcaagttgaaggtggcaaggatttcacacatacagagtgggtatgcttattgggcacacagtcagaaataaaatgtgtgccaatgtcttatcctgttttctgttrctatagcacagtatcacagactggctaagttatgacaaaaagacatttaattcttacaattcttacaattctggaagtccaaagtcaagaagctgcacctggtgagggccttcttactgcatcataacatgacagaaggcatcacaggacaaaaaggcaagagcacaccagctcaggtctctctttctcttcttataaagcc

SEQ ID NO: 155745 - DNA, 394 bp, Homo sapiens
cacatattgtattatgtatctccaccataatttctgtccttttcatcctgctttataatttttggtgcatagcagttgtcttctaccatattatacaaataattttcattatgttttatatttatctatctcttctaattcgacataagctccaagagggtaggatctttctttttttcagtcttgctccaaatgcctaaaacagtgtctggggcgtactgggcactcaataaatatttgcttagcgaatgaaggaatgactaattctacagaatataaagacatcaatagttttctccyagagaggtgttagttgtgttaaattctaacctgttttaaaaatttcaaagataaaagaaagactttaatgacctagagttaaaaaaattaccct

SEQ ID NO: 155746 - DNA, 394 bp, Homo sapiens
cacatattgtattatgtatctccaccataatttctgtccttttcatcctgctttataatttttggtgcatagcagttgtcttctaccatattatacaaataattttcattatgttttatatttatctatctcttctaattcgacataagctccaagagggtaggatctttctttttttcagtcttgctccaaatgcctaaaacagtgtctggggcgtactgggcactcaataaatatttgcttagcgaatgaaggaatgactaattctacagaatataaagacatcaatagttttctcccrgagaggtgttagttgtgttaaattctaacctgttttaaaaatttcaaagataaaagaaagactttaatgacctagagttaaaaaaattaccct

SEQ ID NO: 155747 - DNA, 469 bp, Homo sapiens
ggagtagttcacagtccagacaggtggacagacatttaagctagaaattttttttaaaagacataaatactataaaaaagatacaaatcatgggaatctgcagaagagaggatgactgtctatcaagggacagtatggaagggtagctgctagagcattagcccagcaagcagagaaagcaaaaacttagcacattctactgactcatgtaatgtggctgggtcacaagatactgggatctagggggctggtttcagaaaatggctaagagcaaggctggaaaagttgtgtaaagaatcttgtacaatcagraaggcaaattcaaaggcctataggaggcaagcagaaaatgcaaaggaaaagctggccaagtgaggacttgggtgacctgaggagcacctgtcccaccataagaaggcaaccagcattgactgacggctgccacagggagacagccccagcatagcca

SEQ ID NO: 155748 - DNA, 642 bp, Homo sapiens
ctctgggtgaattttctctttggattcaatatgaggactatttggactccttctgtgtaggtttgtgttccaatcacagggatgatgaggctacatccctgtcacactggctcagggtcacatctgaggtctaccttgagcaagtatactgaacttaatattttggctgcaccagaaaaaatcacccatattcaagcattctggactgctgatgatgacaatttcatgtttcatgtgtatttcgtaaactaatctcactcctggctttctatttactttcttatccttatgttcctttaccttcctttttgcatttatcaaataaattttacccagctacactgtttgcatctttgtaagccatctcraatcttttctgaaatagagtagtaaagaaataaacacatcaaaatgttttcaagtaggcttcaaaatagcccacagctgcggaccctttcattagactgtgtattttcctaagcaaactattctccaagaaacagaaaacattgcccttctttgtaccttagtaggagggaaaatgcttttatattctaaattacacaagcgttccaaaataatttggggaaagagaaagatagttagggcccagcaggataaaggaagaaagcaatgattctt

SEQ ID NO: 155749 - DNA, 627 bp, Homo sapiens
gcgcaatctttgacttagtttaaacttaawaattattgttattacttgtgttactgttatagctattattcatacctcttctcctattggctatatatacatatattaaaactaaaatttaaaagaacagattatgtactatattagttacatgtggggtacagcttcaaatataatccaggctgggcacagtggctcattacctataatcccagcactttgggaggccaaggcaggaggatcgcttgagctcagtagttggagaacagcctgggcaacatagagaaaccccatctctacaaaatgtaccaaaaaattagctgggcgtggtggtgcgcatctgtagtctcagctactctggagactgaggtggaagggtggtttgagcccaggaagtcaaggctgcagtgagccatgttcacaccactgcactccagcctgggttacaaagtgagaacctgtctcaaagaaaaaacatttatgtaggcatacatatatgtctacataaatacgtatgtatgtattatgtgtatatatagtatgtggatataatctagaactacagggaatacataatataaaactcattcaagcaaaacttgttaatcaaaaaatgttttgaagatt

SEQ ID NO: 155750 - DNA, 627 bp, Homo sapiens
gcgcaatctttgacttagtttaaacttaataattattgttattacttgtgttactgttatagctattattcatacctcttctcctattggctatatatacatatattaaaactaaaatttaaaagaacasattatgtactatattagttacatgtggggtacagcttcaaatataatccaggctgggcacagtggctcattacctataatcccagcactttgggaggccaaggcaggaggatcgcttgagctcagtagttggagaacagcctgggcaacatagagaaaccccatctctacaaaatgtaccaaaaaattagctgggcgtggtggtgcgcatctgtagtctcagctactctggagactgaggtggaagggtggtttgagcccaggaagtcaaggctgcagtgagccatgttcacaccactgcactccagcctgggttacaaagtgagaacctgtctcaaagaaaaaacatttatgtaggcatacatatatgtctacataaatacgtatgtatgtattatgtgtatatatagtatgtggatataatctagaactacagggaatacataatataaaactcattcaagcaaaacttgttaatcaaaaaatgttttgaagatt

SEQ ID NO: 155751 - DNA, 571 bp, Homo sapiens
tcagatgtcgtggttggggctagcatagccattttggccaattgttaataagccttaaaggagtagcatgatatttgcatcaatctttagaatatggggtagctgatgtctggttatttttagcttagcatcctaggaacagtgctagggtgacaggaaaagattcacctaatatccactgtcacagtcattcttctgtacgtctattgaactcctgctgggcaagttaccatgggaatattctaaaacataaactttgtccttgaaagatcttatattttggtttaagaaaataaggatataaacagagaaaatattgaataaccatataagacagcatgtggagaatwgttcaaataaattaaattgagaataatggtgtcatttttcaaatatcagtgtcaactggggtggacggctaagactgcctctggcctgctgcagggggtgtgggggtgggtgaggcagggggcctgagtgtttctgttctagaggatgccttccagctctgttgtgtagcttctagctgtgctctgcaggttaaaagaagaggaaacacccagggtgtggg

SEQ ID NO: 155752 - DNA, 422 bp, Homo sapiens
ttccctttgattaaagaggaatatggatataccacattttgtttacttacctgatgatggacatttggggwttttttttcagtttttactgttatgaataatgctgctatgaacattcatgtatagtctttaagtggtctatattttgatttctctttgaaaaatttctagttgtacaatggctgggttaggtggtaggtgtgtgtttaactttttaaggagttttgcaaagtggattttccattttacagtcccaccagcagtgtatgagaattctagttcctctacattcttgttaatacttggtatcgtcaatctttttaattttagccatttaaataggtgtgtagtggtatcttattatagttttaactttcatttctctgattagtgacattgaacctttctcatgtgtttcttag

SEQ ID NO: 155753 - DNA, 422 bp, Homo sapiens
ttccctttgattaaagaggaatatggatataccacattttgtttacttacctgatgatggacatttggggattttttttcagtttttactgttatgaataatgctgctatgaacattcatgtrtagtctttaagtggtctatattttgatttctctttgaaaaatttctagttgtacaatggctgggttaggtggtaggtgtgtgtttaactttttaaggagttttgcaaagtggattttccattttacagtcccaccagcagtgtatgagaattctagttcctctacattcttgttaatacttggtatcgtcaatctttttaattttagccatttaaataggtgtgtagtggtatcttattatagttttaactttcatttctctgattagtgacattgaacctttctcatgtgtttcttag

SEQ ID NO: 155754 - DNA, 407 bp, Homo sapiens
tttgattaaagaggaatatggatataccacattttgtttacttacctgatgatggacatttggggattttttttcagtttttactgttatgaataatgctgctatgaacattcatgtatagtctttaagtggtctatattttgatttctctttgaaaaatttctagttgtacaatggctgggttaggtggtaggtgtgtgtttaactttttaaggagttttgcaaagtggattttccattttacagtcccaccagcagtgtatgagaattctagttcctctacattcttgttaatacttggtatcgtcaatctttttaattttagccatttaaataggtgtgtagtggtwtcttattatagttttaactttcatttctctgattagtgacattgaacctttctcatg

SEQ ID NO: 155755 - DNA, 406 bp, Homo sapiens
gaattctccatgaccgcagaaagccggcttagccaaggtcatgccctctcttcaaaggactggtcatgataggaaaaaggccccatcgcctcaaggcaggacaacgctaagggtcatctcagcttcattcctccctttgctgaaggaggcatttgctgcagttcaaacacaattactctatctgccaaattctgcttcctttattccctcacagatactgatcttaaaagaactcctcaaaaaactatctgcatacaaatctatggctctccaaatttttcctcggaaaccctaagactctgcctatagggaaggacacagtatagtcaccttagaagatatttctcatgatcaaatttataaaagtgcaaataacaaaagaagwgagtatactacaagcagtttt

SEQ ID NO: 155756 - DNA, 548 bp, Homo sapiens
caaaaagagaatatagaaactctgagtaagggtctcagaggttcccatgctttagtgcacagaattgatagcatcttatttttgttacatcatggacttttgggtcttctaagttctttgttatatttccaataaatgaggctcctcattggataaatcatgtccagatatatgagacaggattacattaagagcttttgaaaaaaagaaaattaaatatgattttttttttttgagccgtagtttcacttttgttgtgcaatggcgtgatctcggctcactgcaacctcagcctcccaggttcaagcgattctcctgcctcagcttctcgagtagttgagattacgggcgtacaccacccatgcctggytaattttgtatttttagtagaggcagggtttcaccaaataggccatgctggcctctaactcctgacctcaggtggtccacccaccttggcctcccaaagtgctgggattataggcatgagtcatggcgcccgtccaaatatgattcttaaatatacttctacataaaagataagaatt

SEQ ID NO: 155757 - DNA, 549 bp, Homo sapiens
caaaaagagaatatagaaactctgagtaagggtctcagaggttcccatgctttagtgcacagaattgatagcatcttatttttgttacatcatggacttttgggtcttctaagttctttgttatatttccaataaatgaggctcctcattggataaatcatgtccagatatatgagacaggattacattaagagcttttgaaaaaaagaaaattaaatatgattttttttttttgagccgtagtttcacttttgttgtgcaatggcgtgatctcggctcactgcaacctcagcctcccaggttcaagcgattctcctgcctcagcttctcgagtagttgagattacgggcgtacaccacccatgcctggttaattttgtatttttagtagasgcagggtttcaccaaataggccatgctggcctctaactcctgacctcaggtggtccacccaccttggcctcccaaagtgctgggattataggcatgagtcatggcgcccgtccaaatatgattcttaaatatacttctacataaaagataagaattc

SEQ ID NO: 155758 - DNA, 470 bp, Homo sapiens
gcggtttgtgacaccaaaagctgccctaaccataaactgcatttccttatttcatctgtgcttcagatgtggtgactatgtaagtgggctggtgtgtgtgtgtgtgtgtgtgtgtgtgtgtgtgtgtgtgtgtatgtgtttgcatatgtgcatatacatgtgagtgtgcagctggaggtacatttctgtttcacaattcttgaggtttaaagagcttgcccagtgtctgacacatagtaaatactcaataaatggtaactatgatgatgatgcagcagccaaagatcatttgaaacacaccttacactttatacttccagagaaactgtggtattctgccattttactgattccatttcataatgaagtcataataaaatggaataaaatgaagtaaatggcaaataaatatataggaatcttactraactataaagttccatgtaagatgagcttgtcttaggctttgc

SEQ ID NO: 155759 - DNA, 533 bp, Homo sapiens
gccctggcaaagtgggctatagacagcttccactggctggtactgcagaggggcagggctttatgaactttgaagaagactacattcatagttattttgatcamcctgcaccttccttggaaggtctttggtgtctactgccaccctgtaatataaagaagtacagatatccaggaagtactgtacctaataatactaacacactgtcacaaatgatcataaatattctattcttgctccaactgcttaaagtatttagggaatctgtgccttggtcaatgaacaaccctgaaaattaaaagcaagcccattgtttttctaaaaatctacatgtttatgagtcatcttcataataaatcataatagtaatacattagaatttcctcctctaagggtaaccagaaataaatattaatcagagccaaagctgaacgctctgtatgatttctttcagtcttgaacaattgatgcattcatttcagacagttgtcaaaaactcacagatttctaattttatcaaatcagacagttac

SEQ ID NO: 155760 - DNA, 533 bp, Homo sapiens
gccctggcaaagtgggctatagacagcttccactggctggtactgcagaggggcagggctttatgaactttgaagaagactacattcatagttattttgatcaccctgcaccttccttggaaggtctttggtgtctactgccaccctgtaatataaagaagtacagatatccaggaagtactgtacctaataatactaacacactgtcacaaatgatcataaatattctattcttgctccarctgcttaaagtatttagggaatctgtgccttggtcaatgaacaaccctgaaaattaaaagcaagcccattgtttttctaaaaatctacatgtttatgagtcatcttcataataaatcataatagtaatacattagaatttcctcctctaagggtaaccagaaataaatattaatcagagccaaagctgaacgctctgtatgatttctttcagtcttgaacaattgatgcattcatttcagacagttgtcaaaaactcacagatttctaattttatcaaatcagacagttac

SEQ ID NO: 155761 - DNA, 480 bp, Homo sapiens
attgtgtaataaaaataatagcagctaacatgtgttatacctgtattagctgcaaaacattgttttaagagtttatacagattatcccatttactgtgcacaatacccatatggtcagtaatgttctagtcacagttttagagatgagaaaactgtggcaggaaatattaataacttgcccctggtcatgaagtctgactactggatttaggaagatggataacgttgatggccttcaacagagctgtttcagtagagcagtgaagcacytggagtgaatgaagtggtttgaagggaaaatgggaagtgagaaagtacagatatcaggtatagacatgtaaaacattactatgcctagcacttagaatattccacatagatagaggttattaaaatagtgctgataattgtaattattatttctgataactgtctttcctgctgaaccataagcactttgacagcatactttgtatttct

SEQ ID NO: 155762 - DNA, 629 bp, Homo sapiens
ttccttatttgcattcattatttgcactgttatgttttaggcccttttgctaatgtgaaatacatcagaaaataattatttttcttgtctttctcaaaaagtgcatttatctagaaatataattataaaacttattaaactctcaaaatgtgttcattttacatatgtataaaagtgtattcgagatgcataaataaaaatgaatgctttgttgtactgatgccaatctaatttagacctttattaaayaatagcaaggtaggactattcctgggaataaaccatttatgtctctgggattcagtaagcatctgcatacctacactgaatatgcaacttttccccagctgtgcagaaaattgccacctaagatccttatattattaataactttaatgaaaagtgtggactatgtcacataattgaaagagaaaaaatgagaaggactgtaaaccatttaggattaatttctgaatatgacagtggcgactaatgttggtaacccaatgtgcattatttggaattcagtgactcgaatgaaccagaaaacttttgtgaagggaacggggcacttgatgcttaatgtaggctacagtgctatttggagctcttaaatctaaaaaaagata

SEQ ID NO: 155763 - DNA, 586 bp, Homo sapiens
tgttcttgaggctcaatgctgatgggggtttaaattggtttaacctctttagaaaaaaattggttactattttgtaaaatagaacctttataaacttaactcccagcaattcttctcctaggtacatactcgagaaacttttgttcatgcatgccaggatatattgcttgttataacaaaaaaggaaaaaatctattagtaggagtttgggtaaataaatgtgatatattcacattggcatgttagacattgaaaaaaatgagtgaactatagctacartaacaattatatatggatgctccttaaaaataatattcatagaaaaagtacatcatgaaggctatatgtagtatgatatggtttttatgaagtgtaaaaccaaggaaaaccaagcaatatgcatattgtttatgatatacatgtgacacatttttttctttataaatagcaaataaatgataaaacaaaattcattatagtaggttactttgagcaggaagtaaagagcagattagaggagaaccagaagaaaggcacaatggtattagaattattttagttctttaagttgggcaacaatttcatg

SEQ ID NO: 155764 - DNA, 532 bp, Homo sapiens
tctgctacgtagtcatctttctgctgtgatagaacagatttctttaccccaccatatgccgctacacacccatattttggacttgcttttttactgtctttactgaatacacattttttatgctcttgtgtttttttcttaaactgtttcctaagctttcaatgccttccctttcttaaagattttctacacaaatatttctcatctctcaggaaccagatatgctcttttgcccagtgaggactgacttcaccagcttcagaactcccactacacattacctgtccctacactgcagtgtactctgcatccatcaggcaggaaacagccaagcaaacaataatggtgaagcaactgtctctcatactacaatggataaagactacacttaaagcaatcttaaagcaagtawtccatcaaaaaccgagagtgaaaaacactgatatagtaaagtgaccttccggtaaggactcctcaattacacctggaaaggtagatgcacagaagagcatcagtaaattaaattacttta

SEQ ID NO: 155765 - DNA, 532 bp, Homo sapiens
tctgctacgtagtcatctttctgctgtgatagaacagatttctttaccccaccatatgccgctacacacccatattttggacttgcttttttactgtctttactgaatacacattttttatgctcttgtgtttttttcttaaactgtttcctaagctttcaatgccttccctttcttaaagattttctacacaaatatttctcatctctcaggaaccagatatgctcttttgcccagtgaggactgacttcaccagcttcagaactcccactacacattacctgtccctacactgcagtgtactctgcatccatcaggcaggaaacagccaagcaaacaataatggtgaagcaactgtctctcatactacaatggataaagactacacttaaagcaatcttaaagcaagtaatycatcaaaaaccgagagtgaaaaacactgatatagtaaagtgaccttccggtaaggactcctcaattacacctggaaaggtagatgcacagaagagcatcagtaaattaaattacttta

SEQ ID NO: 155766 - DNA, 463 bp, Homo sapiens
ttcaatgaatcattatgcattatttcrtttccttcctgtcctccacccctcttgtattctttactgatacaaatctatatctatatatatctatatctgtaggaatatatgcagaagagatatatttgtttccctatttttaggcaactagctttgagccagtgaagatgtttctcaaatattattctacacattatcaaacataagcagttcctgctaagacagcaaagcacagggagaaatagattggaattctcacacttattgctctccccctgtggttggcccattgagatgtttagctgctgtagaagcaggaggtctctaaacagtctagtgaaatttcatctgccaaatgctggagttagtagagatctaggaaatatattaataaaagaatggcccccagaatttattggcaagtccaaagtaacaaaaaagcagaatttgatataaccagggg

SEQ ID NO: 155767 - DNA, 463 bp, Homo sapiens
ttcaatgaatcattatgcattatttcatttccttcctgtcctccacccctcttgtattctttactgatacaaatctatatctatatatatctatatctgtaggaatatatgcagaagagatatatttgtttccctatttttaggcaactagctttgagccagtgaagatgtttctcaaatattattctacacattatcaaacataagcagttcctgctaagacagcaaagcacagggagaaatagattggaattctcacacttattgctctccccctgtggttggcccattgagatgtttagctgctgtagaagcaggaggtctctaaacagtctagtgaaatttcatctgccaaatgctggagttagtagagatctaggaaatatattaawaaaagaatggcccccagaatttattggcaagtccaaagtaacaaaaaagcagaatttgatataaccagggg

SEQ ID NO: 155768 - DNA, 617 bp, Homo sapiens
tgcccttccaagtgagtacagcctggcttaacaaaagtgtttcaccaaatcgtcataagtcaaaagcaaagtgaaagtctgtagaataagttctaagggttgaggaatgggaaaaacagtatcttggaaaagacaattaatagttggggaaagaggggtctggaaacaaatctccttaagtgtacagagccatcaagcaccactgctctgactttgagaggacagtccatgatccaacctatcagcagaaaagacggtggaacaggaaacagaggctgccttgcaatggaagcctttaattttaaattatgccatgtaaatgggagatgcctgcagtaaaacctggtttccttcattcacacagagggtgtgctcaaatagccctagaaaataatcaaatgaattccagcattttgaagaaaaagatattgggaaaagatagactggtagtactgtmacaaaacaaaagatgctgcagttgcaaactcatttgaaacaacagcaactcacacaaggctcaaagtgactaatcctgattccatatggtgttcaaacacaggaaagaaggaaaagtgcctggttagctttgggcgctgatgatcctgggggtacacaaa

SEQ ID NO: 155769 - DNA, 582 bp, Homo sapiens
ggaagcagggcagacctaagctggagaagcaggctaaaaacatgagtcccttagataagttccatggatagctccaagggaagccatttcttcctgcctgtaaaggagacaactcagacttatcgaactgattttatggagaaaccaacatatctctgtcttaaaggcccaagatctgttaaagcatatttgatccccaacaccagagaaaattttaatcccataaatattttaaaatataggtcagcagtggcataatatctgcacagaagtcttctgaattggttcttctatacagagaaataagtcaactgtcactttaattggtttgacttagggttacccttccttcttagagatcctgaactaacacatggttctgtcaggaaggtcttcatctccctgaacactactatgatgctggagtttggggttcatggggtcaactgtggaatgtttcaactagatgaggtcagagtgtggaagagggttttcgggtatatttttccagggycatatttatttcagtccattagacagtctaaccacacttatattaagggtccaaaaagaagtggactt

SEQ ID NO: 155770 - DNA, 311 bp, Homo sapiens
aagctagccaaagatcttgaagaagaattggagagaactgttcatttttatcaaaagcaggttatttcctacgagaaaaaaggacataataattggttggcagctcggactgctgaaagaaacctcaatgatttaaggaaagaaaatgctcacaacaaacaaaaattaactgaaacagagtttaaatytgaacttttagaaaaagatcctaatgcacttgatgtttcaaatacaacatttggcagagagcgttcgccatatggtccctcaccgttgggtcagccttcatctgaaacgagagcttttctctc

SEQ ID NO: 155771 - DNA, 530 bp, Homo sapiens
acagaaacttcccgagcagtttcaccacccttgggtagctttggagcacagccaggattttcactgcaaaagagccacggtttcctcgtctgtaaaatgaraagttttaaattagatgttctctaaggttgcttctaatttaaaaattctgtggattgacaccctactgggtctattctagggatcttgagtacataagccatacacaataagttacagtaataaagatacttcagggtttaaaaaaattgtttcattcctacacttaattctgtatttaaaataagtttttcttggttgagtatttatagtctttctgaagtgacagcaagtgaagatagttttgcttgaacatttaagtctaccctttgcacctggggtaaaattcttctctttaggggtaaataaaccacagttagaatgctttcctttatttgaataatttttttttctgggtacccagtgtgctgggtcacttcactgagtggaaaaaacatattatctgtacttacacaaatatatacataaac

SEQ ID NO: 155772 - DNA, 609 bp, Homo sapiens
tgcaaataaatatatgtgtatatctgcttagaaggattaggaaggttagatgatctctagggagtgttagtggtgtctcattttcactttttcctttacatactatcatattgtttgaatattattcggtaagcaggcattatttttatgacaaaaagttgttaaaaataaaaactacatcattatacttctaatattttgacagcctgtcacagttggcaggatagaaacttcataattccatgacttaccagtttataattctgagttacctttttttttttttttttttgttgagactgagtttcgctcctttgcccagtctggagtgcagtggtgcgatctcggctcattgcaagctccgcctcccgggttcacgccattcccctgcctcagcctcccgagtagctgggactacaggcgcctgataccacacccggctaattttttgtatttttagtagagacggggtttcaccrtgttagccaggaaggtcttgatctcctgacctcgtgatccgcccgccttggcctcccaaagtgctgggattacaggtgtgagccaccgcgccgggccctgagttaccttttcagaggagaagagaaagac

SEQ ID NO: 155773 - DNA, 609 bp, Homo sapiens
tgcaaataaatatatgtgtatatctgcttagaaggattaggaaggttagatgatctctagggagtgttagtggtgtctcattttcactttttcctttacatactatcatattgtttgaatattattcggtaagcaggcattatttttatgacaaaaagttgttaaaaataaaaactacatcattatacttctaatattttgacagcctgtcacagttggcaggatagaaacttcataattccatgacttaccagtttataattctgagttacctttttttttttttttttttgttgagactgagtttcgctcctttgcccagtctggagtgcagtggtgcgatctcggctcattgcaagctccgcctcccgggttcacgccattcccctgcctcagcctcccgagtagctgggactacaggcgcctgataccacacccggctaattttttgtatttttagtagagacggggtttcaccgtgttagccaggaaggtcttgatctcctgacctcgtgatccgcccgccttggcctcccaaagtgctgggattacaggtgtgagccaccrcgccgggccctgagttaccttttcagaggagaagagaaagac

SEQ ID NO: 155774 - DNA, 611 bp, Homo sapiens
taaaaagctggcaaaataatccattacctacttattcagtctttggctatacaatttctgagaattatgcctgcaataaaccaagtgtttatatccctacagaatttatacattgaaaccctaacccctaatgtgatggtattaggaggggggcctctgggaggtaattagatcatgagggtaaagccctcatgaatgggattggtgccaaaaagaacctagccaaccttaacctgctccagtcaccatagcttttccaaacatgtgagtgagrccatctttgatggtccagtcccagctgagctctcagtgaatatagctgcataaggaaccccagacaacggcacacggaaaagaagaactgcccagctcagaccagctaactagtagaactgggagaagtaataaattgtgttaagcctctgtgttatggggtggtctattatacagcaatagctaactgatatggtagaagaaatagaaatctgagagggttggagatggttcagaatcatggagtgttatagaagaacagggaagagaccatttcaagtaggggataatctatagtaccaaatgcagtaaagagaacagatagcacgtcaaattta

SEQ ID NO: 155775 - DNA, 498 bp, Homo sapiens
attttataagtgacagtttccctggcctttcacgctctcacctgcccccacataagacgtgctttgctttccctttgccttctgccatgattatgtttcctgggacctccccagccatgcagtctgtgagtcaattaaaactcttttctttttaaattacccaacctcaggtatttctttatagcagtgtgaaaacagactaatacacatctcttttatctctgtcctccatccctcacttctcattctcacaataggtaaccactcttattttccatttattgtccaggtaatttctatgcacatgcaatccaaggtaaatatatgcattttttctttttaaaattttatttattttttccagctttattgaggtataaytgagaaataaaattgtataaatgtagcttgtacaatgtgatgttttcatatatacagtatgaaatgattaccacaattaagctaattaacatatccatcacctcacatagttatcat

SEQ ID NO: 155776 - DNA, 522 bp, Homo sapiens
tgaaaggcactgtgcaccagtgcttcctatcatatatcaacaggggattactagtctcagctcttctcattttgctctgcaaactctggtgtttatcttaatcttttctctttttccttaccaacatatcttttttgtatcatttaggcaattttgcctaggtatyttctttggggattacaatttcttttgtacatccggggatctcttctaataactagtggaaaggaattagggacttcaacattgttgatttatgtgtgtgctagtccaatctagcagcagttttttcatattcctaataaacacatgaagaaattcagctttcccaattgcatgatcacttgccagattattgactcaaagtaatcaatagctggtaaatgagttaactgagaaagaaacatcatactgctttttatttttgaggaggagggaaccattaaaaatcaataaaaatcaatttaaagtttctctaaataaaacaataaatcctaccaaccgttaagaaaagcaaagtgg

SEQ ID NO: 155777 - DNA, 484 bp, Homo sapiens
ctctgtcttatattctgttatagataaattgtcacctcctaaattgtttccaatatgcctcacttctttctgaaatggccacagttcaggctttctttgcatagattattattgtatccttctgacaggttcacaaatgattccatcttttccttctgcaaaytattccagagtcattttctaaaatacagatatgatctccatatatgtcagggtaaaactcaaaatcctcacttgatgtacaaggcctctaggagtcaagacttgcctgaggcttcggcctcatcggtctcactaaactactgcatatatcagagtgcaacattaaaccttttttgcagaaatcgttttctctatttatcatgtccttccccatcttgtctttaatctctacacgtcttttaaactgtcagctgaaaagtcaattatttaacattaagcaaattcttattaaaccccaacttaatgtgccaggcactgtgct

SEQ ID NO: 155778 - DNA, 585 bp, Homo sapiens
actatgatgaataaaggtaaagtttctactcctctagggttgatactgtgtttgaaaaataagaatgcatttggcctttacacacacacacattttcaatgctttcttatgttgtttcaaatatacaacaagctgaaagaattytagagttaatgctagtatacacaatacctagattataccattttcctttgaatactgttgatcatatattacattcatccctctatcaccaatccaccttttttgatgtgttttgaagcacagtcatgtgtcacttaatgataaagagaagttctaataaacatgtcattaggcaatttcgtcattgtgtgaacatcacagagagtatttacacaaagctaggtggtatagcctactatacatgtaggctatattgtctggcctattactcctaggctacaaacctgtacagcatgttactgtactgaataccgcaggcaattgtaacagaatggtaagtatttgggtagctaaacacagaaaagatacaatgaaactatgatattataatcttataggataactggtatatgcagactgtcattgacagaaatgccatta

SEQ ID NO: 155779 - DNA, 585 bp, Homo sapiens
actatgatgaataaaggtaaagtttctactcctctagggttgatactgtgtttgaaaaataagaatgcatttggcctttacacacacacacattttcaatgctttcttatgttgtttcaaatatacaacaagctgaaagaattctagagttaatgctagtatacacaatacctagattataccattttcctttgaatactgttgatcatatattacattcatccctctatcaccaatccaccttttttgatgtgttttgaagcacagtcatgtgtcacttaatgayaaagagaagttctaataaacatgtcattaggcaatttcgtcattgtgtgaacatcacagagagtatttacacaaagctaggtggtatagcctactatacatgtaggctatattgtctggcctattactcctaggctacaaacctgtacagcatgttactgtactgaataccgcaggcaattgtaacagaatggtaagtatttgggtagctaaacacagaaaagatacaatgaaactatgatattataatcttataggataactggtatatgcagactgtcattgacagaaatgccatta

SEQ ID NO: 155780 - DNA, 585 bp, Homo sapiens
actatgatgaataaaggtaaagtttctactcctctagggttgatactgtgtttgaaaaataagaatgcatttggcctttacacacacacacattttcaatgctttcttatgttgtttcaaatatacaacaagctgaaagaattctagagttaatgctagtatacacaatacctagattataccattttcctttgaatactgttgatcatatattacattcatccctctatcaccaatccaccttttttgatgtgttttgaagcacagtcatgtgtcacttaatgataaagagaagttctaataaacatgtcattaggcaatttcgtcattgtgtgaacatcacagagmgtatttacacaaagctaggtggtatagcctactatacatgtaggctatattgtctggcctattactcctaggctacaaacctgtacagcatgttactgtactgaataccgcaggcaattgtaacagaatggtaagtatttgggtagctaaacacagaaaagatacaatgaaactatgatattataatcttataggataactggtatatgcagactgtcattgacagaaatgccatta

SEQ ID NO: 155781 - DNA, 599 bp, Homo sapiens
tatataatattctcctacattttgtatagaattctgggtgtaaaattctatgtataatttctgtttccaactatgactgaataactggcactgtattaactatccagcttgaaacaactataaaactttacaaaatatatgaagcatcaaagtgagatgtttgacaacaggtatcagagaactrtaacctgtgacataagggtacaccataaggtgagtcccacaatcaccagtggttcaatctggaggcaccttccaaatcattgcacaaagatgtggagccccagcagagcacagcagtttcctttttgtgcaaactgacaaaacactttgtaaaatctatatgaaaatacaaagaactcaaaatagccaaaattatcttgaaaaataagaacaaaattggagtattcacattacctgatgtcaaaacttattctaaaagttatagtatccaagacacagtaatgttgcataaggatagacaaataggtcagtggaatagaattaagagtccagaaatagacacacaattatatagtcactttttacaaagacaccaaaaggaaagtcatttcaacaaaaggtattgaaacaactgg

SEQ ID NO: 155782 - DNA, 620 bp, Homo sapiens
tagtagtaataattcataaaataccaaaatattggaacaattttaatcagattcacaataaatttattggctggaaaaatacagcattgatttacatattttaattcaagattgaaagttcatgatatattaaatatttggattaaaaatttttttattcacttctagaatttctaggtctcaggagaggtctgttagagatgctctgctttctgttacttttccatcatctctgatgtttttgtagacatgggagttttttttttgctcatattcacttgcttgstctatcaccctttttaaaaattgttagtttatgccatttcggaatattggcttcaagtttttttttttcctttttcactgtttcttaggaagcttttaagaggcatcaagtactgcatttcctaggttttccaatgtccttcttcactgttttgagagtcaactagggagaaggggcaggactacatgattgtccttggcctctctgtattctgttcagcctcatttgttcggcatttcagtgctgaatgcttgagaacattcagtggttcaatggagttcatacattgtatgagtacatatgttcacatgaaaatatatcattttgtgattac

SEQ ID NO: 155783 - DNA, 620 bp, Homo sapiens
tagtagtaataattcataaaataccaaaatattggaacaattttaatcagattcacaataaatttattggctggaaaaatacagcattgatttacatattttaattcaagattgaaagttcatgatatattaaatatttggattaaaaatttttttattcacttctagaatttctaggtctcaggagaggtctgttagagatgctctgctttctgttacttttccatcatctctgatgtttttgtagacatgggagttttttttttgctcatattcacttgcttggtctatcaccctttttaaaaattgttagtttatgccatttcggaatattggcttcaagtttttttttttcctttttcactgtttcttaggaagcttttaagaggcatcaagtactgcatttcctaggttttccaatgtccttcttcactgttttgagagtcaactagggagaaggggcaggactacatgattgtccttggcctctctgtattctgttcagcctcatttgttcggcatttcagtgctgaatgcttgagaacattcartggttcaatggagttcatacattgtatgagtacatatgttcacatgaaaatatatcattttgtgattac

SEQ ID NO: 155784 - DNA, 550 bp, Homo sapiens
gaattctcatctaagtctctgtcttccactggggattttggctataccacctgtgatggttaatgctgagtgtcaacttgattggattgaaggatgcaaagtattgatcctgggtgtgtctgtgagggtgttgccaaaggagattaacatttgagtcagtgagctgggaaaggcagacccacccttratttgggtgggcaccatttaatcaactgccagcatgtctagaatataaagcaggcagaaaaacgtgaaaatgctagactggcttagcctctgagcctacatctttctcctttgctggatgcttcctgcccttgaacatcaaacaccaagtttttcagctttgggacttgggctggcttccttgtccgcagcttgcagatggcctattgtaagaccttgtgattgtgtgaattaatactacttaataaactcccatatatatatatatatatatcccatatgtaaactgatatatatatatatatatatcctattagttgtgtccctctagagaaccctgactaatacagattttggtaccagg

SEQ ID NO: 155785 - DNA, 337 bp, Homo sapiens
agagaggttgggtgacttagcccaaggatgatcggcttagcctgtgatgctgacaggactgaaacctagggcctctgcctctaaatctcagttcatttgactctgtctgtgtccctgacaggcctcagcctgggacagggtgggcaacgaagaggccagagcagctgggtcccaggaaatgagcactccattggggctcgaacccaggaccacctggatakgaagcagatgagagatctccccaccaggcatgagagttgggggagcgggggggcggttattgctggggatgcaggtgaaattattccagtgattcattcatcctaattgacaaggt

SEQ ID NO: 155786 - DNA, 571 bp, Homo sapiens
atcagcaacaggatgccactgcaatagtttcttcacccaggtcttctttgactgcraatcttgccatgttcacacgtgctaacatcctgtgagttttcccacattcacagcttttaaagtcaaacatatgttaaaaaataaactgacactgtttccctcagacattaatactcgttaacacgcacctagattcccacaacttcattttcatacctgtaatttgatttacatgaataactaaatctttgcttatatctacatgaagttatctagaagaagctaccatttcactttcagaagcagagtcttgtggcatagacatcagcctactcaaaatattatcagagatgaataatacattcaagatctatcttgccacagtgacctagtttccatggcaaaggtcatgggctatgattgtataggaaataaggactagaccaggggtaaaccaggtttagcatatgacactttgtcatttccagttatttgacctcctccctgctccctgtttattgatcaagtatggatttatatgcccagagcagactgggcaaattcccttatgccc

SEQ ID NO: 155787 - DNA, 503 bp, Homo sapiens
atcccaataccccaagaattttaagtcattctactatgaagacacatgtacatgtatgtttattgcagcactgttcgcaatagctaagacgtggaaccaacccaaatgcccatcaatgatagactggataaagaaaatgtggcacatatacaccatggaatactatgcagttattaaaaaggatgagttcatgtcctctgcagggtcatggatgaagttggaaaccatcattctgagcaaactaacacaggaacagaaaaccaaatacggcatattctcactaaattaactttctaaaaatgccagttgcttgattcccaccccgcaacacatacatttttttcccatttagaaggcagtgtagagttgttgaaaaagcataaacctatgctcaattccaagcctcactactttctgatcatgagtcattaagcatttcactgaatccctctatgcctgtttttttatttgtagaaytgaggtaataatatctattgtctaga

SEQ ID NO: 155788 - DNA, 484 bp, Homo sapiens
gttatggaattatttggggcttcatcagggtgaatagaatgtctcaagacagctctctgctgtcctgaatgttgatgaatgagggtcctcaacaaatgcccatctgattcagaccactgatgcgaactctgcgctgtcttgaagtgactggccaagagcagggtgcttcctctcagacaaccagtagctccttctcaaagagctgtagctctgctttgcaggtaaagttcaatgatgaactttacctttactgccctatatgaggacaggargggagcataccaatcagagctggagagttgagagattataggctatgctcaatggccagtgggatagcagattggatttatgttcctaattcttaatttctttcttgtaatagaattatactaccacatcctttgccatgtgactttgcagtgcttctcaagagagtaagcagattatataccctgatccattgactttggtcttggtcatg

SEQ ID NO: 155789 - DNA, 658 bp, Homo sapiens
tgaaaatataagtatatggaaaggttgtgaaacttctttcaaattattaccctggaacaatgacaatagttgggatttctcttttgcagagggaagagaagaggcagaaattccagtcctcctccccccaaaattttagtctcgggatttatttgtgctgaaagccagagttatctactgcttgaaacctaagcagaatgcatcagcatttcaggaccacctgggaccaaggggggctgggagacttccagatggattgtaagacaattcactgatatttacataacgagaataaatgtttttcctaagatagcatttcccttcagtgtcttgagaccaccagcaaaagagggaggtacagaaattctattacattaatagtctttgtttttatggctttggcatttattaactagtgggagctgtttattgggtcataaactttactaatggggatattatctctaaattataaatcttgtccagtatatggcttagttataaaaagaatrattatttaaagtgtctgtatggctgcaacgtatcatgtttatcggcatgaatcctataatggccatttcattgctaattgtgggcttgaaccagaaacaaccagggcagtaacacacatctatgcaatagaataagcagttgtcac

SEQ ID NO: 155790 - DNA, 542 bp, Homo sapiens
tatgatttagataaacttaacagagtgtcagcagtacttagataaagcgatttttttattttttgagaaatggtctctctgtcacctaggctgaagtgcagtgaggcagttatgcctcactgcagcctcaacctcccaggctcaagtaatcytcccacctcagcctcctgagtagctgggattacaggtgtgcactaccacgcctggctaatttttgtattttttttttttgtagaaatggggtttcactgtgttgcccaggctggtctttctgggctcaagcaatccacccacctcagcctcccaaagtgctgggattacaggcatgagccactacgcgcagcctagataaagcaaatttttaaattgatttgatacttgattttactcattaaaaaaaaaaacctgaatgctaattgttaaccaactattgttaaattttaagggaaattgggtagcatggtcttaggtctgattataaatgtttgtcttttttgggagcctgtgattttttcaatacaaagcagcttttaaaacatctt

SEQ ID NO: 155791 - DNA, 579 bp, Homo sapiens
ggagggagctctgccatgggctttactttcacacgttatattctacaagtcttgttttacaaaagcatcccttccttgaggcttcggctgctcatcgctgctcatcatcatagcgtgccataacatatagtaagatttgggtttgtttctgggagagatcttggcatagagaaaggagaaatgcttagagccaccatcaagacagttgggatgaaagctggggataggcagaggctggaggaaacatgtgcaccccttgtaaacacttattcatgttttagttattcacttaaagtgttaaattagtaaaaatagtattgaaaaattgaaaaataggcatattaaaacttgtaacactatttaagcttagatatattatttgtacctcatcaacattttttattttgttgagaaagtgtaaggttaattggcagcatatttctaatagtagatagaataatgtctgttttataaayattgacatcctacattacatgtgtgaaccctgaaaatctgagacagctctcagattttttagaaagtttattttgccaatcttgaggatgtgcgcccgtgacg

SEQ ID NO: 155792 - DNA, 579 bp, Homo sapiens
ggagggagctctgccatgggctttactttcacacgttatattctacaagtcttgttttacaaaagcatcccttccttgaggcttcggctgctcatcgctgctcatcatcatagcgtgccataacatatagtaagatttgggtttgtttctgggagagatcttggcatagagaaaggagaaatgcttagagccaccatcaagacagttgggatgaaagctggggataggcagaggctggaggaaacatgtgcaccccttgtaaacacttattcatgttttagttattcacttaaagtgttaaattagtaaaaatagtattgaaaaattgaaaaataggcatattaaaacttgtaacactatttaagcttagatatattatttgtacctcatcaacattttttattttgttgagaaagtgtaaggttaattggcagcatatttctaatagtagatagaataatgtctgttttataaacrttgacatcctacattacatgtgtgaaccctgaaaatctgagacagctctcagattttttagaaagtttattttgccaatcttgaggatgtgcgcccgtgacg

SEQ ID NO: 155793 - DNA, 280 bp, Homo sapiens
taaattagtaaaaatagtattgaaaaattgaaaaataggcatattaaaacttgtaacactatttaagcttagatatattatttgtacctcatcaacattttttattttgttgagaaagtgtaaggttaattggcagcatatttctaatagtagatagaataatgtctgttttataaacattgacatcctacattacatgtgtgaaccctgaaaatctgagacagctctcagatttttwagaaagtttattttgccaatcttgaggatgtgcgcccgtgac

SEQ ID NO: 155794 - DNA, 551 bp, Homo sapiens
tctacagatttgattctgatgtaagaaatgatggtcaccagctggttactgctaccaccccacaaccccgagcatactggacgaatgtctaagccttgtggttagtggggacaatgctggtggagtctgaagttgtcatgcagtgactcatgcaagcttaggcagatttggtgatataygacacagagatgcaaagaaatgttgtagctgacacacaccggctggctctgggagatgcagaaggagcacgtcacccaaaatagagccagacagacatccttaaggaaagagccaaggggctgcatcttaaagaatgaagaaaggatttgtcatgagagatgggacaggaagttcttgagaggcagagggagattgtgagaatgttgggaagggaggagagattctcgcacatctgggaagctgacaatccatcagcatgtccagaaggaaaataaggaggaggagcagaaacagatgaggctggatatagaagcagggctgaagctgtgtcgattgtggtaaagagttgcgattctatccagaaggcaata

SEQ ID NO: 155795 - DNA, 544 bp, Homo sapiens
atttgattctgatgtaagaaatgatggtcaccagctggttactgctaccaccccacaaccccgagcatactggacgaatgtctaagccttgtggttagtggggacaatgctggtggagtctgaagttgtcatgcagtgactcatgcaagcttaggcagatttggtgatatacgacacagagatgcaaagaaatgttgtagctgacacacaccggctggctctgggagatgcagaaggagcacgtcacccaaaatagagccagacagacatccttaaggaaagagccaaggggctgcatcttaaagaatgaagaaaggatttgtcatgagagatgggacaggaagttcttgagaggcagagggagattgtgagaatgttgggaagggaggagagattctcgcacatctgggaagctgacaatccatcagcatgtccagaaggaaaataaggaggaggagcagaaayagatgaggctggatatagaagcagggctgaagctgtgtcgattgtggtaaagagttgcgattctatccagaaggcaata

SEQ ID NO: 155796 - DNA, 540 bp, Homo sapiens
tgattctgatgtaagaaatgatggtcaccagctggttactgctaccaccccacaaccccgagcatactggacgaatgtctaagccttgtggttagtggggacaatgctggtggagtctgaagttgtcatgcagtgactcatgcaagcttaggcagatttggtgatatacgacacagagatgcaaagaaatgttgtagctgacacacaccggctggctctgggagatgcagaaggagcacgtcacccaaaatagagccagacagacatccttaaggaaagagccaaggggctgcatcttaaagaatgaagaaaggatttgtcatgagagatgggacaggaagttcttgagaggcagagggagattgtgagaatgttgggaagggaggagagattctcgcacatctgggaagctgacaatccatcagcatgtccagaaggaaaataaggaggaggagcagaaacagatgaggctggatatagaagcagggctgaagctgtgtygattgtggtaaagagttgcgattctatccagaaggcaat

SEQ ID NO: 155797 - DNA, 540 bp, Homo sapiens
tgattctgatgtaagaaatgatggtcaccagctggttactgctaccaccccacaaccccgagcatactggacgaatgtctaagccttgtggttagtggggacaatgctggtggagtctgaagttgtcatgcagtgactcatgcaagcttaggcagatttggtgatatacgacacagagatgcaaagaaatgttgtagctgacacacaccggctggctctgggagatgcagaaggagcacgtcacccaaaatagagccagacagacatccttaaggaaagagccaaggggctgcatcttaaagaatgaagaaaggatttgtcatgagagatgggacaggaagttcttgagaggcagagggagattgtgagaatgttgggaagggaggagagattctcgcacatctgggaagctgacaatccatcagcatgtccagaaggaaaataaggaggaggagcagaaacagatgaggctggatatagaagcagggctgaagctgtgtcgattgtggtaaagagttrcgattctatccagaaggcaat

SEQ ID NO: 155798 - DNA, 554 bp, Homo sapiens
agatctacagatttgattctgatgtaagaaatgatggtcaccagctggttactgctaccaccccacaaccccgagcatactggacgaatgtctaagccttgtggttagtggggacaatgctggtggagtctgaagttgtcatgcagtgactcatgcaagcttaggcagatttggtgatatacgacacagagatgcaaagaaatgttgtagctgacacacaccggctggctctgggagatgcagaaggagcacgtcacccaaaatagagccagacagacatccttaaggaaagagccaaggggctgcatcttaaagaatgaagaaaggatttgtcatgagagatgggacaggaagttcttgagaggcagagggagattgtgagaatgttgggaagggaggagagattctcgcacatctgggaagctgacaatccatcagcatgtccagaaggaaaataaggaggaggagcagaaacagatgaggctggatatagaagcagggctgaagctgtgtcgattgtggtaaagagttgygattctatccagaaggcaata

SEQ ID NO: 155799 - DNA, 567 bp, Homo sapiens
cttcccctctcccacactgtgaaggatcgtattggacatttttgttttaatgtcagtgacaggggaacacaggtagctctaatatagctgtgacccagatgcttctgtttctagcacgtatttattttgcagcaaacatttacatccatgatgttttactgtyttttgaaaataattaggcaatatctcatctgaggtaggatgtttctaggggttgtgttctgagggaggaaaactaatctgttctctttccactgcattctaggaacagtaagaggaccttgtgcatgaataatttgtttccacactacagagtgggtaataagcagattagtaaaaacaattctgcttcacttcaataacagcctcctccaactcattttttctcaacaaacttatttttccagcagaagaatcccagtcttcttagagaacccagtgactttttgcaccttaaatctgtgaaatcctcatgttttcttctgccgtatccatagttcaaacaaagatgaggcaaagctagatgcattcctgaaggaacccaagaaattcctctctttatttctc

SEQ ID NO: 155800 - DNA, 537 bp, Homo sapiens
gcaggggcacaatacttccaayctctttgctagtgcataacaaaagcgatctttgctccagttcctggtaagttcctcttctccatctgagaccgcctcagcctggacttcatcgtccatatcacgctcagcattttggtcacaagaatttaacaactttttaggaagttccaaactttttctcatcttcctgtcttcctctgtgccctccaaactgtttcaacctctgtccatgacccagttccaaactctgccccttacccagtttgaaagtcacttccacatttttaggtatctttatagcaatgcctcactcctcagtaccaattttctgtattagtccattctcgcattgctataaagaatgacctgagactgggtaatttataaagaaaaaaaatgttacattgactcacagttccacaggctgtacaggttaacatggctggggaggcttcaggaaactttcaatcatggtggaaggcaaaggaaaagcaggcatgtcttatatcactggagtaggagggagaacttcta

SEQ ID NO: 155801 - DNA, 194 bp, Homo sapiens
aaagtaagggtctgctttgtgagttgaatgtacacatcaaaatgaagtttctgattatacttctgtctacttcttatgkgaagatatttccttatccgcaatggtcctcaaagccctcgaaatgcccacttgaagattcttcggaaagactgtttcaaaactgctctatcaaaagaaagtttcaactttgtgtg

SEQ ID NO: 155802 - DNA, 186 bp, Homo sapiens
gttgaaactttcttttgatagagyagttttgaaatcgtctttccgaagaatcttcaagtgggcatttcgagggctttgaggaccattgcggataaggaaatatcttcccataagaagtagacagaagtataatcagaaacttcattttgatgtgtacattcaactcacaaagcagaccctaacttt

SEQ ID NO: 155803 - DNA, 350 bp, Homo sapiens
atctgggttcttcacatcacatttgtattgtcattcgactggcagtgcgctcacagctgcctctccctgtctgacagtgaactcacagctgcctccccctgatttcctgcctttgctgtccaatggcccctcttctccttatatgcttctgtyttctcttcttgtaaggacacagtcctactggattagggcccacactaattacttcatgctaactaattacatctacaaagtccctatttccaaataaggccacatgcacaggtcctaggggctagggcttctacatctgtttgagggacacaatcagctgggacactccgtgaatgacgatagaaatgtgacatgaa

SEQ ID NO: 155804 - DNA, 462 bp, Homo sapiens
agatcttttcatattgtatcacaaatctccaatgctttgtttatattttggagcagataatttccactaatctatcctcaagtatatggactcttccctttgtcaattctattacaccgctaaagccatccagtgatggcttttaatttcagctgttgtaattttcagttctataatttccatttgatacctttttagagtttccacttctccacgagctttcctatcttttcatttatgacatgcatatcctttacatccttgagcataattataatagctgctttaaatttcttatctgctaactccaacaacagggtcaccttggggttattctcaattgatcaatttccttctcttgataatgytttatattttcttggttccttgtatgtttcataatattggattgtatattggatattgtgtatattacatggtggagactctggattctgttat

SEQ ID NO: 155805 - DNA, 462 bp, Homo sapiens
agatcttttcatattgtatcacaaatctccaatgctttgtttatattttggagcagataatttccactaatctatcctcaagtatatggactcttccctttgtcaattctattacaccgctaaagccatccagtgatggcttttaatttcagctgttgtaattttcagttctataatttccatttgatacctttttagagtttccacttctccacgagctttcctatcttttcatttatgacatgcatatcctttacatccttgagcataattataatagctgctttaaatttcttatctgctaactccaacaacagggtcaccttggggttattctcaattgatcaatttccttctcttgataatgctttatattttcttggttccttgtatgttkcataatattggattgtatattggatattgtgtatattacatggtggagactctggattctgttat

SEQ ID NO: 155806 - DNA, 421 bp, Homo sapiens
agccaaccaacctatgatggttcctaatcttcacctattcttttccaactagtacccctcacgggcagttgtttttcctttgggcttccatacacttcctaggcagggacttcttagaaacattccaggcccatattttattctcccagaaaggagaaataatgcttgagttatcctcaccaggagatttggccayggaaataccttttacccaaattcccatctattcagttatccccaacactacctgccctgttctctaacagctataatccaacactcatgataatccctcagattatgaagataatagttgtggatactctcaaggatataattcatctagaagggttaaccctagaaggagctagattaggaaggtttttccggtcccaatttaaactagattctgcttggaatt

SEQ ID NO: 155807 - DNA, 424 bp, Homo sapiens
gtagccaaccaacctatgatggttcctaatcttcacctattcttttccaactagtacccctcacgggcagttgtttttcctttgggcttccatacacttcctaggcagggacttcttagaaacattccaggcccatattttattctcccagaaaggagaaataatgcttgagttatcctcaccaggagatttggccatggaaataccttttacccaaattcccatctattcagttatccccaacactacctgccctgttctctaacagctataatccaacactcatgataatccctcagattatgaagataatagttgtggatactctcaaggatatawttcatctagaagggttaaccctagaaggagctagattaggaaggtttttccggtcccaatttaaactagattctgcttggaattc

SEQ ID NO: 155808 - DNA, 565 bp, Homo sapiens
aaggtgataaggaaaacatttagtttctgggtccaaggtagagaggaaaattcaaacaatttatttttggagtggaaattattatgattgtctagtgattttgaccagcatccctcaacaaactcactggtctccacatatttggaaaacacatcgttgaaccaaaatttgcttttaccaattgaataacattttgcttcaataagtattacttgagctcctatgaaacactcagtgtaggtcgtaaggagtgtgaagaaatcgtttctgcctacagagtagaataggacagactaaaacaaatgaaaatggatggaataagattaaaacaaagagccttcgcaggtcatggaagactcttcttgatctggcacctgccatggaagactcctcttgatctggcacctgcctgcctcagcagcacctttcttttcatcctctctccgtttctcaaaacaagcctttwttaatatttacatatatgcatgcatgcacggatgcatgcacatcattactattccagaaacaccgtctacctccatttccccagtacatcatgctatat

SEQ ID NO: 155809 - DNA, 521 bp, Homo sapiens
agcctttccctctgggggtagagatgggaaggaagcctgcccttggagactgacaatcacagaaccaggtgggccagcacccacctggcctatgaacccttgttgtaaccatgggaacctcgtagcttggaaaggaggggtcaggtagcccaggccacatgaaaagctgtggctggtccagccctgrcatcagcttttctggttctgtctgctgtcccttttttcccatacctcacttgcaatagaagaggatgaagccgtgctcgctgccctgcatgttgggtggtctggaaccattcaggatgatattgagccctcagactctcttagagcaaggaacccctggcttcacaggatgtgggatctcagaggcagcccagaggcggggaatggaatggagtgcttctaaggaagagggactctccgtgttttctctggggaattttctaacattgagatcgaagaatgaagttggaggtgcctttcttttctttaagaagtaatcatttccaagactagcc

SEQ ID NO: 155810 - DNA, 419 bp, Homo sapiens
atgtgaactactcttttacagacctgcactgagtgccttctgtgtccagggcactgtgagtggagtccctgcgatccagagtatttgatacagatccagccttaggagatagtaatgtatttggagagatgagacatgcatgcatcctaaggacataatttatattttatttcaagrgcaagagaacactaagagaggaaagctccgatgcaaggatcttgctgtggatgacatccttgaggccatgccttcatgtctggcacatgattttgaatacccatccctcttttgtccttctgcctagaatttctttcactcataacaacatcactccaaccttaaagcccagcatgaataccccttcttccatgaagtattcctgacttggccacctggaaatgctgtgttttcttggaatt

SEQ ID NO: 155811 - DNA, 419 bp, Homo sapiens
atgtgaactactcttttacagacctgcactgagtgccttctgtgtccagggcactgtgagtggagtccctgcgatccagagtatttgatacagatccagccttaggagatagtaatgtatttggagagatgagacatgcatgcatcctaaggacataatttatattttatttcaagggcaagagaacactaagagaggaaagctccgatgcaaggatcttgctgtggatgacatccttgaggccatgccttcatgtctggcacatgaytttgaatacccatccctcttttgtccttctgcctagaatttctttcactcataacaacatcactccaaccttaaagcccagcatgaataccccttcttccatgaagtattcctgacttggccacctggaaatgctgtgttttcttggaatt

SEQ ID NO: 155812 - DNA, 337 bp, Homo sapiens
accctgtctcaaaaaaaaaattgcattaaaaataaaagtaaatagacactaaaatgaaagcayagattataagactgatgaatgtactctaaaaaaattatataataaagcaaagcccttattttttttcttttttggagacagggccttttttgtcaccttggctgagtgcagtggcacaatcagagctcacttcaacctcaagttcctgggcttaatcgatcctcctccatcagcctcccgagtagctaggactgcaggtgcacaccactacaccaagctaatttttgactttttgtacagatggggtctcactacattgcccaagctgtgccag

SEQ ID NO: 155813 - DNA, 589 bp, Homo sapiens
atcaataaatagcaaacctggtcctttttaagacactgtgtataaaaaaattccaaaaagattaaaatcartgcagaaaccaaagaaccatttttttctatatcatattgatcatttcaagtggaactgttagctatcttagaaaaattgtggttctcaattggttttgcctctatctctgaaccaccattcctaaaggaaaacattcaaccagaaaatttcagcacatcacaatctctctgaagattaagaagtctctgtgaaggactgaatgtataaattgaaaaatttttgctgtcacatttaggtaaaagagaaatcgttcttcatatccccttcctttccatctgtagctcacctatgtcaactttcctctcagaagtgaaataaaattaaagctatgacactgagtgtcagtcatggagggacacgttccccacttagcctttgctgaagtgtttccagagacaactgtctaatgccaggtccccacttagtgggctgcacttttctactcatttgcacataatccagaagtcacattttgggttcacagtttccactggggtaacctcattaggcctggcca

SEQ ID NO: 155814 - DNA, 589 bp, Homo sapiens
atcaataaatagcaaacctggtcctttttaagacactgtgtataaaaaaattccaaaaagattaaaatcagtgcagaaaccaaagaaccatttttttctatatcatattgatcatttcaagtggaactgttagctatcttagaaaaattgtggttctcaattgsttttgcctctatctctgaaccaccattcctaaaggaaaacattcaaccagaaaatttcagcacatcacaatctctctgaagattaagaagtctctgtgaaggactgaatgtataaattgaaaaatttttgctgtcacatttaggtaaaagagaaatcgttcttcatatccccttcctttccatctgtagctcacctatgtcaactttcctctcagaagtgaaataaaattaaagctatgacactgagtgtcagtcatggagggacacgttccccacttagcctttgctgaagtgtttccagagacaactgtctaatgccaggtccccacttagtgggctgcacttttctactcatttgcacataatccagaagtcacattttgggttcacagtttccactggggtaacctcattaggcctggcca

SEQ ID NO: 155815 - DNA, 589 bp, Homo sapiens
atcaataaatagcaaacctggtcctttttaagacactgtgtataaaaaaattccaaaaagattaaaatcagtgcagaaaccaaagaaccatttttttctatatcatattgatcatttcaagtggaactgttagctatcttagaaaaattgtggttctcaattggttttgcctctatctctgaaccaccawtcctaaaggaaaacattcaaccagaaaatttcagcacatcacaatctctctgaagattaagaagtctctgtgaaggactgaatgtataaattgaaaaatttttgctgtcacatttaggtaaaagagaaatcgttcttcatatccccttcctttccatctgtagctcacctatgtcaactttcctctcagaagtgaaataaaattaaagctatgacactgagtgtcagtcatggagggacacgttccccacttagcctttgctgaagtgtttccagagacaactgtctaatgccaggtccccacttagtgggctgcacttttctactcatttgcacataatccagaagtcacattttgggttcacagtttccactggggtaacctcattaggcctggcca

SEQ ID NO: 155816 - DNA, 589 bp, Homo sapiens
atcaataaatagcaaacctggtcctttttaagacactgtgtataaaaaaattccaaaaagattaaaatcagtgcagaaaccaaagaaccatttttttctatatcatattgatcatttcaagtggaactgttagctatcttagaaaaattgtggttctcaattggttttgcctctatctctgaaccaccattcctaaagraaaacattcaaccagaaaatttcagcacatcacaatctctctgaagattaagaagtctctgtgaaggactgaatgtataaattgaaaaatttttgctgtcacatttaggtaaaagagaaatcgttcttcatatccccttcctttccatctgtagctcacctatgtcaactttcctctcagaagtgaaataaaattaaagctatgacactgagtgtcagtcatggagggacacgttccccacttagcctttgctgaagtgtttccagagacaactgtctaatgccaggtccccacttagtgggctgcacttttctactcatttgcacataatccagaagtcacattttgggttcacagtttccactggggtaacctcattaggcctggcca

SEQ ID NO: 155817 - DNA, 213 bp, Homo sapiens
gaattcgagcccctgctctgccacatacttgctgtgtcaccttgaacaaattacacagcctccgtgggctttggggataaatgtgagayggcatagagaactcatctcctctgctgactgattctgatcctttggtttgactgcctgagcaccatgtgatgagctctgtgagggctccatggagggaaaatgcagtcatctattggtgatatc

SEQ ID NO: 155818 - DNA, 500 bp, Homo sapiens
gaattcttggaagtctgtaccgtgctggccttggtttgtgatgaagctcacacacgatgtctgtaaaaccctgaagtccagccaggtgcggtaaaagagtatggtgacttcagagtttaagagcaggtcattttgcaataactttttataagagtacatggccatctttgccttaggatagtgaagtggtattttccaggacagaagaactgaaatcatctgaatttctaggttgtagatcccacagtccttgggaattttgacttacaaactaggaaattatttcaccctcataaaaatctccaaccctctcaggtctttcccactcccacttgggttkgaattggagtgtttgcccagccatggtgatgattaggaggtgtagcaatatgggcccagaaggcgactttgggattcatctctcatctctcgtagtgcatgagagaagccagctcacggctctcttagaaaacatccattgttcctgaaacctgcagtaa

SEQ ID NO: 155819 - DNA, 437 bp, Homo sapiens
tttctgcataggggaattcttcctctatgggactattttcttaagggcatcacttggtgtgaatgtggttcctaatgagctgatactcctctaggaggtcaagttgaaagatcaagttgaaagatagtatgagagtgtctctgttgacattggtttgaggttatctctgacactgggggattgctgtagcctgagctttgtaaaattccattaaatggtagttttacaaattgccattarctttcctatcatatgcagtgcttaatggaaaagagctggactagaggccccaaaactctttatactggctgagctgctaacccaccaagtgttgtctccaaagtcaagcccccttataccctcagggggcaaaacatctagagttgggggacacaggagtcagaagcaactgcttcagagtttccatggagggggtc

SEQ ID NO: 155820 - DNA, 424 bp, Homo sapiens
tttctgcataggggaattcttcctctatgggactattttcttaagggcatcacttggtgtgaatgtggttcctaatgagctgatactcctctaggaggtcaagttgaaagatcaagttgaaagatagtatgagagtgtctctgttgacattggtttgaggttatctctgacactgggggattgctgtagcctgagctttgtaaaattccattaaatggtagttttacaaattgccattagctttcctatcatatgcagtgcttaatggaaaagagctggactagaggccccaaaactctttatactggctgagctgctaacccaccaagtgttgtctccaaagtcaagcccccttataccctcagggggcaaaacatctagagtkgggggacacaggagtcagaagcaactgcttcagagtttc

SEQ ID NO: 155821 - DNA, 507 bp, Homo sapiens
aggggggataaagcaacacaccgtaagttcatgatgttgtgttgctgtgtgaatacaatgggggagcatgtgggtgtacacacacacacacacacacacatacacacatgcgcacacgtgwtctgcacatacgtccttatctccagaaggagtcttaatcagcaaaaggcaagagctgactcaagagatggacatgacaggaggagcaaaccagaaatcaggaaaggaggccttattctttattctacgcccatttacaaaattgtgttctgagctaacttgttaaaaatttaagttactacccatttaaaaaaataaaatgtcccttttcactgcactggctgtttataatctccaatcccccagactacagcttgcttcagttgccagacacaccttaaataaacacccctcaaaactggctgaaacactgcattctcatcacccgtagccaggtcactgggaaccaagttagcagcagccattatcttcttgtgaaactcttgt

SEQ ID NO: 155822 - DNA, 547 bp, Homo sapiens
ggaactagctctgtgatacattaagtggaggggggataaagcaacacaccgtaagttcatgatgttgtgttgctgtgtgaatacaatgggggagcatgtgggtgtacacacacacacacacacacacatacacacatgcgcacacgtgatctgcacatacgtccttatctccagaaggagtcttaatcagcaaaaggcaagagctgactcaagagatggacatgacaggaggagcaaaccagaaatcaggaaaggaggccttattctttattctacgcccatttacaaaattgtgttctgagctaacttgttaaaaatttaagttactacccatttaaaaaaataaaatgtcccttttcactgcactggctgtttataatctccaatcccccagactacagcttgcttcagttgccagacacaccttaaataaacacccctcaaaactggctgaaacaytgcattctcatcacccgtagccaggtcactgggaaccaagttagcagcagccattatcttcttgtgaaactcttgttggctggaccag

SEQ ID NO: 155823 - DNA, 580 bp, Homo sapiens
taaccctgcaatgagtcttgacaatgctgaagtcaaatgactttttcaaacctttctaatgcttggctataatctaaaggaagcattgcacttcgagtgctgattttttatgaagctcgtaaacctttttctttaaatgccaatgtgctgaaaagttatgagtattaaagacttagaaagtgcctttaaaagtgtgggaaaaggtccctcttttcttgattatgattcttgaatgctagtaatgatagtagtagtaataaatgtcattcttcactagaatagttttttccaaagacctttcgggtctactctcaagttctttcctatctttgtgtgaggtggaygatgtcactagcctcacgtggcagaacggggtcagaagctcagagtttaagtaatatggcctggaattagaacccaggagtattgctccttcttgtaaactctgatgcctgggtttttacatggtgtctatctgtaatggcttataacagagttgctcctccagaagttttagcctcgttcctgcttgataggcagggcctcccattgggcctgacccaggatacatgcttggttg

SEQ ID NO: 155824 - DNA, 580 bp, Homo sapiens
taaccctgcaatgagtcttgacaatgctgaagtcaaatgactttttcaaacctttctaatgcttggctataatctaaaggaagcattgcacttcgagtgctgattttttatgaagctcgtaaacctttttctttaaatgccaatgtgctgaaaagttatgagtattaaagacttagaaagtgcctttaaaagtgtgggaaaaggtccctcttttcttgattatgattcttgaatgctagtaatgatagtagtagtaataaatgtcattcttcactagaatagttttttccaaagacctttcgggtctactctcaagttctttcctatctttgtgtgaggtggacgatgtcactagcctcacrtggcagaacggggtcagaagctcagagtttaagtaatatggcctggaattagaacccaggagtattgctccttcttgtaaactctgatgcctgggtttttacatggtgtctatctgtaatggcttataacagagttgctcctccagaagttttagcctcgttcctgcttgataggcagggcctcccattgggcctgacccaggatacatgcttggttg

SEQ ID NO: 155825 - DNA, 581 bp, Homo sapiens
agctttactcatggctttagggagtgacggtcatgcttcattccaggcctcaaagccttagccatycccaggccttgctctgcccaggcccaggctggcccttgggcaggcttatggggagccaggccagaagaggagaaaagcgccatattgtgtgacatgcccctggctcagagcgggctgtgcctgggagcggtgcccttccgcaggagacagggtgtgcgggtgggacgctggagtgcctggctggtttgggccccactgcatgcagagcaaggcccagcctttggggagggaggcctggtgtggcggagcagagcagggaccagctccaccaggcccatgggtggaaccacacaggctgtgggcagcggggggctgcagccacggcaaggaccccagacccagggtggtctccagggctcttttgcagtaggagtggcaacagagttggggaggctgacaagtgggaggcctgcctaggctctccccgaccgctgccttcccccacaccccatgtctcaggtgccctcctgtgagtcgagccgtcttttccagcaggagcccgtcagctgatagca

SEQ ID NO: 155826 - DNA, 581 bp, Homo sapiens
agctttactcatggctttagggagtgacggtcatgcttcattccaggcctcaaagccttagccattcccaggccttgctctgcccaggcccaggctggcccttgggcaggcttatggggagccaggccagaagaggagaaaagcgccatattgtgtgacatgcccctggctcagagcgggctgtgcctgggagcggtgcccttccgcaggagacagggtgtgcgggtgggacgctggagtgcctggctggtttgggccccactgcatgcagagcaaggcccagcctttggggagggaggcctggtgtggcggagcagagcagggaccagctccaccaggcccatgggtggaaccacacaggctgtgggcagcggggggctgcagccacgscaaggaccccagacccagggtggtctccagggctcttttgcagtaggagtggcaacagagttggggaggctgacaagtgggaggcctgcctaggctctccccgaccgctgccttcccccacaccccatgtctcaggtgccctcctgtgagtcgagccgtcttttccagcaggagcccgtcagctgatagca

SEQ ID NO: 155827 - DNA, 581 bp, Homo sapiens
agctttactcatggctttagggagtgacggtcatgcttcattccaggcctcaaagccttagccattcccaggccttgctctgcccaggcccaggctggcccttgggcaggcttatggggagccaggccagaagaggagaaaagcgccatattgtgtgacatgcccctggctcagagcgggctgtgcctgggagcggtgcccttccgcaggagacagggtgtgcgggtgggacgctggagtgcctggctggtttgggccccactgcatgcagagcaaggcccagcctttggggagggaggcctggtgtggcggagcagagcagggaccagctccaccaggcccatgggtggaaccacacaggctgtgggcagcggggggctgcagccacggcaaggaccccagacccagggtggtctccagggctcttttgcagtaggagtggcaacagagttggggaggctgacaagtgggaggcctgcctaggctctccccgaccgctgccytcccccacaccccatgtctcaggtgccctcctgtgagtcgagccgtcttttccagcaggagcccgtcagctgatagca

SEQ ID NO: 155828 - DNA, 506 bp, Homo sapiens
gggcccagagaaggacgcagactcctcccaccaggagccaaggttaccctcccccaaccctgagtgtctaattcccacgaactctccttcttaaaggagggcagggagagaaacgaacagcaagaaccatagctatttggtgcaaaaagaaacgtggtcactgagagattccaggaagtgtcaaggccagccaggtttaccgctgccgtgctgagccctggcctaggracaggtgagccccctccccacagtgccacaggggcgggcagggcctgctccataaagccatcattgtgtcccacctctgtgcccccacccagggcccgggtcccaccaaggccctggggccctgcccaagaagaagcttccatcagaacagtcaactgacttgtcaagccaactgtaatctagcaagagggcgactctttaatagcagtggcgatgaatggaggtaaaaagagcaggacctggtgacgaggagcatgggggccggccatcatcctcca

SEQ ID NO: 155829 - DNA, 489 bp, Homo sapiens
gaagctctattccccagtattttagaatgtaatggtattcaaagacagggcctttaaagaagtaattaaaattagccagatgtggtggtggatgcctgtaatcccagcyactcgggaggctgaggcaggggaatcgcttgaacccgggaggcggagcttgcagtgagccgagatcacaccactgtactccagcctgggcgagagagcgagactccatctttaaaaaaaaaaaaaaaaaaagaggtaattaaggttaaatgaagtcataagatggggccctaattcaacaggactgatgtccttataagaagagaaagagacagcagggaggggtgtgcacagggaatagaccacgtgcggacacagcgggaagatggctgtctaccagccaaggaaggaaggcgccggagaaaccaaacctgctcacaccttgatcttggacttccagtctccagagctttggggaaataaactcctgttgttgaattc

SEQ ID NO: 155830 - DNA, 504 bp, Homo sapiens
aaaattcctgtggtgaagctctattccccagtattttagaatgtaatggtattcaaagacagggcctttaaagaagtaattaaaattagccagatgtggtggtggatgcctgtaatcccagctactcgggaggctgaggcaggggaatcgcttgaacccgggaggcggagcttgcagtgagccgagatcacaccmctgtactccagcctgggcgagagagcgagactccatctttaaaaaaaaaaaaaaaaaaagaggtaattaaggttaaatgaagtcataagatggggccctaattcaacaggactgatgtccttataagaagagaaagagacagcagggaggggtgtgcacagggaatagaccacgtgcggacacagcgggaagatggctgtctaccagccaaggaaggaaggcgccggagaaaccaaacctgctcacaccttgatcttggacttccagtctccagagctttggggaaataaactcctgttgttgaattca

SEQ ID NO: 155831 - DNA, 534 bp, Homo sapiens
gcagcccctaggatctgaatatgtgggaacacagcccaactttatcacttagtatctgttatcaacatgggtagatcagttaacttttctgtgccttggtttctccctctattaagtgggaatcataagcataccctcctcatggagggttgtgaggattatctgccataaaggcttttcccccacttttyaataagttatgttattttataaaatagctcaaaagaattacatgaggatattctaggtaaataagcatttcaattatggtagaagaaaaaaatacatcttaacataaagtcttaaattaggtctgctagtcaatatggcaggttcagaaactcatcaattgctctgagagagggttccaagcaatgtagcttgctgggactggaagaggatttgttacttttgatttgatcactactttctgatctaactgggggcaacagactggttgatggcacctagttcatgaacagtccttggtgacaaatggaataagctctaatcatccaagtgttggcttcccct

SEQ ID NO: 155832 - DNA, 567 bp, Homo sapiens
taaattggttcaagtaatttgcacatagcctagaacccagcagttccacatatagatttctatttgagagaaactctggcacatattcactttgtagacacttattcaaaggttccaggcagcactgtttgtaacagacaagtattagtagcaataacagttaaaaggaatatactagatctatttgtatcaacatggataaatctcaaacatcactgctaattgaaaaaggcaagctgtagaataaaatgcataygacaccattttgtcaaacacacacatactgatgatactaaaatgatattctgaaaactcataatactggttacctcttgacctctttttctacagcaacacaactaatgctttactcctgttgttccatatccatttccccctaaggattccctatctctctcactctctctgtattagtctgctctcacactgctgataaaaaatacccaagactgggtaatttatacagaaaaagaggcttaatagactcacagttccacgtggctggggaggcctcacaatcatgatggaagttgaggaggagtgagt

SEQ ID NO: 155833 - DNA, 575 bp, Homo sapiens
cagaatttgctttctaggcccttgaccagcctcctgcgccattaattactgcccatgattccatatgtattcttatgtcagaycacctctctttccacacaaagtgaatgaccaagtgtacctggtgaagcttctgtcattggaaagattgtctctccctactctttttcaagggcagtcctgaaggggattgtaaagcagcctcatttattttcagcttttacacacaaacagagccaacacatttacaaatgaagctcaggctgtctcttctgacttcagctggtcatgtgggaccctctgtatgaccagtaggtataagctaaagaaggaagtgggagcctgcgctaccgcctcaggcaggtcacacgtgctacttgttctgcctgggctgatcccaggtgtacccttttctatccttatggcggacttctgctgggcagttttctaccaccacctggcctgtactatttcagggactcattgtcaccactgctattagcaagctactctctgagattgcttctccttttgtcagccctggactgtggaagaggatcaccactgaattcctt

SEQ ID NO: 155834 - DNA, 497 bp, Homo sapiens
ggaaatgggtaacatttattgataagcaactatatatatatatatatatataactatataatttttttttttttgagagggagtcttgctctgttgcccaggctggagtgtagtggtgtgatctcatctcagtgcaacctccggctcccgggttcaagccattctcctgcctcagcctcctaagtagctgggattacaggtgcatgccaccacgcctgactaatttttaatttttagtagagacgggatttcaccatgttggtcagggtggtctcgaactcctgatctcgtcatccacctgtgtcggcctcccaaagtgctgggattacagatgtgagccaccgcgcctggcraagttctatattttttaaggacacattttgattgaggccagtttcagtttaagcaagaacaagattaagaagttgttatgtgagtggagagttatactaaaaaggtttttaaaatcgtcatgaggatatgcaaaaagagaattc

SEQ ID NO: 155835 - DNA, 554 bp, Homo sapiens
tgcagttgtcttgctgtgaagaataattgggaagtttgatcaaatctctgctaagaaaaagtgctatgatcctaagaacttaaaagcttcttgtcagggaagttatctgatgcagtgaccttcaacatggtgacacatcttgcttgttcagacaacactttttaaaaataaatttgagggtctgctctattcaaagcacagaataattgctctgagaaaaaattgtaaatacgtgtcaaatctgtgtgttggaattaaccaaaagcttaacagtagtttagcaacatagtgataatgatacaagaaaatggaaacayggcacaagattggatgcacatatatacagtcctccatcccttattcatctactttcattctgaccaacttgcgctttatcctttcctagtctttaatcctctgagtgagtcccaggcattaccctcctgcttccttctctcttcattcatttattcagcaaatatttattgatcattgcttatgtgccaggctccctgctaagcacaaaagatacagccacgcacaaggcacatagg

SEQ ID NO: 155836 - DNA, 496 bp, Homo sapiens
tgctcttggcttactaactggctctcccgtgtggctgacaccatgtgggaagaccccctattgctgtgtgctgctgcctgccgtcttagttgagtgctgccaaaactcccctccctatgttggatgggtcctagaaagtccacgtcctccctgggaaccataaattgccaaccttagtagggtaagaggggtgaccatggtcattatcactccycagaataggaactactggtcagactgaaatggactatattccaaggccttggatgtctcattattactcattacttacaggcaggagcaggtgacatggctcggatgtttgtcccctcaaatctcatgttgaaatgtaatccccaatgttggaaaaggggcctagtgggaggtgttgaatcacaggggtgaatccctcataaatggcttagtgacattctcatgataatgagtgagttcttgagatacctggttgtttaagagagtgtgacacctcccccat

SEQ ID NO: 155837 - DNA, 496 bp, Homo sapiens
tgctcttggcttactaactggctctcccgtgtggctgacaccatgtgggaagaccccctattgctgtgtgctgctgcctgccgtcttagttgagtgctgccaaaactcccctccctatgttggatgggtcctagaaagtccacgtcctccctgggaaccataaattgccaaccttagtagggtaagaggggtgaccatggtcattatcactccccagaataggaactactggtcagactgaaatggactatattccawggccttggatgtctcattattactcattacttacaggcaggagcaggtgacatggctcggatgtttgtcccctcaaatctcatgttgaaatgtaatccccaatgttggaaaaggggcctagtgggaggtgttgaatcacaggggtgaatccctcataaatggcttagtgacattctcatgataatgagtgagttcttgagatacctggttgtttaagagagtgtgacacctcccccat

SEQ ID NO: 155838 - DNA, 496 bp, Homo sapiens
tgctcttggcttactaactggctctcccgtgtggctgacaccatgtgggaagaccccctattgctgtgtgctgctgcctgccgtcttagttgagtgctgccaaaactcccctccctatgttggatgggtcctagaaagtccacgtcctccctgggaaccataaattgccaaccttagtagggtaagaggggtgaccatggtcattatcactccccagaataggaactactggtcagactgaaatggactatattccaaggccttggatgkctcattattactcattacttacaggcaggagcaggtgacatggctcggatgtttgtcccctcaaatctcatgttgaaatgtaatccccaatgttggaaaaggggcctagtgggaggtgttgaatcacaggggtgaatccctcataaatggcttagtgacattctcatgataatgagtgagttcttgagatacctggttgtttaagagagtgtgacacctcccccat

SEQ ID NO: 155839 - DNA, 507 bp, Homo sapiens
gatttgtgtgttttttgtgatataaaacacatttttatagtagaccatggtcaaaaatgattaaaggccactaatgtaatgataaattcttatcaaaagaatttttccattacatagactgtcatgatcattattgcaaaactgttttcattataaaggtttgcttgtcttttttttgtgcgttttgctataagctataacttttttattttttattttattttttatttattattattattattatactttaagttttagggtacatgtagtgcacatgtaccctaaagctataacttttaaaaagaagtagatgttcactytatttttctctctagaatatttctctataagatgaaacggttttcttctttaaatgccagaattaatttcagaacaatacaattatcaaattaagtttgtacctagaaaataatttgctttcaattatatgacatctaaagcaaaaaaaaatgtgattcttaaatgtaaacttgtcagacaaat

SEQ ID NO: 155840 - DNA, 390 bp, Homo sapiens
agcagtgacatatatttcaaggatctgaggatttcttagcatattggcaacttctggaaaatgtaccatctagcagactgttgtgtcactggtctagttccccctctaccttcatcaggacaaaaataatgtcytggaatttgttagatctttattaaaaatatgcatatgtgcatagcatggagagtggggtgaagaggaaagacagaaaaaaagaaagatggggaaatggggagacaggaacaggaatgagatagagtgagggagcaagagaagtaggagataggaagagagactcaagctcaattgttgggggcttttatgtcttctaccatttatttatcttaggaactctttgagaaatatttactaactaaccatattatagat

SEQ ID NO: 155841 - DNA, 537 bp, Homo sapiens
taagctttcataaaaatttcattaaatgagagtgctgctgggtttcaggtgcttgagaactgaatttcaaactaacagttctcaccctgagtgctacctctatgcttaatcattgtggactcgaatcatatccttactttgctcaacaaaacgatgtgtcaagggcatcagtgtcagaatattttcttgaattcagtattaagcctaattgccatgattaattgtagaaaacatcacactctgataagactgctttactgatcttgaagaccaagcaatgcaactattattaattgagtgctattcttcacaggaagcagsgtgtgtgccttacaaggccaacttttactgctttagaatacaatgcttatattatccctactagagtgagcctgtttactatgattttattttattttctgtccgcatagcaatgggtttgtaatttttaaacacaccatttaacaacagaaagatgtaggctacgaaaatgctttgtagtgacagaaaatgcatcccaaagattgtgtgtttaga

SEQ ID NO: 155842 - DNA, 605 bp, Homo sapiens
gcctgcacagctttcaagttctaattcgcccagatgtactcaagaacatgttgtggtattaacaataactgtttttcaattaacagtcaatatgtggaggaaccaaaaaaaattaaaaggctcctttgcacttaatttttcccacatgctacttaaaaggcattttctctcccttttaatgttaattgaatcatcatccgcttgtcacttaaatttcaaatacatgggaggacacttctctaagtgctgacatgtagttagaggtcacactacaaacccagatgtccctactctcattactcatctcaatcwcagcagggaagacaggtataatatctaaagggcagtttaattcttctgatgatttttttaaccataatcttattaaaaagcttaaactttccatttgaatttcctttttctgaagttttctatggtctctctgaacacaagtacactctggatgtcctttaaaaaaaaaaaaaaagattcttagaaggattctaaatcccttaaactatccagattccatgaacattctacacgatatttgcctaactctaatgtttgcttattcttctctttcaaggttcaactcctccctt

SEQ ID NO: 155843 - DNA, 625 bp, Homo sapiens
gtttctgggcttggaaatgtgaaaattgcatggagaaatagcatgagcacaggaaaaacatctgaagactatatgagcaaataaaattgatgtggcaaaaattgaattttgaattaatgacagaagaagctattaacaaaataactgcaacctataatcagaacactgattatatgcctagtccatttctacaactgtgcatatgaaataatatttataccatcacattggtctaagaaaagtacatgactccttgcagcatttttacgttgtggcctttacaacgtcaataacaatcttcaagtgtattcattcaaaacatacatgtctgtttagtaaccactatgtggaaagtcctccaccatccattagagatatttaaagatgaatgagatgcaatctttgccatcaggcaggtaaacaactagyttgaatgcaatcacccagcacaaatggtggtaactggcagagtcttcaatgcagaaatgatttatctggtataagtgtatactgtgtcacagcatataattcctaagtgccctgttctgctctgctgagagatttctaatcaaaatctgctttgttctcatttaagtagaaggtagatttgctacaaaactttgct

SEQ ID NO: 155844 - DNA, 573 bp, Homo sapiens
tatactggtaataacttaaaagagcttgctgtatgagagaaatctgcacataataaaagctggctatacatttgagagtctaaaaaaaygcacacaaaacaaaaaggactcaaagaggtagaaaataggcccattattgggaggggacaaaatttggggtaagagcgcatattaacatgcctagattttaagtttatctttaaaatgtacaaagtgctggattgcctggagggaaaagtacattaatctggtcatcagaaggccagctgtagtccaagtctatcagtctttggccgtaggagaccttaggaaagtcagctaagagcattggacctggaatctactcatcgcttgcaaaatgagagggctcattaactgagcttgtaagtctttggtagctttaaaaatgtaactttctttgatatatctctacttgcagaatttcaaaggatggctcaaactacactcaccaatttcaaaattttctctcttaaatttttgtgactctgatttggagcccatgctattttaaaaactcagtaaaacagataccccaataattgagtctaaatt

SEQ ID NO: 155845 - DNA, 573 bp, Homo sapiens
tatactggtaataacttaaaagagcttgctgtatgagagaaatctgcacataataaaagctggctatacatttgagagtctaaaaaaatgcacacaaaacaaaaaggactcaaagaggtagaaaataggcccattattgggaggggacaaaatttggggtaagagcgcatattaacatgyctagattttaagtttatctttaaaatgtacaaagtgctggattgcctggagggaaaagtacattaatctggtcatcagaaggccagctgtagtccaagtctatcagtctttggccgtaggagaccttaggaaagtcagctaagagcattggacctggaatctactcatcgcttgcaaaatgagagggctcattaactgagcttgtaagtctttggtagctttaaaaatgtaactttctttgatatatctctacttgcagaatttcaaaggatggctcaaactacactcaccaatttcaaaattttctctcttaaatttttgtgactctgatttggagcccatgctattttaaaaactcagtaaaacagataccccaataattgagtctaaatt

SEQ ID NO: 155846 - DNA, 572 bp, Homo sapiens
atttagtgaatgctagattatttactgaggaaactggtttaaagtttttggtttagaaatatagcagtgttaaccaaaggaaatacatggtctgagtttgtcaagatggtctattttgaaatgattttgaaagaaagaagaacgatgtccttaccaactgaggataatggcaatgaacattagacaattaaaasagcagaagttacaatatttatacataatgattagtatgtaaaataaataagaagcataacttagttaactattgcacatgcatagtgtattattttgtcagatttaggaagctgtgtttcaaatggacagtcagtgtctaaatcaggtagctgcctattgagttaactgttgaaagtcagttgcaaggcagagcctagttatgtcattgattgttattcaacatctgtgaaacgtactttattcattaaaatcagtacatactcactatttatgacagtctcaatgttgcaaaatcactggtagtcatgttgaaaggaagagctgctagcaaaattagaaagttgcttctcctcaccagctcaagcaaatggctaatg

SEQ ID NO: 155847 - DNA, 572 bp, Homo sapiens
atttagtgaatgctagattatttactgaggaaactggtttaaagtttttggtttagaaatatagcagtgttaaccaaaggaaatacatggtctgagtttgtcaagatggtctattttgaaatgattttgaaagaaagaagaacgatgtccttaccaactgaggataatggcaatgaacattagacaattaaaacagcagaagttacaatatttatacataatgattagtatgtaaaataaataagragcataacttagttaactattgcacatgcatagtgtattattttgtcagatttaggaagctgtgtttcaaatggacagtcagtgtctaaatcaggtagctgcctattgagttaactgttgaaagtcagttgcaaggcagagcctagttatgtcattgattgttattcaacatctgtgaaacgtactttattcattaaaatcagtacatactcactatttatgacagtctcaatgttgcaaaatcactggtagtcatgttgaaaggaagagctgctagcaaaattagaaagttgcttctcctcaccagctcaagcaaatggctaatg

SEQ ID NO: 155848 - DNA, 564 bp, Homo sapiens
gagctcatgctgagtcccacaaaactctgagtcccaagcagctacagctacagcatagcaccagtttgaggccttaaccctcatcagactactacatactgccaggatctcaatagcccctgcatctttatatctctgaagtcctactgatattccctgccagcagccaggcaccatttctagatgctgctgccagggcaaaaacatgaaccattggcagcaacccccactatccccagagaatcttagcttctgtacttttacaagcatactaaggaaaggctacctgcttgcgccactaactggggccaaagcatatggtccccagccacctgcctaaggctgctcccagcgaaaggaaccccactttccccagcaactgctgctccaacctgagcattctgacarggacctgaagatcactccatccctgtctgccacagccagcacctgcatgcaccactgggaagccagaggacaggcccaccaagcccagctccacaggacccaagcatgctatctgggagcctgggaattacctggcacaacccaccaccaatgaca

SEQ ID NO: 155849 - DNA, 437 bp, Homo sapiens
tctggtatcttcctataccacagtggaataaaagtaataatcatggctgggcacagtggatcatgcctgtaatcccagcactttgggaggtcgaagtgggtggatcacctgaggtcagcagttmgaaatcagcctggccaacatggtaaaaccccgtctctactaaaaatacaaaaattagcctggcgtggtggctgaggcaagggaatcccttgaacccaggagatggaggtggcagtgagctgagatgtatttatagacaactgattttccataaaaataccagtaacatacactggggaaaggacacccttttcattaaatattactgggaaaactggacatccatatgcagaaaaaattaatctagacccctatctctcaccatatataaaaatcaatcagagatggattaaagacttagacataaaaccaaa

SEQ ID NO: 155850 - DNA, 621 bp, Homo sapiens
atgaacaggaggaagatgactaaccaarggccttaaactccaacacctgcagattgtaggcctgtgacataaatgggtaaaataatttccatctaagaactaagccctttccactttcttaaaacccaccacattatttttcacattatcatttttgatagagacttgaattccaagaataatattttcatcttgaagcaaccgtaagaaaacaacagaacaagtttcattataaatggtcacccgcagtactgccttttggcttttgccctcagcacagaagaacattttctgaccctcgtccagcgacacctttccccacagtgaagaaggtgcagagtctaggggacatgccactgggagcctgcacctaaaccccatttcacaagccctggaccccaaagttctccccaaaatgggtttgaattgcttcgatgacttgtgtgagcctcttttctagatttatcctcttgaggctggggactgcaccctcttcccatgtgatgacccctagacctgaggagtaggcatggggtccttgatggcagtggacagaacttatacaagtagattggggtttctgggacagagtaggaacaaacaagcagaagtgcaaaccac

SEQ ID NO: 155851 - DNA, 580 bp, Homo sapiens
aatgaattcctttatttcagtaaaaggactatttcagacacctaggaaattgatttatatctgcttaaattggccatgcctggcttattttacgataggaagaaaacaatgctctgagatttcagaatcagcmtaatataataggctctgaaaagatttctgacacggaatctgccctgtactttcagaatgtcttaaatgtcattgccatggttaatatagctccaaacagccgagaattttatacatagcttcctagccagagctgattctaggatcaccaaattcttagtaaatagctttcagaaaattaatggtgtttctctttttctctctctgtttcttaaagccattagtctactttctagattatatcaatatctcatataaatcacaagttctttacttttatagttttaataaatccacatgctatttctgtacaccccaattcttacttgaaatattattggtcatataataaataaaagcatcagtaatgttttcagagactacttgtgtagtagactggagtgatatttataatgccttaggggccaagtgctaagtgtagctaaag

SEQ ID NO: 155852 - DNA, 571 bp, Homo sapiens
atcattatacatgacaaacaacatacatatcatagagttatttcagaaaagtaactaaacaaataacaataacaaatagcaacaacaacaaactttgggagagtgaagaatctgatttccaggactgccatattatattattttaaatgtctcctctttaacaaaaaattatgacacatggaaraaaaaaaatatggtccaaaaacaagaagcagtcactagaaactgtctgaggaagctgggatgttagacttaaggagacaactatttttcaaatattttatttaattttattttttaattgacaaataatggtaaatattcatggggtacatagtgatgttttgatacatgtaatgtatagtgatcaaatcaggttaattcacatatccatcatctcacacacttatcatttctttgttttggaaacactcaatatcttccctctagctatttgaaactatatattattgttaactatagtcatgctacagtacagaacactgcatgtccagctgtaatgttagacaaagattttgaacctattttaaatatgttcaaagcactaaag

SEQ ID NO: 155853 - DNA, 547 bp, Homo sapiens
gccaaaaacaaaaggccatagattatatcattctatttatatgaaatttccagaataggcaaattcatagaagcagaaagtaaactagtggctgggttgactgagaagggggaagaatataatgggcagtgactgctaatgagtatggtttttcttttagcgatgaggaaatattctagaattacagatagtggttatggatggacaactttatgaatatttatgtaagttaaagagtaagtacaagagatttagttcccactgttgaagatgtatataatccatgacttttgtaatcagatgacatttatttttaatgaagagtgatttttataatattcatactctcttttatttttatttttcatcaataccttgtagtctacctttatatagtgatttataaatagttaatgkcttaattttaattctttcaatgtagggcactttatatgtctcagttataaaattaaagacttctttttttggaggaatcatttcatattcgagaaatttcaaaaactgacattattgtagaattgtacat

SEQ ID NO: 155854 - DNA, 601 bp, Homo sapiens
tcacccatcattgaaatgaagccacccccgaagaggaccacattatcaatttaatagaacccaaccaaggaatccaataatgaaggataggaatccaagacaagtaaagtacttgatgctgcccatctcctaaattgctctacagatggcattcattaaatcaaagcagtgtgyttcctgctaaggagtcatattttaacagactcctccaataagtgagaagccagctcagatctagaaccctaactctatacttcctagagttcagtcaacatacatttattatgagcccatcatgagtccagcacaaaagagatgctatgtggaacataaaaggtgtgcaagacatggtccccaccttctgggagatcaagctgtctctgtgagccttgctcccttatgccatcagggtctgcctgtagttatgcatggtgagggctgaccacattgaatattacctgcctttaagggaaaaaaagtcaatccttttagaagcttattttttaaattaattcaagacatcctttattgggataggaaagtggggtaatattgtcttattactgtcatctgtactgagaaaaaaaacataaatggattc

SEQ ID NO: 155855 - DNA, 417 bp, Homo sapiens
tatacttcctagagttcagtcaacatacatttattatgagcccatcatgagtccagcacaaaagagatgctatgtggaacataaaaggtgtgcaagacatggtccccaccttctgggagatcaagctgtctctgtgagccttgctcccttatgccatcagggtctgcctgtagttatgcatggtgagggctgaccacattgaatattacctgcctttaagggaaaaaaagtcaatccttttagaagcttattttttaaattaattcaagacatcctttattgggataggaaagtggggtaatattgtcttattactgtcatctgtactgagaaaaaaaacataaatggattcagaaatgagaggatttctaattcatatctatctragaaatataagaaagactctaaattcattga

SEQ ID NO: 155856 - DNA, 596 bp, Homo sapiens
atatatattaagaaactatgtgaacatgcgtttgtaaagttttattggcatactgccacactcattcatttatgtactgtctatagctgcttcacactacaatggcagagttgaaatggtgcaacagactgtatggctcccaagcctcaaatatttattatctggtcctttgcagaaagagttttccaactcatgatctaaaacaatgccaacaactcctaattacccctaacctaaaatgaacagctatgctccrcttgaaagagcttcggggagacgataaccttcagagaggaagtagaattttggttacagtaactagacaaaatttttggtgaggagaatgacaacatgaggggatagctatgtactggtgagggaagaggtcagtataacatcagaagccagatacagcttttactatttaagatcccatcagtaatctgggaccattattcagagtacctaataaaatactgatgaggttgtttttactatcatatggcctagactctggtgatggaaagtaacctagggccaggttataaaaacttaaatgccagagtaaggaatgtggcctttttctagtatgcaag

SEQ ID NO: 155857 - DNA, 426 bp, Homo sapiens
cacccaataggcaaagccccycaaaagaagccgttcagatccacatgcccgtggtgccccccacctcaggtgaccatctgtcctgggatgctgctggccttttaatgtgaaaaacagaaattcccaggaaaagcaagatgagttggttgccctaccccacctttatgagctgaattgaattgtcctctgtagagcctcccaggagaggcccagaagtgtgtcggggagggtgggtacagagggcaaacagagacaactcggaccttgcctgcccatgctttgggggcataaaacaaggaaagaagccaagttgtctgccttctggtggtttgtcattcacttaaatgcaggtgaccctgttttggcattaaacatggaagacttggaagctaagagcctgcagcaaagtcagggaagaagcaaaaa

SEQ ID NO: 155858 - DNA, 426 bp, Homo sapiens
cacccaataggcaaagcccctcaaaagaagccgttcagatccacatgcccgtggtgccccccacctcaggtgaccatctgtcctgggatgctgctggccttttaatgtgaaaaacagaaattcccaggaaaagcaagatgagttggttgccctaccccacctttatgagctgaattgaattgtcctctgtagagcctcccaggagaggcccagaagtgtgtcggggagggtgggtacagagggcaaacagagacaactcggaccttgcctgcccatgctttgggggcataaaacaaggaaagaagccaagttgtctgccttctggtgstttgtcattcacttaaatgcaggtgaccctgttttggcattaaacatggaagacttggaagctaagagcctgcagcaaagtcagggaagaagcaaaaa

SEQ ID NO: 155859 - DNA, 630 bp, Homo sapiens
taagagtccagtggctcttgtcataggcagcaattgctctctatatattatcatccctgggtccccattacaatcctatgaagtattagtatcctcattttgtgcacaaagaaacagaggcttaaaggggccaagtcacttgtatgggagactcagctggactttacctcggtctgcctgacctcccatccatgcctttaactgtgctgtcctcctgcctggtgtgtgrcccccactctgggaggacctgcactttctccagacctgtggatggcagtgatgtcatccttcttaaccctacccccaccacctgctgatggatctatgtaagggggctcgagtaccaacaagaaaactgcccccaatcctaatctctggggaggcgccaccttggtcacacaggcagccagttatgaactgatggtggtcaggtctcttcgggtgtttaactctgttcagattccactggaagggtctgtggccagggccaggtggaatgtttcccttggctgacaggaatttgctttcatactttgctgtgggaaagttgtcagggagttgggtcaccgaggagcatttgggacaggtgagaaacttcaaactggttgccaggggtaaacttgtcacctg

SEQ ID NO: 155860 - DNA, 548 bp, Homo sapiens
taaaagagagtgtctaaatagctaataagcatatatcaagttttcaatattattattcatcaggaaataggaattgaaaccacaatgagaaaccaccatacactcatcagaatggctaaaatcaaaactaacaagagtaagcattggcagtgatgtggagaaattggaacctttatatattgcggatggtagtataaaacagtgtgaccgatttggaaaattgtttggcaatatccattaagctaaatatagttctaccttatgacccagatatttcactgctaggtatatacccactagaaaagagttcatatgttcaccaaaaggtatatacaacaatgttcacagcgccttaattaataacatccccaagctggaaataatgaaaatgttcataaacagaagaatgggcaataaattatggtatatttacacaacagaatactcaacaataaaaacaacaaastactgataccacaaaagcatggataaagatcccagacagtatgctgagcaaaataaatgggcatgaaagaatacatactgta

SEQ ID NO: 155861 - DNA, 565 bp, Homo sapiens
ccactgcagcataactctcccaccagcccttgtgaaagaagccccctaaccagagtgcagaggtccagagcccctgtggtgggaggaggcttggaggcaaaggcccagggtttcactacagcctgcttcttgctggctgtgtcaccctggaatgttactgtttccttctgagcctcctgtgcctgtctgtctaattcccaccgatttagcccagggttgtgagctgaatctcataagcacagcctgattcttggaataaaaaaatctgatgtgatcctaaatgctatcaatatattgtccagctctagggaggcccccctcgccttgtcccccactgaccttcaaggtaaaagaagctgtgaggtgggaggtgcccawgagaaatattttcatagagccagtagcaaatgggaccaaaccagggggtgatgatttcaggacatcacttttccaagtggttaatgacccagaggagtgaggacaactgtcttcagacataaggaggtttggtctgacctcaaggggcaaggccaggagacagtttagttttgtctcagtagaagct

SEQ ID NO: 155862 - DNA, 456 bp, Homo sapiens
cctggcaattccatatgaattttagaatcagcttgttagtttccacaaagaagtcagctgagattcggatagggattgcctgagtttgtagatcaatttggggagtattgccrtcttaacagtattaagtcttccaatccatgaacatggaatattttttcattcatttaggtcttccttagttgttttcaacagtttttttgtggttttctgaggataagttttgcacttcttttgttaagtttatttctaagtattttatttgctactgttgtgagttgttttcttaattttatgtttggattgttcattgcaagtgtatagaaatatggttttttaaaagtattaaacttgtattctgtaaccttgctgaactcatttattagttctgatatatatatttaggtagattatttagggtttcctatatataagatctataatctattatatgaa

SEQ ID NO: 155863 - DNA, 456 bp, Homo sapiens
cctggcaattccatatgaattttagaatcagcttgttagtttccacaaagaagtcagctgagattcggatagggattgcctgagtttgtagatcaatttggggagtattgccatcttaacartattaagtcttccaatccatgaacatggaatattttttcattcatttaggtcttccttagttgttttcaacagtttttttgtggttttctgaggataagttttgcacttcttttgttaagtttatttctaagtattttatttgctactgttgtgagttgttttcttaattttatgtttggattgttcattgcaagtgtatagaaatatggttttttaaaagtattaaacttgtattctgtaaccttgctgaactcatttattagttctgatatatatatttaggtagattatttagggtttcctatatataagatctataatctattatatgaa

SEQ ID NO: 155864 - DNA, 456 bp, Homo sapiens
cctggcaattccatatgaattttagaatcagcttgttagtttccacaaagaagtcagctgagattcggatagggattgcctgagtttgtagatcaatttggggagtattgccatcttaacagtattaagtcttccaatccatgaacatggaatattttttcattcatttagrtcttccttagttgttttcaacagtttttttgtggttttctgaggataagttttgcacttcttttgttaagtttatttctaagtattttatttgctactgttgtgagttgttttcttaattttatgtttggattgttcattgcaagtgtatagaaatatggttttttaaaagtattaaacttgtattctgtaaccttgctgaactcatttattagttctgatatatatatttaggtagattatttagggtttcctatatataagatctataatctattatatgaa

SEQ ID NO: 155865 - DNA, 654 bp, Homo sapiens
aaatatattcaaatactcccaatatcattagttattagagaactgcaaatgaaatccacagtaagataccatcccatatctattaaaatggctaacaccaaaataagcgataatatcaagtatggatgaggattcaaagcaaccaaaaccttcatacagtgcaaggtggtacagctactttgaaatatagtttggaaaattcttatgaagtcaagcaaataccatgaaaaccagtaattccgtttatgaggaattactcaaaaaagcatgatttttaaaaaaactgatawtcaaatgattatagagtttttacttataagtgccccaaactgaaaatgacccaaatgtccctcagaaaggaaagatatacaaactatggtatacccatatgatagaattctacacagaaacataaattggcaatctatgaatctgtgcaacaacatgaatataatttaaatgaattatgtgaaatgtgaggagacattttttaaagtgacattctgtgtgattccatttatatgacattttgcaaaggcaaaattgtaggaatcagtagtttctacaactgaggatacgagtaattgagtataccatggcacacaggattatgaggccaatgggactgttgtatatctttattatgtttgtaat

SEQ ID NO: 155866 - DNA, 202 bp, Homo sapiens
caagttgtggtagtgaatatttgtgcatcttattttattcctggcattattaaagaatatttaaaaataatattaaagctgatctttaggaggattctgtgtccaggtttttacaagagctagggggaaaaacaacgccagttgtttttagttgttttttgttgtattttcacttaaaakacaaaaacaatgatgtctcagc

SEQ ID NO: 155867 - DNA, 512 bp, Homo sapiens
ttataatttttctggaattttgaactatagtgattcattctaagraaaagaaatcagttcacaggaaaagaatctccctaagattatttcccatccccacaagcattgaaaaatgctttttgcatattacacagagaagttctgcttgtttttctcaacccctccttgtcagaccaggatgggatggggaagggtggcttacctttgtagaccccctgccagagagccttcccttggcatggaatctaaagtagtctcccagacaatctctagcacatcactgagttatattttcttcatagcagtacctgaaattattttgtttactcattttttcactgactggattacccccactaaatttacgctccatgagaacagattttgtctttttgattcatggctaaacctgaagcactcagaacggtacctaaaacaatgcctcaaaaaaaatttactgactgtctgaatgaatgaatgagttaatattgccaagggcacagtaatgtgaa

SEQ ID NO: 155868 - DNA, 442 bp, Homo sapiens
cttgcactttttggctcatgatcctttcttctgtcttcaaaagtggcaatgtagcatcaccttcaaatctctatctctctctacctccaccttcacattaccttccctcttagaagaacccttgtgattacatcaggcccacttggctaatccaggacaatctccccatttcaagrtcgccaacttaaccacatttgcaaaatcccttttgccataaatgtaacagcgacaggttacagagtttaggacatggacatctgaatgtccatggtgaggctgggagccactatttagtttaacaagtcatttggtgctggccagctgctgttgccttaaggcacctaaattaatcatgccagtgttcctgcggagggctctgaagtatgttaacacatatgtgaggtgtgacttttatcctagagaaatagtacatgacagctgg

SEQ ID NO: 155869 - DNA, 485 bp, Homo sapiens
gacttcctttctatacacatatatgagcaaattaaatagggacataagcagaataaatggtattgaaaatgtacattcaygaagctcaatttgaagaatctctgctgaggttttgcccatgttttcacaatgtcattataaacctatttttcatgcttgcattaatgacatttattaagtgaccattcatcgatatctactttgcaaaaactctatggaagcaacagaattgaacaaaagagttccttaccatggggtgtttataaccctatcttgagacacacttgtaaaaaaattaatataaggccaattgatatgaatgctgtgacagacacaatgaaggattctggaagcattaaggaaggagagactaatcccagctggggtggaacataactggctctccatgtggcagattcacattaaccaagctctgagaaattatctacaaatctgcaattcaacgttactgtttttcaaggaca

SEQ ID NO: 155870 - DNA, 478 bp, Homo sapiens
catgcctgttatccagatttctgtttatataaattagaaaactcaagcagttctttttgaatgtagygcatctcctcatgggtgatactcttaacctcacctctaggggcccaccagggctttagtctagttataggtctagaagcaaacaggggtcttggggatggcttctgaggaaaatcaacattattttgcctggcaactgcctcaggggaggccatcgctgttgcctcaggcagtgcagggtttatcacctcagacgaaggtggaaaggctgacggcagcatgggtcccgtaggggatgttgccactactggggatagggaggctgttccatctagcaaaagaacttcatcagagtttacaaactctatgtccccagcttcatcaggttctctcacacatccccattccaacttgcagagtcccattcttttccaatcaatgccctcactttaacagtagacacctgtcgagg

SEQ ID NO: 155871 - DNA, 478 bp, Homo sapiens
catgcctgttatccagatttctgtttatataaattagaaaactcaagcagttctttttgaatgtagtgcatctcctcatgggtgatactcttaacctcacctctaggggcccaccagggytttagtctagttataggtctagaagcaaacaggggtcttggggatggcttctgaggaaaatcaacattattttgcctggcaactgcctcaggggaggccatcgctgttgcctcaggcagtgcagggtttatcacctcagacgaaggtggaaaggctgacggcagcatgggtcccgtaggggatgttgccactactggggatagggaggctgttccatctagcaaaagaacttcatcagagtttacaaactctatgtccccagcttcatcaggttctctcacacatccccattccaacttgcagagtcccattcttttccaatcaatgccctcactttaacagtagacacctgtcgagg

SEQ ID NO: 155872 - DNA, 478 bp, Homo sapiens
catgcctgttatccagatttctgtttatataaattagaaaactcaagcagttctttttgaatgtagtgcatctcctcatgggtgatactcttaacctcacctctaggggcccaccagggctttagtctagttataggtctagaagcaaacaggggtcttggggatggcttctgaggaaaatcaacattattttgcctggcaactgcctcaggggaggccatcgctgttgcctcaggcagtgcagggtttatcacctcagacgaaggtggaaaggctgayggcagcatgggtcccgtaggggatgttgccactactggggatagggaggctgttccatctagcaaaagaacttcatcagagtttacaaactctatgtccccagcttcatcaggttctctcacacatccccattccaacttgcagagtcccattcttttccaatcaatgccctcactttaacagtagacacctgtcgagg

SEQ ID NO: 155873 - DNA, 499 bp, Homo sapiens
ccatgccccttccaagatggggcgggagtccctaggcctccactgcagctgcccaaactgaggcggcagactcaggcatccctgcactcttgggcgcctgggaaggaccccctgctcttgcaggctcagaagtgcctgcccctgctgcctggcttctccctgctgtggatgcctgcttggatctcggagcaaagtcctgagagcctgagggccatgaatggcagcaggaggcagacagattcctgggtggaaggcrgcaggtccccagtaaggcccctccttcaggccagggaaggcctgagtctgggtgctgggctgccagtcccaaggactggagtggggacttgtggtgcctcttctgggcctgccttggccacccatggaccaatcagcacgtacttcctcccctctcaggtccataaaagccctgggctcagccagagcagggcagaggaggtagggcaggaggactagctgcagagaggagctaccctgtctg

SEQ ID NO: 155874 - DNA, 590 bp, Homo sapiens
ccagaaataatttacataaatataataaaactgatctttgacaaagtaacaaggcaataaaatagagaaaaagagaaacttttcaacaaaaggtgctggaacaatggaacatccaaatggaaaacaaaaattgaatctagacacagactttacacccttcacaaaaattaattcagaatggatcatagacctatatgtaaaatgtgaaactattaaaatctcctagataataaccctggaaaaaaatctagatgaccttgggtatggcaatgacttttaaaatacaatactaaagtcatgatccatgaaataagaagttggtaagctaracttcattaaaatttacaacttctgctctgcaagagaatgagaagataagccacagatggaagaaaatatttgcaaatgacatatgtgataaaggactgttatctaaaatatacaaagaactcttaaaactcaacaattaaaaatgaacaacctgattaaaaaatgggcaaaaaaccttaacagagacctcaccaaagaccatacagagatgacaagtatatgaaaagatgctcgatataatatcatatgccattagaaaa

SEQ ID NO: 155875 - DNA, 607 bp, Homo sapiens
aagcttacctcagaaaattgaaaagaagggaacattttctgacttattttatgaagccagcactaccctgatacagaaaaggggcaaagtcattacaaacaaaacaaaattacaggccaatattccttatgatcattgatgtgaaaattctcaacacagtactagttaactaaatacatcaacagttgaaaggattttacatcatgacaaaatgggatttattcctraattaaaagaatgactcaacatataaaaatctctcaatataatacatgacattataaataaaggtaaaaaatacagttaccttatttgattcagagaaagcatttgacacaattcaatatttttataataaaaacactttaaaaactagagaacttcttcaggctgataaaggacatttatgaaaatcctatagttaatataattcacagtggtgaaacactgaaagctgtttttctaaaatcaagaggaagacaagaatgccagctttcaccacttctattccatatagtcctggaagtactagcaataaaaaacaataaaaggcatccaaatctggaaggaagaagcaaaatgatctctctttgcagattatatgatc

SEQ ID NO: 155876 - DNA, 584 bp, Homo sapiens
ctcatgttgtcttcccttattttctgtatatgtcctctgttttcatactttatcttgaagaactcatttctaaataattatctctacatgagacgtttactcagggtttttttkggggggggcggggtgggggagggaatccagcctaaaggaattaaaaaaaaaaaaaaaactaaccaaacaaatagatatgaaactggtaaggtttggctctgtgtcctcacccaaatctcatcttgtagcttccataattcccacgtgttgtgggagggacccactgggatatgactgaatcatgggggcgggtctttcctatgctgttctcgtgatagtgaatgggtctcacgaaatctgatggttttagaaacaggagtttctctgcacaaggtctttttgcctgccgccatccacgtaagattgccttactcctccttgccttttgtcatgattgtgaggcctccccagccatgtggaactgtaagtccaataaaactctttattttgtaaattgcccagtcttgggtatgtctttatcagcagtgtgaaaatgaactaatacaggtacctacccaccacattgcatt

SEQ ID NO: 155877 - DNA, 568 bp, Homo sapiens
gtagtggcacaatcacagcttactgcagccttgacctcccggggctcacgtgatcctcccatctcagcctcccaagtaaatgggactacagtcatgcaccactacacccagctaatatttatattttttktagagatggggttttgccttgttgcccaggctggtcttgaactcctgagctcaagcaatcctcccacctcgacatcacaaagtgctgggattgtaggcatgagccactgcacccagcgatcttttttgaaggttattaccctccgcattttacataaagtgacatttgatgcctcaagtttgttcctggaaaggcaacaaaactagacaaaataatgccagcaaaataactatcttcggtggattttcttccaagaaaagaaggaaactactagtcattagtgaaatataatttcacaggatcaaatagcttatgtaaaatactttttatatataatcgaacattccatcaaacattccatatatggaatagaaaatatattccatatatggaatgttttgataatacaaaaagactctgaccactagacactaaatt

SEQ ID NO: 155878 - DNA, 497 bp, Homo sapiens
gtatatgcatgaatatatatatacatgaaaaatatatatttatatatatatatattcaggcagtcactgcactcactgttctaggtgctgggcatgcaraggtgaatgtgacagatgtgatccctgtccccgtggggctcatgctgtgtgctggggaggagaggcatttagaagttaaatactcaaataaaataattatgtgcaataaatagttacacattgtgttaagtcttatgaaggaaaccaagttcagttagagaattactggaggggaggtaggggtgacatacttaatgaacggcatgtttaaagccttatataaggaagtgagttaagctaaaagacaagaatgaatcagccattgcaaatggaaagaagcagaatgagggttgtcgtagggaacggagtaccaggcagaggtgagaatcaggaaagagcgtggcatgctcaagctaccaaaggaaggtccaaagtagccactgtccaacagaaagatc

SEQ ID NO: 155879 - DNA, 497 bp, Homo sapiens
gtatatgcatgaatatatatatacatgaaaaatatatatttatatatatatatattcaggcagtcactgcactcactgttctaggtgctgggcatgcaaaggtgaatgtgacagatgtgatccctgtccccgtggggctcatgctgtgtgctggggaggagaggcatttagaagttaaatacycaaataaaataattatgtgcaataaatagttacacattgtgttaagtcttatgaaggaaaccaagttcagttagagaattactggaggggaggtaggggtgacatacttaatgaacggcatgtttaaagccttatataaggaagtgagttaagctaaaagacaagaatgaatcagccattgcaaatggaaagaagcagaatgagggttgtcgtagggaacggagtaccaggcagaggtgagaatcaggaaagagcgtggcatgctcaagctaccaaaggaaggtccaaagtagccactgtccaacagaaagatc

SEQ ID NO: 155880 - DNA, 517 bp, Homo sapiens
caggagccacatgagtaatttgaaattttctagtagccacatttttagaaaagttaaaagaaatgtgtgaaatacattttcataccatattttattcaactcaatatatccaaagtattagcatttcaacatatcatcaatgtaaaattattgaggcatatttctttgttactgttctaaggtctccatatcctgtgtgtattttacacttacagcacatctcaattcagactagctgtatttcaagtacttcatggctacttttcttaaaagaactaattcacaaaaarcaaaacaaaacaacaacaacaaaaaatggcactaggactgttttagttgctgggcatgcaaaggtgcatgcaatagttatgactgcttggataggcctagaatgttggactaacaggcacaagatgagcttgaaggggcatgcatgggcctgattatgagggccttgtacgtagtgctaaggagttgggagattatatatatatataagtgcactttatatatataa

SEQ ID NO: 155881 - DNA, 517 bp, Homo sapiens
caggagccacatgagtaatttgaaattttctagtagccacatttttagaaaagttaaaagaaatgtgtgaaatacattttcataccatattttattcaactcaatatatccaaagtattagcatttcaacatatcatcaatgtaaaattattgaggcatatttctttgttactgttctaaggtctccatatcctgtgtgtattttacacttacagcacatctcaattcagactagctgtatttcaagtacttcatggctacttttcttaaaagaactaattcacaaaaagcaaaacaaaacaacaacaacaaaaaatggcactaggactgttttagttgctgggcatgcaaaggtgcatgcaatagttatgactgcttggmtaggcctagaatgttggactaacaggcacaagatgagcttgaaggggcatgcatgggcctgattatgagggccttgtacgtagtgctaaggagttgggagattatatatatatataagtgcactttatatatataa

SEQ ID NO: 155882 - DNA, 611 bp, Homo sapiens
atacacttaaaactgactttggtggggtgaccttgatgttattttctaagcagctgacacaaaattgaggttagaatctgtgrctttgattacaatatcaggatgaataccatttgagatcttaagtaacacttctgaacataatcaagtctgtctaaagaagtggatgttgcagagactggcaaaactcaagacactctgattggcattcaggaaattttttcaaatcaattccagtgtcaaaccctttttgtcagacctttccttgcctctcgtttaatgtagtcattttgataggataaatcccattgtgaatttttatttttatgactttgtttcctactacctcactctcaaaggccagacttgccaacagctttcctaatgttaaaatatgagttctgttcactgggtgtgacagtggtctgctgtgctttgagttggaaatagtcgttattctctaggacacccatggagcagtgttatccattagataacacccagctcccatgggaaggttgatatgggccacatctatacatttaaccaaagctgtgtcttcaagaggtgtctcagggagttttcaccagcaatacaggcaccgcagcaac

SEQ ID NO: 155883 - DNA, 604 bp, Homo sapiens
aaaggaagacttatcgatcaattttagttaaaccttgcttgtctgacactttgctgctaaggaatgtgtttttattgcctggccagatagttcagatttccggtcagtcttagtaaagaccccttttataacaytgataaaattttatcacagagctatgaaaacaaaattagatttcataactcacatcaggccttgaaggggatgcctctataaattttacaaaccctatcaagtttaatgcacctattctgataattttttcaatagcaaattctactgaacttcatatatactatgtgtgtatataaatgtgtgtatgtgtgtgcgtgtgttcatgtatatacatatatatagatttgtttctctctctaccttacaggaaagaaaactttctttacccacttataaacagaagactgtgacaagaaggccaattatttccatcgctgaagactctaaatttggcaaatcttctaaataacaatcctgcatagtttattaaaaaaaattagtcgtaaaatttatccttcaaaaatctgcattttaaataaaccctgacagtgatttctcaagactgtaaagatattagtctgagaatgca

SEQ ID NO: 155884 - DNA, 575 bp, Homo sapiens
tggctgtctgtaagccaaaaagggaggcctcaccagaaaccaacccrgctggcaccttgatcttggacatccagcctccagaactgtgagaaaatcaacttctgttgtttctgctgtttaatactcagtctagtattttgttatggctgactgagaaaactaatacatatgtatatggggtctatcatatgcttttaaacaatctctctggtcacatctatctcttccaatttctctgtccatggggcacctatttaatacgctttatgaattccaacacctatatttacatgggtgtccctaatccttgctaacgatttttctgcttaaggtgttgaatcttctccatttctcaagttccatcagagttcctgattgattcctctgtagagccttgtctgccaccctaggtgggtactgtgctccacttttctcagctgagattcctgccttcactgctaattttacatttatcacattctattagtacttctctcagaggaatatcagcttccctatcatacaacttttccttattaaaaaaatctggacttaccgtaaaaaatatagaacac

SEQ ID NO: 155885 - DNA, 607 bp, Homo sapiens
gaaaatttaatgccttataaatttctatatwaaaaaaggaaggattaaaattaagaatgttggaccatcctggccaacatggtgaaatcccgcctctgctaaaaatacaaaaaaaaaagccgggcgtggtggtgggtgtctgtaatcccagctcctcgggaggctgaggcaggagaatggagtgaacccaggaggcggagcttgcagtgagctgagatcccgccactgcactccagggtgggcgatagagcgagactctgtctcaaaaaaaaaaaaaaaaaagaattttaaataggaacaacagtctaaacccaacaaaagtagaggacagaaaatgtcaaaaacagaagcagatattaataaaaaataaaaaaagggtaaattcagctgcattaaaattaagaaattttgttcactaaaaagcataatagaatgaaaaaaggacatatactggaaatagcatttataacatatattagcaacaaaggaacaatattcagaacataaataattcctacccatcaataaaacaaacaaccctaccaaaaatgacaaaataaataaataagtactttacagaggaagaaacttgcactggcataaacat

SEQ ID NO: 155886 - DNA, 607 bp, Homo sapiens
gaaaatttaatgccttataaatttctatataaaaaaaggaaggattaaaattaagaatgttggaccatcctggccaacatggtgaaaycccgcctctgctaaaaatacaaaaaaaaaagccgggcgtggtggtgggtgtctgtaatcccagctcctcgggaggctgaggcaggagaatggagtgaacccaggaggcggagcttgcagtgagctgagatcccgccactgcactccagggtgggcgatagagcgagactctgtctcaaaaaaaaaaaaaaaaaagaattttaaataggaacaacagtctaaacccaacaaaagtagaggacagaaaatgtcaaaaacagaagcagatattaataaaaaataaaaaaagggtaaattcagctgcattaaaattaagaaattttgttcactaaaaagcataatagaatgaaaaaaggacatatactggaaatagcatttataacatatattagcaacaaaggaacaatattcagaacataaataattcctacccatcaataaaacaaacaaccctaccaaaaatgacaaaataaataaataagtactttacagaggaagaaacttgcactggcataaacat

SEQ ID NO: 155887 - DNA, 607 bp, Homo sapiens
gaaaatttaatgccttataaatttctatataaaaaaaggaaggattaaaattaagaatgttggaccatcctggccaacatggtgaaatcccgcctctgctaaaaatacaaaaaaaaaagccgggcgtggtggtgggtgtctgtaatcccagctcctcgggaggctgaggcaggagaatggagtgaacccaggaggcggagcttgcagtgagctgagatcscgccactgcactccagggtgggcgatagagcgagactctgtctcaaaaaaaaaaaaaaaaaagaattttaaataggaacaacagtctaaacccaacaaaagtagaggacagaaaatgtcaaaaacagaagcagatattaataaaaaataaaaaaagggtaaattcagctgcattaaaattaagaaattttgttcactaaaaagcataatagaatgaaaaaaggacatatactggaaatagcatttataacatatattagcaacaaaggaacaatattcagaacataaataattcctacccatcaataaaacaaacaaccctaccaaaaatgacaaaataaataaataagtactttacagaggaagaaacttgcactggcataaacat

SEQ ID NO: 155888 - DNA, 607 bp, Homo sapiens
gaaaatttaatgccttataaatttctatataaaaaaaggaaggattaaaattaagaatgttggaccatcctggccaacatggtgaaatcccgcctctgctaaaaatacaaaaaaaaaagccgggcgtggtggtgggtgtctgtaatcccagctcctcgggaggctgaggcaggagaatggagtgaacccaggaggcggagcttgcagtgagctgagatcccgccactgcactccagggtgggcgatagagcgagactctgtctcaaaaaaaaaaaaaaaaaagaattttaaataggaacaacagtctaaacccaacaaaagtagaggacagaaaatgtcaaaaacagaagcagatattaataaaaaataaaaaaagggtaaattcagctgcattaaaattaagaaattttgttcactaaaaagcataatagaatgaaaaaaggacatatactggaaatrgcatttataacatatattagcaacaaaggaacaatattcagaacataaataattcctacccatcaataaaacaaacaaccctaccaaaaatgacaaaataaataaataagtactttacagaggaagaaacttgcactggcataaacat

SEQ ID NO: 155889 - DNA, 616 bp, Homo sapiens
tcacattattaggttccaaataggcaactcaaaacactacattgtttaggaacacgaatatatgtggtaaaattagaaagaaaaacgaggttagaataaacataaaatttcttcagcagtttccacttcagagcaagtaggcagagggatgggtgagtcwtgcaggaattttaagttattggcaataacttaagctgtttggttggtacataggtgttttaaaattattgtacttaaaatgtacatatattccatatgcattcttttgcatatattctacatgttaccaaataaatgcaacacaaagtgataagtgcaactgcacaggtgaatttaagtagatgacaaaaaggagaacatgatccactgcctgcaagattcagacagatcttcagagaagaggatatgagtggatatgtttctaaaggattcatgggagtttacaggtagaggtagaaaaaaatatttttatgcggagggtttagacacataaaatagtttgggctttggagggattgtaaagaattcaatatgctttggagcattgaaagtaggggaaaatgtgagctattgatgcttgataaatgtagaaagattaaaacgacaaacagaggga

SEQ ID NO: 155890 - DNA, 598 bp, Homo sapiens
aagtgttataattgatcagcaccgagactcatgctccactcttaaacctggagtgatcatgcgaagaaaagttgagggtgccagaagacttgaaggctgctgggtattaattatcttaaaaattacatattcatgtctaccaggtacgaggcattggtctaggttctggggatacagcagtgaacaacatgaggtttcaaccccctggaatttattctgtagttgggggatacagaaaataaacaaatacatgtgtctataataagtctgatggagataattgtcacataaaaatataaaacaggatgaggaacatagtgagggctatgatgcagaggaaggtgtgaccattactattttatgtagtggttggagatgctgyctctgttaaagcaaatcttggcagtgagctaaagcagttgaggaagcaaagcagacagagatacctgggggaaggggaacagcacatagagggaacagcaggagcaaagtcctgaggtgggagcatggttgctgaacttgaggatcatcaggaaggccagtgtggctggagcagagtgagtgaggagaagacagcaggtgatgaggtcaggggtta

SEQ ID NO: 155891 - DNA, 629 bp, Homo sapiens
ggtagagaggttgaactttcagaattatatttttgtagtctactttatactgattcttttcctggagagtatataccaaacaaattagagtcaatcacttttcgctaggatagtccaartctgagatctttattggtgaaaacaataatggcctataatttcgtcaatgaacagagttaacacctcaggtaaagcatcagcatgtattgtatagaaggaaggaaagaaggaaagaagggaggaagggaaggagggaggaatccaagcacaaaggatcctaaaacatcagagcaatagttaggagcctgaattatatgcatgtatttcttttatttatatacagtcacctatagatattacctttctccttctctacctatacaattccatgtctgaacttatttagcaagtctaatgactggaacatgaaatattttccaaatggccccactgaatggatctgcagtccatcattgtacatttggaatgatgtcataaatggttacattttaatccttcctgtattttctaaatgggaatagggaggggggaacttgggagaaagtggtttgcatatgatattctaagcccgaataactgaataaaatcctaaatgtaggaatggaaaa

SEQ ID NO: 155892 - DNA, 601 bp, Homo sapiens
cttgtgctcttctagctcaagtttatggaaatagatccagcaataaaaataaatggcaataatgacttttcagggaaaccagaaatgcttattatgtccctaataagyatttatatgcaatttatggatgtgaagaaaacataattgaatcaatcagtcaatgagttacagtgacaatgccattaagcaatgcactttggagaagaccatggtggcacctcacaaatacgtaacacaaatttatactaaatatagtttttacccaactctatttatagagtgcagataacattaatttatggcccatacatttttataaataacatttcaacaaatattttatttagaatgcatttcgaacactaaaattttgctcaactacagagagttcagcaatagtttattatttatactgctgagagctagggattgagtatagaaaacaggaaaaaacattatgcattttttgtcaacttgcttctaacggtcttaagaaaatgaatgcacttgcgctataattttcatgaagagacataatgtcatcacaaaagattttagtctggggaaaggtttttatgataaactattatttacataggta

SEQ ID NO: 155893 - DNA, 601 bp, Homo sapiens
cttgtgctcttctagctcaagtttatggaaatagatccagcaataaaaataaatggcaataatgacttttcagggaaaccagaaatgcttattatgtccctaataagcatttatatgcaatttatggatgtgaagaaaacataattgaatcaatcagtcaatgagttacagtgacaatgccattaagcaatgcactttggagaagaccatggtggcacctcacaaatacgtaacacaaatttatactaaatatagtttttacccaactctatttatagagtgcagataacattaatttatggcccatacatttttataaataacatttcaacaaatattttatttagaatgcatttcgaacactaaaattttgctcaactacagagagttcagcaatagtttatyatttatactgctgagagctagggattgagtatagaaaacaggaaaaaacattatgcattttttgtcaacttgcttctaacggtcttaagaaaatgaatgcacttgcgctataattttcatgaagagacataatgtcatcacaaaagattttagtctggggaaaggtttttatgataaactattatttacataggta

SEQ ID NO: 155894 - DNA, 447 bp, Homo sapiens
atgactggcctgggttcccttatttcttgtcaaggccagaatttaaatacaggaaacttgaaaaggaggccaacttgactagcatacacagtctgattagctgcagagatgagaaaaagtggatgaggtaaagagagaaattgaagatgacaccaccatttctagacaatatgccaggaaaaaaggaatgattattaaccataatacaagttattgcctaatctcacctatttcttggtgagaacaaatatttccatttatatcatgtgaaatttargatactgatgggtctcttgttgaaaacgatacttagaaatgcaaatccgtgtatcagaagataggtcaagccccaaaataaagatctgggggtcattagcactcaggagctaagtgtaaccagaaaacaggtcaaaatcatttaaggagagaatgcagaagaggataaga

SEQ ID NO: 155895 - DNA, 304 bp, Homo sapiens
tatgcattttttgtcaacttgcttctaacggtcttaagaaaatgaatgcacttgcgctataattttcatgaagagacataatgtcatcacaaaagattttagtytggggaaaggtttttatgataaactattatttacataggtatgaataacataaattgaaaccatgcaataatgtattgaacgaattgttttttattttcttattacattttcccatatatcctgttttatttcacatgagatcaggggatagtaattataatagctaactattaatgaggcatgcctcttccctagtcct

SEQ ID NO: 155896 - DNA, 582 bp, Homo sapiens
ggctatccataatgttagtgtattattactttaatccaggctctctctggccatggcagagagaaagcaaaaaacaaataarcaaacaaaaacaagagaatgccagaaacacaagccagatgcccaaagtcacctagtgactcagtgacaggcctgggagggaactgaagaatttggatccaacatccttccggctctagtattcaatatctataaaacatgaagagagcattgcaaaatgtagacaccacacacgtatacacacatttattaagagactaaagtgtagcacactaaaacaagaaagtttgagtaaatgtacaatttattttttaaaaaattaggttgatttgtcgtgtgacaaggctgaaaaaactctaagttactaccaagcacgtctattgtctttacggatgaagacctgcacgcaagctgcatctcacagtggcatggcagccacacaccagaaggcagtgaaaataattgcatacaaaaatggggatgggtatcgtaatgggaagttaattgtggctggaacattccccatggtaagtggctatcacttaaatgctgcttgcatct

SEQ ID NO: 155897 - DNA, 627 bp, Homo sapiens
attataaatgcatgcattttaaggacacagtttgatgagttttggaaaatgtgtacacccatatgaccacaccaatcaatgtatggaacatctcygtcaccttgaaaggttctcttgtacctccttgcagccaatctaccccttcacccccggctccaagtaagcactgatctgctttctgtccctctacattagatgtgtctctttctagagttttatataaatagactcatgtagcatgtgctcttttgtgtctggcttgtgttgctgagcgtttttgagattcattcatgtttgtgtgtgtgtctgtggtttgtttctttgtaatgagtggtaggtcttcttttactaatctagcaagaaagttatttctttctaggggcctttagacattaccgtatcttgcagttataactgaggaaggatgaatcataaatagatttaaatgatatgatacctaagatattttttctaaataatttaacaataataatagccaatatttattaaatacatgttttataatgagcataaaacagaaaataagaggtgtattaattttccactgctgtggcttaaaagaataagcatttattatatcaaagtttccatgggccaggaattcag

SEQ ID NO: 155898 - DNA, 580 bp, Homo sapiens
agctgtcctgggctgcacgtggcctgctggctatgggttggacaagcttgagctaaatcatttaccactgtgatcttgaaagtcacctcaccttgctaagcctcaataccctaatccatgcagtgaataattatataattcatgtaggtgcttcctctgaaagcccagtttctgacctagagcaggtgctctgtacacattagctattttcattattgttatcttgattattttcatttccacaacatctttgctttagactttatcacaaacaaatgaaagtgcaccaaacctttacaatttatctgccagggckctctgcttatcaattcttcaattacctaatgcaaccccatgtcattcagggcttcagaaatgccttcctattttgattggaggagaagtggttcccgctctgtaacttatcaactaaccttgcctcttgggtatttacataaagaatgggaatttatttgaaaagaaactgtgggaataaattgcccttaactattctcccacaactatgtgctatgaatttgcatcattcatttctatctctctgcaggctgatacacagttt

SEQ ID NO: 155899 - DNA, 580 bp, Homo sapiens
agctgtcctgggctgcacgtggcctgctggctatgggttggacaagcttgagctaaatcatttaccactgtgatcttgaaagtcacctcaccttgctaagcctcaataccctaatccatgcagtgaataattatataattcatgtaggtgcttcctctgaaagcccagtttctgacctagagcaggtgctctgtacacattagctattttcattattgttatcttgattattttcatttccacaacatctttgctttagactttatcacaaacaaatgaaagtgcaccaaacctttacaatttatctgccagggcgctctgcttatcaattcttcaattacctaatgcaaccccatgtcattcagggcttcagaaatgccttccyattttgattggaggagaagtggttcccgctctgtaacttatcaactaaccttgcctcttgggtatttacataaagaatgggaatttatttgaaaagaaactgtgggaataaattgcccttaactattctcccacaactatgtgctatgaatttgcatcattcatttctatctctctgcaggctgatacacagttt

SEQ ID NO: 155900 - DNA, 668 bp, Homo sapiens
tatttattaacacctgaatttgtaataaacatagaagtcataccaccacttcatctagaaaaagaaggaaggaaagaagatagatgagggatacaagaaggcktctactgtttagaaattcttatcttaaaaaaaaagagactaaagcaaatatatcaaaatgtcagaatgtgtccaatctgattatgggtacatgattctgttttgtgttcttttttgcacactctaaaatgttttacctatttcataagggtaaaaacctcaagaatatcttttgtctctgatgtccccagtctgtgacaagttctagaaccccaagaattttccagtggtttgtctaatgtcccacatgagggagccagaccctaaagctgcaagtgtgctgacctcaatcattctgtaggtttcctgagctctttggttctcacctcccaccctggactagcacctgctgaggtctctaaaccaaaagcctgttggtcctgatccttgctgcttttatggagccctgcaatagttttcctaggtgggaggaaacaggcatccctcagtttcactcctagatgagcaacttttagccaaaactcattgtttcaggccccaagtatgatggccctgttctatgtaacatataggtctacccttctcctttcctgccatgctggaac

SEQ ID NO: 155901 - DNA, 518 bp, Homo sapiens
taattcatgttgtatctttcttttcttttttttttttttttttttttttgctatcttacacgggtgcctcacctggagcttgcattcaatgcaactcctagatctttttttttttcatgtgatttttctattaagccaggtctctctcatcttccatattttgctccttgtcaggagactgaattatttaaaaggcctggccctggtattaacatgctggtcctgaatggtgacagagcacagggacacactattttaaaaacactgttaggaaaraacattttagtttctcttgtcctagactctgtttgttctcagacactgtgtcataaaattttcatggacattaacttcctttgacttccacggccttgtctctcctgggccctgtctcttcttgattgtcttgggttttgttaactactttttctttttctcctcctttagtttaagtatttcccaacattctctctaaggattttgccacttctttgcagaacaaagaatgcacacctacc

SEQ ID NO: 155902 - DNA, 532 bp, Homo sapiens
aagagaataagaagcaaaataatgttatgatttgtcctatggtagaggcaggcaatggtgtggagaacagatatttgtttatttaattttacttagaaattgctatgtgcaatccctgtgctgtgcagtacaaggatgaatgagttgactacaatatgattcttccactcaaaaaaaaamccccaggattttagaatgtatttggaatcttaaataaatgattattatgtttatggtttcttagtctagtgttttaataacagatatggtggttttcatacattgaaattccctttcaaagcaaaatttacctattattctgcacaacggacaagtaatagttaataataatatatatgcttgcatatatgtgcacatataacgatacttcagtaggaaaaatccctcattcaaaattaatacactggaaatgtattccactggatgtatccactggaaatgaattccaggcatctcaaatcactaaagtatatctaaatgaagaattgaaataggccaggcatggtggtgc

SEQ ID NO: 155903 - DNA, 532 bp, Homo sapiens
aagagaataagaagcaaaataatgttatgatttgtcctatggtagaggcaggcaatggtgtggagaacagatatttgtttatttaattttacttagaaattgctatgtgcaatccctgtgctgtgcagtacaaggatgaatgagttgactacaatatgattcttccactcaaaaaaaaaaccccaggattttagaatgtatttggaatcttaaataaatgattattatgtttatggttycttagtctagtgttttaataacagatatggtggttttcatacattgaaattccctttcaaagcaaaatttacctattattctgcacaacggacaagtaatagttaataataatatatatgcttgcatatatgtgcacatataacgatacttcagtaggaaaaatccctcattcaaaattaatacactggaaatgtattccactggatgtatccactggaaatgaattccaggcatctcaaatcactaaagtatatctaaatgaagaattgaaataggccaggcatggtggtgc

SEQ ID NO: 155904 - DNA, 658 bp, Homo sapiens
gcttattagcatgtatgacttatattgaacctcaagtacagtggatgggaaataattgcagataaatatgttaactggatactcacaatagcacaatcctttcatctgacttttcaggtaataagtacataaaaaacaaagcctttaatttgaaaggttcgtagctgatgctgcargactgctttgtgataaatatgtgctgggaaatggacacaagacaggattatcaggcaaaattaatggtatttgtgtcccagctgagtcataagtattaccagattcttgccaattatttgaattaggttggataaagatgggaaaatccataacacaattaaatagcctttagactttcccttttttttctctactctagaccctcttatgtctatactttgcatttcatcatcaacttctgtctgagaataaattggtttatgcccaagaatattaatctggtatatattttgtctgacatccaaacattatttacaaggggaagcatcaatgaataagttagtgaagtatgtaaaatcctgtttatgctgaagagcccttttcataaacgagattatggaacacttgtattattactaaattaaattaattaaagcctatcatccttactctagttcaatcatttatttaatgcacacag

SEQ ID NO: 155905 - DNA, 658 bp, Homo sapiens
gcttattagcatgtatgacttatattgaacctcaagtacagtggatgggaaataattgcagataaatatgttaactggatactcacaatagcacaatcctttcatctgacttttcaggtaataagtacataaaaaacaaagcctttaatttgaaaggttcgtagctgatgctgcaggactgctttgtgataaatatgtgctgggaaatggacacaagacaggattatcaggcaaaattaatggtatttgtgtcccagctgagtcataagtattaccagattcttgccaattatttgaattaggttggataaagatgggaaaatccataacacaattaaatagcctttagactttcccttttttttctctactctagaccctcttatktctatactttgcatttcatcatcaacttctgtctgagaataaattggtttatgcccaagaatattaatctggtatatattttgtctgacatccaaacattatttacaaggggaagcatcaatgaataagttagtgaagtatgtaaaatcctgtttatgctgaagagcccttttcataaacgagattatggaacacttgtattattactaaattaaattaattaaagcctatcatccttactctagttcaatcatttatttaatgcacacag

SEQ ID NO: 155906 - DNA, 534 bp, Homo sapiens
gcatgactgctacataagatacatgtcaccgaaactgttctaaaggaaaatccacgttttcaaaataagaaccactttattcagttgtggaagattagtttttccaaagttctacgaattaatgaagtaataggtaacactcagagttatatttttatatttttaaccatatttcagtatattttatccttagagcagacaatacagctttctagaaattaattatttagtaattatacaatgtgtactttaattggcaacatcgagttttcaatgaagttttattaagtttgtaccatttatttgtattttctatttacaagtaggcaaagataaattgtataactgataaaatggtttctgaygaatatgcaaaatagttacaagctgttcaatattcatataaaatattttgttaccctaataatatgtataaaataaataatcttttatttctaagataatggaataattttatgcttagctatgtgaatattttttctgtaattataagcatcttataaaaataaaaac

SEQ ID NO: 155907 - DNA, 534 bp, Homo sapiens
gcatgactgctacataagatacatgtcaccgaaactgttctaaaggaaaatccacgttttcaaaataagaaccactttattcagttgtggaagattagtttttccaaagttctacgaattaatgaagtaataggtaacactcagagttatatttttatatttttaaccatatttcagtatattttatccttagagcagacaatacagctttctagaaattaattatttagtaattatacaatgtgtactttaattggcaacatcgagttttcaatgaagttttattaagtttgtaccatttatttgtattttctatttacaagtaggcaaagataaattgtataactgataaaatggtttctgacgaatatgcaaaatagttacaarctgttcaatattcatataaaatattttgttaccctaataatatgtataaaataaataatcttttatttctaagataatggaataattttatgcttagctatgtgaatattttttctgtaattataagcatcttataaaaataaaaac

SEQ ID NO: 155908 - DNA, 456 bp, Homo sapiens
cagtgtatatgtaccatattttttttatccagtctataattgatgggcatttgggttgattccatgtctttgcatcttattttgtccaagttaaatgtccaatttatattgtgaatagtgctgcgatgaacatacaggtgcatatatatttataatagaatgatttatattccttttgatatatacccactaatgagattgctgggtcaaatggtatttctgcttctaggtttttgaggaatcaccatgctgtcttccacaatggttgaactagtttacactcccaccaacagtaaaagcattccatttcttccacaaccttgccagcacctgttttttttttttttttttttttttttttggccttttaataaaaagtcattcgggcgggtgtgaaagggaaccaacttggggttttaacttacatttatcwaaggaccagggaaatggggcttt

SEQ ID NO: 155909 - DNA, 569 bp, Homo sapiens
atctgggctgctgcacagcttttgcagatatgccaaatatgtacagcactgctacctctttcaggttgatgctaccctctgttcaggaccaaagcttggtgttgttcattgatcaacctgtacacaaccacccagagaccactcttggcatttttgacagtctagtaatcaaatgtcctctctcgcttttattatttccccatayacacatttgtaggtattaaccaaataaaataaacaaaaaagttgttcgtgtttcttttttattggagaatttttttaaaagaactgtaataggtaacaagacatgctagggtttacagaaaaagaaaacttctggcacagtgaaatttttttttcaaagtgttagttgacctcacttctaaatccagtgcccgccctccacaaaaaagttacagtatgtgtattgttaggaagtgtttttattgatacataatagttgatccataaaatgtatgggatacatgtcatattttgatatatgcatacaatgtgttatgatcaaatcaaggtaactagcatacccaacacctctaacatttactatt

SEQ ID NO: 155910 - DNA, 569 bp, Homo sapiens
atctgggctgctgcacagcttttgcagatatgccaaatatgtacagcactgctacctctttcaggttgatgctaccctctgttcaggaccaaagcttggtgttgttcattgatcaacctgtacacaaccacccagagaccactcttggcatttttgacagtctagtaatcaaatgtcctctctcgcttttattatttccccatacacacatttgtaggtattaaccaaataaaataaacaaaaaagttgttcgtgtttcttttttattggagaatttttttaaaagaactgtaataggtaacaagayatgctagggtttacagaaaaagaaaacttctggcacagtgaaatttttttttcaaagtgttagttgacctcacttctaaatccagtgcccgccctccacaaaaaagttacagtatgtgtattgttaggaagtgtttttattgatacataatagttgatccataaaatgtatgggatacatgtcatattttgatatatgcatacaatgtgttatgatcaaatcaaggtaactagcatacccaacacctctaacatttactatt

SEQ ID NO: 155911 - DNA, 537 bp, Homo sapiens
acagcacattttctttatccattcatccactgatagacacktaggttgattccatatcttgaatatcgtgactaaggctgctatagaatgtgagtgcaggtatctgttcaatatgctgatttctttccttttgaatatccagcagtgagattgcttgatcatatggtcattcaactttcagtttttgaggaagctccatactgttttatagttgctctactaatttgcatttctaacaacagtgtatgactattaccctttctcctcatccttgctagcatctattattttcagtgttttgaaaacaaccattttaactggggtgagataatttttcattgtggttttgatttgcatttctctgattatcagtgatattgagcattttcatatacctgttggtcacatgtatgtcttcctcttttgagaacacttacccatttttaattggattttttgttgttgtttgagtttcttatataatctggtcatgaattccttgtcagatgagtaatttacaaacattttgttctattc

SEQ ID NO: 155912 - DNA, 537 bp, Homo sapiens
acagcacattttctttatccattcatccactgatagacacttaggttgattccatatcttgaatatcgtgactaaggctgctatagaatgtgagtgcaggtatctgttcaatatgctgatttctttccttttgaatatccagcagtgagattgcttgatcatatggtcattcaactttcagtttttgaggaagctccatactgttttatagttgctctactaatttgcatttctaacaacagtgtatgactattaccctttctcctcatccttgctagcatctattattttcagtgttttgaaaacaaccattttaactggggtgagataatttttcattgtggttttgatttgcatttctctgattatcagtgatattgagcattttcatatacctgttggtcacatgtatgtcttcctsttttgagaacacttacccatttttaattggattttttgttgttgtttgagtttcttatataatctggtcatgaattccttgtcagatgagtaatttacaaacattttgttctattc

SEQ ID NO: 155913 - DNA, 532 bp, Homo sapiens
ccctatgtgtactccaaggatctgagtctgtagtttacctctctaactggagaaactcactttaatcttctatgggtgtaattttgtagttcttttactttgataatgggtgaagttgttttagttgagtaacacatatccaagtatgaattccttgtactttaattgtttacaaagtaatcaaggacatctgatagagtatatttctccagcaatgtccaaaatcagtatttgtctgatgtcttctccagaataccagataacctgatataggttatacaggggacgatttggtggttgaaaggaaggacrccatgataggactgatgtgaattagtgctttaaaatattttgctaaccaacttgcaaaagactgaaaacaagtacagaggggtttatttttatttgcacgggacagtcagtgaacttgacagggggtgacctatgacttcttgagaagaaagaatgaaaggctatgaaagtgaattatagtatgctgggtcatcagagattaaggacgtatgacagttta

SEQ ID NO: 155914 - DNA, 544 bp, Homo sapiens
tgctgttggtttatttggtttgttcacgtattggttggttatttggttggttcacatagtctatatcctgtcattgttctttctagtagttttatcaactgctacaaaggaggtattgaattctcctactctaattgagctccatcatttttgcttcatgcattttgaggctttgttttttggcgcatamaaacttagaatttttaattctagtcttcctggtggaacggattctttttcattatgcaatatccctgtttgtttttagtaaaatttttgctctgaagtctatttatctgaaattaataataatttagccactcctagggttttttgtattaatgtttctataataaatatatttttccatctttttactttcaccctacctatgtcaccaaatttaaagtgattttcttctaaaaagtatatgatgagtctacatgtttaaaatccattccaccaatctatgccttttggttagtacatttagataatttacatttctatttactggtattattgatatgttagaactgaagtc

SEQ ID NO: 155915 - DNA, 544 bp, Homo sapiens
tgctgttggtttatttggtttgttcacgtattggttggttatttggttggttcacatagtctatatcctgtcattgttctttctagtagttttatcaactgctacaaaggaggtattgaattctcctactctaattgagctccatcatttttgcttcatgcattttgaggctttgttttttggcgcataaaaacttagaatttttaattctagtcttcctggtggaacggatyctttttcattatgcaatatccctgtttgtttttagtaaaatttttgctctgaagtctatttatctgaaattaataataatttagccactcctagggttttttgtattaatgtttctataataaatatatttttccatctttttactttcaccctacctatgtcaccaaatttaaagtgattttcttctaaaaagtatatgatgagtctacatgtttaaaatccattccaccaatctatgccttttggttagtacatttagataatttacatttctatttactggtattattgatatgttagaactgaagtc

SEQ ID NO: 155916 - DNA, 591 bp, Homo sapiens
aaaatcttattattttaaaaggtttaaacattaattttctttgtttccaactggaacttaaagcttaattttgttttattacaaccgcttgttattacagatgctgttagagttcttaaagttagtttacctaaactatgtttccttttaaaactaattgctatgctttagagaaaaatatatggcagggcctgagctaaactgaatatttctttcccttctttttttcctactaacaaaagaaatgcattagcacrttactctggttcagaagaaatatgaactcagggtaactctaatttggtctctagctaactagaagaataaaatatcttttttatacctttgaagatgagtagcttcaattaattgctatatagggatagatcattaaaatggttctttaaatttttttccctaaattctattaataagtagaatatatgcaatgcaaacaaaaacatttcatatgatgttttctgaaaacctgaactaatttatatcaattttggtagcatgcttttaattataatttagttacatatttgttcttattgtaagaaagataacagaaatctactgtgcagtgag

SEQ ID NO: 155917 - DNA, 645 bp, Homo sapiens
tctttcatactttacttttctcctgattgatactaaatattaagagtttagaattaatatatcatgtctgtaaaagagaaggtttagtctttcagttcaggaaaacatttgattggtagataaaatcattccagataatmcttcctttggcagataattgagcatctagtagatttagttggagtcaaggttattttatacttgaatatggtgcttactgtataacctacagaaaatgacttaactcatctatatttcaatgtatcctttctaaaattagtatgatagactctgcatgttttataaggttatgtctaacataaatatgactataggtgtgaaaagacttagtggtctcagaataatggtatacacataagcattaatcatttgcataaaatcatcatataaaaataatgtgtgaatgtaagttaaaacaattagcttttattgtggagtactatgaactaatagaaatcaaagccatcctgctcccatccttccaatccctgggggcaatactgtccgatttaatctaataacaaggataagggagtttccttaaggaaaattataaaaggtatatatttttaaacttccacagagatctatatatatttcataaaatatttatatctacatttt

SEQ ID NO: 155918 - DNA, 511 bp, Homo sapiens
tttcttcttatgcccaatgttacagatacagatattgaagtgcagtttgattaaaaatgcaatctaaaacctatacctaataaatggtggagccaggattaaactctggaccacttctttagcattctactatgtgttcatggaaataaataaaataagggcatataactggctggtgaaagaggtggatttctttcctaggwgttgaagaaaatgatttcccctctccctatgtctccctttcctcatctctccttccttcctttccaaacatatgttattgttcatataatagagctatggtttataatttttgagcatatgttttgtttaaaatttaatctgggatgaaaatatcaggaatcccaaattagaatgaaggaagtaaggttccaatctcagaggtagactttagacaggtaccaaataattcagtaattaagataaacaatatttaatgcatcctttaaaaatataaaaattaatgaaaaactctataattcaagatgaa

SEQ ID NO: 155919 - DNA, 445 bp, Homo sapiens
gtgtcccaacatgtccatgtgttttcttgttgaaatggtacagaagctcgcagaaaggaatggcatttacgtctaagaatgagcaaatagctaaaataaatgagattcaaatgaaattattacaaaattcagactgacttaaatctacgtctttatccaggcaaatatgctaaaaaaaattggctttactttttaatgtcaaaataccctccccacattcacragttgctcgattgctttgagtgaagtagttctaccgtacatttattatttatgtcctgactgcttctgaactggactagaggcagcttgccccaaaaatgcaagtgtaaatgtagttttagaaacagacagaaatgtagatatcaatgtagatataaaaatacccacaggaaagttcaaataaaaataaaataaaataagagaatttatgaagaaaggaggt

SEQ ID NO: 155920 - DNA, 590 bp, Homo sapiens
atgatatccatgattctttgatttaaaaaaatgatcatttatactctcccaaataaatgcaaaaggcttagaaaatctactattgactaggccccacttcataaagtagactataaaaaatggcactaaaaaattccatttaaaaaaacmaagaagtttaacttacagaagatacttgacttctgtttaacgtttcagaaagaatgtttctcaaaagaaaactcaagtatgaactattgactaagctaatttgcggaagaataaaacaacaggccaattgcagtataacgtcttaagcaactcagttcattttggatcttggtattatcactttgatcttggtttcaagttaatataacttgaaaacaggctgggataagaagacagaggcacatgttctcattgattccgtcatatgctggctcgatgttaaaatgtgtggcatatggtggaaaagtttgcagcaaattcattcttcttgaagtctttagaaaacttttgcatataaaaacaataaaaattaaaaatccgtgcattaccaaacaactgatgtgcacttcttatgtcctttggtactacctgggaacaat

SEQ ID NO: 155921 - DNA, 590 bp, Homo sapiens
atgatatccatgattctttgatttaaaaaaatgatcatttatactctcccaaataaatgcaaaaggcttagaaaatctactattgactaggccccacttcataaagtagactataaaaaatggcactaaaaaattccatttaaaaaaacaaagaagtttaacttacagaagatacttgacttctgtttaacgtttcagaaagaatgtttctcaaaagaaaactcaagtatgaactattgactaagctaatttgcggaagaataaaacaacaggccaattgcagtataaygtcttaagcaactcagttcattttggatcttggtattatcactttgatcttggtttcaagttaatataacttgaaaacaggctgggataagaagacagaggcacatgttctcattgattccgtcatatgctggctcgatgttaaaatgtgtggcatatggtggaaaagtttgcagcaaattcattcttcttgaagtctttagaaaacttttgcatataaaaacaataaaaattaaaaatccgtgcattaccaaacaactgatgtgcacttcttatgtcctttggtactacctgggaacaat

SEQ ID NO: 155922 - DNA, 590 bp, Homo sapiens
atgatatccatgattctttgatttaaaaaaatgatcatttatactctcccaaataaatgcaaaaggcttagaaaatctactattgactaggccccacttcataaagtagactataaaaaatggcactaaaaaattccatttaaaaaaacaaagaagtttaacttacagaagatacttgacttctgtttaacgtttcagaaagaatgtttctcaaaagaaaactcaagtatgaactattgactaagctaatttgcggaagaataaaacaacaggccaattgcagtataacgtcttaagcaactcagttcattttggatcttggtattatcactttgatcttggtttcaagttaatataacttgaaaacaggctgggataagaagacagaggcacatgttctcattgattccgtcatatgctggctcgatgttaaaatgtgtggcatatggtggaaaagtttgcagcaaattcattcttcttgaagtctttagaaaacttttgcatataaaarcaataaaaattaaaaatccgtgcattaccaaacaactgatgtgcacttcttatgtcctttggtactacctgggaacaat

SEQ ID NO: 155923 - DNA, 590 bp, Homo sapiens
atgatatccatgattctttgatttaaaaaaatgatcatttatactctcccaaataaatgcaaaaggcttagaaaatctactattgactaggccccacttcataaagtagactataaaaaatggcactaaaaaattccatttaaaaaaacaaagaagtttaacttacagaagatacttgacttctgtttaacgtttcagaaagaatgtttctcaaaagaaaactcaagtatgaactattgactaagctaatttgcggaagaataaaacaacaggccaattgcagtataacgtcttaagcaactcagttcattttggatcttggtattatcactttgatcttggtttcaagttaatataacttgaaaacaggctgggataagaagacagaggcacatgttctcattgattccgtcatatgctggctcgatgttaaaatgtgtggcatatggtggaaaagtttgcagcaaattcattcttcttgaagtctttagaaaacttttgcatataaaaacaataaaaattaaaaatccrtgcattaccaaacaactgatgtgcacttcttatgtcctttggtactacctgggaacaat

SEQ ID NO: 155924 - DNA, 563 bp, Homo sapiens
agctgggacaatacatggatggcactgcatcccacccctccatttcctgaaaagttttctgcagacaaagaatgccgattctttcttcctaagatgttttataaaatccacccattaaaacttctaggccttgagttttctttatgtaagtgttttctctgtagaatattaatctatttgatatggttgaacttaagtatttcagtttattattagtcatttgtgattttcttcctctattcttttttctaccatcattgagatttgaatatttttataactgcattttattttattgatttgacttttatctataccttttattttggmattttttggtagttgcaagatgtgaaatatattgagttttcagtgtcagcttacagctaattttgtatcacttaaaggaaaaatagaaactttcaatcacatacattaaacaggtccatgtatcccaaccctcttctttatgctgtatttgaagattatctggaggtttctggtaggcatcagcttaggaaataaagaagaatatttttataaaatataactgtaacagtcat

SEQ ID NO: 155925 - DNA, 563 bp, Homo sapiens
agctgggacaatacatggatggcactgcatcccacccctccatttcctgaaaagttttctgcagacaaagaatgccgattctttcttcctaagatgttttataaaatccacccattaaaacttctaggccttgagttttctttatgtaagtgttttctctgtagaatattaatctatttgatatggttgaacttaagtatttcagtttattattagtcatttgtgattttcttcctctattcttttttctaccatcattgagatttgaatatttttataactgcattttattttattgatttgacttttatctataccttttattttggaattttttggtagttgcaagatgtgaaatatattgagttttcagtgtcagcttacagctaattttgtatcacttaaaggaaaaatagaaacttycaatcacatacattaaacaggtccatgtatcccaaccctcttctttatgctgtatttgaagattatctggaggtttctggtaggcatcagcttaggaaataaagaagaatatttttataaaatataactgtaacagtcat

SEQ ID NO: 155926 - DNA, 529 bp, Homo sapiens
tgttataacgcaaagcgataagtgactatatcataagtaagaacaaggtattatgagaatcaaaaatttagtcttgaagaataaagtctcaccagtgagagaaaatacatctaataaaggccatagcaagagccaaaagtctttggcaaggctaagagcaccgagttgcagggtagttgaaatgaaggttttgtttgagttttctcataatggggtaggggttggcttgggggtgggattggaaaggagattggcttgccaagagatgacattgcaatgtggcatcctctaccggggctaccctgtaaaggatctaaaacatacctcagaggcrtggtaaaaagaggctaaaaatgtggatgtcctaagtttatgaaacaagatgggctagaagataaataccttcaaattctccattattctcagtgttctaatcactgaatttttggtttgtgacctctatgattaatctttaatacagtcttggtgagttgtacatgaattatgtatttcctttttatttaaacat

SEQ ID NO: 155927 - DNA, 604 bp, Homo sapiens
attatttggttgtcctggttttatttgagatgacagtaaatatgtcattaacatatctcaccacaagaaagaaacaaagtccaggtgttttcacaggttggctccatcaaatattaatggtaaattatattaattataaattaattccattcttacagaaaccacttagaagtaaaatgagtaaaaagtaatgaacaaaaataattccacaaattattctgtgaagattgtaagaaatttgatatcaaacttagatgtggaccatataataaataaaatttagagactactttcatagacatggacgcaaaactcttaaaaaaaaggtatagtctattatatactgcccttatataaaattatcccaatagaatgcctatgattttttaatccyttaatttcacagaatgtacatttttcagcacaatgtttcatggtctgtgtttatataagatagtaaacaatgttcccccaaattaatacaaaattttgaacaacacctatgtattaatgtatttgagctatattccaaacacaattactagtcctacagaatggtatgtagaagtttttaaaagtctctcatatgtcaacaaaggtgaca

SEQ ID NO: 155928 - DNA, 522 bp, Homo sapiens
tctgaaagaatcacagtgttactgggattggcatgccctctaaagcagatacagcttagatcacaacacccaggtaccttcaaatacctgaaaagccttcccaataaggatggatacaaataaacccagactgtgaagagtacaataaatacctaattcttcagtatccagacattgatgaacatccattagcatttaaggccgtccaaaaaaatgtgacctcaccaaatgaactaaataaggcatcagggaccaatcccagaaagatagagatatgtgatgtttcagacagaattcaaaatagctgttttgaggaaactcaaagaaatgcaagataacccagagagaaattcaaaatcttttttttctaatttgattgtactgtggtctgagagactgttaygatttcagttattttgcatttgctaaggagtgctttacttccaatcacgggatctattttagagtaaggaccatgtggtgatgagaagaatgtatattgtgttatttttgtgtggagtg

SEQ ID NO: 155929 - DNA, 281 bp, Homo sapiens
gggaatacaatgttgaacaagatttacaccgtccttattcttgcatagtgtaaattctagtttgttatgggagcacactgataataaacaaggaaaaaatgttaatgatcaacgttaaggttaaagaaaacaagatgatatgatatagagtacytagttgacattaagctgagatccaaatgacaagaaaactcagctaagtgaaatctagcggaggtacctttacagacagagggaacaactacagtgagtgtcacatgtaagtgggacagagaggccag

SEQ ID NO: 155930 - DNA, 605 bp, Homo sapiens
tttactccaacgataatgaacacttgttttgctatgtcccttgtacaaaagtaattgttrtcccccaatcttgctctcattcagttcaagcctctctgctaagtgtttaagaccctccaagatttgactctaacttttatctcctactgtttctaacacatcctttaccttatttatagccatttgttcatttcagaaatgaaaagctaattcagaattattagtgctataatagaggcatttataacaagcatagagatggcctaaaggaagatgtaatcagtttttttctggggagtcagagaagacttcacaaatgatatgatgcttaaagctgagtcgtaaaggttcaaaagttgtccatcagaaaaacatggtccattgaggaggggaagagtaattttctgagtaattttctgagcagggccctgatccttgtcttgggggacggtgactagagcttttcttgtagcctcattatccctgcattctgccataagtttgaatggggctgaccacaccaggagctcacgctcagagaaaggagtgtagctcagaataacatctcatagagcatcttcagtaaggaacaagtagataatgtg

SEQ ID NO: 155931 - DNA, 568 bp, Homo sapiens
agtgtttgcagatggccattatgagggaggagggtttaaagctttgagggaagggggttgcagttgtctccacacaccccatctgagtcttttggagatttccttgggcctaagccccaagatgtgtgggggctcagggactctttattctcactttcttccattctagttgcttcctgatcatactgtctctcttctcataactgcctccattcctagcccacctccttctactctcagatatcatcaatctctgggctggtttacctgttttttattaacatccytcatagtcacttcttatttatttatttaaaaagcctacaacacccagtattcccaggaggtctctcatccaagtactaaacagacctgaccctgcttggtttcagatatcagacaagattgggcacatccagggtagtacggccatagaccatagttactttattttttattttgtattttttttttagtatttattgatcattcttgggtgtttctcagagagggggatgtggcagggtcataggataatagtggacagaaggtcagcagataaatacgt

SEQ ID NO: 155932 - DNA, 569 bp, Homo sapiens
ttatctatcatatagtaagtggttactcagcagcacctttggatttgtctcttgaaaatgctcttctttctggccagacatagtgctcatgcctgtaatcttaacactttgggaggctgagacaggtggatcatttcaggtcaggagtttgagaccagtctggccaacatggtaaaacccaatctctactaaaaatacaaatacaaaaaattagactggtgtggtggtgggtgcctgtaatcccagctacttgggaagctgagacaggagaatcacttgaaccctgaaggcagaggttgcagtgagctgagattgcaccacttaactgcagcctacgtgaaagaatgaaactccatctcaaaagaaaaaagaaagaaaaaggaaaagaaagaaagaaaatgctctttccatctctaccaaatggccagcctgcaatttttttaatttttgagattctgcttccgttttaattataaattccaattttagattatcctcttgcttctatatgtgactgtaagctgctaaaagcaaccayaccatttctggaacacttggatgcttagaaa

SEQ ID NO: 155933 - DNA, 577 bp, Homo sapiens
tgttgtccagcctttttgagagacatctccaagcatgggrgcagaccagatgaatagggcatgaagtaaacccccaacaaatcacagcagcacaacagaagaggtaagtgaccattgaaagaaaaatagacaagaaaagatcaacagtgagagcatcaacaataaaaaagtccccacaaaaaccccattcaagggtctgcaatctcaaagattggaactagacaaactcacaaagatgagaaagaatcaacaaaataatgctgaaaaccaaaaagaccagagtgtctcttctcctccaaatggccacaatgcctctccagcaagggtgcaggactggaaaaaagatgagatggatgaattgacagaagaaggcttcaggaggtgggtaataaaaaactctactgagctaaaggagcatgttctaacccaatgcaaataagctaagaatcttgatgaaaggttagaggagctgctaactagaataaccagtttagagaggaacataaataatctgatggagctgaaaaacacagcatgagaaatttatgaagcatatgcaaatgtcaatagctgaatc

SEQ ID NO: 155934 - DNA, 651 bp, Homo sapiens
agtgctatttctatcaaattaccacatggtttttattcacagaattagagaaaactattctaaaacttatatgaaaccaaaaaagaatacaaatagccaaagcaattttaaaagaacaaaattggaggcatcacattacctgacttcgaactatactataagactacagtaaccaaaacagcatggtactggtaccaaaataagcagatggaacaatggaatagagtagagaaccagaaataaactgatcttcaacaaactacacaaaaataaacaatcgaggaaggatttcttatgtaataaatgtttctgagaaaagtagctaaccataagcagaataatgaaacaatttctacgtttcttccatatagaaaaattaactctacatggattaaagacttaacaataaaccctcaaactataaaaatcctagaagtaaacctatgaaatacccttctttttatttatttcttacttttttttttttttttatagacactgggtctcacaatgttgyctagcctgggcttgaacttctgggctcaggtaatccaccggcctcagcctcctaaattgctagaattacagtcatgagccactgcaccttgcctgtaaatattcttgaaatcagccttggccagaatttctttt

SEQ ID NO: 155935 - DNA, 548 bp, Homo sapiens
ctgagagatgatgctaaaccattcatgagaaactcacccctgtgatccaattatgtcccaccaggtttcatctctgatattggagcctacaacttgacatgaaatttgctgaggacacagattcaaactatattatttcaccactgccccactcaaatcttgtgtccttctcatattgcaaaatacaattatcccttctcaacagtcccccaaaatcttaacttatttcagcattaactcaaaagttcaaagtccaaagtctcatctgagacaargctagtcccttccaactatgagcatgaaaaacaaaacaaaacaagcaaaaaaaaacagttagttacttccaagatacaatggggttacaggtattgggtaaatacttccattccaaaatggagaaatccaccaaaagaatgaggctacaggccctatgcaaggctgaaacccaacagggcagtcattaaatcttaacactccaaaacaatatcctttgacaccttgtcacacatccagagcacactgttggcaggggtgggctcccaagatct

SEQ ID NO: 155936 - DNA, 576 bp, Homo sapiens
aatgttttcatgcctgctaacacaacatccattttggaacccatggatcaagaagtaattccaactttcaagtcttattatttaagaaatacttttcataaggttatagctgaaatagatagtgtttcctttgatggatctagaaaaagtcaattgaaaaccttctgaaaaggattcaccattctagwtgtcattaagaagatttgtaattcatgggaggaggtcaaaatgtcaacattaactaaagtttagaggaagttgattccaactctcatgaatgactttgaggggtttgaggcttgtggcttaaaacaacagcaaaaggtagtaattgctggtttagactgttctcctgccttcttcccccttttaaatagataagttgtacctatttctcagtgcacagctttctatgatgtattatagttatgaatatatttttagtgggaagagttttggagacggacatatacaagttttaatcttggttctatcactcagtagttttgtggccttggacaacacactgaaccctttttaagctttattggaaaaagactgatggtaatacccatc

SEQ ID NO: 155937 - DNA, 616 bp, Homo sapiens
caccaaatataccaaaaaagagtttaaagaaatgagcaaaacttccaaaatgataaaagggacctaacaatgtactccctgaaagtctgtcagagggcagaaaccaatgacactcatcccaatgcagcatctctcttgcattgaaccccccaacgctgttactgtgtcagagcaaaaacaaggaaattactagatcaaaacagccagggatgaggacatttatctaaatatttggtgcacaaggtgacatcatataagatcagatagctatgtactcagaaatctgaaaattgayttcctcagatgcatgaaatagaaacttgataagcatctattgtggttctggtactatgtatttatcctggattcaaaattatattctatttcttggagaaagagtttcttcccttaataatattgattcctcctggcccctcctctctttaccccttcaccccaccccatcaaaaccccctccctgtggttaccaagtctctgccattttctacgttactattttgttcctggcgaggctaaatttgacctggacaatttaaattgaaatttccttatggggttataaactctagtgagttaggatactattgtttttact

SEQ ID NO: 155938 - DNA, 616 bp, Homo sapiens
caccaaatataccaaaaaagagtttaaagaaatgagcaaaacttccaaaatgataaaagggacctaacaatgtactccctgaaagtctgtcagagggcagaaaccaatgacactcatcccaatgcagcatctctcttgcattgaaccccccaacgctgttactgtgtcagagcaaaaacaaggaaattactagatcaaaacagccagggatgaggacatttatctaaatatttggtgcacaaggtgacatcatataagatcagatagctatgtactcagaaatctgaaaattgatttcctcagatgcatgaaatagaaacttgataagcatctattgtggttctggtactatgtatttatcctggattcaaaattatattcwatttcttggagaaagagtttcttcccttaataatattgattcctcctggcccctcctctctttaccccttcaccccaccccatcaaaaccccctccctgtggttaccaagtctctgccattttctacgttactattttgttcctggcgaggctaaatttgacctggacaatttaaattgaaatttccttatggggttataaactctagtgagttaggatactattgtttttact

SEQ ID NO: 155939 - DNA, 616 bp, Homo sapiens
caccaaatataccaaaaaagagtttaaagaaatgagcaaaacttccaaaatgataaaagggacctaacaatgtactccctgaaagtctgtcagagggcagaaaccaatgacactcatcccaatgcagcatctctcttgcattgaaccccccaacgctgttactgtgtcagagcaaaaacaaggaaattactagatcaaaacagccagggatgaggacatttatctaaatatttggtgcacaaggtgacatcatataagatcagatagctatgtactcagaaatctgaaaattgatttcctcagatgcatgaaatagaaacttgataagcatctattgtggttctggtactatgtatttatcctggattcaaaattatattctatttcttggagaaagagtttcttcccttaataatattgattcctcctggcccctcctctctttaccccttcaccccaccccatcaaaaccccctccctgtggttaccaagtctctgccattttctaygttactattttgttcctggcgaggctaaatttgacctggacaatttaaattgaaatttccttatggggttataaactctagtgagttaggatactattgtttttact

SEQ ID NO: 155940 - DNA, 611 bp, Homo sapiens
cacttaaatattaatgaaaatcagttgtattagaccgctcttgtattgctataaagaaacacccaagacagggttgttgtttataaaggagagaagtttaattggctcatggctttacaggctttacaggaagcatggtgctggcatctgcttggcttctaggaaggcctcaggaagawtccaatcatggcagaggcaaagagggagcaggcatgtcacagggcaaaagcatgagcaagagagaaagagagtgggctgggaggcgccacacacttttaaatgaccagatctggtatgaactcagagcgagagctcacttaccaccaagacgatggcccaaaccattcatgaggaatctgccccaatgatccaaaccccacccaccaccaggtgccaccatcaatattggggattacatttcaacatgagtttgggcagagacaaatattcaaactatattattagtatagaacagttagtaagaacttgggcactgaattcaagcaaacctgggttcaaatccttgtgtcagcacttgcgtctgtgccctttacaagttacttaaaactccctaccattcagttccctgatctgtaaaaattagttaataa

SEQ ID NO: 155941 - DNA, 611 bp, Homo sapiens
cacttaaatattaatgaaaatcagttgtattagaccgctcttgtattgctataaagaaacacccaagacagggttgttgtttataaaggagagaagtttaattggctcatggctttacaggctttacaggaagcatggtgctggcatctgcttggcttctaggaaggcctcaggaagattccaatcatggcagaggcaaagagggagcaggcatgtcacagggcaaaagcatgagcaagagagaaagagagtgggctgggaggcgccacacacttttaaatgaccagatctggtatgaactcagagcgagagctcacttaccaccaagaygatggcccaaaccattcatgaggaatctgccccaatgatccaaaccccacccaccaccaggtgccaccatcaatattggggattacatttcaacatgagtttgggcagagacaaatattcaaactatattattagtatagaacagttagtaagaacttgggcactgaattcaagcaaacctgggttcaaatccttgtgtcagcacttgcgtctgtgccctttacaagttacttaaaactccctaccattcagttccctgatctgtaaaaattagttaataa

SEQ ID NO: 155942 - DNA, 503 bp, Homo sapiens
tgggctccatattgaaaatactcactgagaaaagcacgctttataagaactcaggagaacttgtggcttctgttgcaaaggctatttttaaccctcgctattatagtttttaaatgtgctatctgattaattttgtaagcttggattctctcttcacaggctaattgactcattgtaataccgaagttgaatcttcaaaagtgtctgaatgcttcaattttcactttattctttctcagttctttggtttttttgaactaaaaagtagycttgattgccaggggttggaggtagattaaccgttcagctagattgtggaaaaatggaatgagtagttctaaaagccaagcaccacctcctttgatacaaatagcctattctccttacatgtctattaacttgcttagtttccaatcaagactgggtagacaactttagctggtcaccaaggagcccagtgtctgatcctgggtctcatttaccaaagagcaacagccggaatc

SEQ ID NO: 155943 - DNA, 565 bp, Homo sapiens
tcatgtgggcaaattttaactacctcatgaactgcatttacaaggagatgcttaatttactacagtttgtttatgagtgctcttgtgtgaggtgaatcatttagggcagtttatttttagagttacacaaggagtggattaaaaaaatacccgctcaaacaagaatgtcaagcaaatttagcttgaaacacgaggtagacatagtgtactaagagggctgagaataaacttttgaacttaaagagtcctgattcctgtttgtaaccctgatgcacagatcactggcttgtatttcacaatatcaacttttcagtaaatggaagctttctcttttaaaaactctgaattaaatcttatttacaatagatttgcattgttcaaaaaaaaagtttttagtatatttagtttaggccaaaaaacytggagtcatcctcgacaccttttgtcttatatcacatatctaatcaatccatccaaaaacccttgatggtggcccttaaagatttatggagaatatgaacacttcttcccagctctacagttacaccctggtctcagccatcat

SEQ ID NO: 155944 - DNA, 438 bp, Homo sapiens
ctcaagttgcctgaaattgtttgcaaactcatgtgtacatgtatgtatatattatctgggggagggtgtccatagtttcatcagcctctcaaagatccatttgtaactttaaaggctctttaagattctagtggctacaacttgtcctgagttttaaaccccagttcccattttgaaatsttccaaaacaagaacagttgccagcctgagacctggaaagaaggtgaagataatttggtgaatcagcatcattttctaaacacaaaactcagggccagatgttttatcaaaacagaagcaaatagaaaaataaagatgcaatttaatagcaagttcctcagtttctgtcctctggaggcatttccatccatttgtctcagtttcccaggtgcttcctatggatcctttcacattcttgctctaggtgcccaagtgggt

SEQ ID NO: 155945 - DNA, 351 bp, Homo sapiens
gggaggaggtgggtgctgtatcagtgtgtgtgtgagagagagaagcggggaggtgggagaggagacagagggattgagcaaggctaagccctgcttatgagagacagaggcacctctgagggcaggtcaccaaaacgagcaccactttccaagtgggtgtaattataagatggtgtaccaggtgtgtgagaggtctgagtccccagatgggaggatattcagtccttgtgtgtatgtcaagarcagttttctgtggctatgagaaggttgtgtccctgtgtggtaagagggcaggttcctcaagtgagagggttgaatttttgtatatttaacagggtcagttctctgtag

SEQ ID NO: 155946 - DNA, 450 bp, Homo sapiens
cagtgccttaatttctctctgccacagatttttcttcttttctttatcttctctattctttgcttcctgactgggtagagatgggagtgttagcctgggccaatccctccatcctgaaaatttcttcttccattcacttctctgaatctttcttcttcaattattccttgttttcagtttcagtttctcccttttcartggaacatgctaaaacccacaaactcttcttctagccaccattttcagtatttcactatcttccatttttaaactaagcaatttcttccttttccgtttttttctagccctctccaccaatagaatcacaatgattgcaactggtatttatgtggtgctgaatagtttaccaaacactattgcatggcatggtgggaccccttgtttttgtgtacctagtatctgttccctttctttaggtagcaacacccc

SEQ ID NO: 155947 - DNA, 526 bp, Homo sapiens
catgtgaggtccttcatggttttatatcatcccgtatcactattcccacctcaccatatactgtgcatgccaccctgggtctttgtgtaggctcyacctggtcctggctcatcaccatagctcaggtgtcacctcctgagggtgtcctttcctgactcctcaccttccccatcccaagctgtgcagctgccccaaatgtggctttgcttgctcacatttcttagcataccacagtgttattgcctccttctttgactatctcttcaactcagctgttaagttctctgaaggcagtgactctatattaatgtcaaatttttagcacctagcacaatacctgttcataataggtgctcaataaatatttgctgaaccaatttgcctatataagcctctgtaatccttaaagcagtcctataaggtaggtattactggctttacaggcaaaaattttgaggtcaggtaggccaaacatcttgctcaagatcgcagacctaataaatgatcaaatcaggatttgaactca

SEQ ID NO: 155948 - DNA, 588 bp, Homo sapiens
actatgacagtggacaagatattctgtgagtctatggttagtagtcttggcagaagcattatgtgcaggataggcaatcccatatctggagtaagtgtctattccagtgaggacaaacctctgccctttccatgatggaagaattccaatataatcagcctgccaccaggtagctggctggtcatccccaggaatggtgccatatcgagggttcagtgttggtctctgctgctggcaaattgggcactcaggagtggctgtagccaggtcatccttggcgagtagaagtccatgctgctgagcccatgtgtaacctccatccctgccaccatggccactttgttcatgggtccattgggtcatgayaggagtggctgtggaaagaggctgagtggtgtccacagaatgggtcatcctatccacttgattattaaactcctcctccactgaggtcacctgctgataggcactcacatggcatacaaatattttcacagtttttgaccactcagagaggtccatccacatacctcttccccaaatttctgtcaccaattttccaaccatgcttcttccaagtccctgacc

SEQ ID NO: 155949 - DNA, 635 bp, Homo sapiens
tagtagtatcacatcatggcacagataatgagacataggtttgcttggtgctatgctcaaaacctttgtgtcccctgaaattcattgtgttgaaacctaatcagtaatgtgatggcattagaaggtggagcctttgagaggtgatcgggtcacgaagacagagcattttaattgtttgtctggttactccaagtgtttgaagattaaaaactatttcatttaagttagtttttagttctccattaattatggttacataactaatttacattataaacaactgttattaaacraagaaaaatttcattctattttctgcccaaataattataactgatagagactgaaaaaacatgtgtagtgcccttattaaagaggccccagagagctgccttgcccctttcaccatgtgaggacacagtgagaagtcagctgtctgtagcccagaagaaggccctcaccagaacctgaccatggaggcaccctgatctcagacttccagcctccagaaccgtgagaaacaaatttccgttgtttataagccacctggtctatggtatttcgttatagaagcctaaactgagtaagacactttggctacctggttctggtggttcagctctgaccatcaatca

SEQ ID NO: 155950 - DNA, 635 bp, Homo sapiens
tagtagtatcacatcatggcacagataatgagacataggtttgcttggtgctatgctcaaaacctttgtgtcccctgaaattcattgtgttgaaacctaatcagtaatgtgatggcattagaaggtggagcctttgagaggtgatcgggtcacgaagacagagcattttaattgtttgtctggttactccaagtgtttgaagattaaaaactatttcatttaagttagtttttagttctccattaattatggttacataactaatttacattataaacaactgttattaaacaaagaaaaatttcattctattttctgcccaaataattataactgatagagactgaaaaaacatgtgtagtgcccttattaaagaggccccagagagctgccttgcccctttcaccatgtgaggacacagtgagaagtcagctgtctgtagcccagaagaaggccctcaccagaacctgaccatggaggcaccctgatctcagacttccagcctccagaaccrtgagaaacaaatttccgttgtttataagccacctggtctatggtatttcgttatagaagcctaaactgagtaagacactttggctacctggttctggtggttcagctctgaccatcaatca

SEQ ID NO: 155951 - DNA, 572 bp, Homo sapiens
tgatccattaaaacttagatcgcaatcctgaaagcaccagtttggtaactgtttattaaataagaattaaatcattggtacacattttatttcttcattctttacatttttttcttcatgtagtaaaaaactagatttatgttattgaagcagaattcactaatcatgtaaagattagttgatccttgaaatgctgcatatctaacatttttagaaattggtttctctgggccagacaatatctgagaaagaaagaattgggaagatactttcagttctgtacaaaaataatgaaacagatctggtaagctgaagatctgagcattattttgacagacatgggaaatggggactgcacctgcctatctcacctggttttcaatgcttcacttkcactggctttcagccattttcaaccatgtacgaatgaggtacatggttaacattaaatgacaaggtcactactaatgatgtcctggagggcagccagcctagtcccaaatcctgaatttgccatgtggaaagaaatgaacatgcaacatgaaaaactgctgcctctaaattccgagata

SEQ ID NO: 155952 - DNA, 572 bp, Homo sapiens
tgatccattaaaacttagatcgcaatcctgaaagcaccagtttggtaactgtttattaaataagaattaaatcattggtacacattttatttcttcattctttacatttttttcttcatgtagtaaaaaactagatttatgttattgaagcagaattcactaatcatgtaaagattagttgatccttgaaatgctgcatatctaacatttttagaaattggtttctctgggccagacaatatctgagaaagaaagaattgggaagatactttcagttctgtacaaaaataatgaaacagatctggtaagctgaagatctgagcattattttgacagacatgggaaatggggactgcacctgcctatctcacctggttttcaatgcttcacttgcactggctttyagccattttcaaccatgtacgaatgaggtacatggttaacattaaatgacaaggtcactactaatgatgtcctggagggcagccagcctagtcccaaatcctgaatttgccatgtggaaagaaatgaacatgcaacatgaaaaactgctgcctctaaattccgagata

SEQ ID NO: 155953 - DNA, 572 bp, Homo sapiens
tgatccattaaaacttagatcgcaatcctgaaagcaccagtttggtaactgtttattaaataagaattaaatcattggtacacattttatttcttcattctttacatttttttcttcatgtagtaaaaaactagatttatgttattgaagcagaattcactaatcatgtaaagattagttgatccttgaaatgctgcatatctaacatttttagaaattggtttctctgggccagacaatatctgagaaagaaagaattgggaagatactttcagttctgtacaaaaataatgaaacagatctggtaagctgaagatctgagcattattttgacagacatgggaaatggggactgcacctgcctatctcacctggttttcaatgcttcacttgcactggctttcagccattttcaaccatgtacgaatgargtacatggttaacattaaatgacaaggtcactactaatgatgtcctggagggcagccagcctagtcccaaatcctgaatttgccatgtggaaagaaatgaacatgcaacatgaaaaactgctgcctctaaattccgagata

SEQ ID NO: 155954 - DNA, 595 bp, Homo sapiens
ctaataaataattttgaaataaataaatgagcattcatagcttttgttgttttgctttatttttttgtaacagggtctcactctatcacccaggctagagggcagtggcgcgatcatggctctctgcagcctcaaactcctgggctccagtgatcctctaacctcagcctctttggtagttggtaccacagacatgtagcacatcatcagctaatttttaatttttttgtagagattgggtctcaatgtgttgcccaggctggtattgaactcctgggctcacrtgatcctcccaccttggcctcccaaagcactggggctataagcattagccaccacgcctggccacatttatagttttatactttatagtttataaaacaatttaagatagactacttcatctcagtatcagcaatacaccttggaataatcatatttaggatagttagcttttcatgttgcactgatccccttaccattatgtaatgcccttctttgcctattttgatctgtgttggtttaaagtctgttttatcagagactaggattgcaacccctgttttttttttctttccatttgcttggtgaatat

SEQ ID NO: 155955 - DNA, 595 bp, Homo sapiens
ctaataaataattttgaaataaataaatgagcattcatagcttttgttgttttgctttatttttttgtaacagggtctcactctatcacccaggctagagggcagtggcgcgatcatggctctctgcagcctcaaactcctgggctccagtgatcctctaacctcagcctctttggtagttggtaccacagacatgtagcacatcatcagctaatttttaatttttttgtagagattgggtctcaatgtgttgcccaggctggtattgaactcctgggctcacatgatcctcccaccttggcctcccaaagcactggggctataagcattagccaccacgcctggccacatttatagttttatactttatagtttataaaacaatttaagatagactacttcatctcagtatcagcaatacaccttggaataatcatatttaggatagttagctyttcatgttgcactgatccccttaccattatgtaatgcccttctttgcctattttgatctgtgttggtttaaagtctgttttatcagagactaggattgcaacccctgttttttttttctttccatttgcttggtgaatat

SEQ ID NO: 155956 - DNA, 646 bp, Homo sapiens
tgatatgatgttcaacacagttttaaatattattgtggacagtcttttttggaattatttacaattgtatgtggatagttgcattaaagttgggggcattctgaaaattaaaggaaatatgtatgcttatgtgtgtgtgtaatcatgtatgttgggcaaccaagaagtaacttgtggctatggaccttttctgccagcatctctaccctccagtttctattaatagaccttattttcctgaccattgagggttgattatgtggctgatgctgggagaccatggtcagagaagcacctgtgccttgagtctcttttttttttttgagacagagccacactctctcatccagcytggagtgcagttgtgtaatcatagctcactgcagtcttgaattcctgggcttgtgtcttcagccttagtaactggaaatcatctttggaattatccttcttgagttcctgggaaatgtattcttcttcctctttggtaaaaggcttttaagataataactcaagaactacctgaaaccatgctgaagcacacaagataaaacatgagaaaaaacaaacaaaaaaccactgtgacatcaagaatgaaaatggagaagagatacagagagtttcctgagtgtccagtccctgagag

SEQ ID NO: 155957 - DNA, 595 bp, Homo sapiens
aattttcaaatctcaaggtatataaatcggcactatttgaaatatggtaatttatttctggaaaatctgaatttttctacattccatttatatttccacttaggttaatttagtattttattatctatagtttgatttctgtcaatttgacttccaccaaagtattcactatctacactgactacatatatatgtgtgtttgcataaatrcagatatatgcatcagtatgctatacacctgaaaaaatgtaaacttttttaaaaaggggcgtttctctaaaactagctagcagtatttcagtgttttaaatactaaccaaatactgtcactattttcaacaaccctagatgtagaaactctagttattcctatcttctagttggaggaactgaagcattggaaggtcatttaccatgtacagggtcatacatttactaaatgacagaatcaggtttggaataaatgggaattgattccagagcctgtgttcttaaccacgttctccagaaaacttgtactactattctgtataatcaatcaggttttaaaaataaagtaaacaaatccagtggtatctttggattaaaagttatt

SEQ ID NO: 155958 - DNA, 508 bp, Homo sapiens
atttaacccggctcatatttatagtactkttaacagtaaaaaatagaacacttgattaaaatttgtactattggaaaataaaaatgaaatgtacacagtacaataaagagataaattttgttatgcccttaatattagaatgtagggaacattgtgatttttaaaaatttaactcacaataagtattttaattctattaacctgacctcaacttcttttactgttatccaaataatttattttattgggaatgattttttcacttaaagctactctctcttactctctctcatgttcagtctgtctcatactactattccaattaatgtagcatatattatagatcccaacaattctctttctctctctgtttttctcatgctaacattatacttgatgtggcttcagttgtaaagcccaataattatctccacatttcaataccattatcttatataatatgttgcctaaaattcaaatatgttattattgaagttatttattggaa

SEQ ID NO: 155959 - DNA, 547 bp, Homo sapiens
cacacatgagcaactggaatttatccctgggacggaaggatggttcaacactggcctattgtttttaaggctttctggctctggaaactgtaaactcttgcctccaaaatgacctcaggagtctcccaggaattacaggagactattccaaggtgcaataatttatctctcaaagagataaaagtttaattttaatttttstttcttctgctttactgaattaatttatgaaaattctatctggactttatagcctcttttacagactgcttacaatatgcagtgtactttagatgtgcttattcagtagttaaactccttttactgtgtcttatggagagggctccctctatcattttttgttttctcaacactatatagtcaatatctattaagagaagttctgaaagaaaaacactgaaagaggaggaaaataataaaaggaacaattagagcaatacaacataaatgcctatagccaaacaactgaaggagttttcatatttaaggggccccatgagtatctcattaaatgagtgaaaaacca

SEQ ID NO: 155960 - DNA, 547 bp, Homo sapiens
cacacatgagcaactggaatttatccctgggacggaaggatggttcaacactggcctattgtttttaaggctttctggctctggaaactgtaaactcttgcctccaaaatgacctcaggagtctcccaggaattacaggagactattccaaggtgcaataatttatctctcaaagagataaaagtttaattttaatttttctttcttctgctttactgaattaatttatgaaaattctatctggactttatagcctcttttacagactgcttacaatatgcagtgtactttagatrtgcttattcagtagttaaactccttttactgtgtcttatggagagggctccctctatcattttttgttttctcaacactatatagtcaatatctattaagagaagttctgaaagaaaaacactgaaagaggaggaaaataataaaaggaacaattagagcaatacaacataaatgcctatagccaaacaactgaaggagttttcatatttaaggggccccatgagtatctcattaaatgagtgaaaaacca

SEQ ID NO: 155961 - DNA, 593 bp, Homo sapiens
aaattgtttgattgtgttgtatgtctttgtgcacttcttgcatgaatttgtggcaaccgaggatagtatagaagatatttgcataccagttcttagaatagtctttacatctcctttaaagaagaaaggtgacatactacatacatgtgaagcacatattgcttcattgcttcagtccctattttggctgtcataaatctgtcacataaaatacactttytagattaaggcattcataaaattattttcttgtagtatttatgttgaaaagcaaattcaaatgtattcattatatatgtaatgtttaaaaagtcccagttcatagtatcactaataatttgatagttgataatgtgaccttaaatgcatcttcttacttatttatattaatatccctacatgatggagttatatggataaattcagggctaaaactttagtcgttctatgcaaatatgtttccaggtttgcagactactccacatttacaatctactggtcaattgtcatttttaaggtattaaaaacatattctcagacatttaagtgcaaaagtcaaacctagataagattcagtagctattacagtaaat

SEQ ID NO: 155962 - DNA, 621 bp, Homo sapiens
tctctttctaatttcattgatgggtagcattaaaagcttctttattatttactgattcatgaatcgtagagattgtgaaaagtaaagaaacagctctaattatttctaagaattggtgatttcggtctcttaacgtacttgtgaaacttgaaggcaactcctggagcagctctctataagtcagtcaagagattctcaggactgtggtgcaggacacagaattgacaaatatctagattttgttatgaagctaacatgatgtccagtccatattctataaataaattactattagattgaagaatgagatattgtggtaratcaaatatccaggaatgaaattatcatgttattatatttaaatttttaacaaataattagactataataaaagatacttacaaataatatattcagcattaacttgataaattacatgggaatttttcatgcaagctggatattatttccagtaaactattgattactacttatatctatatgtgacctctctcactagtccagatatctcttgaaaagccactcagaagtttcaagatatttacaaataaatataatttatatttgtttgattttatttttgaatatgtgctctcctgc

SEQ ID NO: 155963 - DNA, 442 bp, Homo sapiens
tgacggttttatgaggagctccccgacccccaaatcactctgcacttctcyttcttgccattgtgtgaagaagggcatgtgtgcttccctttccaccatgattgtaagtttcctgagacatccccagtcctgtggaactgtgaaacaattaagcctgtttcctttataaattatccagtctcagagagttctttatggtaaagtgagaacagactaatacagtaaattcatgccacagagagtggggtgctgttacaaggctgcccaaaaatatggaagcaactttgaaacagaggctgaaagagtttgaagggctcagaagaaaacagaaagatatgggaaagttcggaactccttagagacttgttgaatggctttgaccaaaatgttgatactgatatggacaatgaagtccaggctgaggtcgtctcagacaaagatg

SEQ ID NO: 155964 - DNA, 442 bp, Homo sapiens
tgacggttttatgaggagctccccgacccccaaatcactctgcacttctccttcttgccattgtgtgaagaagggcatgtgtgcttccctttccaccatgattgtaagtttcctgagacatccccagtcctgtggaactgtgaaacaattaagcctgtttcctttataaattatccagtctcagagagttctttatggtaaagtgagaacagactaatacagtaaattcatgccacagagagtggggtgctgttacaaggctgcccaaaaatatrgaagcaactttgaaacagaggctgaaagagtttgaagggctcagaagaaaacagaaagatatgggaaagttcggaactccttagagacttgttgaatggctttgaccaaaatgttgatactgatatggacaatgaagtccaggctgaggtcgtctcagacaaagatg

SEQ ID NO: 155965 - DNA, 563 bp, Homo sapiens
caggttatactatcatcacaaaatgacttatgcaaaaaaatgcataagtaaaatgcaaatrctcttctttcatatcctaatgagaatataaaatatccaaatagcattcagaagaaaaaaatatttaaaattttaatgatacacaatatttcaaagtatgtaacttgtgatatttttgctaaaaaataaaccttcataactttaggtagtcaaaagagcatgtgaatcatagtaatattgatttaaaatgtaacatgaatggatagtttatctgtaagattagagcattcaggataactgttatttgttcccatgagattacttgatgccataaaccatgatggcacaaatattgttcatttatgtcactataaagtgagatttactgtggaacaatcagtactacttcttataatagctaggtttaacattactaattgtatcactataaaccaattttatggtgatataaacattagaggtaatgctgtcaggctctcatattaatgcctcaaaaaatacactaatatattgtctgattatatctcttacaaaactgatat

SEQ ID NO: 155966 - DNA, 646 bp, Homo sapiens
ttatcttgggcctctcatgtgtgcaaaaagaatggcaagacaaaatggaaaaaaataattcagtcaactgagaaaatatccttttccagaaaaacaagtcctgagaagaaaaaacataagggtcttttgaatatacctatagcttgtatatccacttttaattaagctgacttttaaccatagtgctctttaaaagaaaaaaaaatccgcataaatcccttattacccgacttcaaccacaccaaacagccatatttctggcttttgaaaatmaccaaaagtaacctcacaggtgaaatcaacaaacctcaactaaggttattacttaactgccagtgtacaagctattttcaaagaggtggtaagcagtttttacaaaatctagaaactttaaatgtagcccagagaaaggaagatttaagaaaggaatctagaagttgttcacggaggggaagagaatgagcaaatggcaaaagtcacacagatattaaccaggatgtactcattccctaagccaggattgaacctgggccatcattgtaaaatggcagaaaccaaaagaaagtattgccacatggttacaaggtcaaactcccaagaatgtaaaacaagatggagatttgtagcaaagtttgttactgacggt

SEQ ID NO: 155967 - DNA, 646 bp, Homo sapiens
ttatcttgggcctctcatgtgtgcaaaaagaatggcaagacaaaatggaaaaaaataattcagtcaactgagaaaatatccttttccagaaaaacaagtcctgagaagaaaaaacataagggtcttttgaatatacctatagcttgtatatccacttttaattaagctgacttttaaccatagtgctctttaaaagaaaaaaaaatccgcataaatcccttattacccgacttcaaccacaccaaacagccatatttctggcttttgaaaataaccaaaagtaacctcacaggtgaaatyaacaaacctcaactaaggttattacttaactgccagtgtacaagctattttcaaagaggtggtaagcagtttttacaaaatctagaaactttaaatgtagcccagagaaaggaagatttaagaaaggaatctagaagttgttcacggaggggaagagaatgagcaaatggcaaaagtcacacagatattaaccaggatgtactcattccctaagccaggattgaacctgggccatcattgtaaaatggcagaaaccaaaagaaagtattgccacatggttacaaggtcaaactcccaagaatgtaaaacaagatggagatttgtagcaaagtttgttactgacggt

SEQ ID NO: 155968 - DNA, 607 bp, Homo sapiens
tctctctatttctctttcttctgacaagagtggccacatcaaaactgactgttttctaggaagtattttcttggaagctgaagacaagcctagaggagaagactgaatggactaagcctctcactctgtgcttttgtgagcataagtatctgaagagggacagagagcttcagcatttaaagtgggcaaggatattccccttgtcttgagtgaagcctggcttttcttcagcaatacaacgtcaccgcagccctcctgcatttgttttctactgatacacaacaaattactacaagtttagcagcttaaaacaatgtacatttatcatctcactagttctgtgggtcagaagaccagacagacatagcttagctgtgtcctctgcctagggtttcacaaggcaatcaagatctcaactggggctgtatttctttctaaagctcaagtcttcttacaagctcatgtagtggcttgaagaattcagttcctcgtggttgtagaactaacacccttattttcttgctggccctcagccagtggccaatccccagaaggctctcatagtctttttcacagmacagttgcttagttcttcaggaccaagcag

SEQ ID NO: 155969 - DNA, 604 bp, Homo sapiens
gcaagaccttgtcttaaaacaaacaaactctgggatggatgctttgtttcacaagttggaaaaccctagagagcagtgttttgtgagtttacatggagctaaggaaggaatggaaaatattttattcctctgtgcatgataaaagaagctgctgtcttaatatatctgtctatctctstgtgtgtgtgtgtgtgtgtgtgtgtgtgtgtgtgttctgaggtgagggtgagggagaagccatggagatggattgtttcttgctttattttccttgtattaggtagatatttttcacattaaatatttttactattttacaccttcttaaatattgattatttgggggttataatttttcagttttcttatatcttcccctcttcagtcatggacaacagcaaaataatgcattaattctataacatttcagcaatactgctacacaacattgctttcttaaacaaatgtaaatagctgattgaaaagtacatttctttaaattacaaattttattatccaactcctactgaaaggctccacttacctccagttattggaagaattcaactattttcactttagttctacaatctttttatatctc

SEQ ID NO: 155970 - DNA, 540 bp, Homo sapiens
taaaatttttagtgggaacattataataacagtaggttatggcacataaaatacagaaaatggcattttttaatagtaaactaattaccagcttttatgttaattaattataaacattgaattttaatatattctctggaagggtgcttggaagtatgcatgatgcatgtatsgggggagggatagagtggtgaaaaaagaggtctgcacaggtataaagttaaaatattaattgttaaattttgttattggtctaagtgaatggtttagaagtgttttattctccctctctattgccaattttctgtgtaattatttcacacattgattatatgtttatataatataggaatcgaagagagtataccatagtcactctctccattcattgtcctttctttcctcaaaacaaaacaaaaataaccaaattctgaaaatatgtcatacatcttaacagtatgcacaaattcagtagttactgcttattttcattctgttccctttgggaaacattcatccctcaggtgtgtaattgaaaaa

SEQ ID NO: 155971 - DNA, 583 bp, Homo sapiens
cactgttttttaccccattgaatggacttggtgcccttgttgtaaataaattctccataaatgtgtgaatttaactctgggctctytttttgtttacattggtctataggtctatcattatactggtattacaatattttcatgactttagctttgatgactacttagctttaaaacagaaaattatgaattcactatgttgttattttggctattcagggatactggagcaaatgtgactcttgttatactttagcaaggagactggcagcatttttcccttgccctagagatttgtggaactttgaacttgagggagatgatttagggtatctggtgaataaattcctaagcagcaaagcattcaagaggtgacttggttgctgttaaaagcattcagttttaaaagggaaacaaagcataaaagttgcaaaaggaaaatttgcagcctgatgatgagatagaagagaaaaacccattttctgaggagaaattaagctgggtgcagaaatctgcataagtaacaaggggccaaatgttaatcaccaagacaatgcagaaaatgtctccaggacatgtcaga

SEQ ID NO: 155972 - DNA, 581 bp, Homo sapiens
gatgacttttgacagacatcccacacctgggctggtaggaaggaaatagcagcatagagasagtagctcccatgctggaaaggaatggatgggtgttaaatgagatcagtatttatacaggtttactgaacacagacatgaactagctctgactgatcatttgggaaagatgcccactcaaagcgtgatgcccactcaaatagtgatttaatatactattagcataaacgaaggtatccttcatattgttttttccctggtaaataaaaaaaaaattagacatctggagaaaggaataaagatgattttttagtgacttacgcaacatgccctctttcattatacttggctcaacccttctagaatgattcaaccacagatctatgaaaaggattcttggaaagattatcacagctagggtatagagcagactccaaagtaggagtttgatcaaagggagaggagactgggaactcttctgcattttcacaactgtattccagaagttgtggaatgacaccattaatcacatgaactttaactggcatggaaatcaggcataacttgtgtgggtcattgac

SEQ ID NO: 155973 - DNA, 610 bp, Homo sapiens
ctagcaaaaattcagacatgatagtgtgtcagagtgtgccaaggaggtgcatttgaaggatctggtwcttgtgggaaatggcagaagataaagtcatattgcctttttaaaaagcattttctttagaccactagtctagaaacgtggtatagcatacccctcctagatatttgcttgctcattagcatattaaaatatctggagccttaaatatattcagatgttaactttccttcaactcatcattttacaaatttccttgaccacaagccattaatgacccttattatataaacaatttcttataggctatgctttaggaaatgtgggatgatgtatatcaagtagaatataagaagtctagaatggcagcatagagttgatttttttaaatagggaaagttattgagtaagaaacttaggtgatccagtttacacattaaggacacccttctgtgtgatgaactagagaaaataaaaatcttgaaatcaaagaccactaaggagataattgcaagatgtttgtttgtttttataaatttgaataggttgatggaatttaaaataaaaaaacaaaggaacaattctttgggcaagagagatgtgggca

SEQ ID NO: 155974 - DNA, 513 bp, Homo sapiens
ggtattgaaaaactaattctaaggtttatatgcagaggcaaaagacccagaataggccacacagtgatgaagaaaaacaaaattggaggattgacactatctgatttcaagatttactacaaagctacagtaattgagacagtgtggtattgagggatgaacaggtaagtagattgatggaacagaataaagagcccagaaagagatccaaataggtatattcaactgagtttttactaaggagcaaaggcaagacaatggagcaaagattgtcttttaaacaaatggtggcaaaacaactaggcatstacatgcaaaaaacccaaaatagactcatacgttatatgcttcacaaaaattaacttaaaatggattatagacctaaatgtaaaatgcaaaactataaaactcttggaagatcaccagagcagaaaaattagatgacgttgggtagcatgataactttttagatacaatgtaaaaagcacaatctatgatagaaataacttatag

SEQ ID NO: 155975 - DNA, 544 bp, Homo sapiens
cttgtgtatgagaagaaaatgacgtgagagatacattatatttgctcaatgcactatacttttcatacttattagatattttaacaatttacttaataaatttagccattgatacttgttagatgcaagtttgattttatttggccagaagttttcattataagactttccagatattggatacgttcaagttacccaaaaatggctcaagtgctgaccactgagtcacagtgactgtcaagagccacccccccawtgcctttagttaaaaaaaaattacttttatagtatagcttactaatcatattttagaaatatttttcaatggtcaataactctatcttttgaagatttattctaaatacatatccaatgctattagtcaataaaaatgatcattggagcttaatatctataattcaatttttgtcatgcgaacatcaaactgaatttaaaataaaggcaaaagtaaacatttggtcataaatcaattcttatgatgacataaaagctttatatttatcttaatgttagcattctagaa

SEQ ID NO: 155976 - DNA, 520 bp, Homo sapiens
ttcacttaaaattgaatacataatgtatgcaatagcacaatgcctggtcaaagcaagcagtcattttaagttagctactttattatgatctacacaaacagaggaaagggcaatgtcaggcatcaatttctccccattatyttatttaagatagaaggaatctttaacagtcacttttttcttgccatagttttaaaatagtactagactttgacattttccagccctgggtaaaaaaaaaaatgacttggaaaacagttcattaatcaaattgccatggttgattgtttgtctgaatatacataatagataataaagtgtttgaatgttgagctgcacataaaattgaaccacgtatgaattagaatgaatattctgagatcttaatttattaagggttgtggcaggcagaattctaagatagctccagagattattggactattaagattgtctggtataatcgcctccataaattcaggtgggccttaccaaatcaggtgatccttattttaaaaaa

SEQ ID NO: 155977 - DNA, 366 bp, Homo sapiens
atgattagaatctctttaaaacaagtagtgataaatacaggaaaaccagagatcaaaggtgatcaacagaacaaaagccacaagaggacaggatcttagaagcaaattactaaaatgaaaatgctttcagagttcattaacaggcaagttgaaaaacaaggcaaaatggacctgattttacgtaaaaaataatagcaatatgtactctttgctaatgcacttaaatggcttttagaaaaatatcctgctattcacttcaaggaacaaattcttatgatatcagcaactaytgaatgtgaggcattattataaggccaatttttaaataaagtctgtttatataaaaaagtcacattcattgcattt

SEQ ID NO: 155978 - DNA, 539 bp, Homo sapiens
accctaaatattgtttttgtatatgctaagcaactgtaaattgttaggagatgattactgagcaaaataataataaagaaatatactctctatttacattaagacaacatgacacttcagtttccataaaagaacagatgaaatggaagtgatatttatactgaggagaaaaacaccgtgtgagttgaaggtgaaagtggtgctgggaatcatctactttggagtagccagggtaactgaattggaagtagaagctgtaagaagagggaaaaaaggtataatttaagtaacctagaaagaagattttgacttgcaataggatattactaatgaaaacaatatatttttaagatcaatcctacgttagaccaagtaaaaataactctgaaaaaagaratttttactaaacttgacacctataggtaataaagatagaccatgagtaatttttaaaaattactctttaagcctgtctgtgtttaatttccttattttatatatatacatatatataagcatatatatataaacatatatat

SEQ ID NO: 155979 - DNA, 574 bp, Homo sapiens
acacaaaaaagtttttattggttcaactgctggagccacagtgtccagtagagtgccttcattgcagtaggtactcttattttttattaaataatctagttaggccggaagcggtggctcacgcctgtaatcccagcactttgggaggctgaggtgggtggatcacgaggtcaggagatcgagaccagcttggccaacatggtgaaaccccatctctactaaaaatacacacacacacacacaaattagctgggcatagtggcacatgcctgtagtcccagctactcgggagactgaagcaggagaatagcttaaacccaccattgcactactgtactccagcctgggcgacagagtgagactccatctcaaaaaaaaaaaaaatctaattaaagacattatatagaaatacktaataggtaagtaaataaataccgaatgtgtaagtaattcaataagtgaacaatatttgtaatagtaggacccttgtcttcatttaaaaacacagaaacaacagggcttacttaaaatttacaataagatgctacaaagaaaacattggtccaatagttat

SEQ ID NO: 155980 - DNA, 598 bp, Homo sapiens
cttggccatctcttaccagtctctgtttatcttaagccttgtctttctgatgttcttacccattaaataggttaaactccattaagtcataagtggattgtgaattttcagagaatgaaaaatataaaatggaaagtataaaatatttagttaaatctgcataggaaatatttcttaaatgattctaaaatgacctcagtctataaattaccatttaatatgttaattatacattgtatgaaaggaaagcaaagatctaatcctgcattgatgtgcaacagatcaccttacatgtggcaacatttgagggactgaaaaygtttcttgccctcttgcctaggtccacagttcctttcaatctcttctgcatgataccttgaatatatcatttgttagttattagcacgtaaaaggtaaggcttctggtcaaaccttcaaatatatcataggggacaaatgctataggcatatcactattaagcattagcaacttagcagaaattagataacatgagaagaccatgagaaagtgagaaggatgatggctaacttcgatggtagtcaggagctggggaaggtgtggacatgcaagcaatgg

SEQ ID NO: 155981 - DNA, 598 bp, Homo sapiens
cttggccatctcttaccagtctctgtttatcttaagccttgtctttctgatgttcttacccattaaataggttaaactccattaagtcataagtggattgtgaattttcagagaatgaaaaatataaaatggaaagtataaaatatttagttaaatctgcataggaaatatttcttaaatgattctaaaatgacctcagtctataaattaccatttaatatgttaattatacattgtatgaaaggaaagcaaagatctaatcctgcattgatgtgcaacagatcaccttacatgtggcaacatttgagggactgaaaatgtttcttgcyctcttgcctaggtccacagttcctttcaatctcttctgcatgataccttgaatatatcatttgttagttattagcacgtaaaaggtaaggcttctggtcaaaccttcaaatatatcataggggacaaatgctataggcatatcactattaagcattagcaacttagcagaaattagataacatgagaagaccatgagaaagtgagaaggatgatggctaacttcgatggtagtcaggagctggggaaggtgtggacatgcaagcaatgg

SEQ ID NO: 155982 - DNA, 598 bp, Homo sapiens
cttggccatctcttaccagtctctgtttatcttaagccttgtctttctgatgttcttacccattaaataggttaaactccattaagtcataagtggattgtgaattttcagagaatgaaaaatataaaatggaaagtataaaatatttagttaaatctgcataggaaatatttcttaaatgattctaaaatgacctcagtctataaattaccatttaatatgttaattatacattgtatgaaaggaaagcaaagatctaatcctgcattgatgtgcaacagatcaccttacatgtggcaacatttgagggactgaaaatgtttcttgccctcttgcctaggtccacagttcctttcaatctcttctgcatgatrccttgaatatatcatttgttagttattagcacgtaaaaggtaaggcttctggtcaaaccttcaaatatatcataggggacaaatgctataggcatatcactattaagcattagcaacttagcagaaattagataacatgagaagaccatgagaaagtgagaaggatgatggctaacttcgatggtagtcaggagctggggaaggtgtggacatgcaagcaatgg

SEQ ID NO: 155983 - DNA, 603 bp, Homo sapiens
aataccaaaaacataattcatgaaagaaacaattgataagttgaacttctatctcattccaacatgtgctgctataacagaatacctgaaattgagtaatttataaagaacagagatttatttcttacagttcaggaggctggggagtccarggtagaagggactgcatctggcaaagcccttcttgctgcattatcccgtagaggaaggtagaagggcaagacagcatgcacaagagagaagaggcctaactcattattttattggtaacccactctcaagattactaacccactcccacaacaacggtattaatcacctcttgaaagttccatctctcatttgggattgattttccaacacatggactctggggaacacaatcaaatcatagcaactttttaaaatttttaaaaaattcttctatgaaagacactatcaagaaaatgagaatgaaaagacaagttacattctaggagaaaaaattgcaaaaggctatctgataaaggtctgttatccaaaatacacgaataactcataaagatcaaccataagtaaatgaacaacctgattttaaaatgggcaaaatatttaacaagaaca

SEQ ID NO: 155984 - DNA, 598 bp, Homo sapiens
cttggccatctcttaccagtctctgtttatcttaagccttgtctttctgatgttcttacccattaaataggttaaactccattaagtcataagtggattgtgaattttcagagaatgaaaaatataaaatggaaagtataaaatatttagttaaatctgcataggaaatatttcttaaatgattctaaaatgacctcagtctataaattaccatttaatatgttaattatacattgtatgaaaggaaagcaaagatctaatcctgcattgatgtgcaacagatcaccttacatgtggcaacatttgagggactgaaaatgtttcttgccctcttgcctaggtccacagttcctttcaatctcttctgcatgataccttgaatatatcatttgttagttattagcacgtaaaaggtaaggcttctggtcaaaccttcaaatatatcataggggacaaatgctataggcatatcactattaagcattagcaacttagcagaaattagataacatgagaagaccatgagaaagtgagaaggatgatggctaacttcgatggtagtcaggagctggggaargtgtggacatgcaagcaatgg

SEQ ID NO: 155985 - DNA, 399 bp, Homo sapiens
ccatatagggtctgggaatttggtgaaaggcatgactctttattatgacgatttaagtcaaaaaccatgagctttagattcctttgcttatgcataacctataacwctctagtagacttcacatcaacttcagtcttagtgactttgtgaaatattaaccattgccaaaaaagctctgtgggttcaagtattttcagtggttttctggcttcgcaactcccggcaatactgatgcctacctgatctttggtgatattcatttctctgctagctctgccacaatgcacatttgatattctgaaacttaagcactaaattatagagttaactcttcttagcacacctaagacttataaaggcaaaatatactactttatttttctccctctgggatttcat

SEQ ID NO: 155986 - DNA, 568 bp, Homo sapiens
ttccaaaatctgagatcttttgagtgtcaacatggtgctcaaaggaaatgctcattcgagcatttcagattttgaatttttggatttgggatgcctacctggtaggtataatgcaactatytcaaaatctgaaaaaatcagaaatatgaattgcttctggttctccaaggattttggataaggaatactcaacttgtataaattaatctctggaagttttgctttattgttgttatgtgtacactaagaaacttacaaggatctattgtcccttaagttttatggagcacttatgtagcagtcccagtgctagagtctccttttcatgtaaagtctcatgataaccctaaagggtaggcattgttcgtatccccattttacagatatggaaatggacacatggaaagactaaacaatttgcccaaagtctcacaggtgacaagcagaggaggctgggtgtaaactcatctttgactccagaccttactcctaacctttgacctatacagtgtgctactgagtcaggcattcacggcctcccaaaacttggaaccagtcttttcttcta

SEQ ID NO: 155987 - DNA, 517 bp, Homo sapiens
gcgaaaagctgagtccgccgatcgtgcccgggacaaggctgccttccactcgccctcgccgcatctacctggtaggcggcatgcgcacgggcttaraggcttgagagcctctggaagagaaagggtcccaggaaggaaacctgcccccggcctaagtgtcggcgcccagatcaccacgaaccccgcacctaggcgccgcccaccaagttccaaagaagtccgaggcgacctgggagtcggtcggatcccagccgagaaaagaaacaagcaggatagcaattcttaggggagccaccctgggagttttaggcagcgtttgcctttccctggttttcttcaccaagccccatcctccccccgcataccacccccagtcaaaagagtgggagaaaatgcacagttcgaagtcggtgagagcaaaaatgggtctagtaaatcaacccgtggtggtagctaaaaggtttggggctgcaaagaaacaaactgtaagttttgagcaacaaactttttcttcaat

SEQ ID NO: 155988 - DNA, 572 bp, Homo sapiens
catatttgacaaatcacaattataaaaacacaaatggtctggggcagatgtgtgaaatgagatggattcatacttgtgctgcattataaaggtctgaataaagaataacacacaggctaggtgtagtggctcatggctgtaagatcagcactttgggatgctgagacaggaggatcccttgaggccagaagtttgagaccaaccaayacatggacaacatagggagaactcatctctacatcaagcacaaaaatgagctgggcatggtggcaatgcctgtggtcccagctactcaggaggccgaggcaggaagattgcctgagcccagcagttggaggctgtagtcatgactgaaccactgcatatctgcccacatgacagagcaagaccctgtctcaagaaaaaagaaaatgctatttggattagaatccacttgcttgtttccctgcctgccaggctgcgtgttaaatctggcacattgtgggtacccagcccaggaccccatgtggctgttgcagcttccctaacaattttggataaagaagtgaattttttaattagttttttttttt

SEQ ID NO: 155989 - DNA, 585 bp, Homo sapiens
gactaggagcatcaaaaataaaacattagtattatacagttcaagcagacatagtggtggcggtggtgatacaggagtatgacattctgggagagagctgctctcgttaaagtggtggttactctaaagaggaccaagaagatgagatacaccattaacaatgtgagccaccatttatatggtgcttcctgtgtgccaacagccctgcaaagtgagattataggcattatatcatttgatccttccccaagttctagaagggggatatccatgattagcagcattttaaagctcaggaaattggagcttagggaagttagtaactgacacactcatgtagctcatacacagtggagcagtaattcgtgtccaggtctctctgatgccagcwtctacctactcataatgggtggattcctggccagcttacctgcagggctgcccattaaatggtagctcctggccaggaccttgtggggagggaggtctcagcgagcaaggtttgttagagcaaattgctctactggagtacccagaaagcacgggttgtccatctttcgttctgagagaaatccctcaaagcaa

SEQ ID NO: 155990 - DNA, 295 bp, Homo sapiens
tgtaatgaactttaatggaatgtactcgaatggattcgactgtaatggaatgttctggaagtgaatggrctccaatggaatggattcaaaaggaatggaatcgtacggaatggaatctaatggaatggaattaaatggaaatgaatcaaattgaatagcacggaattgaattgaatggaatcgaatgcaatggaatctaatgaaacggaaaggaaatgaatggaatggaatggaatgggctggaatggaaaggaatcgaaacgaatggaatggaatcgaactgaagagactggaa

SEQ ID NO: 155991 - DNA, 295 bp, Homo sapiens
tgtaatgaactttaatggaatgtactcgaatggattcgactgtaatggaatgttctggaagtgaatgggctccaatggaatggattcaaaaggaatggaatcgwacggaatggaatctaatggaatggaattaaatggaaatgaatcaaattgaatagcacggaattgaattgaatggaatcgaatgcaatggaatctaatgaaacggaaaggaaatgaatggaatggaatggaatgggctggaatggaaaggaatcgaaacgaatggaatggaatcgaactgaagagactggaa

SEQ ID NO: 155992 - DNA, 295 bp, Homo sapiens
tgtaatgaactttaatggaatgtactcgaatggattcgactgtaatggaatgttctggaagtgaatgggctccaatggaatggattcaaaaggaatggaatcgtacggaatggawtctaatggaatggaattaaatggaaatgaatcaaattgaatagcacggaattgaattgaatggaatcgaatgcaatggaatctaatgaaacggaaaggaaatgaatggaatggaatggaatgggctggaatggaaaggaatcgaaacgaatggaatggaatcgaactgaagagactggaa

SEQ ID NO: 155993 - DNA, 178 bp, Homo sapiens
gaattccaacctcaagcatctctctctcagaccaccacctctcttatttgcagtccatctgctatayactacgttaactctaacaagtccttggcctcaacacaaccctataatccattgaccctaccacagttttgttgtcccctaccccactcacgtggccgcttccctgcagcct

SEQ ID NO: 155994 - DNA, 541 bp, Homo sapiens
gaatgggatcgaatataatggaatacactggaatgtaatgtaatgaactcgaatgtaattgactggaatggaatgtacatgaatgaaatgtaatcgaatggaaagtaatccaatggaatagaatctaatgcaataaaatcgactcagatagagtagaatgtaatggaatggagtgcagtgcaatggaatggaatggaatggaatgcaatggaatggaatggaatggaatggaatggaatggaatggaatgggatggaatggtatggaatggatagtaatggactggagtgaaatggactggaaaggaatggactcaaattgaaagggctcgaaaggaatgsagtcaaatggaatggtctggaatggaatgaacaagaatgtaatgcaatccaatagaatggaatcgaatggcatggaatataaagaaatggaatcgaagagaatggaaacaaatggaatggaattgaatggaatggaattgaatggaatgggaacgaatggagtgaaattgtatgcagtagaagagaatagaatggaatgc

SEQ ID NO: 155995 - DNA, 541 bp, Homo sapiens
gaatgggatcgaatataatggaatacactggaatgtaatgtaatgaactcgaatgtaattgactggaatggaatgtacatgaatgaaatgtaatcgaatggaaagtaatccaatggaatagaatctaatgcaataaaatcgactcagatagagtagaatgtaatggaatggagtgcagtgcaatggaatggaatggaatggaatgcaatggaatggaatggaatggaatggaatggaatggaatggaatgggatggaatggtatggaatggatagtaatggactggagtgaaatggactggaaaggaatggactcaaattgaaagggctcgaaaggaatggagtcaaatggaatggtctggaatggaatgaacaagaatgtawtgcaatccaatagaatggaatcgaatggcatggaatataaagaaatggaatcgaagagaatggaaacaaatggaatggaattgaatggaatggaattgaatggaatgggaacgaatggagtgaaattgtatgcagtagaagagaatagaatggaatgc

SEQ ID NO: 155996 - DNA, 595 bp, Homo sapiens
gagcatgttaaatggacatgtaaaagatatgacaaagatccaaatcagacttctagagataaaaaatacctgagatgtaaaatacatgagatgccattaatagctaattagaggctgcagaggacaagattagtgaacttgaaaaaaaagcagtagaaaacatttaaaataaaacaaaaaaatacggaaaataaagtgaacattgatgtgcattatcccatcagtgtgccatggtgtagtttcacaaggtctaagatatgtgtaattggagtcccagagaaaaaggggaagacaaggatattcaaagaagtctgttcaaaatttttacaaatttgacaaaaactataaacccctaaatccaagaagcccagagaactctccaagctgaagaagcttgaagaaaatgacaccagtgcacattgtaatcaattttcttaaaactgatataaagagaatatcataaaartatccaggaaaagtaaatgcattatgtgcagggaaacaacaatgagaatgacaacaaactttgttggcagcaacacaaaccagaagacaatggggcaacatctttaaaatacttaacaaaaagacaaaa

SEQ ID NO: 155997 - DNA, 566 bp, Homo sapiens
aatcgaatataatggagtcgaatgaaatggaattgaaaggaatgggatagaatacaatggaatatactggaatgtaaygtaatgaactcgaatgtaattgactggaatggaatgtacatgaatgaaatgtaatcgaatggaaagtaatccaatggaatagaatctaacgcaataaaatcgactcagatagagtagaatgcaatggaatggagtgcagtgcaatggaatggaatggaatggaatgcaatggaatggaatggaatggaatggaatggaatggaatgggatggaaaggtatggaatggatagtaatggactggagtgaaatggactggaaaggaatggactcaaattgaaagggctcgaaaggaatggagtcaaatggaatggtctggaatggaatgaacacgaatgtaatgcaatccaatagaatggaatcgaatggcatggaatataaagaaatggaatcgaagagaatggaaacaaatggaatggaattgaatggaatggaattgaatggaatgggaacgaatggagtgaaattgtatgcagtagaagagaataga

SEQ ID NO: 155998 - DNA, 566 bp, Homo sapiens
aatcgaatataatggagtcgaatgaaatggaattgaaaggaatgggatagaatacaatggaatatactggaatgtaatgtaatgaactcgaatgtaattgactggaatggaatgtacatgaatgraatgtaatcgaatggaaagtaatccaatggaatagaatctaacgcaataaaatcgactcagatagagtagaatgcaatggaatggagtgcagtgcaatggaatggaatggaatggaatgcaatggaatggaatggaatggaatggaatggaatggaatgggatggaaaggtatggaatggatagtaatggactggagtgaaatggactggaaaggaatggactcaaattgaaagggctcgaaaggaatggagtcaaatggaatggtctggaatggaatgaacacgaatgtaatgcaatccaatagaatggaatcgaatggcatggaatataaagaaatggaatcgaagagaatggaaacaaatggaatggaattgaatggaatggaattgaatggaatgggaacgaatggagtgaaattgtatgcagtagaagagaataga

SEQ ID NO: 155999 - DNA, 566 bp, Homo sapiens
aatcgaatataatggagtcgaatgaaatggaattgaaaggaatgggatagaatacaatggaatatactggaatgtaatgtaatgaactcgaatgtaattgactggaatggaatgtacatgaatgaaatgtaatcgaatggaaagtaatccaatggaatagaatctaaygcaataaaatcgactcagatagagtagaatgcaatggaatggagtgcagtgcaatggaatggaatggaatggaatgcaatggaatggaatggaatggaatggaatggaatggaatgggatggaaaggtatggaatggatagtaatggactggagtgaaatggactggaaaggaatggactcaaattgaaagggctcgaaaggaatggagtcaaatggaatggtctggaatggaatgaacacgaatgtaatgcaatccaatagaatggaatcgaatggcatggaatataaagaaatggaatcgaagagaatggaaacaaatggaatggaattgaatggaatggaattgaatggaatgggaacgaatggagtgaaattgtatgcagtagaagagaataga

SEQ ID NO: 156000 - DNA, 566 bp, Homo sapiens
aatcgaatataatggagtcgaatgaaatggaattgaaaggaatgggatagaatacaatggaatatactggaatgtaatgtaatgaactcgaatgtaattgactggaatggaatgtacatgaatgaaatgtaatcgaatggaaagtaatccaatggaatagaatctaacgcaataaaatcgactcagatagagtagaatgcaatggaatggagtgcagtgcaatggaatggaatggaatggaatgcaatggaatggaatggaatggaatggaatggaatggaatgggatggaawggtatggaatggatagtaatggactggagtgaaatggactggaaaggaatggactcaaattgaaagggctcgaaaggaatggagtcaaatggaatggtctggaatggaatgaacacgaatgtaatgcaatccaatagaatggaatcgaatggcatggaatataaagaaatggaatcgaagagaatggaaacaaatggaatggaattgaatggaatggaattgaatggaatgggaacgaatggagtgaaattgtatgcagtagaagagaataga

SEQ ID NO: 156001 - DNA, 567 bp, Homo sapiens
ctgtggatggtccccaggcaaccaygagggctcagctccaagattctgtgacagctggtgttaccagtgggaaagggtgtttccaccttaagtgggaagcttaaggcaggaccagtctgacctgtcagcttgtttatttacatggcaaattgcattttctacttcattagccaccatgctgcacccaggagcttcttctgggcactggctctgatcagggattggagtatctttgttctggggccagaggaagatgggttgggaaaggaggggagtttgggggacactgccaacccaggaagcatctgcagaaagaaaactgacactgtgaactggggcaagaaatgctgaaaacctgtgggcttttccaacatacaatttactggaaatgaatgtgctgctacctcaatataaaccagggtgtatttcttttcttctctgagtcacgatattttcctctacaaaacacagcttctgccaaggtggttatgatgaccatgctcacaaatgatgcctgtgcgtgcagttctgtaaactccaaagtcaaaagcaaagagggtgggtggt

SEQ ID NO: 156002 - DNA, 449 bp, Homo sapiens
ggaagggaatgtagtgtaatggacaggcctggaataaagcggaatgctacggtctcgaatggaataaaaatgtatggaatggaatgcaatgaaacggaatcgaatgtcatagaatgtaatggaatgcaaaaaaatggaatccaaaatcattgactggaaaggctgggtgtcgaaaggaattgactccaatggaatggaatcgaatggaatggaagtgaatagaatcgtactaaatcgaatgkaatggaattgataggaacggaatggaaaggaatgcaatgatttggcatggaatggaatcgaatggcatcgaatggaatggaatggaatgcaatggaatggaatgtattagaatgtaatgaactttaatggaaggtcctcgaatggattcgactgtaatggaatgttctggaagtgaatggacaccaatggaatggattcaaaaggaa

SEQ ID NO: 156003 - DNA, 246 bp, Homo sapiens
gaattccattccattccaatccattcctttcctttcgcttgcattccattctattctcttctactgcatacaatttcaytccattcgttcccattccattcaattccattccattcaattccattccatttgtttccattctcttcgattccatttctttatattccatgccattcgattccattctattggattgcattacattcgtgttcattccattccagaccattccatttgactccattc

SEQ ID NO: 156004 - DNA, 246 bp, Homo sapiens
gaattccattccattccaatccattcctttcctttcgcttgcattccattctattctcttctactgcatacaatttcactccattcgttcccattccattcaattccattccattcaattccattccatttgtttccattctcttcgattccatttctttatattccatgccattcgattccattctattggattgcawtacattcgtgttcattccattccagaccattccatttgactccattc

SEQ ID NO: 156005 - DNA, 492 bp, Homo sapiens
tccattccattgcattccattgcattccattccattccattccattgcactgcactccattccattacattctactctatttgagtcgattttattgcattagattctattccattggattactttccattcgattacattccattcatgtacattccattcyagtcaattacattcgagttcattacattacattccagtatattccattgtattcgatcccattcctttcaattccatttcattcgactccattatattcgattccattccactcgaatccattccattagaggacattccattccaatgcattccattccattccatagcattccaatgcattccattccattccatttgatgccattccatgacattccattccattcgagtccattccgttccaattcattccattccgtttcatgaaattcgagtcctttccagtacatttcattccaatcccatccaatccaatctactccattc

SEQ ID NO: 156006 - DNA, 492 bp, Homo sapiens
tccattccattgcattccattgcattccattccattccattccattgcactgcactccattccattacattctactctatttgagtcgattttattgcattagattctattccattggattactttccattcgattacattccattcatgtacattccattccagtcaattacattcgagttcattacattacattccagtatattccattgtattcgatcccwttcctttcaattccatttcattcgactccattatattcgattccattccactcgaatccattccattagaggacattccattccaatgcattccattccattccatagcattccaatgcattccattccattccatttgatgccattccatgacattccattccattcgagtccattccgttccaattcattccattccgtttcatgaaattcgagtcctttccagtacatttcattccaatcccatccaatccaatctactccattc

SEQ ID NO: 156007 - DNA, 492 bp, Homo sapiens
tccattccattgcattccattgcattccattccattccattccattgcactgcactccattccattacattctactctatttgagtcgattttattgcattagattctattccattggattactttccattcgattacattccattcatgtacattccattccagtcaattacattcgagttcattacattacattccagtatattccattgtattcgatcccattcctttcaattccatttcattcgactccattatattcgattccattccactcgaatccattccattagaggacattccattccaatgcattccattccattccatagcattccawtgcattccattccattccatttgatgccattccatgacattccattccattcgagtccattccgttccaattcattccattccgtttcatgaaattcgagtcctttccagtacatttcattccaatcccatccaatccaatctactccattc

SEQ ID NO: 156008 - DNA, 492 bp, Homo sapiens
tccattccattgcattccattgcattccattccattccattccattgcactgcactccattccattacattctactctatttgagtcgattttattgcattagattctattccattggattactttccattcgattacattccattcatgtacattccattccagtcaattacattcgagttcattacattacattccagtatattccattgtattcgatcccattcctttcaattccatttcattcgactccattatattcgattccattccactcgaatccattccattagaggacattccattccaatgcattccattccattccatagcattccaatgcattccattccattccatttgatgccattccatgacattccattccattcgagtccattccgttccaattcattccattccrtttcatgaaattcgagtcctttccagtacatttcattccaatcccatccaatccaatctactccattc

SEQ ID NO: 156009 - DNA, 460 bp, Homo sapiens
ggaagggaatgtagtgtaatggacaggcctggaataaagtggaatgctacggtctcgaatggaataaaaatgtatggaatggaatgcaatgaaacggaatcgaatgtcatagaatgtaatggaatgcaacaaaatggaatccaaaatcattgactggaaaggctgggtgtcgaaaggaattgactccaatggaatggaatcgaatggaatggaagtgaatagaatcgaactaaatcgaatggaatggaattgataggaacggaatggaaaggaatgcaatgatttggcatggaatggaatcgaatggcatcgaatggaatggtatggaatgcaatggaatggaatgtattagaatgtaatgaacwttaatggaatgtactcgaatggattcgactggaatggaatgttctggaagtgaatggactccaatggaatggattcaaaaggaatggaatcgtac

SEQ ID NO: 156010 - DNA, 479 bp, Homo sapiens
actcgaatataatggactggaatggaatgaaatcacatggaatgggaacgaatggaatggaatggaaaggaatggaatcgaatggaaaggaatcgaatggaagggaatgaaattgaatcaacaggaatggaagggaatagaatagacggtaatggaatggactcgaatagaatggacacgaatgctcaaattgaatggactcgaatggaatggaaacgaaaggaatgtcatcgaatggaattgaatcgattggaatgaaatcgcatagaatggagtggaatcaaatggaattgaatcgaaaggaaaggaagcgaatggactgaaatgaaatggaatggaattgaatggaaagtaatgcaatggaatagaatggaacgaaatttcacggaatggamtcaaactgaatggaatcaaatcaatggaatcaaatcaaatggaatggaaaggaattgaatggagtagattggattggatgggat

SEQ ID NO: 156011 - DNA, 549 bp, Homo sapiens
tttttattattttatatatatatatatatatttttttttttttgagatggagtctcgctttgtcacccagactggagtgcagtggtatgatctcagctcactgcaaactctgcctcccaggttcaagcaattctgctgctcagcctcccaagtagctgggattataggcaccckccaccacagccagctaatttttgtatttttagtagagaggggtttcaacttgttggccaggctggtctcgaactcccaaactcaggtgatccacccaccttggcctcccaaagtgctgggattacaggtgtgagccactgtgcccagtcttcttgtgctatttctaccgcccttggtgatgccttcatgttttagtcagggtgagctaagttatgctgcagaaacaaacatcccctaaattttattctacatgcccaaagttgcaactgggagcaggagttgtgggggcaatatctgctcattgtagtcactctatgactcaaactgataaagctttcttctgtcatcacagcaagaagaaaagaccatggcaaa

SEQ ID NO: 156012 - DNA, 549 bp, Homo sapiens
tttttattattttatatatatatatatatatttttttttttttgagatggagtctcgctttgtcacccagactggagtgcagtggtatgatctcagctcactgcaaactctgcctcccaggttcaagcaattctgctgctcagcctcccaagtagctgggattataggcacccgccaccacagccagctaatttttgtatttttagtagagaggggtttcaacttgttggccaggctggtctcgaactcccaaactcaggtgatccacccaccttggcctcccaaagtgctgggattacaggtgtgagccactgtgcccagtcttcttgtgctatttctaccgcccttggtgatgccttcatgttttagtcagggtgagctaagttatgctgcagaaacaaacatcccctaaattttattctacatgcccaaagttgcaactgggagcaggagttgtgggggcaatatctgctcattgtagtcactctatgactcaaactgataaagctttcttctgtcrtcacagcaagaagaaaagaccatggcaaa

SEQ ID NO: 156013 - DNA, 429 bp, Homo sapiens
ttcataacagtatgttatttagagtgggaagggacctttgccagcctttaatccagcctcttcttgttttctattttagagctgaggagatagactcagaggtgctaagggacttgtgcagagacacaaagcctgtgggttgtcacaggtagcacgtgggccytgggtacctcgtctcccagagcacatgattcttgagctgaacctcggatttttcctcctcttttaccaaccccacgggctttagggcacccacaccacagggtgcagaggcagttcccacagggcctaaggaccacatgcctaatgaagacatggtgcttgaaaagtcagtgatctttccctccccaactagttatgaatatcagaaaaacttaagtgcagtcctggctagaaaccataaataaacccattttcctgacgctcctt

SEQ ID NO: 156014 - DNA, 430 bp, Homo sapiens
attcataacagtatgttatttagagtgggaagggacctttgccagcctttaatccagcctcttcttgttttctattttagagctgaggagatagactcagaggtgctaagggacttgtgcagagacacaaagcctgtgggttgtcacaggtagcacgtgggccctgggtacctcgtctcccagagcacatgattcttgagctgaacctcggatttttcctcctcttttaccaaccccacgggctttagggcacccayaccacagggtgcagaggcagttcccacagggcctaaggaccacatgcctaatgaagacatggtgcttgaaaagtcagtgatctttccctccccaactagttatgaatatcagaaaaacttaagtgcagtcctggctagaaaccataaataaacccattttcctgacgctcctt

SEQ ID NO: 156015 - DNA, 430 bp, Homo sapiens
attcataacagtatgttatttagagtgggaagggacctttgccagcctttaatccagcctcttcttgttttctattttagagctgaggagatagactcagaggtgctaagggacttgtgcagagacacaaagcctgtgggttgtcacaggtagcacgtgggccctgggtacctcgtctcccagagcacatgattcttgagctgaacctcggatttttcctcctcttttaccaaccccacgggctttagggcacccacaccacagggtgcagaggcagttcccacagggcctaaggaccacatgcctaatgaagacawggtgcttgaaaagtcagtgatctttccctccccaactagttatgaatatcagaaaaacttaagtgcagtcctggctagaaaccataaataaacccattttcctgacgctcctt

SEQ ID NO: 156016 - DNA, 451 bp, Homo sapiens
aatggggcccaaatcctggcattcataacagtatgttatttagagtgggaagggacctttgccagcctttaatccagcctcttcttgttttctattttagagctgaggagatagactcagaggtgctaagggacttgtgcagagacacaaagcctgtgggttgtcacaggtagcacgtgggccctgggtacctcgtctcccagagcacatgattcttgagctgaacctcggatttttcctcctcttttaccaaccccacgggctttagggcacccacaccacagggtgcagaggcagttcccacagggcctaaggaccacatgcctaatgaagacatggtgcttgaaaagtcagtgatctttccctccccaactarttatgaatatcagaaaaacttaagtgcagtcctggctagaaaccataaataaacccattttcctgacgctccttc

SEQ ID NO: 156017 - DNA, 526 bp, Homo sapiens
aagactccgtctcaaaaaaaaaaagaaagaaatgaataaaaatataaaaatctcagctacttgggaggctgaaatgggagaaccacttgagcccaggagttcaagaccagcctgggcaacatagcaagacctgatctctacaaaaaacaaacacacaaaaattagctgggtgtggtggcttgcacctgtagtcccagctattcaggaggctgagacaggaggattgcttgagcccaagagttagaggctacagtgagctattatcttgccactgcaccccagcctgggcaacagagcaagatcctggtatcttaaacaaacaaaaaactgcagatgactaacatgttgttagtcattaagttgcacatttttcatgataaaaaatgatgctgtgatcgtcatatsattcatgacatagggtcaaacatgtttacacaacaagaaaataggaaatatatttgcagtatatgtgacagaaaatgctaatatttgtattgtataattagctttttaaaacattaacatt

SEQ ID NO: 156018 - DNA, 405 bp, Homo sapiens
ggcacagtaaagcctgcgggtgccactgagactgcttctgctgagattagacacagtggtttggcaccaagtctgtgaccagtgcctgtttttagcaacatrgctagtaaatattgactctgtggcatgaaaatggaaagcagagatgactatgtcaactcactcagaggatagaagttcaccaacctctgataagatgtagttatacaacgcataggtgtgtcactaataaataagttgtttgggggcagggagaatggaaaacaagacaaggaagcattccatgggcaattaacagctgctttcctgtctgcactgtctggctggcttattcatttgttcgctttaaaatgaatggatacttacatacacactggcatgtaggaaaaaaaggctagaaagaaa

SEQ ID NO: 156019 - DNA, 439 bp, Homo sapiens
gaattccaaggactccatcaggagaaacatgggcattaaggtgggtatcatcctgggagcatctggagctgatggcctgtgcttctggccaaaagttgtaactgtgtcccttccctctgccatgtgatttcagcttttcgaggctggaaaggtccttgtgcctctggctccttatctgggtcctagctggtgactataattccacttcagtttcacccctttagtttgtttctaaactggtaaaatgcaaattcgccttaggagaggtgttaggaaagtgcttgaagtggctatcagttgttttacctgatgagcatctragcagcggccttgagaaaggaggctggggaactaagttaaaatcagccaacacttatatagtgcctactgtgtactagcctacgacaaggggacagaggtaggaatgtcacaattcttg

SEQ ID NO: 156020 - DNA, 391 bp, Homo sapiens
tattgtagtgtcattgcttccagaccttcccaacagacagggctaggaaatgcatgtgtatgttctgatgctggctctcacacacagatgtgtttattttggtatctatctgtatgtatattaaaaccatgacttcatactacctccaactccaatccaacacaggcttcattccagctgtactaccttcctcatctgtagctttttccaacagtaagaagctggcagagtctgagcacttaaacctgccagaagagggggtacagaggatggtgctttgccttaaaggacaagattttcacaggcacaagcgaaggtcattcccatggagagaacagcatgcctgaaggctagcaggcaaaggaygtgaggggtaaacctaaaacaggga

SEQ ID NO: 156021 - DNA, 569 bp, Homo sapiens
gggcattcctttaggacctgtgcctcaaagaccagtgggaagagacagctgggtgaggacaggcttcaggtactctcatgtgtccagatcaaatayggctttaacccctctctaagtcatcgcaaatctttattttgcaaatagcagaaaatgccattcaaatggcttggctgaaaaagagaatgtgtggacccacctaactgaaaagtcagagccaggagggactcagccatggttcgatccagaggttcaacatttacttgcaatattttctctgcaagtttcattttgtttctgtttccagttctctacaagtcattcatctctatttctttgcgagacagtttcatttgaggctggctttccccctgtggcacaagtggctgctttatgtcagcatttcagtgaagtccttagatgggctctgagtggcccagcttttgtcacatgccccctcctgaacaaatcaactcctgttgggaaggaaggtagtttgccgattggcttggtcaagtcacagtctcccttcttctcagccccttcaagaaggaaatcggcttctttgggct

SEQ ID NO: 156022 - DNA, 569 bp, Homo sapiens
gggcattcctttaggacctgtgcctcaaagaccagtgggaagagacagctgggtgaggacaggcttcaggtactctcatgtgtccagatcaaatacggctttaacccctctctaagtcatcgcaaatctttattttgcaaakagcagaaaatgccattcaaatggcttggctgaaaaagagaatgtgtggacccacctaactgaaaagtcagagccaggagggactcagccatggttcgatccagaggttcaacatttacttgcaatattttctctgcaagtttcattttgtttctgtttccagttctctacaagtcattcatctctatttctttgcgagacagtttcatttgaggctggctttccccctgtggcacaagtggctgctttatgtcagcatttcagtgaagtccttagatgggctctgagtggcccagcttttgtcacatgccccctcctgaacaaatcaactcctgttgggaaggaaggtagtttgccgattggcttggtcaagtcacagtctcccttcttctcagccccttcaagaaggaaatcggcttctttgggct

SEQ ID NO: 156023 - DNA, 569 bp, Homo sapiens
gggcattcctttaggacctgtgcctcaaagaccagtgggaagagacagctgggtgaggacaggcttcaggtactctcatgtgtccagatcaaatacggctttaacccctctctaagtcatcgcaaatctttattttgcaaatagcagaaaatsccattcaaatggcttggctgaaaaagagaatgtgtggacccacctaactgaaaagtcagagccaggagggactcagccatggttcgatccagaggttcaacatttacttgcaatattttctctgcaagtttcattttgtttctgtttccagttctctacaagtcattcatctctatttctttgcgagacagtttcatttgaggctggctttccccctgtggcacaagtggctgctttatgtcagcatttcagtgaagtccttagatgggctctgagtggcccagcttttgtcacatgccccctcctgaacaaatcaactcctgttgggaaggaaggtagtttgccgattggcttggtcaagtcacagtctcccttcttctcagccccttcaagaaggaaatcggcttctttgggct

SEQ ID NO: 156024 - DNA, 569 bp, Homo sapiens
gggcattcctttaggacctgtgcctcaaagaccagtgggaagagacagctgggtgaggacaggcttcaggtactctcatgtgtccagatcaaatacggctttaacccctctctaagtcatcgcaaatctttattttgcaaatagcagaaaatgccattcaaatggcttggcygaaaaagagaatgtgtggacccacctaactgaaaagtcagagccaggagggactcagccatggttcgatccagaggttcaacatttacttgcaatattttctctgcaagtttcattttgtttctgtttccagttctctacaagtcattcatctctatttctttgcgagacagtttcatttgaggctggctttccccctgtggcacaagtggctgctttatgtcagcatttcagtgaagtccttagatgggctctgagtggcccagcttttgtcacatgccccctcctgaacaaatcaactcctgttgggaaggaaggtagtttgccgattggcttggtcaagtcacagtctcccttcttctcagccccttcaagaaggaaatcggcttctttgggct

SEQ ID NO: 156025 - DNA, 571 bp, Homo sapiens
taggacctgtgcctcaaagaccagtgggaagagacagctgggtgaggacaggcttcaggtactctcatgtgtccagatcaaatacggctttaacccctctctaagtcatcgcaaatctttattttgcaaatagcagaaaatgccattcaaatggcttggctgaaaaagagaatgtgtggacccacctaactgaaaagtcagagccaggagggactcagccatggttcgatccagaggttcaacatttacttgcaatattttctctgcaagtttcattttgtttctgtttccagttctctacaagtcattcatctctatttctttgcgagacagtttcatttgaggctggctttccccctgtggcacaagtggctgctttatgtcagcatttcagtgaagtccttagatgggctctgagtggcccagcttttgtcacatgccccctcctgaacraatcaactcctgttgggaaggaaggtagtttgccgattggcttggtcaagtcacagtctcccttcttctcagccccttcaagaaggaaatcggcttctttgggctcacaccatccccc

SEQ ID NO: 156026 - DNA, 542 bp, Homo sapiens
taggacctgtgcctcaaagaccagtgggaagagacagctgggtgaggacaggcttcaggtactctcatgtgtccagatcaaatacggctttaacccctctctaagtcatcgcaaatctttattttgcaaatagcagaaaatgccattcaaatggcttggctgaaaaagagaatgtgtggacccacctaactgaaaagtcagagccaggagggactcagccatggttcgatccagaggttcaacatttacttgcaatattttctctgcaagtttcattttgtttctgtttccagttctctacaagtcattcatctctatttctttgcgagacagtttcatttgaggctggctttccccctgtggcacaagtggctgctttatgtcagcatttcagtgaagtccttagatgggctctgagtggcccagcttttgtcacatgccccctcctgaacaaatcaactcctgttgggarggaaggtagtttgccgattggcttggtcaagtcacagtctcccttcttctcagccccttcaagaaggaaa

SEQ ID NO: 156027 - DNA, 571 bp, Homo sapiens
taggacctgtgcctcaaagaccagtgggaagagacagctgggtgaggacaggcttcaggtactctcatgtgtccagatcaaatacggctttaacccctctctaagtcatcgcaaatctttattttgcaaatagcagaaaatgccattcaaatggcttggctgaaaaagagaatgtgtggacccacctaactgaaaagtcagagccaggagggactcagccatggttcgatccagaggttcaacatttacttgcaatattttctctgcaagtttcattttgtttctgtttccagttctctacaagtcattcatctctatttctttgcgagacagtttcatttgaggctggctttccccctgtggcacaagtggctgctttatgtcagcatttcagtgaagtccttagatgggctctgagtggcccagcttttgtcacatgccccctcctgaacaaatcaactcctgttgggaaggaaggtagtttgccgattggcttggtcaagtcacagtctcccttcttctcasccccttcaagaaggaaatcggcttctttgggctcacaccatccccc

SEQ ID NO: 156028 - DNA, 375 bp, Homo sapiens
tgcctaactagaaaggtgctgagtagtctgaggaacatctgggctgtctgaggatcccctagtcccctagattgggaagtgggagcgaggcttaactgaagcgtgtctaatgtcaaagtccttgctgtcagccccgccttatgcagcttcccccctaaaccactgtgaaaacgtgtgagctstgtggtaatgtgccaattccaggggtgtcaacaccatgacccccagatattctcatacactgcctccttagcccatcccaggcaaagagggctctgcaaaccagggaccctgcgaggccaggggacagtgggattatactgccccatcccctctggcctgcctcccgcccttccagcctgctcactgtgtccc

SEQ ID NO: 156029 - DNA, 410 bp, Homo sapiens
tgccccacttgacagaagagagatggatggggaggtgagaggcactgcccgcctaaccacccaccaccygtcacttctgccttttgaaatcactttcgtgggcagaggcagggatgctgatcacaccatgtgggagggacttggagggtggggcggtgactcacaggacagtgggggataggaagcagctccagagcctccctggtagtgaaagggaagggcgctagtgactcagggacagctggggaggggcgcatggggagggagctcattccccccagctctgtgccctgcatgcctggggggtgacctcctgtggtgggccccgatcttgcccctgtggggcagtctttgccctcagcttgcttcccagcagtagccaggcagccagtagctgcatggtgagtgaa

SEQ ID NO: 156030 - DNA, 391 bp, Homo sapiens
gaattcagtcttcttggccctgctgctgccccacttgacagaagagagatggatggggaggtgagaggcactgcccgcctaaccacccaccacccgtcacttctgccttttgaaatcacttycgtgggcagaggcagggatgctgatcacaccatgtgggagggacttggagggtggggcggtgactcacaggacagtgggggataggaagcagctccagagcctccctggtagtgaaagggaagggcgctagtgactcagggacagctggggaggggcgcatggggagggagctcattccccccagctctgtgccctgcatgcctggggggtgacctcctgtggtgggccccgatcttgcccctgtggggcagtctttgccctcagcttg

SEQ ID NO: 156031 - DNA, 414 bp, Homo sapiens
ctgccccacttgacagaagagagatggatggggaggtgagaggcactgcccgcctaaccacccaccacccgtcacttctgccttttgaaatcactttcgtgggcagaggcagggatgctgatcacaccatgtgggagggacttggagggtggggcggtgactcacaggacagtgggggataggaagcagctccagagcctccctggtagtgaaagggaagggcgctagtgactcagggacagctggggaggggygcatggggagggagctcattccccccagctctgtgccctgcatgcctggggggtgacctcctgtggtgggccccgatcttgcccctgtggggcagtctttgccctcagcttgcttcccagcagtagccaggcagccagtagctgcatggtgagtgaattc

SEQ ID NO: 156032 - DNA, 414 bp, Homo sapiens
ctgccccacttgacagaagagagatggatggggaggtgagaggcactgcccgcctaaccacccaccacccgtcacttctgccttttgaaatcactttcgtgggcagaggcagggatgctgatcacaccatgtgggagggacttggagggtggggcggtgactcacaggacagtgggggataggaagcagctccagagcctccctggtagtgaaagggaagggcgctagtgactcagggacagctggggaggggcgcatggggagggagctcattccccccagctctgtgccctgcatgcctggggggtgacctcctgtggtgggccccgatcttgcccctgtggggcagtctttgccctcagcttgcttcccagcagtagccaggcasccagtagctgcatggtgagtgaattc

SEQ ID NO: 156033 - DNA, 581 bp, Homo sapiens
aacaatcaattcctatgggtgccctgtaattctggcactatctacttggggattgtgtcagatcccacaggttgagggctcagtaccacaggctattcccccacagcagttacaagtctgggcctccagaacttctaatcaacttccagttggacttcaagttgggtttcccaggaccccctctttggtttgattaatttactagagtggctcagagaactcatggaaacayatttaccagttttttataaagaatattaaaggatacagataaagagatgcatagtgcaagatacggggggaaagtaacatgcttccatgtcctcccagggcactcaccctctgggaacatccatgtattctccatatgccttcatgtattggagagcatccaggtagctgaatacagctacctggatgctctccaaatccaatccttttgggattttatgaaagcttcattacataggcatgactgattaattgaacattcagcccctctcacatcccaggaggtgaggggtggggctggaagtcccaaccctctaatcacaccctgatcactatgatgatgagcccca

SEQ ID NO: 156034 - DNA, 581 bp, Homo sapiens
aacaatcaattcctatgggtgccctgtaattctggcactatctacttggggattgtgtcagatcccacaggttgagggctcagtaccacaggctattcccccacagcagttacaagtctgggcctccagaacttctaatcaacttccagttggacttcaagttgggtttcccaggaccccctctttggtttgattaatttactagagtggctcagagaactcatggaaacacatttaccagtttyttataaagaatattaaaggatacagataaagagatgcatagtgcaagatacggggggaaagtaacatgcttccatgtcctcccagggcactcaccctctgggaacatccatgtattctccatatgccttcatgtattggagagcatccaggtagctgaatacagctacctggatgctctccaaatccaatccttttgggattttatgaaagcttcattacataggcatgactgattaattgaacattcagcccctctcacatcccaggaggtgaggggtggggctggaagtcccaaccctctaatcacaccctgatcactatgatgatgagcccca

SEQ ID NO: 156035 - DNA, 581 bp, Homo sapiens
aacaatcaattcctatgggtgccctgtaattctggcactatctacttggggattgtgtcagatcccacaggttgagggctcagtaccacaggctattcccccacagcagttacaagtctgggcctccagaacttctaatcaacttccagttggacttcaagttgggtttcccaggaccccctctttggtttgattaatttactagagtggctcagagaactcatggaaacacatttaccagttttttataaagaatattaaaggatacagataaagagatgcatagtgcaagatayggggggaaagtaacatgcttccatgtcctcccagggcactcaccctctgggaacatccatgtattctccatatgccttcatgtattggagagcatccaggtagctgaatacagctacctggatgctctccaaatccaatccttttgggattttatgaaagcttcattacataggcatgactgattaattgaacattcagcccctctcacatcccaggaggtgaggggtggggctggaagtcccaaccctctaatcacaccctgatcactatgatgatgagcccca

SEQ ID NO: 156036 - DNA, 581 bp, Homo sapiens
aacaatcaattcctatgggtgccctgtaattctggcactatctacttggggattgtgtcagatcccacaggttgagggctcagtaccacaggctattcccccacagcagttacaagtctgggcctccagaacttctaatcaacttccagttggacttcaagttgggtttcccaggaccccctctttggtttgattaatttactagagtggctcagagaactcatggaaacacatttaccagttttttataaagaatattaaaggatacagataaagagatgcatagtgcaagatacggggggaaagtaacatgcttccatgtcctcccagggcactcaccctctgggaacatccatgtattctccatatgccttcatgtattggagagcatccaggyagctgaatacagctacctggatgctctccaaatccaatccttttgggattttatgaaagcttcattacataggcatgactgattaattgaacattcagcccctctcacatcccaggaggtgaggggtggggctggaagtcccaaccctctaatcacaccctgatcactatgatgatgagcccca

SEQ ID NO: 156037 - DNA, 361 bp, Homo sapiens
ctccaactgacatggaagacaaaaccctactttcattttttttaagttccatgaagtagatgcaagttgacattttctcatttccaagatacatactaayaaaatatttacacaacaccccatgtgttacttatctccattctcagtttatagatcaccttacacaaatgtttttgtagtgaaaaatcacaattctaatataaggggccacccattttgttttgattcaaactatgacttagctagccagcaaacagtcaaatgaccttcccgtgactgcaaaatatgaaatgcttcaccatgctaattttctccgtattgttccaattttagtatttgtgctgccaaagcaagcacaaag

SEQ ID NO: 156038 - DNA, 238 bp, Homo sapiens
caaaatatgaaatgcttcaccatgctaattttctccgtattgttccaattttagtatttgtgctgccaaagcaagcacaaagcctwacttttacatataactgctgataagtcatggatgagggttagctctgttaaatctaactaacaaacttgagactcagataattccaatgaatggcttcctgtgaaatagaatccgaaaatattttataaacttgagatactgatgcaagcag

SEQ ID NO: 156039 - DNA, 315 bp, Homo sapiens
ttttgttttgattcaaactatgacttagctagccagcaaacagtcaaatgaccttcccgtgactgcaaaatatgaaatgcttcaccatgctaattttctccgtattgttccaattttagtatttgtgctgccaaagcaagcacaaagccttacttttacatataactgctgataagtcatrgatgagggttagctctgttaaatctaactaacaaacttgagactcagataattccaatgaatggcttcctgtgaaatagaatccgaaaatattttataaacttgagatactgatgcaagcagcttgagagatct

SEQ ID NO: 156040 - DNA, 238 bp, Homo sapiens
caaaatatgaaatgcttcaccatgctaattttctccgtattgttccaattttagtatttgtgctgccaaagcaagcacaaagccttacttttacatataactgctgataagtcatggatgagggttagctctgttaaatctaactaacmaacttgagactcagataattccaatgaatggcttcctgtgaaatagaatccgaaaatattttataaacttgagatactgatgcaagcag

SEQ ID NO: 156041 - DNA, 315 bp, Homo sapiens
ttttgttttgattcaaactatgacttagctagccagcaaacagtcaaatgaccttcccgtgactgcaaaatatgaaatgcttcaccatgctaattttctccgtattgttccaattttagtatttgtgctgccaaagcaagcacaaagccttacttttacatataactgctgataagtcatggatgagggttagctctgttaaatctaactaacaaacttgagactcagataattccratgaatggcttcctgtgaaatagaatccgaaaatattttataaacttgagatactgatgcaagcagcttgagagatct

SEQ ID NO: 156042 - DNA, 238 bp, Homo sapiens
caaaatatgaaatgcttcaccatgctaattttctccgtattgttccaattttagtatttgtgctgccaaagcaagcacaaagccttacttttacatataactgctgataagtcatggatgagggttagctctgttaaatctaactaacaaacttgagactcagataattccaatgaatggcttcctgtgaartagaatccgaaaatattttataaacttgagatactgatgcaagcag

SEQ ID NO: 156043 - DNA, 578 bp, Homo sapiens
ccattttgcagcagaagagttgcacaagcctcctgcctcagttgtacagcctgtcagtattagaccgagaaacatgcaaatactgaaaaaatcaaaataaacactccgtaggatttcctactagttatatggtggtattccaatgagataaattcattttatcctatgtacttcaaccaaatccatctcatgctcaaagagtcagctactatgtaccttgatcagaggtgtcctgtcttcacggtcgcagaggttaagctcacatcttctggacaccaggagatgtaccatttccggttggccagtggcacaggccaaatgtagggcrgtcctgtgagagtgacaggactttttaaaacatgtaactgtaagcattaattagcatgttatttctctgtcttcaaaacaaatatgtaattttcttgtgaagaaagtacaacatttgttagcgcttattactcaccacattaatgaaagagcaggctatttaatagaaaaggcttggcttttggattcagtttaattggggcttaaaatttactgtaagctctgtcacttagctgttatttagcctttct

SEQ ID NO: 156044 - DNA, 578 bp, Homo sapiens
ccattttgcagcagaagagttgcacaagcctcctgcctcagttgtacagcctgtcagtattagaccgagaaacatgcaaatactgaaaaaatcaaaataaacactccgtaggatttcctactagttatatggtggtattccaatgagataaattcattttatcctatgtacttcaaccaaatccatctcatgctcaaagagtcagctactatgtaccttgatcagaggtgtcctgtcttcacggtcgcagaggttaagctcacatcttctggacaccaggagatgtaccatttccggttggccagtggcacaggccaaatgtagggcagtcctgtgagagtgacaggactttttaaaacatgtaactgtaagcattaattagcatgttatttctctgtcttcaaaacaaatatgtaattttcttgtgaagaaagtacaacatttgttagcgcttattactcaccacattaatgaaagagcaggctatttaatagaaaagscttggcttttggattcagtttaattggggcttaaaatttactgtaagctctgtcacttagctgttatttagcctttct

SEQ ID NO: 156045 - DNA, 543 bp, Homo sapiens
aaacaataaagaataatacatgtcttcagcataaaactgaattaattttatctacatagcagagagatgttgaataagctaatcagtaatcactttacattttacttttyattccctgcatattaagaataaaactggatacatttttttttttttttttttgagagggagtctcctactatcactgggctggagtgcactggtgcaatctctgctcactgcaacctctgcctcccagtttcatgtgattctcctgcctcagcctcctgcgtagctgggattacaggtacaaccaccatacctggctaattttttgtatttttagtagagatagcatttcactgtgttgggcagactggtctcgaactcctgacctcgtgatctgcccacctcggcctaccaaagtgctgggattacaggcatgagccactgcacccggctgataatttttaaaataattattctgggtaaagaaaaatatctgttttatactctgttggttgaattataaattaatatgaacatccttaagaacaatttaga

SEQ ID NO: 156046 - DNA, 516 bp, Homo sapiens
tgaattaattttatctacatagcagagagatgttgaataagctaatcagtaatcactttacattttactttttattccctgcatattaagaataaaactggatacatttttttttttttttttttgagagggagtctcctactatcactgggctggagtgcactggtgcaatctctgctcactgcaacctctgcctcccagtttcatgygattctcctgcctcagcctcctgcgtagctgggattacaggtacaaccaccatacctggctaattttttgtatttttagtagagatagcatttcactgtgttgggcagactggtctcgaactcctgacctcgtgatctgcccacctcggcctaccaaagtgctgggattacaggcatgagccactgcacccggctgataatttttaaaataattattctgggtaaagaaaaatatctgttttatactctgttggttgaattataaattaatatgaacatccttaagaacaatttagaaatattgatc

SEQ ID NO: 156047 - DNA, 190 bp, Homo sapiens
cttgaggtcctgcttagtgagggacctccctacygtggcttccagccaccctcgccagtgttctggggctgacagatatttgaattatctttgggatgcggttcttggggtcccttccagtgagggacctcccaaccggggcctccagccacccccaccagtgttctggggctgacagagatttgaattc

SEQ ID NO: 156048 - DNA, 442 bp, Homo sapiens
gaattcctggaatgagttcccacgcgcargagcaaggagccatctttgctgtttgtgcaacttagtcgttacagcccgcgggctctggagaatccatacctaccggggcagaagggatatatcatcagcacagcacagctactctacaaaatcttagaaggcagattcttttaccaggttcctgatccattcctccttactgggcaggacctcgacaactccttcccggggagaatgtaaatctctgtcagctcgagaacaccggtggggtggtggaggccccaggtgggaggtcccacccagagaggaggaaagaatcagggatctgtgtaaagaatctgcctggccactatttggtagagcagttgtgatgtgctgggggatcccttccacccccagtcatttgggactctccaaagctggccccatcctctcccccagg

SEQ ID NO: 156049 - DNA, 442 bp, Homo sapiens
gaattcctggaatgagttcccacgcgcaagagcaaggagccatctttgctgtttgtgcaacttagtcgttacagcccgcgggctctggagaatccatacctaccggggcagaagggatatatcatcagcacagcacagctactctacaaaatcttagaaggcagattcttttaccaggttcctgatccattcctccttactgggcaggacctcgacaactccttcycggggagaatgtaaatctctgtcagctcgagaacaccggtggggtggtggaggccccaggtgggaggtcccacccagagaggaggaaagaatcagggatctgtgtaaagaatctgcctggccactatttggtagagcagttgtgatgtgctgggggatcccttccacccccagtcatttgggactctccaaagctggccccatcctctcccccagg

SEQ ID NO: 156050 - DNA, 442 bp, Homo sapiens
gaattcctggaatgagttcccacgcgcaagagcaaggagccatctttgctgtttgtgcaacttagtcgttacagcccgcgggctctggagaatccatacctaccggggcagaagggatatatcatcagcacagcacagctactctacaaaatcttagaaggcagattcttttaccaggttcctgatccattcctccttactgggcaggacctcgacaactccttcccggggagaatgtaaatctctgtcagctcgagaacaccggtggggtggtggaggccccaggtgggaggtcccacccagagaggaggaaagaatcagggatctgygtaaagaatctgcctggccactatttggtagagcagttgtgatgtgctgggggatcccttccacccccagtcatttgggactctccaaagctggccccatcctctcccccagg

SEQ ID NO: 156051 - DNA, 474 bp, Homo sapiens
caagagcaaggagccatctttgctgtttgtgcaacttagtcgttacagcccgcgggctctggagaatccatacctaccggggcagaagggatatatcatcagcacagcacagctactctacaaaatcttagaaggcagattcttttaccaggttcctgatccattcctccttactgggcaggacctcgacaactccttcccggggagaatgtaaatctctgtcagctcgagaacaccggtggggtggtggaggccccaggtgggaggtcccacccagagaggaggaaagaatcagggatctgtgtaaagaatctgcctggccactatttggtagagcagttgtgatgtgctgggggatcccttccacccccagtcatttkggactctccaaagctggccccatcctctcccccaggccccagttggaaggactcccactgggcaggaactccagaactccctcccagggagaat

SEQ ID NO: 156052 - DNA, 564 bp, Homo sapiens
atctgtgataaaagactgaattaaagattctccaggaaccatgcatgggaatgaatgctttctagtgaaccataccgcttctccttttaaatatcaaggatttaatgacaattataaaacatttcaattttatttggttaactgttcatcatctttaagcctcagtgaaagtttgacttcctccggaaagtgcctccaaaatacctggcattttccattatagaacttgaaaacatggcagatccgataactactgcttattttttttwaattttatttatttatttttttaccaattttgttttgcctaaagtaattcctctgggacatgatttcccaactaattctccaaattctcataactctttcactagtctttttaggataatcttctattctaagacaaagcctaacttcagtaaaattgtgtacaaacacatacaacattaaatgaaaccagatcttaaacagagggtgcataaggagtgtaacatggggacttcaggggaaaatatgcattagaagggaaagagaacagagttaagatgccagtggaggttgaaa

SEQ ID NO: 156053 - DNA, 610 bp, Homo sapiens
gctgaggtgagaggatggcttgggcacaggagggcaagacttcagtgagccttgattgtatcagtgcacttcagactaggcaacagagtgagaccctgtctcaaaaaaattaaccttgtgaactgtatgtgattgcccccttttctgtgttagaatacatcttttatttgtttactttttactttttatcatcatcacttgtaaaatacttagaagtttaagacatccttttatccttgaaccatttgagggtaagttttgatcttaaacataatgtatggactcctgtgactttgtgaagctgtatgaattcttaatttttaatttttattaatttttttaatttttgtgacatgaaaagtaaaaaataaaaataaataaataaaaatgtataaccttcacaaagtcatgttttctattttatagagtaaaaatatcaaaaaataacaagagrctttgaaaagaacattcaaacaacaaaatagattttgtaaattaaaaataccattacataaataaaaacttcagtggaatattaggaaaataaaaaagtgcctttgagcactttgaaaactttgcagacgaccaaggctgcatgcaacctgaagtt

SEQ ID NO: 156054 - DNA, 569 bp, Homo sapiens
tcatcaaggtcatccctagaatgtatttggtttttcacctacaaaataaataacactgtttcaaaatgtccccaaaatatttatagcatatacwaaatgtacagaagtgggaattgcccatctgtttctatgagcacaaacacaggtacctgttccatactttttttttaagcaatttcctttatgttgactctagttcagaagaccacatggtctatggataaattagtttcccagttcctatgctatttagaaaactgacagagagacttgggttaattaaggaacaaagattaagagaatgtcttcctgagcttgagttattttaattgcaaaaacaatctatttatacatacaattaggtatttagattaccccattttacacaagagattttcataagtaaaaaaattcaaatggatcaaataattggtgaagagaaaaaccagagtagcagcaagtgaccctctaagtcttttggaagttgaactttctccaaagccaggaactctactttacttgtaatatgcttacctcattcttaaatctttgcatatatcacttaattc

SEQ ID NO: 156055 - DNA, 569 bp, Homo sapiens
tcatcaaggtcatccctagaatgtatttggtttttcacctacaaaataaataacactgtttcaaaatgtccccaaaatatttatagcatatactaaatgtacagaagtgggaattgcccatctgtttctatgagcacaaacacaggtacctgttccrtactttttttttaagcaatttcctttatgttgactctagttcagaagaccacatggtctatggataaattagtttcccagttcctatgctatttagaaaactgacagagagacttgggttaattaaggaacaaagattaagagaatgtcttcctgagcttgagttattttaattgcaaaaacaatctatttatacatacaattaggtatttagattaccccattttacacaagagattttcataagtaaaaaaattcaaatggatcaaataattggtgaagagaaaaaccagagtagcagcaagtgaccctctaagtcttttggaagttgaactttctccaaagccaggaactctactttacttgtaatatgcttacctcattcttaaatctttgcatatatcacttaattc

SEQ ID NO: 156056 - DNA, 569 bp, Homo sapiens
tcatcaaggtcatccctagaatgtatttggtttttcacctacaaaataaataacactgtttcaaaatgtccccaaaatatttatagcatatactaaatgtacagaagtgggaattgcccatctgtttctatgagcacaaacacaggtacctgttccatactttttttttaagcaatttcctttatgttgactctagttcagaagaccacatggtctatggataaattagtttcccagttcctrtgctatttagaaaactgacagagagacttgggttaattaaggaacaaagattaagagaatgtcttcctgagcttgagttattttaattgcaaaaacaatctatttatacatacaattaggtatttagattaccccattttacacaagagattttcataagtaaaaaaattcaaatggatcaaataattggtgaagagaaaaaccagagtagcagcaagtgaccctctaagtcttttggaagttgaactttctccaaagccaggaactctactttacttgtaatatgcttacctcattcttaaatctttgcatatatcacttaattc

SEQ ID NO: 156057 - DNA, 411 bp, Homo sapiens
tagctagttataatttggagcgagcacccatggagatgggaagatagggaggctagcttccttgatgttaacatttcaaaaagatagccccaggtccttcagaaggacatccctggttataaagctggcaaaggagatagagaaagaagtaacaactgcaagttttttaaactaaatactctaagaaaagagagatgagagatgrcaagggaaagttttccttgtttgcactagggaaaattcagtttttttcccatttagatttgtacttacattctagggctatgctctacgtggcaagcggctaccaattggacagcacaaatctagaacatttctatcattgtgtaaagatttggggggaacttcagagtgaaaccacctttgcaaaaattataacaatgagaaaat

SEQ ID NO: 156058 - DNA, 379 bp, Homo sapiens
tgataggtagctagttataatttggagcgagcacccatggagatgggaagatagggaggctagcttccttgatgttaacatttcaaaaagatagccccaggtccttcagaaggacatccctggttataaagctggcaaaggagatagagaaagaagtaacaactgcaagttttttaaactaaatactctaagaaaagagagatgagagatggcaagggaaagttttccttgtttgcactagggaaaattcagtttttttcccatttagatttgtacttacattctagggctatgcyctacgtggcaagcggctaccaattggacagcacaaatctagaacatttctatcattgtgtaaagatttggggggaacttcaga

SEQ ID NO: 156059 - DNA, 423 bp, Homo sapiens
ttataatttggagcgagcacccatggagatgggaagatagggaggctagcttccttgatgttaacatttcaaaaagatagccccaggtccttcagaaggacatccctggttataaagctggcaaaggagatagagaaagaagtaacaactgcaagttttttaaactaaatactctaagaaaagagagatgagagatggcaagggaaagttttccttgtttgcactagggaaaattcagtttttttcccatttagatttgtacttacattctagggctatgctctacgtggcaagcrgctaccaattggacagcacaaatctagaacatttctatcattgtgtaaagatttggggggaacttcagagtgaaaccacctttgcaaaaattataacaatgagaaaattacaacatgaaagagatct

SEQ ID NO: 156060 - DNA, 602 bp, Homo sapiens
atttgctttgcctctctcgacacagaacttcagcatctgattaaaggaggccaggtgtccaacatctggccagatggatttgtttctgagcaaagtcagaggaaaccagaggtagacatgcacctggtccccagtcagcttagcccttttaatgtgcctagccatccctgaagttytgccctgttaacgaaataggaatttgccattgctatccttacaggtgttcacaaagccatagaataaaatgactacaatttgagatcaactgactcaaaaactttatctcctagaggaaaggaaactaaagtccacagaagttaagtgactaggccaaagttacccagctaggagatggcaaagcttttaaagacaccagactctagattccatggcccaacctcactcctggttattagttgcatctaagacaatggctttcaaactttagcatcagaatcatctggagggcttgttaaaacacagattgccaggtcccacccccagagtttcagattcagtgtttctggactggggccctagaatttacatttctaacaagttccctggggaatggtgatactctcggtgtagggcccatatgt

SEQ ID NO: 156061 - DNA, 602 bp, Homo sapiens
atttgctttgcctctctcgacacagaacttcagcatctgattaaaggaggccaggtgtccaacatctggccagatggatttgtttctgagcaaagtcagaggaaaccagaggtagacatgcacctggtccccagtcagcttagcccttttaatgtgcctagccatccctgaagttctgccctgttaacgaaataggaatttgccattgctatccttacaggtgttcacaaagccatagaataaaatgactacaatttgagatcaactgactcaaaaactttatctcctagaggaaaggaaactaaagtccacagaagttaagtgactaggccaaagttacccagctaggagatggcaaagcttttaaagacaccagactctagattccatggcccaacctcactcctggttattagttgcatctaagacaatggctttcaaactttagcatcagaatcatctggagggcttgttaaaacacagattgccaggtcccacccccagagtttcarattcagtgtttctggactggggccctagaatttacatttctaacaagttccctggggaatggtgatactctcggtgtagggcccatatgt

SEQ ID NO: 156062 - DNA, 582 bp, Homo sapiens
tccagcttcaacatgtgacctaaagtctaaataaatctgtgcattcaatttgcaggtcacaaagacaggttctaagatgggcatgcaaactccactctacaactacagtgagtccaagggcttctgctatatatagctcctaagaaaatctctactggccttcaacctggcaaagtataacgttagagcacctacagccttcttgtcagtctgaagggaaatcccatcctagaaaggtgctaatacagagcaaacagatgagagtgaaggaggagagaaaccaagcccaagccctgtgaaactatctagactgtagcatgactcacccaaggaagtcctacctstaaacttttcagttgtgggctgatcattttcctttttctgtctttttttggtaacttacactcctaccttatttacatgggaacccatgaacaaaaacaaagggaagctgaggatgaaaatatacatatatttccagctgctatttaggaggcgaaacccagaaaacaaaactagtatctaaggggtttctttggaaaaacaattactttttctatctcttaataacataatgttact

SEQ ID NO: 156063 - DNA, 484 bp, Homo sapiens
aacaagaatctcagcctggtaatccagggaattctcccagattttacccaagaccaccaaggcagtacccccacaaatctgcactagccacaaagcattactgctcctaaggtgccccctaaagcagatasagctgcagtcaccaaagacttaaatcacacacccaagtcccttcaaatacctggaaaaccttcccaagaaggatgggtacaaacaaactgagactgcaagactgcaagaaatacctaagtcttcaatacccagacactgatacacatccataaacatcaaggccctcctggaaaacataacctcaaccaaatgaactaaataatgtaccagtgaccaatcccagaaagacagagatatttgaactttcagagtattcaaaataactgtattgaggaagctcaactaaatcaatataacacagaaaaggagttaagaatcctatcagataaatttaacaaagaaattgaaataa

SEQ ID NO: 156064 - DNA, 539 bp, Homo sapiens
ctgtaatgtccaagaatcccctcagttgcttgaaggctttggggagggggaaaggaggagatgggcttaattctttcttctccgaaagtcctggtcctctatgacaagactagacctagatacttcactgaagtctgatagagctgagccttagattttgagaccttatataatctgttagccagaaaattaagaagagccttactgccctcctgggagatttcttcagttggggcacagaggagaatgtcatctacatattgtaaaactttaacytgagaataaaggaattcagagaggtctttggacaatgcctgcccaaacaggagaggggtgccttgaaatccctgaggtaacactgtccaggttagctgggtggtctgtcttagggatcctcgaatacaaacaaattttggaagtcagggtgcaacagtatgcaaaaaaaggcatcctttaggtccagggctgtgaaccattttagttctctcaggaatttggcttagcagatgtattagtctgttttattctactgataaaga

SEQ ID NO: 156065 - DNA, 590 bp, Homo sapiens
tttcttcagttggggcacagaggagaatgtcatctacatattgtaaaactttaacctgagaataaaggaattcagagaggtctttggacaatgcctgcccaaacaggagaggggtgccttgaaatccctgaggtaacactgtccaggttagctgggtggtctgtcttagggatcctcgaatacaaacaaattttggaagtcagggtgcaacagtatgcaaaaaaaggcatcctttaggtccagggctgtgaaccattttagttctctcaggaatttggcttagcagatgtattagtctgttttattctactgataaagacatacccaagacctgtcaatttacaaaataaagaggtttaactggacttacacttccacatggctgcagaaaggaaggaagagcaagtcatgtattacgtggatgrcagcaggcaaagagagagcttgtgtaggcaaactcttgttttttaaaaccatcagatctcatgagtcttgttcactataatgagaacagtgcaagaaagacccgctgctataattcaatcacctcccactgagttcctcccatgacatatggaaattgtgggagt

SEQ ID NO: 156066 - DNA, 466 bp, Homo sapiens
atgcaaaataagtgacacaaactgaatatcatagtcctagggatgattttacctttctgaacgcttgyatgattgcttctttgcctgtttgcctaataaaaattgccatgtgaggcagaatttggtcaggttcttctgtagtgaggttgtgagaaagagctaacagaaaccaaccattggcagctaccatagtctacagagaagaaataaagatataacgagaaagaaagaaggaaggaaggaaggagagagggagcaaggcagaaggcaagaaatgcaaacagaaaacaaaaacgccaactaatatctatattgacaaacactcagaccagttcaaaacacatataaaatattttaactaaggtacagaattctgagattctgaccagctggctttggttaacaattcaataaaagactgatacttagtatgtattccccatctcactttatatcagcagtggac

SEQ ID NO: 156067 - DNA, 474 bp, Homo sapiens
tatctcaaaagagcttcttatgcaaaataagtgacacaaactgaatatcatagtcctagggatgattttacctttctgaacgcttgtatgattgcttctttgcctgtttgcctaataaaaattgccatgtgaggcagaatttggtcaggttcttctgtagtgaggttgtgagaaagagctaacagaaaccaaccattggcagctaccatagtctacagagaagaaatamagatataacgagaaagaaagaaggaaggaaggaaggagagagggagcaaggcagaaggcaagaaatgcaaacagaaaacaaaaacgccaactaatatctatattgacaaacactcagaccagttcaaaacacatataaaatattttaactaaggtacagaattctgagattctgaccagctggctttggttaacaattcaataaaagactgatacttagtatgtattccccatctcactttatat

SEQ ID NO: 156068 - DNA, 463 bp, Homo sapiens
atgcaaaataagtgacacaaactgaatatcatagtcctagggatgattttacctttctgaacgcttgtatgattgcttctttgcctgtttgcctaataaaaattgccatgtgaggcagaatttggtcaggttcttctgtagtgaggttgtgagaaagagctaacagaaaccaaccattggcagctaccatagtctacagagaagaaataaagatataacgagaaagaaagaaggaaggaaggaaggagagagggagcaaggcagaaggcaagaaatgcaaacagaaaacaaaaacgccaactaatatctatattgacaaayactcagaccagttcaaaacacatataaaatattttaactaaggtacagaattctgagattctgaccagctggctttggttaacaattcaataaaagactgatacttagtatgtattccccatctcactttatatcagcagtg

SEQ ID NO: 156069 - DNA, 355 bp, Homo sapiens
aatggactttctttaggtgtccactttgagcaaaataatgtattctttctaatcttacctaaaaagtgaagtcatgaattcttaaaaagcgtagcccagttctttgctgggattactgtagtattttgtsgaaatatcctggtattaattaatttcaccaacaccctctccccacactgattcatagccataattaatccttgcaatggtcacagcattcatttagtgattttagaaccaatgattatatttgccatattaattgtagttaatataacaatgtacatttttctagttgtttgagccctgaaaatcattttttggaacaacatcagttgcagagaggagaagaaat

SEQ ID NO: 156070 - DNA, 620 bp, Homo sapiens
gattctttattccatcatatttcctgatggctttaaattggatgaaatagctggagctctggtaggcattttgtacagtgaggttaaaatggaaatggaagctacacatgacaaagcaacaagaataaagaagtgtgagcttcttatttgacaatgcaacagtgttgatttcatcaatgtgaaagaaaagtaaatttctattttgttaaggcactgttctttggagaagtcttataatctgtagccagacctaattctgaataatacacttaggaattaacaaaatattttggaaaagaaaaattacagctgacaaagaaaatagaggcctggaatagtaagaaagccttgcagattttgatatgataactaactgttaaagttccataacagaggaaagtaaagagaacaaatatttgttaatcccccactatgtgttatacttgtaaaatatgttttatattctttctctttgaaaagcaaatgcaacttctattaccaaaatgcttaacaaattttaatactraaatcaaatatttatattgctatgtaacaaatttaatgagtctagaatatcattttttgtaatttttctctagaatttgccttatattgcagca

SEQ ID NO: 156071 - DNA, 486 bp, Homo sapiens
gagttccttatatattttggatattaaccccttataaagtatatgatttgcaaatactttctcccattctgtargctgccattttactctgttgtttcctttgctgtctgtacatcaaaaactacaaaacattggtgaaataaattgcaaataacagaaataaatggaaagcaatcacatgctcatacattggaaaacttaacattgctaaaatgtctatattacccaaaccagtctacagagtcaatgtaattctctataaaaatcccaatagcattttttgcagaaatagaaaaagcaattttaaaattcctctgtaaccccacatagccaaaacaatcataagaaaggagaacaaagctggaggtgttgtatttcctgtcttcaaaacatattacaaagctacagtaatgaaaacattatagtattgggataaagacagacatagccaatagaacagaatagagagcccagaaataaaactac

SEQ ID NO: 156072 - DNA, 505 bp, Homo sapiens
gaatgacccacttgtgtctgggcagaaatccattcattctagagccaatatattgctaggaagcaaaagaaaaactgctcttttatactcatacgttacaaataataatagagacatataaatctggacttcattagtttaaatttgatatccttaatcatcaataaaacaataagacaaaaaagatgtgatcatttcttgaacattttatgtgatatattccatttttctaatggaaaagagctttgcttttgctggattctttgtgaaaacagcaaatcataaggaattctctttaattattatagattggtactctttcttacacaatgtaagaattccttgcctcaggggaaattaaccttaagtaactgatgacaaatggataaaaagaggtaatgtcagcctcattttgtgaaaactggagataagcaattcagaaaatgacrgacatggctaaagagttgctgtcacaattctttgccatcctagagcaactatgcag

SEQ ID NO: 156073 - DNA, 576 bp, Homo sapiens
ttcaatgaaacagtgaagacaaacgtttattatgcagatttgtatagcgttttgccaatggttgagggagttatgtgacagtgatgtgcattcaaatatgtaaagataatggggctcagacaataccccaaagtatagagcttgatctgttcagcaattttatctaaaggaaattaaaaggccttagaagcaatcttagaaacaaggactttctgaccttcttttgttcctccctctcctacccaaaaaacacaggatggaactctctctgaagtttccttctctgaagctcctccagaagcaaacaactacctttgttccccaccatgaaatttcattaaycagagaggattaaattcatatctcaggaaggaaggctgagaagtgtcattaaacatggacagactttgtcacaagctattgtctgttcctcaggtctcaatcagttttacaaataatcctttacaaactcttgtttgggcctgatcaactctcctaaaaataatttactaccctcaaaattgcctgcctttccccatcttcctctcttctatgaagaggatactatttaagctt

SEQ ID NO: 156074 - DNA, 576 bp, Homo sapiens
ttcaatgaaacagtgaagacaaacgtttattatgcagatttgtatagcgttttgccaatggttgagggagttatgtgacagtgatgtgcattcaaatatgtaaagataatggggctcagacaataccccaaagtatagagcttgatctgttcagcaattttatctaaaggaaattaaaaggccttagaagcaatcttagaaacaaggactttctgaccttcttttgttcctccctctcctacccaaaaaacacaggatggaactctctctgaagtttccttctctgaagctcctccagaagcaaacaactacctttgttccccaccatgaaatttcattaatcagagaggattaaattcatatctcaggaaggaaggctgagaagtgtcattaaacatggacagactttgtcacaagctattgtctgttcctcaggtctcaatcagttttacaaataatcctttacaaactcttgtttgggcctgatcaactctcctaaaaataatttactacyctcaaaattgcctgcctttccccatcttcctctcttctatgaagaggatactatttaagctt

SEQ ID NO: 156075 - DNA, 474 bp, Homo sapiens
ttattaatgcactaataaatctaatttggccagtttttcttccagcattgaaagaggtcacgatttctctgctaaatataagatgaagtaattgattagggtttaaatgacactgtacaaaaaatgcaggcctttttgtatgcttggtgaattatttattttgttgactattgacaacacatggtgggtctcctccacaatgaattgactgaccctgggtaagttacytaacatggtttaacttcagtttttttcatctctaaattcttttgtttttaataaactggtctttaagcttagtttctaaagaataaagtaatcatgttagaaatatagtgatatccaggtattaattaaaatggtaggcgttttcatgactcccaagagctataggctttgatctttatcatctctgtatgccccattacgccaagtacatggtagcacctcagtatatgcttattatgtgattga

SEQ ID NO: 156076 - DNA, 444 bp, Homo sapiens
catgctggtcagaactctaggtcattctaccttccgggtaataaaaagaaacagggacatcaagcaattggagacctaaatcttgctcacctgcttcaactggcacgacaaccctttatttatttatttatttttctttatttagatgaagcttatgtctatatactacagctttccaaaaaaaataaatctaaaataaaatgaatccaaacaaacacttcctcccccctgccacattatcaatgccaagaaagtgatattttccaaaagtccttttttattacccaacactactttgtctataatctagcgaatggataaataatatgytgttatgtggcttaatattatgtttggtgtgagaaaaagtaaagtttttttttaaagagatactgtgggataacagaaagataatcagactaaaagttagaaaagccagctccc

SEQ ID NO: 156077 - DNA, 511 bp, Homo sapiens
attatttcactgagatggaaccatagatgttatgtctctagaatttatagggatggttcttaagccatgctggtcagaactctaggtcattctaccttccgggtaataaaaagaaacagggacatcaagcaattggagacctaaatcttgctcacctgcttcaactggcacgacaaccctttatttatttatttatttttctttatttagatgaagcttatgtctatatactacagctttccaaaaaaaataaatctaaaataaaatgaatccaaacaaacacttcctcccccctgccacattatcaatgccaagaaagtgatattttccaaaagtccttttttattacccaacactactttgtctataatctagcgaatggataaataatatgttgttatgtggcttaatattatgtttggtgtgagaaaaagtaaagtttttttttaaagagatactgtgggataacagaaagataatcagastaaaagttagaaaagccagctccctc

SEQ ID NO: 156078 - DNA, 300 bp, Homo sapiens
acatgtattgctatatggaaggtataatgctaatgacaggacatagagcaaacaatacaaaatagactcagccaagcatggtggtgcacacctgtagtcctagctacttgggaggctgaggtgggaggttcacttgaaccgaagatttccaggctgctctgagctgtgattgcaccactgcactccatcctgggcaacacaktaagactctgtctcaaataaatgaatgaataaataaataaattgattaaattgagacatggtgagttcattttctatggccactgtaacacaatacca

SEQ ID NO: 156079 - DNA, 532 bp, Homo sapiens
tgctcatactagcttctaataatatattaaatttctgtaatattggatgtaatgtctgcttttccatttcagattttatttayttgggtcttctctctttttctcttcatcctgttaatgatctataaattgtatttatctttttctgaaaaaccagtttttcactttgttgatcttttctatttctcttttttgtttaaatttcatttatttctgctctgatctgtattatttcttttttttttactaattttggatttggtttgctcttgcttttttagttctttaagatgcattattaggttgtatatttgaagtctttctacttttttgatgtaggtgcatatttctataaactttcctctttgtactgcttttgatgtatgtcacagtttttggtatgttgggttacaatttttgtatgtttcaaaaaatttttttaatttttcttcttaatttcttcattgaccctctggtcattcaggagcatattgttgaatttccatgtgtttgtacagttttcaaagttcct

SEQ ID NO: 156080 - DNA, 532 bp, Homo sapiens
tgctcatactagcttctaataatatattaaatttctgtaatattggatgtaatgtctgcttttccatttcagattttatttacttgggtcttctctctttttctcttcatcctgttaatgatctataaattgtatttatctttttctgaaaaaccagtttttcactttgttgatcttttctatttctcttttttgtttaaatttcatttatttctgctctgatctgtattatttcttttttttttactaattttggrtttggtttgctcttgcttttttagttctttaagatgcattattaggttgtatatttgaagtctttctacttttttgatgtaggtgcatatttctataaactttcctctttgtactgcttttgatgtatgtcacagtttttggtatgttgggttacaatttttgtatgtttcaaaaaatttttttaatttttcttcttaatttcttcattgaccctctggtcattcaggagcatattgttgaatttccatgtgtttgtacagttttcaaagttcct

SEQ ID NO: 156081 - DNA, 401 bp, Homo sapiens
gcatctactccaagcagtgtaatgaccttgttctcattttggatattgttaatcaattggaaagataggatgacaactcagccagtgtggacaatatggttgtaaaaaaaggaataaggagctgccatagtctacttggtgttgccataaacaaatacctgaggttgggtaacttatacagaagagagatttatttggttcatggatctgcaggctgtgcaagaagcatgacactggcatctgcatctgctgagggcttcaggttgcctctactcatggcagaaggtaaagaggggccagcatgttcagagatacgtggctagagaggaagtggggacagaggtcgtttcaggcwgttttcaaccaccagctttcatgcgaatataatggagcaagaattc

SEQ ID NO: 156082 - DNA, 545 bp, Homo sapiens
ggagtatatatttttctcatctgtacatggagcatcctccacaataggccatatgcttggccgtaatgaataaattcaaaatattcacaactatcctgtcataccaccgtggaataaaattaaaaattgataccaagaggaactctcaaaatgacacaaatatatgaaaaccaaacaacttgctcttgaatggcctttgggtaaacaacaaaacaaaggcagaaataaacaattttttgaaatgaattaaaataaagtsatgacataccaaaacctctgggatatagcaaaagtggtgttaagaggaaagtttatagcattaaatacctgcatcaaaaagatagaaagatctcaaattaacaacctaatttcactcctcaaaaacctataaaagcaagaacaaaccaaacccaaagcgagcagaagaagaaataacaaagatccagagcaaaactaaatgaggttgcaactaaaaaaaaaataatgagaagaagaatcaatggaatgagaagttgaatttctgaaaagataaacaaaatgataaa

SEQ ID NO: 156083 - DNA, 614 bp, Homo sapiens
agaaattagaaatagaacagcaaactgaacacagagtgagcagaaggaataaactaataaayatttttatataatgatttttaaaatcacagcaaaaattaattaaatatagaatagaaaataatagagaaaatgtaatcaaaagttggttcttggaaaacactcacaaaattgaccaactattagctacaatgatcaagccaaaaagaaaaaaagattcaaattactaaaatcagaaatgaaaggggcgggggacattataaccaactttaccaaaatgaaacggattataagggatgctatggacaactgcatgtcaacaaactagagaacctagataaaatgcaaatttcctaaaagacacaaaaccaaactgactaaaaagaaataaaatctcaatagacctgtaacaactaaagtggtagaattaataataaaaaatcctcccacaaacaaaagcccagggctagatggcttcactagtgaattctaacatacttttaagatgaattaacaccaattttttataaactgttccaaaaaattaaagagagaacacttcccaattcactctgtgaggctaatattatcctgattccaaaacagaaaaaaac

SEQ ID NO: 156084 - DNA, 590 bp, Homo sapiens
tgaaaaaggaaaaagtaacatasgtagcataattctattatatattaggcaaatgcttccaacttgaggtcataatttttatttttattattactgcttttattactgctatataatatgtgtagctcattttagaatgcttgaaaacccagaaagcaaaattaaggagatagtcccatctctcttcctaccacttcaaagtgactattcctaaaaatttgcatattgctatgcacatattgatgagtttggaattttacatgtaatcatatgtatttttgtgtttttttccatttactattacctggtgagtattattcaatagtggtaatgttctttaaaaatgacttatatgattacatgacatttccttaaatgcttgggtcataattgacccaatcatttgtagattattgacacaattttgatactataatgatgcaacattgaacacacttatatgtgaaatcattgtgccttttgcttgtgcatatgtgtgtgtgtgtaaagaacacttaaaacatggatctactcacttcaaaaaattttgagtacacagtactgtattgttaactataggtaccatgttg

SEQ ID NO: 156085 - DNA, 547 bp, Homo sapiens
ctttacttttacctatgaaatagaaagaaaggttgaatgtcaggtatgtagggactaattgattattaccataaactcagctcccagaatgcaagctaggaccttgataatatcctcaccttcccataaggtcatgaaacagtgagagaaatctaatgtagctgatgccatcttacttctgacctcacaagctaactgcctttgctcattcctactgtggaccaagccaatcacaaaaagaatttagattatactttaactttagaactaatgactctctcayttttgaaacagacccccaaggaggtaaggaagtatgcatacaagtaacaatgattaaagatttatagaaacaaggtggacttgacaagtagttgaccatgaacaaagaagttttgccacctcctcagacctttgctgatgcccagacatctgtgttcaccagtcacctcctggtcttagccccatcccttttccccctccctctaacataaaaggagcctaaaaattaatcaactttagatagttctttaggatgttagtccac

SEQ ID NO: 156086 - DNA, 286 bp, Homo sapiens
tttttcagcttgctatgtgcttcagaatgtttgacatcttttatggattataccaaaaggctccttgttccctggcttctaattggaatacaatagtgggggatcagaaggtgggtggaaaatgggcttgagaaatatttcttcycatggcttccttgccttcacatagcctaagtccacagttactgccttgtgcccttagcatatttctaccctctccaggttctagttccctcctcttggtcattcaggcttagcgttagttacagcttctcactcttgctat

SEQ ID NO: 156087 - DNA, 496 bp, Homo sapiens
agtaaactgatgcccaaggagagaggaactgatgagatctcccagtgtgaacataagaatagaattaggtatccaaaytctgatcatattttgtgcagctgagtaactgaacttggagagtggcctctggtagattcagtccttggtggaaaaaaaaaaaaaaaaaaaaaaaaaaggcttacctgtgtccaacaggaacatctgccttgttcaactctggctgacatccatgcttcatgcatgtccttcatgcatgtaatataacagctctatttctgtttcagcaaagccaaaagaagaaccagggaagtcttattccctgtcctggctgagctattaatggctggagctgtaccagctcactgctgccttgtgtgtcagaggcaagtaagctcactatgaagtttggccatgctcccagtcctggttttgggagagttgttcccacctgtgcctcttttgttcttggggctagtcgaagggatgagcacctgta

SEQ ID NO: 156088 - DNA, 496 bp, Homo sapiens
agtaaactgatgcccaaggagagaggaactgatgagatctcccagtgtgaacataagaatagaattaggtatccaaactctgatcatattttgtgcagctgagtaactgaacttggagagtggcctctggtagattcagtccttggtggaaaaaaaaaaaaaaaaaaaaaaaaaaggcttacctgtgtccaacaggaacatctgccttgttcaactctggctgacatccatgcttcatgcatgtccttcatgcatgtaatataacagctctatttctgtttcagcaaagccaaaagaagaaccagggaagtcttattccctgtcctggctgagctattaatggctggagctgtaccagctcactgctgccttgtgtgtcagaggcamgtaagctcactatgaagtttggccatgctcccagtcctggttttgggagagttgttcccacctgtgcctcttttgttcttggggctagtcgaagggatgagcacctgta

SEQ ID NO: 156089 - DNA, 568 bp, Homo sapiens
ctctttgcagtgctgtatactgccactatataatataggaaaaataactatatgcttgtaggttaaaaaaatctgttttacacacacacatcaactcagtaaaatgcatgcctgtattaaaayggaaggaaattcatataaatacgtgtaggaattatctctactcagccttgccttccaaacatgatatactactactatactttctgaacctagtctcagttactgttttaaattactataggaattgatttaaaaagcgttagcgaatcttcaaacagcaatatcccccaaaagagtgtcatgtaattagccatatcattttatattatttttaatcttcaaaatgcaactcacagcttttgttcacatcttttgttttcaatattctcagacttatagacaaactaatagtagtgcagcataattaagctggtgagaaaatgcattatgttgtcctctccatctttagcacaaacacacagacacactgacttaaatatccacacccaccatgcatgtgaacactgcaatggttggaatgttacaagatagccttggataatgg

SEQ ID NO: 156090 - DNA, 568 bp, Homo sapiens
ctctttgcagtgctgtatactgccactatataatataggaaaaataactatatgcttgtaggttaaaaaaatctgttttacacacacacatcaactcagtaaaatgcatgcctgtattaaaatggaaggaaattcatataaatacgtgtaggaattatctctactcagccttgccttccaaacatgatatactactactatactttctgaacctagtctcagttactgttttaaattactataggaattgatttaaaaagcrttagcgaatcttcaaacagcaatatcccccaaaagagtgtcatgtaattagccatatcattttatattatttttaatcttcaaaatgcaactcacagcttttgttcacatcttttgttttcaatattctcagacttatagacaaactaatagtagtgcagcataattaagctggtgagaaaatgcattatgttgtcctctccatctttagcacaaacacacagacacactgacttaaatatccacacccaccatgcatgtgaacactgcaatggttggaatgttacaagatagccttggataatgg

SEQ ID NO: 156091 - DNA, 435 bp, Homo sapiens
tttggctgttacaaacagggaatcatctagkgtctaatgggtagaatccagggaggttgctaaacatcccacaatgaactggacagccaccataacatagaactgcccagcccagacccggtgcagtggctcatgcctgcaatcccagcactttgcgaggccaaggcatgcagactgcttgagctcaggagtttgagaccagcctggtcaacatgtatttcctgtctctacagaaaatacacacacacaaaaattagccaggcatagtggtacatgcctgtggtcccagctagtcaggaggctgacgtgggaagatggcttgagctggagggcaggggttgcagtgagccgagatcgcaccattgcattccagcctggatgaaagagccagaggccctgtctccaaaaaaaaattgtccagcccagaatgtcagt

SEQ ID NO: 156092 - DNA, 428 bp, Homo sapiens
ggaatcatctagtgtctaatgggtagaatccagggaggttgctaaacatcccacaatgaactggacagccaccataacatagaactgcccagcccagacccggtgcagtggctcatgcctgcaatcccagcactttgcgaggccaaggcatgcagactgcttgagctcaggagtttgagaccagcctggtcaacatgtatttcctgtctctacagaaaatacacacacacaaaaattagccaggcatagtggtacatgcctgtggtcccagctagtyaggaggctgacgtgggaagatggcttgagctggagggcaggggttgcagtgagccgagatcgcaccattgcattccagcctggatgaaagagccagaggccctgtctccaaaaaaaaattgtccagcccagaatgtcagtaatgctgaagt

SEQ ID NO: 156093 - DNA, 433 bp, Homo sapiens
tggctgttacaaacagggaatcatctagtgtctaatgggtagaatccagggaggttgctaaacatcccacaatgaactggacagccaccataacatagaactgcccagcccagacccggtgcagtggctcatgcctgcaatcccagcactttgcgaggccaaggcatgcagactgcttgagctcaggagtttgagaccagcctggtcaacatgtatttcctgtctctacagaaaatacacacacacaaaaattagccaggcatagtggtacatgcctgtggtcccagctagtcrggaggctgacgtgggaagatggcttgagctggagggcaggggttgcagtgagccgagatcgcaccattgcattccagcctggatgaaagagccagaggccctgtctccaaaaaaaaattgtccagcccagaatgtcagt

SEQ ID NO: 156094 - DNA, 539 bp, Homo sapiens
ctctgtaaggcctggtttttcctaggttatgattgcagagcaaggattattataatattggaataaagagtcattgctacaaactaatgattaatgatattcatatataatcatatctatgatctatagctagtataactattcttattttatatattttrtaatactgcaacagctcatgccctcggtctcttgcctcagcacctgtgtggcttgctgcccacagatagggagccaggtgcagtggctcatgcctgtaatcctatcgctttgtgaggccaaggcaggaggatcacttgagcccaggagttcgagaccagcctggcaacatagcaagaccccatttctacaaaaattttaaaaaactagctatggaggcacatacttgtggttccagctccttgggaggctgaggtgggaagacagcttgaacctgtaaggtcgaggctgcagtgagctgtgactgcaccattgaactccagcctgggcaagagtgagatcctgtctaaaaacaaaaacaaaaacaaaaaacaacaaca

SEQ ID NO: 156095 - DNA, 575 bp, Homo sapiens
aaaatcttcataccattctcctacaccaaatactccattgtcactgctaaaaagctatttttctatctatcataaagtagtacaatgatttctaaaacgaagcatacagaaaagctcaaaaagtagtatgtaaatgcataaagaaaataacatttctggytgacgtctcatactgggattaggggagagaaatgggagttgtagaataaagccctgtctatatggctatctctccatttccttggcatttttgaggtactgtgaggagactatctggacccacagagcaaagattgaaagccacttgaccacagaaaaagttaacttcttgatatggcatgcaaagccctccatcacgtacaacttttccccatcttaaccttcacagcccagcaagatcaaaccaatggcagttttcccaggaaccatgctgtttgtcattccctgtcttcgctcatgttttcactttgtgaggaactttctaagactctccactcaatatcatttggatatactatccagttttaagacttatatgggaggatatttcactcattcatttatttagtcaaaca

SEQ ID NO: 156096 - DNA, 523 bp, Homo sapiens
ttggtgtgccacattcacagagactgacgtcccatttagcaagtcaggagagaggaagcaagactattattcttatggctatgaataattacttcactcttgccaccagttgacaaaatgaaatatcaataaaataatatagactatacaataaatgtgtgctcyactttgggcctaagtaactgataaaaccttccactatgtgcaggggtttatagaaggttctttaatttgggggcagtatgtgccatgacttcttccaaattaagaacaaatttggtaaatattttattttagataaatgttatacaattttctgggatttcaaatcaattagatataacacatgtcattctcacctaacataaattcatatgtaagatcaagataaaataattttttaaaaacaaacttaactgagtctaagatgtgccaaagacaagggtcataatatctgtgtcagtaatctattttatttgaacatttctacaaatagaaaatttaaattaaagtttttctctta

SEQ ID NO: 156097 - DNA, 316 bp, Homo sapiens
ggagcattgtaacaccaaagccagaagttgtaatggtgaaacaggcagacgagcttcatgattatgttgcartgctccacaaatgggtacagtgattgatgacctgcaggaaaatgtgcttatgaggtgaggttgcttgattttgttgtcaaatcaaaacaactatagatattattcctgagaagcattctttaacctggccttaatcagaaaataagtagttctgtgatgtaggtcagtgaacttgctgtgatagcaatgatgtatgtgaaaataccagagagtactacattttgttattgttgttaaaatgttg

SEQ ID NO: 156098 - DNA, 316 bp, Homo sapiens
ggagcattgtaacaccaaagccagaagttgtaatggtgaaacaggcagacgagcttcatgattatgttgcagtgctccacaaatgggtacagtgattgatgacctgcaggaaaatgtgcttatgaggtgaggttgcttgattttgttgtcamatcaaaacaactatagatattattcctgagaagcattctttaacctggccttaatcagaaaataagtagttctgtgatgtaggtcagtgaacttgctgtgatagcaatgatgtatgtgaaaataccagagagtactacattttgttattgttgttaaaatgttg

SEQ ID NO: 156099 - DNA, 518 bp, Homo sapiens
tttcaatttttggtagagacaggttctcactatattgtccagactggtctcaagctcctggactcaagctatcctcttgccttggcctcccaaagtgctgggattacaggtaaaagccactgtgtgtggccagaaaataagttctttgctctcccccgtataaaaacatgtgggtttgtgcctggtagtataccatgttaatcaagagtgaggtttgcayctcttagtaggacaatagagtcagaaatcttctaatcatctggttttatcagcactaccactttcttaatgtatttacgtgatgatctggtgcgtagttgttataatagttaacatcgaatgagcatcatctaaccctcatgacaagcttatttataaggatccattatcattatttcccttctacagcaaaggaatccaagggatgtcttgcttaatttagaactagtacaatattgaactggtttagaaacccaaagaatcccactccagaatctgtgctattaaccacactataa

SEQ ID NO: 156100 - DNA, 536 bp, Homo sapiens
atatatgctcccaccacaggagtacctagactcatgaaacaagttcttagagacctacagagaattagataaccacaaaataaccatgggagacttcaaactccactgacggtgttagacaaatcatggaagcaaaaaattaaaaaaaaaaatttgggacctaaactcagcatttgaacaaatggacctaacagacatctacagaatactacacccaacaacaacagattatacattcttcttatcttcagatgacatatactctaagattgaccacacactcagccacaaagcaattctccacacattcaaaaaaaccaaaatcatcccaagaacactcttagactacggcacaataaaaacagaaatcaataacaataatatctctcaaaacaatataattacattgaaattaaayaacctgctcctgaactacttttgtgaaaaaaagtaattaagacagaaataaaaattatttgaaactaattaaaacaaagatgcaacataccagagtctctggtacacagctaaagcag

SEQ ID NO: 156101 - DNA, 589 bp, Homo sapiens
tgcattattaaattcctatagtgaaatttttatttccacaagttcagtttggttctttcttaaaatgtctatgttgtctttcaatgcttgaattgttttactgatttcctttgattgggtttaaactttgtcctgtatcttgttgagcttccttgacatctagattgtgaattctgtgttgccatttcagccatttccatctggttaagaatcattgctrcacagctagtgtggtcacgtggaggttagaagatactctggattttagagttgtcagaatcattatgctgactccttcccatctgtgtggactgatgtacctttaatctttgaagttttttggatggggcttttggcttttatattctttgatgccctttagggtttgattgtgatatcagttgggtttagtttattgcttcatttctgtatgctttccagggccaaggctcagctcagcactcctgggctgcatgctcttaccctggcaggctaggaccaggaatgtagctttgttttctggtccctggaggtcaagcacctcctgcacttagtagggggccatgcattcacagtccattggcaacaa

SEQ ID NO: 156102 - DNA, 589 bp, Homo sapiens
tgcattattaaattcctatagtgaaatttttatttccacaagttcagtttggttctttcttaaaatgtctatgttgtctttcaatgcttgaattgttttactgatttcctttgattgggtttaaactttgtcctgtatcttgttgagcttccttgacatctagattgtgaattctgtgttgccatttcagccatttccatctggttaagaatcattgctacacagctagtgtggtcacgtggaggttagaagatactctggattttagagttgtcagaatcattatgctgactccttcccatctgtgtggactgatstacctttaatctttgaagttttttggatggggcttttggcttttatattctttgatgccctttagggtttgattgtgatatcagttgggtttagtttattgcttcatttctgtatgctttccagggccaaggctcagctcagcactcctgggctgcatgctcttaccctggcaggctaggaccaggaatgtagctttgttttctggtccctggaggtcaagcacctcctgcacttagtagggggccatgcattcacagtccattggcaacaa

SEQ ID NO: 156103 - DNA, 605 bp, Homo sapiens
aatgctcttcgttttgtagcccagctccatttttgtttaatttttttttctgtttatgttttatcaatcatattatctactatgtttgtaggagaatgggttgtactaagagatgccattctatgccaatttgactagaatgtctccttttttgtttaagcccctttgacttatcttttttgtttaaccccaaagactttaaactgatacaatatgtataccttctcatattttaaaaactttctcaaggtgtttttagttttgtcctttatttattgctccaacaacgcataatgataattgggattatttyaatagttcagaaatttgcaaactgaatagagaatatgagacctgctaagagcagcatgtaagaggtagcagggctaagactaatgtctaatgatatagttctttttttcccaatgattttatttaattttataatttctctttcaacttttattgtaggttcagggggtaaatatggaggttttttataagggaaaattatgtgtttctggggtttgatgtacaaattatttcatcacccggatagtgagcctggtgccttataggtagttttccggcccacatcctattct

SEQ ID NO: 156104 - DNA, 606 bp, Homo sapiens
agtctcagtgtctactgttcccatctttatgtccatgtaagcccaatgtttatcttgcacttacaagtgagaacatgaagtatttggttttctgttcctgtgttaatttgcttaggataatggcctccagcttgcatccgtgttgcatcagaggtcatgattttgttttttatggctgtgttatattgtrtagtttatatgtaccaccttttctttatccggcccaccattaatgagcatgtaggttgattccatgacttttctattgtgaatagagctgcaatgaatatacaactgcatatgtctttttggtagagttatttatattcctttcaatatataccccataatgggattgctgggtcaaaatggtaattctgttttatgttctttgagaaatctccaaactgctttccacagtggcggaactaattttaccttcctgccaacgtgtataagcattccctcttcttcacaaccatgccaacatctattattttttgactttttaataacagcccttctgagtggtgggagatgatgctttcttgtggttttgatttgcatttctctgatgatcagtgatactgaacttttttatatgct

SEQ ID NO: 156105 - DNA, 606 bp, Homo sapiens
agtctcagtgtctactgttcccatctttatgtccatgtaagcccaatgtttatcttgcacttacaagtgagaacatgaagtatttggttttctgttcctgtgttaatttgcttaggataatggcctccagcttgcatccgtgttgcatcagaggtcatgattttgttttttatggctgtgttatattgtgtagtttatatgtaccacmttttctttatccggcccaccattaatgagcatgtaggttgattccatgacttttctattgtgaatagagctgcaatgaatatacaactgcatatgtctttttggtagagttatttatattcctttcaatatataccccataatgggattgctgggtcaaaatggtaattctgttttatgttctttgagaaatctccaaactgctttccacagtggcggaactaattttaccttcctgccaacgtgtataagcattccctcttcttcacaaccatgccaacatctattattttttgactttttaataacagcccttctgagtggtgggagatgatgctttcttgtggttttgatttgcatttctctgatgatcagtgatactgaacttttttatatgct

SEQ ID NO: 156106 - DNA, 565 bp, Homo sapiens
cagggctgaaaaactacctgttgggttatatgcacactagccagttgacagtttcagtcataccctgaatctcagcaccacacaatatagctttayagcaaatgtgcatattaccccgattcaaaaataaaagttgaaaaagaaaaaaaaagtacacattcacatccttttgcataagaaaaagacaggaggcagccataccaaaacattttcaatggctacaagatagaatatcttggagataattctttttaattaattagtttattttaaactaacaaaaattgcctacatttatgctgtaaaaaaaagaggattgctacattaatgtaaaagaaataattaacaagaaatgtataaaaaatctgcacacatgccctcaatccagtagttccaaatacatagaaaggcagaaattgacagaatatgaaaaaaattctcacaaggtaacctatacataaactaacaaaaaagtattttttaatgatgaggtagatcttcatggacaatattatgaaacttcttcaggacggtcctgtatgtttgtatacataatccatattca

SEQ ID NO: 156107 - DNA, 565 bp, Homo sapiens
cagggctgaaaaactacctgttgggttatatgcacactagccagttgacagtttcagtcataccctgaatctcagcaccacacaatatagctttatagcaaatgtgcatattaccccgattcaaaaataaaagttgaaaaagaaaaaaaaagtacacattcacatccttttgcataagaaaaasacaggaggcagccataccaaaacattttcaatggctacaagatagaatatcttggagataattctttttaattaattagtttattttaaactaacaaaaattgcctacatttatgctgtaaaaaaaagaggattgctacattaatgtaaaagaaataattaacaagaaatgtataaaaaatctgcacacatgccctcaatccagtagttccaaatacatagaaaggcagaaattgacagaatatgaaaaaaattctcacaaggtaacctatacataaactaacaaaaaagtattttttaatgatgaggtagatcttcatggacaatattatgaaacttcttcaggacggtcctgtatgtttgtatacataatccatattca

SEQ ID NO: 156108 - DNA, 565 bp, Homo sapiens
cagggctgaaaaactacctgttgggttatatgcacactagccagttgacagtttcagtcataccctgaatctcagcaccacacaatatagctttatagcaaatgtgcatattaccccgattcaaaaataaaagttgaaaaagaaaaaaaaagtacacattcacatccttttgcataagaaaaagacaggaggcagccataccaaaacattttcaatggctacaagatagaatatcttggagataattctttttaattaattagtttattttaaactaacaaaaattgcctacatttatgctgtawaaaaaagaggattgctacattaatgtaaaagaaataattaacaagaaatgtataaaaaatctgcacacatgccctcaatccagtagttccaaatacatagaaaggcagaaattgacagaatatgaaaaaaattctcacaaggtaacctatacataaactaacaaaaaagtattttttaatgatgaggtagatcttcatggacaatattatgaaacttcttcaggacggtcctgtatgtttgtatacataatccatattca

SEQ ID NO: 156109 - DNA, 573 bp, Homo sapiens
catttgttgaatagggagttcattcctcattgcttgttgttgtcacctttgtcaaaggtcagatggttatagatgagtggctttatttctgggttctgtaacctggtccatttatctatgtgtttgtttttgcacctgtaccatgctgttttagttactgtagccttgtaatatagttcaaagtcaggtagtrtgatggcccagcctggtactttttgcttaggattgatttggtttccctgggctcttttttggtttaatatgaattttctaatagtttttactaattctgtgaaaaatgatgttggtattttgataggaataacattgaatctgtaaatttacattgagtaatatgtttcttttaacaatattgattctttctattcatgaccgtggaatgtttttccatttgtttgttatctctgattcttttactagtgttgtgcaattcttgtagtacagatctttcacttccctggttagttatattcctcagtattttattcttttcatggctattgtaaatgggattgccttcttgatttggctctcagcttgaatgttattagt

SEQ ID NO: 156110 - DNA, 615 bp, Homo sapiens
gaagtaataacaaaggaaaagtttctgggcagtaagaacaaataattaaagtagacggtgtgcacagaagaaaagtggaaataaaatgacttataattttttttcttttactttttgtatcctgttcaacytttttaaccttttcaacagcaaacatgcatgatttttacttataaaaagtgaggtcatagtgaaaagtttagaaaggagatgatggaataaagtagaattcccttcatcagtaaccaataaaatcacaaacagcataaatacttactagcggaaaccaaaaaaactaagaaggcataattcactgtgttgagtttgaaatactatcagctaagggaaaaaaaaaggggggttttatcttgacttggtacagaccctaaaactggccttaagcctcacactggtaccagtgaaataacaaaagccctcgcattttcacaaagaataccaaagatggacagtgtatagggcagactgcagggttgacaatggtgaaagaagaacggtgaacagggactgaattattgaggcagaagtgtggggtcacactggacagtaggaataatacaacacagaaagacatttcccacaagcctatgataaacc

SEQ ID NO: 156111 - DNA, 615 bp, Homo sapiens
gaagtaataacaaaggaaaagtttctgggcagtaagaacaaataattaaagtagacggtgtgcacagaagaaaagtggaaataaaatgacttataattttttttcttttactttttgtatcctgttcaacctttttaaccttttcaacagcaaacatgcatgatttttacttataaaaagtgaggtcatagtgaaaagtttagaaaggagatgatggaataaagtagaattcccttcatcagtaaccartaaaatcacaaacagcataaatacttactagcggaaaccaaaaaaactaagaaggcataattcactgtgttgagtttgaaatactatcagctaagggaaaaaaaaaggggggttttatcttgacttggtacagaccctaaaactggccttaagcctcacactggtaccagtgaaataacaaaagccctcgcattttcacaaagaataccaaagatggacagtgtatagggcagactgcagggttgacaatggtgaaagaagaacggtgaacagggactgaattattgaggcagaagtgtggggtcacactggacagtaggaataatacaacacagaaagacatttcccacaagcctatgataaacc

SEQ ID NO: 156112 - DNA, 322 bp, Homo sapiens
ctgctggtgtcaggtgtaaatttgcattaatacttcggaaagctatttgaagtatgtacttaagctaaaaatacagacacaaaactcacggattccattttttgtgtataatacctagatagatagctttaccaaagtacaggtactaaaatatttacagcattactgtttataatagccctaaactgcaaaggccacttattaactatacctataaacactgraatggataaataaattgtggtatgtttccataacagtagtatacagcagtgagaataaccatcaaaatccacacgcaacaacatggtgaagattgtaa

SEQ ID NO: 156113 - DNA, 566 bp, Homo sapiens
taagagaaacaacaacagaataatagatatcagaaacaagcattatattgttttgttggatttttttccaggaatcatgggttgcagagacagcatgttataatgaaaaaaggcaatagttcctctagttgaatgacttgggtccagattcctgagtcatttatattwaaaaatgtttaatattagaaatttttaagaatgacacaatcgtaaaagtcagattaaatgccttcgaaaattaagtaaattattaatgatttatagaaacctcaaaaggagtctatgattaaggaaagagttagaataacgttatggcgggagaagtatagaatgggaattaaaaaggaaatgttggaatacattaacaaattttgcctaacaattattcagttgttgcctaatatgtcttggctttaaccatatatttgtagaacagaaaagggtattatgatgtcttccaatcttctgctttgcattcaacagataacaattaaaattgtttggatgtgtaaaacctgcttaattttttaagagatttaaaaaaaaaagagatttcataaatagtc

SEQ ID NO: 156114 - DNA, 484 bp, Homo sapiens
ttccctctgacatagtctacccaaatcagaagggaccagaaaatcaattctgattaatatgacayagcaagcttctttaacatccccaaaagatcataccacctcaccagcaatggatccaaaacaagattaaatctctgaattgccagaaaaagaattcagcaggtcgaatattaagctaatcaagaaaacaccagaaaaaggtgaagtccaacttaaataaaagcattacacaaaatataaaaggaaaattcttcagtgaaatagatatcataaataaaaaaacaatcacaatcttgatttctggaaatcaaggacacactttgattaaatataaaatatgttggaaagtctcagcaatagaattgaacaagcagaagaaagagctccagagcttgaagacaaggcttttgaactaacctaatccatcaaaccaaagaaaaaaaaagtaaaaaaaaaaaaaattgaacaaaacctccggaag

SEQ ID NO: 156115 - DNA, 401 bp, Homo sapiens
gcaaaactaaacctcataaatgaaggaaagataccgtattttccagatacacaaatgctgagagaatatgccactaccaagccagcactacaagaactgctaaaaggagctytagatcttgaaataaattgactcaaaatataccaaatacactcaaaatataccaaaacagaacctccttaaaggttctgaatgaaaaaaaaaaaaacacacacacaaacacacaaggtattcaggcaacaaatagcacaattaatagaatagtacctcatatctcaatactaactttgaaagtaaacggcctaaatgttccatttaaaatacatagaatggaggaacagataacaattcaccaaccaagtttatgctactttcaggaaactcccctaacctgtaagaat

SEQ ID NO: 156116 - DNA, 476 bp, Homo sapiens
agtgcttatttcacttcatctctaaatccaggtggctcagagtagagagatagaatccatttgtttgggagaatgtaagggaaaaaagtaagagttctggaatttaaataattcttccatatcttgtctattattatcaaggtggtacctctatgagtctgcaaggaccacagcattacagggtttgtggtgcagccaaaagcagatacagcttagatcgtaacacccagttcttttgaagatctgaaagccttcccaagaaggatgagtactaacaagcccagactacaaagaacagcaatatatatctaactttttaatgcccagacacagaayatccacaagcaccaagacaatccaggaaaatatgacctcattaaattaagtaaatatggtaccagggaccaatcctggagaaatagatatatgtaacctttcagatagttaattcaaaatagctgttttgaggaaactcc

SEQ ID NO: 156117 - DNA, 599 bp, Homo sapiens
gttgcattggggcttaatgttgcttctgctgatagatttaatattcagtagcagccagagaaaagatcattgttggtgatggggattccatgtgcttgagcccctgcatattatttagccttcatcccttcataaaaaatgtatttatgtcttcattttaccagcattggtacaatggaggtaaagacaggggcgaaaagacagaagctggttaatattaacaggttgagttagtttgtctacttgcttttcttttcttgttgtttgtttttagtgcatctatgatgaagatctcttttgaaaattaatatgcaattaaaaattcttcacactttgcttactctcatatgtccatccacattattcctccccatagctttttstccatatgttctaatcttttttcttccaggattccaactaaccattctgtgaaactgtatatcttcttatttagggtcaattttctttatatatatatatatatatatatatatatatatatatatatatatctttatatatatgtttattttactatactttaagttctagggtacatgtgcacaacgtgcaggtttgttacatatgtatacatg

SEQ ID NO: 156118 - DNA, 599 bp, Homo sapiens
gttgcattggggcttaatgttgcttctgctgatagatttaatattcagtagcagccagagaaaagatcattgttggtgatggggattccatgtgcttgagcccctgcatattatttagccttcatcccttcataaaaaatgtatttatgtcttcattttaccagcattggtacaatggaggtaaagacaggggcgaaaagacagaagctggttaatattaacaggttgagttagtttgtctacttgcttttcttttcttgttgtttgtttttagtgcatctatgatgaagatctcttttgaaaattaatatgcaattaaaaattcttcacactttgcttactctcatatgtccatccacattattcctccccatagctttttgtccatatgttctaatcttttttcttccaggattccaactaaccattctgtgaaactgtatatcttcttatttagggtcaattttctttatatatatatatatatatatatatatatatatatatwtatatatctttatatatatgtttattttactatactttaagttctagggtacatgtgcacaacgtgcaggtttgttacatatgtatacatg

SEQ ID NO: 156119 - DNA, 612 bp, Homo sapiens
atgcacatgtgagctcactgcagtggtattctcaaaagcaaatacatgaaatgtacataaatgcccatgaatggtagactgggtaaaaaaaaaaaaaaaaagtggtatgtatacgtcatagaatactacacagccataaaaagactgagataatgtcctttacagcaacatgggtggagctggaggccattatctttacacagaaacagaaaaacatatactgcrggttctcacttataagtggtacctaaacactgagtatacatgaacacgaagaaggggaaaacagacactgggacctacttgagagtagggagtgggaggagggtgagaatcattaaaccacctattgggtcctatgcttactacttgggtaatgaaataaaatgtataccaaacttccatgatactcaatttttctatagaaccatcctacacgtactcctgaaacaaaagaagttaagggaaaaaaaagcgttttctcagtgtagttggacttcagatagcaagtcttccttgcttgactaaatcctggtctggttttcaataagtatcaaacttttttccatattgatgcacaaaatgaaattaacacttgatcactcatacatt

SEQ ID NO: 156120 - DNA, 394 bp, Homo sapiens
accatcaaagaggtacctctatgagtctgctagagtcacagcattacagggcttggggttccccctaatgtacgtatgagtgcagaaccaaatatttagatcacaacactcaattccctttgaacacttggaaagrcttctcaagaaggacaaatacaaataaacacaggctgcaaatattacaataaatacctaactcttcaatgcccaaacaatgataaacatccacaagcatcaagaccatccaagaaaacatgaccttaccaaatggattaaataaatcaccagtgaccaattccagggtaaccgagatatgtgactttctaggcagataattcagaatagctgttttgagggagctcaacaaaattcaagataccacagagaaagaatt

SEQ ID NO: 156121 - DNA, 394 bp, Homo sapiens
accatcaaagaggtacctctatgagtctgctagagtcacagcattacagggcttggggttccccctaatgtacgtatgagtgcagaaccaaatatttagatcacaacactcaattccctttgaacacttggaaaggcttctcaagaaggacaaatacaaataaacacaggctgcaaatattacaataaatacctaactcttcaatgcccaaacaatgataaacatccacaagcatcaagaccatccaagaaaacatgaccttaccaaatggattaaataaakcaccagtgaccaattccagggtaaccgagatatgtgactttctaggcagataattcagaatagctgttttgagggagctcaacaaaattcaagataccacagagaaagaatt

SEQ ID NO: 156122 - DNA, 537 bp, Homo sapiens
tctgagttcctgtgacatctggatgcttataagtatgtcgtgcctctcccctttctctcttgctcccactctcaccatgtgagacgcttgctacccctttgcctcccaccatgattataagcctttgcaggccctccctagaagcagatgctactgtcatgcttcttgtactgtctgaagaactgtgactcaattaaacttattttctttattaattacccagactcaggtatttctttatagcaatgcaagaatggcctaatacaataatagatcaaaaataatgacaacaaagtaaaatagcaagaataactctgccgattttttcgtyccttttcatttccacgctgaaaaattaagtccgaagacattatttgagagacagtaacagaaggatctgtctccaaaacagaggctaaatatatcatagcccagaacagggtgtgaaatcctgaccaaggttagtagagtatgcatgatgggcagtccagcacaaggtataaaagtctagggtaaggagggcatctgcaaaagagg

SEQ ID NO: 156123 - DNA, 549 bp, Homo sapiens
acagtctccctctgggaaaacccaaataatatttttactagaaataagccaaggaaacagatactcatgaagagattctggaattaaattatttgccagcaaaatgacaataaaaccacattctgatggtgaacagatgttataaatgctaatatgctgtagcattacagtcactaaggttcctacatgtgtgaaattaggatgggattacagacaaaaggagttgtgctgacctaggcaatccttcttccacttgtgaaaatagtggaaataatagttgtggggatgctagtgttgattggttaktttttgttaagcattgtcaatgcactcaagaagaaaattagaggcttaagtcaggcaaccccaaagtcagtaaattatgtgaaaaccagaaggtctatgaaagctgcaattccttatgagaagatttaaagataaccccataactattgcctgaaacaaggcacaggacttgattttctgaaagaagaattgcagagaaggtttgttcaaagctctggcaattttcacaaactaaacccatag

SEQ ID NO: 156124 - DNA, 445 bp, Homo sapiens
caccttatttttaacttaggtgatgaatactcattaacaatttcactgtaaatgtaagtatatgtctctttccttaaagcgattgaatcagcatctttgcatctgggtctcagcttgtgttgttatttgattgttgtgattttgttgtgtttaaagtttacatagttatggctgatgaaaatgatctagcaacagtggcggggggggtgatgttttatatagaatagatttttccagttgtgtgaaaaatgacattggtattttgataggaatattattgaatctgtaaactactttgggaagtatggccattttaacaatattgattcttccaatccataagcacagaattttttcccatatatttgtgctatctctaatttctttcagcagtgttctatagttctcctcgtrgaagtctttcacctcagtggctagatgaatt

SEQ ID NO: 156125 - DNA, 611 bp, Homo sapiens
acgttgacacacagtattaatcatcacagtgatccttaatggttccataaaaattttgaattttttttaaatttctgaaaacatgtcattgcaattttgatggagattgcaataaatttggattgctttgggtagtatgaatattttaacttatgagatttttaaatctatgaacacatgttgttttccacttatttctgtcttctctcacttttttaactaatgttttgcagtttttactgtataacgctttgcactccttggttaattttattcctaagtattttattacttttatgcttytgcaaataaggacgtttctttaatttccttttcagatagttcattgggaaggcatagctactcagttttgtatgttgatttttttatcctgcaactttacttaagttgcttgtcagttcgaacaatttttggtgaaattattagagttttatctataccagatcacatcctcaccacaaatagaacaaatttccctttctccttttcaattgagaccttttacttcttttttctttcctaattgctctgtttagtatttcgcatagtgtgttgaacagaacagtgtctattcttgcctccttgttcct

SEQ ID NO: 156126 - DNA, 611 bp, Homo sapiens
acgttgacacacagtattaatcatcacagtgatccttaatggttccataaaaattttgaattttttttaaatttctgaaaacatgtcattgcaattttgatggagattgcaataaatttggattgctttgggtagtatgaatattttaacttatgagatttttaaatctatgaacacatgttgttttccacttatttctgtcttctctcacttttttaactaatgttttgcagtttttactgtataacgctttgcactccttggttaattttattcctaagtattttattacttttatgcttttgcaaataaggacgtttctttaatttccttttcagatagttcattgggaaggcatagctactcagttttgtatgttgatttttttatcctgcaactttacttaagttgcttgtcagttcgaacaatttttggtgaaattattagagttttatctataccagatcacatcctcacyacaaatagaacaaatttccctttctccttttcaattgagaccttttacttcttttttctttcctaattgctctgtttagtatttcgcatagtgtgttgaacagaacagtgtctattcttgcctccttgttcct

SEQ ID NO: 156127 - DNA, 611 bp, Homo sapiens
acgttgacacacagtattaatcatcacagtgatccttaatggttccataaaaattttgaattttttttaaatttctgaaaacatgtcattgcaattttgatggagattgcaataaatttggattgctttgggtagtatgaatattttaacttatgagatttttaaatctatgaacacatgttgttttccacttatttctgtcttctctcacttttttaactaatgttttgcagtttttactgtataacgctttgcactccttggttaattttattcctaagtattttattacttttatgcttttgcaaataaggacgtttctttaatttccttttcagatagttcattgggaaggcatagctactcagttttgtatgttgatttttttatcctgcaactttacttaagttgcttgtcagttcgaacaatttttggtgaaattattagagttttatctataccagatcacatcctcaccrcaaatagaacaaatttccctttctccttttcaattgagaccttttacttcttttttctttcctaattgctctgtttagtatttcgcatagtgtgttgaacagaacagtgtctattcttgcctccttgttcct

SEQ ID NO: 156128 - DNA, 486 bp, Homo sapiens
aatatggtaagtacacggaaaaacagattattataacactgtaactctggtgtgtaaactagtcttaagtagaaagatgaaagaccaaaaaatgatacaattaaaaatagctataactgctcttcaagaygtaatataacaagatttgtaaagaaacaagaaaaagcaggaggatgaagttatgacatagagttagtattaatttttttggcttgtttgtttatggaaactgttgttatcagttaaaaataatgaatgataatgtattatttgcaagctttttggtaacataaaacaaacaaacatataaatacaatgggtacacaaaaataaaaagcaagaaactaaattacatcaccagagaaaacaatcttcactaagaggaagacagtaataaaataaagaagaaatagaacaccacaaaaaaacagaaaatgaatagcaaaatggcagtagtaagttcttactcatcaataataacactca

SEQ ID NO: 156129 - DNA, 486 bp, Homo sapiens
aatatggtaagtacacggaaaaacagattattataacactgtaactctggtgtgtaaactagtcttaagtagaaagatgaaagaccaaaaaatgatacaattaaaaatagctataactgctcttcaagatgtaayataacaagatttgtaaagaaacaagaaaaagcaggaggatgaagttatgacatagagttagtattaatttttttggcttgtttgtttatggaaactgttgttatcagttaaaaataatgaatgataatgtattatttgcaagctttttggtaacataaaacaaacaaacatataaatacaatgggtacacaaaaataaaaagcaagaaactaaattacatcaccagagaaaacaatcttcactaagaggaagacagtaataaaataaagaagaaatagaacaccacaaaaaaacagaaaatgaatagcaaaatggcagtagtaagttcttactcatcaataataacactca

SEQ ID NO: 156130 - DNA, 601 bp, Homo sapiens
atagaaattaagaaagtggtattaaattatttttctcattaattatagtttagccttgcttataacttctagaatttgttctttgtggggaaaggacatgttttaaatcatatccatataatacattttcctaaaatttcagagatttttgagaaaagataaaatttctttcttactacaggtgagcaacaataattcttgatgtcaactagattcctcacctacttgtacactttaagttaaactctgtagaagaccataatatgctacctaaaacagaatgtccatgtaatataatatagtctctataatctgagataagagatctttcaaaactacctgaatctttaagaattattaaaataaaaggaagtttaaaccaaaaaaaaaaaaatacagcaaaaatggttatttttcactgaaacaaatccattagaaatacgtgttttctgagtatattttatctcagaatgtagtcttaattattttgcaatcaacamgtacacatttacttacttaagacaaggatatagttacataataagaaataacattcaacaattgaaaatgaaaaattaaacataatccagaaagtagtata

SEQ ID NO: 156131 - DNA, 468 bp, Homo sapiens
attccttcgaaattgaaaacataaatgtaatttgcttgttcaaataaaaatatcccatgttgatgcaaaaaaaaatagaaacagaaatatgaagggyaaaattataaattaatttaaattaatgtagaaagcctaatctagtcgtaatgtcttaaaacatttatacttgtgaataaaacatacagcaacaatatcacaaaaatgagaggaaaagtaaatagaagtagctctttgatttattgcattattacagtaagtagtaaaataataattattagaatataacaaggatatatagaaatatctagggtactcaataaattaatagtaaaataatgtagaattaacaagtggggtgtgtgtaaatgtgaaaataacacaaatatgattaatttactagacagccaaaaaggaaaggcaaaataatataagaatggaagaaatagaaagcaaacgatgagatgactt

SEQ ID NO: 156132 - DNA, 468 bp, Homo sapiens
attccttcgaaattgaaaacataaatgtaatttgcttgttcaaataaaaatatcccatgttgatgcaaaaaaaaatagaaacagaaatatgaagggcaaaattataaattaatttaaattaatgtagaaagcctaatctagtcrtaatgtcttaaaacatttatacttgtgaataaaacatacagcaacaatatcacaaaaatgagaggaaaagtaaatagaagtagctctttgatttattgcattattacagtaagtagtaaaataataattattagaatataacaaggatatatagaaatatctagggtactcaataaattaatagtaaaataatgtagaattaacaagtggggtgtgtgtaaatgtgaaaataacacaaatatgattaatttactagacagccaaaaaggaaaggcaaaataatataagaatggaagaaatagaaagcaaacgatgagatgactt

SEQ ID NO: 156133 - DNA, 551 bp, Homo sapiens
acagcagtttgagaccctgacaggtgggtccatttaagctgtgtcttggcgccacagacttttgggctcagtgtaagacgctaggcctgaaagtttcccaagttaggctgttatggaggaagagggctacggtctggggggctctcccaggacttctctctgggctcctaaggtcacctgcatttytttgtgaggatgacagagagcggtggcgttgcagcttctttggtctccctttcagtgcctggggtggggcaggagtttggcctcccaaggggttcagggagggattcaggatggcttcttaacgtttttccacatctttctttaagaacccagaagaggagagaactgctgtgcgtctgaagtgatggcggaggtaagttgcatttgacattttcttggaaaggacttactggttttcgggacagtgtcctatttcagaaatttatctaaaatatttacattcatgatttggacaaaggggaagaggggaggaaactgcatttatgtagcattttcctaaagcagcctagggctgtctattttgc

SEQ ID NO: 156134 - DNA, 551 bp, Homo sapiens
acagcagtttgagaccctgacaggtgggtccatttaagctgtgtcttggcgccacagacttttgggctcagtgtaagacgctaggcctgaaagtttcccaagttaggctgttatggaggaagagggctacggtctggggggctctcccaggacttctctctgggctcctaaggtcacctgcatttttttgtgaggatgacagagagcggtggcgttgcagcttctttggtctccctttcagtgcctggggtggggcaggagtttggcctcccaaggggttcagggagggattcaggatggcttcttaacgtttttccacatctttctttaagaacccagaagaggagagaactgctgtgcgtctgaagtgatggcggaggtaagttgcatttgacattttcttggaaaggacttactggttttcrggacagtgtcctatttcagaaatttatctaaaatatttacattcatgatttggacaaaggggaagaggggaggaaactgcatttatgtagcattttcctaaagcagcctagggctgtctattttgc

SEQ ID NO: 156135 - DNA, 511 bp, Homo sapiens
aaagatttgccaattctgttgatcttttccaaagaccaacttttggtctcattgattttctctgttgtttttctattctctattttgttcattgctgctgtgatcttttattatttccctccttctggaagctttatgtttttgtttattctttattatctggttccttaagatatacagttagattgttgatttgagatatctctgtttttttttctttttttttttaatataggtgtttttagctrtaaatttccctttaagccctgctttagctgcatttcataagttttggtatgttgacttttcatttatctcaaaatattttttaattttcttcatgatttctttaacacgttggttatttaggagtatgttatttaattttcacgtttgtgaatttcccaaatttccttctgctgttgatatctaagttcattccattgtagttgcaaaacatattttgtgtgatttcaatcctcttacatttattgagggctgttttatggct

SEQ ID NO: 156136 - DNA, 511 bp, Homo sapiens
aaagatttgccaattctgttgatcttttccaaagaccaacttttggtctcattgattttctctgttgtttttctattctctattttgttcattgctgctgtgatcttttattatttccctccttctggaagctttatgtttttgtttattctttattatctggttccttaagatatacagttagattgttgatttgagatatctctgtttttttttctttttttttttaatataggtgtttttagctataaatttccctttaagccctgctttagctgcatttcataagttttggtatgttgacttttcatttatctcaaaatattttttaattttcttcatgatttctttaacacgttggttatttaggagtatgttatttaattttcacgtttgtgaatttcccaratttccttctgctgttgatatctaagttcattccattgtagttgcaaaacatattttgtgtgatttcaatcctcttacatttattgagggctgttttatggct

SEQ ID NO: 156137 - DNA, 458 bp, Homo sapiens
gaattctctggtgtcgaatgaggtttgacatctgaataaaagctttcccacattcactgcattcataaggtttctctccrgtgtgaattttctgatgtgtaatgagattttctttcctgctgaaggcttttccacattccttacattcatagggtttctcagctgtatgatttcgcgtatgtacggttagggatgaactctgagagaaggctttcccacattcactacatacatagggtttctcaccagtgtgacttctcatatgtataataaatactgagcattgagagaaagcttttccacatttattacatttatagggtttctcccctgtgtgacttctcatatgtagcgtaacagatgacattcgagaaaaagctctaccacattcattacatgcataaggtttctccccagtatgaattttctcatgctcaataagattttgcttctggctg

SEQ ID NO: 156138 - DNA, 458 bp, Homo sapiens
gaattctctggtgtcgaatgaggtttgacatctgaataaaagctttcccacattcactgcattcataaggtttctctccggtgtgaattttctgatgtgtaatgagattttctttcctgctgaaggcttttccacattccttacattcatagggtttctcagctgtatgatttcgcrtatgtacggttagggatgaactctgagagaaggctttcccacattcactacatacatagggtttctcaccagtgtgacttctcatatgtataataaatactgagcattgagagaaagcttttccacatttattacatttatagggtttctcccctgtgtgacttctcatatgtagcgtaacagatgacattcgagaaaaagctctaccacattcattacatgcataaggtttctccccagtatgaattttctcatgctcaataagattttgcttctggctg

SEQ ID NO: 156139 - DNA, 458 bp, Homo sapiens
gaattctctggtgtcgaatgaggtttgacatctgaataaaagctttcccacattcactgcattcataaggtttctctccggtgtgaattttctgatgtgtaatgagattttctttcctgctgaaggcttttccacattccttacattcatagggtttctcagctgtatgatttcgcgtatgtacggttagggatgaactctgagagaaggctttcccacattcactacatacatagggtttctcaccagtgtgacttctcatatgtataataaatactgagcattgagagaaagcttttccacatttattacatttatagggtttctcccctgtgtgacttctcatatgtagcgtaacagatgacattcgagaaaaagctctaccacattcattacatgcataaggtttctccccagtatgaattttctcrtgctcaataagattttgcttctggctg

SEQ ID NO: 156140 - DNA, 587 bp, Homo sapiens
ttttcaaactccagtttgcctggtagtctcctagaggacctattaaaacagatttctaggtcctatccgtagagtgtctgaatcattgtagcctgggaatttgtatttctggcacattccctggtgatactgatgctgctggtctatggaccatgatttgagaaccactgctctaaaggaaatttatgaagtgatatcacagaggagatattgagtaatctatgggaaaattcctttaaaagacgtccatagcatatgcagcaactattgcaatgtgaatgcttcttcagaacattatyagcaaaagtcaagggcacagatccgacttgtgctgacatgcttagtaatatgggaaaattttgcagtataattagtcagcatgatcctactatgtagacttctgatataataccctctttgtatgtgtgtgtatgtttactcaatggtggtattatttaatattttaactgcttttttgaggtaagactgacatacaagaagcctatacatgtttaatgcttcctactttatttcaaggaaagtatttagaattcataagggaataggtaatatttgaataacatatc

SEQ ID NO: 156141 - DNA, 561 bp, Homo sapiens
taacagtttccagtttgtttttccattttctctttattgtaattaactctatgaagaacatcctggtagccagatcttgagagcagacggcttggttatgggtcatataactcttactgatttaatgtcctcttgttgttcatgcctcagactttggaaggaattcatacccaaaccctgctccattttttacagttctccccacccagtgttgtcatggacagaagatttcatgatcatctaggcagaagttgtttaatttacagatgaagaagccaagttccacaaaatacaacttactaatccaaggccatggtgtcaggaagtctgcttctcagatgatgggcgtttcaaacagggcccatgccactgcaagcccactgtgtgctggagttttttgtctgagtctcgtctctattaatgggtagtgctcaaattcataaagccttcatgattttttttctgtgctctctcaatagtcctttgtttataactcgacgtrgccttgtagtttccctgagcactatcattatttatgtacattgcaatcttgcggagggt

SEQ ID NO: 156142 - DNA, 568 bp, Homo sapiens
acctgcagtcccagctacttgggaggctaaggcaggagaattacttgaacccaggaatccaggaggtggaggttggaaacaaaacaaaacaaaacaatacttactgactttggaatcaaagagactttgtttgaatttcagytctgccactgaattctctgtgagcctctgagaatgttgctgtaagcatacctcatttgctactctaacaaaagccgaggactaacagttacactgcttagcatgccaggggcagggggtacacggagcaaaacccagtgaggactctgttctcctggagcctacagttcaatgggtgtgatgaacctggtggatggaacgaggccgtgatttccttgaggatatattataaaccaacaagagtgccctgaaagagaggagcatgattatccaagagcttgtaacatagaaacctgctggataattgaaacagccattctaagtcctgctgggacacataccaggaggaggaactggcatactggcattagctaggtgaggggtgtggtcaaaggatgcagagaaattattccagacccagaggaca

SEQ ID NO: 156143 - DNA, 525 bp, Homo sapiens
gaattctctgtgagcctctgagaatgttgctgtaagcatacctcatttgctactctaacaaaagccgaggactaacagttacactgcttagcatgccaggggcagggggtacacggagcaaaacccagtgaggactctgttctcctggagcctacagttcaatgggtgtgatgaacctggtggatggaacgaggccgtgatttccttgaggatatattataaaccaacaagagtgccctgaaagagaggagcatgattatccaagagcttgtaacatagaaacctgctggataattgaaacagccattctaastcctgctgggacacataccaggaggaggaactggcatactggcattagctaggtgaggggtgtggtcaaaggatgcagagaaattattccagacccagaggacagcatgtcccaatgttctgtggaggaaaaggacaggacaaaaaaaatcaaggaatacaaaaaataaggtaaaagttggtgcgagacgattctgaagaggcgggcaggga

SEQ ID NO: 156144 - DNA, 538 bp, Homo sapiens
gaattctctgtgagcctctgagaatgttgctgtaagcatacctcatttgctactctaacaaaagccgaggactaacagttacactgcttagcatgccaggggcagggggtacacggagcaaaacccagtgaggactctgttctcctggagcctacagttcaatgggtgtgatgaacctggtggatggaacgaggccgtgatttccttgaggatatattataaaccaacaagagtgccctgaaagagaggagcatgattatccaagagcttgtaacatagaaacctgctggataattgaaacagccattctaagtcctgctgggacacataccaggaggaggaactggcatactggcattagctaggtgaggggtgtggtcaaaggatgcagagaaattattccagacccagaggacagcatgtcccaatgttctgtggaggaaaaggacaggacaaaaaaaatcaaggaatacaaaaaataaggyaaaagttggtgcgagacgattctgaagaggcgggcagggaggaagaacgcaag

SEQ ID NO: 156145 - DNA, 504 bp, Homo sapiens
gcaatgaagaccaacataaaccacaaagagatgctatgcttacccttcacttctcacatgcaggctgtcagcaaggctgtaagttctgttttgaaaatgtcttgaacctgaccatctctgttgctaccagccaagtctaaggcatcgtcatctccatatgcagtaatgcaaaagcctgtttacggatgtttctgcttccctctatgtcaatccatcccctcacacagcagcatgagagatcttcttaagtttgaattgcattgtgtcagtatttactaaaaatcctgcacacccagaactcttagtggataatccaaactggtctccaggcctttgcggcccagcatgaccagctctttccttgctcatcaatgtcgtctcatgcttttccacttgtggcctgccatactccaacyacgttggttttccctctgtacctggcatttgccaagctctttcccacctctgggcctttgcatatgcagtcccctccatctagaattc

SEQ ID NO: 156146 - DNA, 421 bp, Homo sapiens
gccgctgaagcaaaatgtaaaccaagatgcccctgcagtggttgtgcttcactctacgacatctgttaccggaaaggggtccagattcagaccccaggagagggttcttggatctcgtgcaagaaagaatttgagacgagtccataaagtgaaagcacatttattargaaagtaaaagaataaaagaatggctactccatagagagcgcccctgagggctgctggttgcccatttttatggttgtttctggatgatctgctaaacaggggtggattgttcatgtctcccctttttagaccatatatggtaacttcctgatactgccatggcatctgtaacctgtcatggtgctggtgggagtgtagcagtggggacgaccagaggtcactctcatcaccatcttggtttgggtgggtttta

SEQ ID NO: 156147 - DNA, 461 bp, Homo sapiens
  misc_feature (1)...(461): n = A,T,C or G
ggcagagcccaggacatttgaggcagaacagatgtattccccttggtcgctgggcctcagcgcctcgatgtccaccctcagggcattgggggaagccaggacatggatgtgtggctctgcaggagcaccctggggctgactggaggccaccagtcgactgccaaggtggagagtcaggctggcgagcggctcgctgtccactcggcaatccaggatgccccggaggccaccctcaggctccacgaagaccatcatggtgggcgtcttgggagggtctgtggggaggaagggagtgtggtgattgcagamaatgaccacaaatttctccctccctgtacccatgcacagtgactttgctgctcctccattaagaggcagaacctatttgctcactccttgaatctgtgactcagtttgaacaattgaagagagaagtgatgttgtgcacnnnnnnnnnnnnn

SEQ ID NO: 156148 - DNA, 607 bp, Homo sapiens
tccatttgtttgtgtcctttcttatttccttgagcagtggtttgtagttctccatgaagaggtcctccacatcctttgttagctatattcctaggtgttttattctctttgtagcagttgtggaggacagttcattcatgatttggctstctgcttgactattgttggtgtataggaatgcttgtgatttttgcacaatgattttgtatgctgagactttgctgaagttgcttattagcttaaggagaatggggctgagatgatggggttttctaaatatagaatcatggtatctgcaaacagagacaatttgacttcctctcttcctattggaatacactttatttttttctcttgcctgattgctctggccagaccttccaatactatgttgaataggagtggtaagagaggacatacttgtcttgtactggtttcagaggaaatgctcccattttttctcattctatatgatattggccatgggcttgtcataaatagctcttattattttgagttacattccaacaatacctagtttattgaaagtttttagcatgaagggatgctgaattttattgaaggccttttctgcatgtattgagat

SEQ ID NO: 156149 - DNA, 345 bp, Homo sapiens
gtcatttatgagaataaaaaatttgaaagcatcctaaatgtttaaaatgaggaatatgttaataaattatggtacttagtataattaagtattattaaaggatgtaaaataatgtacaacaatatttaatgacatggaaatatacttagattatattgttgtttgaataagatacatttcacacacacacacacacacacatacacacacacacacacctgytcactcacaagtaaccaaacattgtaggatgtgtactatggagtcttatttggtatttaatgttaggataattttgaaggtatcccaaaggatttaaattatagttttaaatcatttttatat

SEQ ID NO: 156150 - DNA, 519 bp, Homo sapiens
ttttgcgggacccagtgcaatatgaaaatgggagccctttgttcaaaatgcaggaagaaagtattattaaaatttaaaaaatataaaactttttccttccaaggtctccctgttgacctctcatgaagttttttgactttttaacactgcaatccctcaggcaggtgaatacacacagcctgctgagcctcacaggcgcctgagcggccagamcaatttgtcagtctccctcttccacacccatcactccagtcacgatggacgggaggtcctgagagagtccaacctccacggggggacacactggggaccttgatcaggaataggtaacaggcctctccccaggttgcttatcaaatgttctgtggtgttgctaatcctgggtgaggagagctgctgcaatactccaaggttctatggggtgcaggctcacccaaccccaccccttcccatgtcctccccaggcacctgccaggggtggcaggtagtggcaggatattggcctccccctgctgtcct

SEQ ID NO: 156151 - DNA, 519 bp, Homo sapiens
ttttgcgggacccagtgcaatatgaaaatgggagccctttgttcaaaatgcaggaagaaagtattattaaaatttaaaaaatataaaactttttccttccaaggtctccctgttgacctctcatgaagttttttgactttttaacactgcaatccctcaggcaggtgaatacacacagcctgctgagcctcacaggcgcctgagcggccagaccaatttgtcagtctccctcttccacacccatcactccagtcacgatggacgggaggtcctgagagagtccaacctccacggggggacacactgggsaccttgatcaggaataggtaacaggcctctccccaggttgcttatcaaatgttctgtggtgttgctaatcctgggtgaggagagctgctgcaatactccaaggttctatggggtgcaggctcacccaaccccaccccttcccatgtcctccccaggcacctgccaggggtggcaggtagtggcaggatattggcctccccctgctgtcct

SEQ ID NO: 156152 - DNA, 564 bp, Homo sapiens
cattgtattgtatgtttaggggtaaagtttatgagataaagaaaatatgcatcttcaaatttgctagatattgccaagttgttctccaaacaattttttattctaccacagtatataagagttctactgtttcatatawtttgctcacatatgccactattaaacatttaatgttttgccaaactgataagtctgcaattatatctaattgtggttttccccttgtaagggaggctaggcaaccttccatatgcttataggacaatattttttctcttttctgtgaattacctatttgtatcttcacgctatttttctactgagttttcttatgtgttatttctcattaatttgtaagcatttcttaaaaattatggattataatttgttttgttatatgctttgcagaaacccttctcagtttgtggagtatcttcttactttatttgtaatgtttgttgtgtaacattggtttaaattgaaatacactcagctatatactttatttaatagtatgtgcatttgtttcttatttatcctacctcaaggttagaaataagatct

SEQ ID NO: 156153 - DNA, 525 bp, Homo sapiens
cgaatcagaacagaaatgagcattgctgacatgaccttgaagtttccataatcaccagcttctggtattatttgagagtagatttagaacacttatgctggtgttgttttcacttacargtaaccctcaaaagattagcagcccttctttactgctgttaattttgtcattgaccaaactcacagcaaaagatgcaaccatcaactcctaactcaaaagagtgaacaacaaagtctgcatatgaaagcatggtcttcagaatttcatgctcagccaggtatttaggctgcaagacctaccttatctcggagtgtagatgcttggatttgctgcttacaggtcagcaaatcatgcgtagttagctctgttttatttaaacaagtctggttacaaactactgtacagtacttctgcacaaagttatactacgtctctatgttccctaattcacttaaggaaagagcaatcactttcaaggtttcacccaaatcattcttttaagctattcttaacaccctgagcttt

SEQ ID NO: 156154 - DNA, 612 bp, Homo sapiens
atacttgtactaaaactattttttgtttaactgaaattcaactttaactgggcactgtattttatctgaaacacttacttggctttatgttttctagcttccacactccttatattagataacagtgctctcatattttgaatgtattaattccatattttacttacatttgaacaaattacttttctacattatgtttatgtttgaaatgactttaagtttattctactaaattacttaattcaaaaaacaaacactatataaaacacattttcttattyagatagtccataaattaaaaatcagtcaattcttgatgagaaattgagcatctctttgttttatacttttaaagatgaaataccccatgattctgattttaggaaatggtgtgaaacccagagaaaagttgtaaatatagtgaaggtctttgctattcagatggaatggaaaaagtttaagccaaaaaaaaaaaaaaaaaagaatggtcacattcacaaatatattgggcttgtactcattatgacatcattaatagccaattagaaagttctcttggtattcagccttctgactccgtttcacaataattggtattgatagcattttatt

SEQ ID NO: 156155 - DNA, 505 bp, Homo sapiens
ttgtgtatacaaatatgtaatatatatgcatgcactcccaacaccccccccacacacacacacatgtwcacacacatttccctgtaacagagatctgattgatttacaaatggaagactggaatctttccctcttggaccttccttacaactatagcagcctttgaggcacttattggacttcagtctttttcaacgtggagataattaagcttttatgccctaagttatacattgtatgttagaattaacttctctcctatgcatttagtatagcagcaattatgtatcattcttagagaattaagaaagtagtcactaagttcattttatgtgttccgcagttgagatgagaaaatctatatggctaccagtaatttgaaaaccactgatataagagatggttataccattacacagaatagatttgtcaaatagactacaaaatttctgccctttcccctttacgttcccataacagacattgttaatcaatcatgggactc

SEQ ID NO: 156156 - DNA, 651 bp, Homo sapiens
ggcaaccaacacagtttcatatggtaatgagatttcccccctgtaggagggctatgaactgctaattagcatctatgacctaatattctctagcaaccaagagtaatagcagtaatttccagttttatgcagagtacaagcctctaatattaccaacacttttgtttcatttataattaactgcacacaattattacagtcaagaaagtaaatcctaatgttcctaggtaataaaaaaaagaaattatgtttgtaaaacttgtatgtgtgtcatgctgactgactggasttctttggaagccctgaggatctttatcaatcaattaatttttctttttgtctataccgatatcacccttaattttaatttgtaattcctagtttactacttaattctttgttctttgcttgaaaactcatatttattagacctgcttttaagttcatgaacaaagaagacatttaaaagctagtaactagggcaaaatgttctgatattagctgacaatgtgtttcaagagaccggtaatgcatacttcttagatagggatatactttgcacaggaagaatgttttatgaggtgggaataaaggaattttatttgaggttctcccatgaaagttatgcttctgtgaatgtcagtaaaattg

SEQ ID NO: 156157 - DNA, 558 bp, Homo sapiens
aaaaaataaacagagaacctttaaaagccgacatatacgaaaggaccctaaagacagtaggtgcttaggaaaagcgatttagcactagagggtgtgtgtgtgtgtgtttgtgtgtgtgtgtgtgtgtgtgtgtgttgtttttttgttttgagacagggtcatcctgtgttacccaggctagtttctaactcctgggctcaatggattctccccactcagcctcctgagtagctgggactgcaggtgcgcaccactgcacccagcttacttgaggtaaatttttaatattgcactgtttgagcttgaaaagatcctttgtagttgatttggctagagagggagtaaagggactgtacaatataatcttccagttttaagcacatggattcatgcatgatcaaacacgtccttcacatatgagtatatgcacatggctatgatgttttaattgayagcttttgcttgtttgcttttttatactgctcaaagaataattttggctgaccactcttctatttatttaagtcaggaatttttgtgccagaaagatggtatctg

SEQ ID NO: 156158 - DNA, 426 bp, Homo sapiens
tgcctccttgtagcagggtaaaatgagtgagtaccttgtctaagaaagggaacatgaccaaactgaacccagaagacataggaaatctaaacagatcaattaacaccaaagaaaygggcattttttggtacttctaaaaaagtaccagactgatattttcacagagatgttcgttatacccttaaggaacaggaacagaaaacttctatactatttaaactattttagaggatagaaaaggaaagaaaactccagattttatttatagaacttgcatgaaattgataccaaattctgacaatgcaagttcaaaaaggaaaactagagatcagtgttacttatgtcaaacagctcttaatagaatagatggatatggttatcaacatgataaatatgtttatcacattttaaagcctacatggagaa

SEQ ID NO: 156159 - DNA, 436 bp, Homo sapiens
aaacctgggttgcctccttgtagcagggtaaaatgagtgagtaccttgtctaagaaagggaacatgaccaaactgaacccagaagacataggaaatctaaacagatcaattaacaccaaagaaacgggcattttttggtacttctaaaaaagtaccagactgatattttcacagagatgttcgttatacccttaaggaacaggaacagaaaacttctatactatttaaactattttagaggatagaaaaggaaagaaaactccagattttatttatagaacttgcatgaaattgataccaaattctgacartgcaagttcaaaaaggaaaactagagatcagtgttacttatgtcaaacagctcttaatagaatagatggatatggttatcaacatgataaatatgtttatcacattttaaagcctacatggagaa

SEQ ID NO: 156160 - DNA, 338 bp, Homo sapiens
cacaatagccaagttacagaaacaagcttagtgtccattgacagatgaatgaatggataaggaattgtgtgaggtgtrtatatacacacatatatacataaacatatacaatggagtattattcagcctttaaaaaaggaaattctgacttttgtgacaacatggatgaccccgaaggacattattttaagtgaaataagctaggcccagaaagacaaatactgtatgatctcacctatctgtggaatctaaaaaagtcaaatacatagagaagaaggtgagcagagagagggttaggaataggaagatgttggtgaaagatgttggcatttgtgtag

SEQ ID NO: 156161 - DNA, 566 bp, Homo sapiens
acagctagttctccactgcagtgtgtcctaggaaacactctaagatccactgttaaaccttatgagagcttcagattctatattgctcccyattttactgggcatgagtaggaagttttaggaaggaaaataaaagaatatcagctgcatagacttgaagcagtaacacttgcatttataagtgtgagtatagttttaaaaatctatagattttatgcaattgtaaatatatgaattcctcgctattaatatttgtttcagaatttttaaaaaaattgttgagttacttttcttttgttcatttcaccattaattagacccataatgttgtagacattatttggattatattgacattttatcagattgaacatatctgtattacttagtaaggtaaaaagcaaaaacaaaaacaaacttttccagaaagaaaaaaaactgtgaatcaaaactacaacaatatattgaacatttcatagatgatgggttcatagataagtataaaaacattcattaaaaaaatctttatcactctttgaaaaaggatatattatcacccagtgttt

SEQ ID NO: 156162 - DNA, 428 bp, Homo sapiens
tctgaggtatacagagcgaggatttcaatacaggaatttgagggccaaggggcatgatgttgagcacctaggagtcacactgaattctgtgtagttgcttgaccatggtttgcctctagttttgtaaatgcttcctctctccagactttcttctccaggctaaatcttatatgttctttaaggctcaattcaaatgggaagctttcccaacatccatagcctgtttgcctcctcttgtttcctcygttgaactccacacttgcaccatcatggcactcccctgtatcaaaattgtaactgtttacttctcctccccgtgccccaaacataccctcacacaggatactaagctcttggctcccgaaagtcccacttaacagcgtctgtggcttcacagttaaagcatttgaaggatggctagatcttca

SEQ ID NO: 156163 - DNA, 629 bp, Homo sapiens
gaattctgatactgtggttgaggaatctggtgatcccataggtataaaaagtggacaagggacaccttkcagccagatctctcacatctcaatccatttgccacatgtgtagatacgggtctgcagaatagtgatttgactaagttcacacttctctgaacttcacacttgacatgggcattaagtatgattatgcagactgcatactgcctaattccagattaggattacacagtgcacagctgaaaggctcagtgtggccttgctagcttgttggggctctcacagtaagaaatctcctccagctgggtactagtttgatgtagtatcagtgatgattatagagtggattattataatggacagctaagtaagggactataacaatgaggtaattattaaaagatagagtatcctttttattttaaaaaaattctagaatacagttttttcattaatgtaagaagcaaggaaactgtaaatcagctctaaatttgaaaggaagcctttatgtctacttacccatgaacagtcagcttaacctcatattttaaaggtattgctacagtcactctgctgtgctttagattgtccatttcctcttcattttcactatacaaacagaaaac

SEQ ID NO: 156164 - DNA, 436 bp, Homo sapiens
acacgtctggttaatcagaatacatcaaatgaggcactgcccttcctggaagggcaacttaaagatgaccaagcacttttgctcttttcccttttctcttgcttggaagcttgatgctgcttggctatactgtgatcatgaggaaaagctgagagagctggaaagataaccatcaatgtctagtctttggtagctgttcaccaaacctgtgaacatccttcctcaagactgcttattatgcgaaataatatctttattgttyaagtcactattagttaattactctaaaacttgcaattaaaagtattcctagcagatacagaagcaattgttcagggaaagcttacatcactcattctggaagcacaactgaggtgcagaaatgtattgcggtatcatttacatgagtttcaaggatttgattttaaactcccta

SEQ ID NO: 156165 - DNA, 542 bp, Homo sapiens
tggaaatcaggctttgcactaggcacttggcctgcattattaccctttaagacaaccttaatgagtcggtactatttttacccacttagcaatgaggaaagaggtctagagaagttaaaagtcttctctgaaaaggtcactagtaatacagtagatatgggatttgaaccaggtcagwttgacttcaaatctggaagctcttcaccaccataacattggttcttaggtttcagtgtgataagaacttggagctctattaattgtgaagatctgtggcctggtcccctttagttctgacgtggatggtctggggcctaggaatctgcatttctttcaagcatccaggtgattctcataaaggtggctcagagacaacaccttaagaaacacagccttatacttcatttaaaatcattatgccatttaaaaatcataatgggtttgataggctgcaagaaatattatcactctaaattaaaaatgcaaagcagatattttgttgtgagaaaacatgtaacaaagaaaaataattcattaagatg

SEQ ID NO: 156166 - DNA, 449 bp, Homo sapiens
aaaaatctgctcttcagttatcttcatttgatcctgtattctagactagactagtggtgattgtaagctcaattatcttaaagtgactatggggcaattttgtctggacaggatgtgaactagacctttaaatgtccctttcatcttttacattctgtgtgtcattagtgaacattttaatgaaggctttttactatgcccagacacatcctgtttttggacaaacmctatgtctttgtgttgatagacactaaaggtctgaacaacaggactcctgagaataaatacactgtcagtgaaacttaaatattttgagataatttagaaaacggttcactggttagaatgtaggatccatctcaaatgcaattgatcctgggatgtggctgaaaagcatataatgaaatttttaaaaagaaattattgtataacataaatacatgtgtctg

SEQ ID NO: 156167 - DNA, 579 bp, Homo sapiens
gctgctggttccaaaggccagcttcaatcatgtcactcctcaactcagaaaccttcagtgtttagtattattccctaaattaagagtaaattttcctcgacaatcaagacgctacactataagactgcaatctgacatttttgtctcattcattatacataccattcattagagccaaattctttggaatttgttttgctgctagttttctctgtatatcaaaattatgcttatccttcaatagcctccwggcatgccatttcctttatgaaatgtcttctgttataattagattttttttttttgcgtctcgatattgtaaagcagtttctacttctcagtcatttatatgcttgtgctaagccttccctataactgtgggcttattgaagaaagggaatgtgttttgtgcacacactgccttgccccttttcaccttttcgctctttgcacagtgtgttgtctttagtagaggctcaataaatatttgctaaattgaattatcaaaatgatttattggattttcaaagctagagatcatgagtttgacaattttttatgtcctctgaggtctaatca

SEQ ID NO: 156168 - DNA, 579 bp, Homo sapiens
gctgctggttccaaaggccagcttcaatcatgtcactcctcaactcagaaaccttcagtgtttagtattattccctaaattaagagtaaattttcctcgacaatcaagacgctacactataagactgcaatctgacatttttgtctcattcattatacataccattcattagagccaaattctttggaatttgttttgctgctagttttctctgtatatcaaaattatgcttatccttcaatagcctcctggcatgccatttcctttatgaaatgtcttctgttataattagattttttttttttgcrtctcgatattgtaaagcagtttctacttctcagtcatttatatgcttgtgctaagccttccctataactgtgggcttattgaagaaagggaatgtgttttgtgcacacactgccttgccccttttcaccttttcgctctttgcacagtgtgttgtctttagtagaggctcaataaatatttgctaaattgaattatcaaaatgatttattggattttcaaagctagagatcatgagtttgacaattttttatgtcctctgaggtctaatca

SEQ ID NO: 156169 - DNA, 636 bp, Homo sapiens
gcactcagggagtcattctctggcatggtctttgagtacagagtgattttgctgattaaaagcaaatagattgacttttaaaatcaactcatacamacaaactgttaaaatcctctaatgagagtgaagaaacctaaccaagactgactgatacattactgctccatctctgcaccaaagtggactcagggaggcctgtaggagatgccaactccttatcctactccccacaaagacagttcttggctatcttcatcagacacaaatgaatggttgaggctccaaagctctctaccaattcttgtgttacactggcacttttaaaaaattttgtttattttttatttttaaatggagtctcactctgtcaccctggctggagtacagtggcgtgatcttggctcactgcaccctttgcctcccgggtttgagcaattctccctgcctcagcctcccgagtagctgggattacaggcacccgccactacgcctggctaatttttgtattacttagtagagatggggtttcgccatgttggccaggctggtcttgaactcctgagctcaggcaatctgcccaccttggcctcccaaagtgctgggattacaggtgttagccaccgcacctggctggca

SEQ ID NO: 156170 - DNA, 636 bp, Homo sapiens
gcactcagggagtcattctctggcatggtctttgagtacagagtgattttgctgattaaaagcaaatagattgacttttaaaatcaactcatacaaacaaactgttaaaatcctctaatgagagtgaagaaacctaaccaagactgactgatacattactgctccatctctgcaccaaagtggactcagggaggcctgtaggagatgccaactccttatcctactccccacaaagacagttcttggctatcttcatcagacacaaatgaatggttgaggctccaaagctctctaccaattcttgtgttacactggcacttttaaaaaattttgtttattttttatttttraatggagtctcactctgtcaccctggctggagtacagtggcgtgatcttggctcactgcaccctttgcctcccgggtttgagcaattctccctgcctcagcctcccgagtagctgggattacaggcacccgccactacgcctggctaatttttgtattacttagtagagatggggtttcgccatgttggccaggctggtcttgaactcctgagctcaggcaatctgcccaccttggcctcccaaagtgctgggattacaggtgttagccaccgcacctggctggca

SEQ ID NO: 156171 - DNA, 578 bp, Homo sapiens
tgcaccggtaattagatcggaacaaaacaggatagggattttcacagtgcttttctatacaatgtctgtaatctatagataacataaccaattaggtcggggtcgatctataactaccaggcccaggatgtggggccaggctgtctgcttgtggatttcatttctgccttttagtttttactttttctttctttggaggcagaaattgggcataagtcaatatgaggggtggtctcctcctytaattctactttatacatccatgtgaacacatttttaaagcactgatttatgagtaagagcatgtgttattttactttctgtgcctggcttgtttcatttaagataatgacatcccccaccagttccatccctgttgctgcagaatacatgatttcattttttttttttatggctgaatagtattcgtgtgtgtgtgtgtgtgtgtgtgtgtgtgtgtgtgtgtgtgtctgtgtgtgtgagagagaacctctttgacacagaacaggaattggtattaggaagggaaatttgggggtatgacctctgttgttaatgagtctatagagcatgggaat

SEQ ID NO: 156172 - DNA, 583 bp, Homo sapiens
tgcagtaagggctgagaatgtgcatttctgcaaagttcccagaggacccatactttgagaacagctggttcaggagaagagtattccagcgagaaaagctgagtcaaaaggcctcaagaatgtacctggttattttaaagaacaatggggaggcaaggatggctagaaatgtaagcaaagggaagaatggtggaagaagagatwatatagaacctgtggctttttctctgagagaaagggggatctataacagcattttggcagagaagtcacatgatctaacatacgtatacaaaggaacactctagctgctgtgttgtgaatagagtaggagatcaagattcgacacatggagaagaggctactgtggcaacacaggtgagaggatggttccaacaaaagtggtggcagtggatatggtaagaagtagttgaagtcaatttgctgacatccaatttacaatttgctgagagactggatgtctggcatctgagaaagaggctctgtgatgactccagggtctttagcctgagccacttggaaatgtagttttcatcaattgagacaatattgcaggagaaca

SEQ ID NO: 156173 - DNA, 538 bp, Homo sapiens
cagtcctcatacataaactaggaacaatgtcaaccatgacccagggttgctttaaggggaaaaaagttaagcaatatatatagcagtaacactttggaacaagataggtcttgttatttaatattccttcytctttccccacttgcctgtgtgcaacaaacttgtctttggctttgaaacatgaaacttctcccctctatcagtacacatttttcaacttgtcacaaatctgagacattgagaaatgactgcaaaaagatggacccatataacatgagttttggatgacggttttgggaatggaaaattatactacattaacgatgaagatgccaattttccttttcttttagattgtatattgtaagtaaaactatcacttttttttttaggcctttaggttaaacgacgggatatgggatcaattccaattgctattcctgatatgctccttagcctgttctttaagagggttgataggtcaaagatggaaataaaattctcaagtcttggcttagctggatcctgtccttaatac

SEQ ID NO: 156174 - DNA, 314 bp, Homo sapiens
ggccagggagagcatgtgtcagcacagaaaaaaytaccatttataaaaccatcagatctcatgagaattcactctctatcacaagaacagcataggggaaaccgcccccattatcaatcatctcccacctggtctctccctcagtacctggggattacaattcaagatgagattcgagtagggacacaaagcctaaccataacagcatctaaccaggttcaatgacaacataaggaagagtttaaaaggcatgcctaaatttgaaaatagagtttaggtggaaataacaggtgagactattttgttaatggtat

SEQ ID NO: 156175 - DNA, 574 bp, Homo sapiens
gcaatattttatatttaaatagacctggctctatgataccaatctcagaggtttgctgtgaggatcacatgagataaatcttgtaatgggtggtccaacaggcttttgtacaaaaattttgtcttgtcattgttatattttgttggttggtttattggttttagaatagctgacaacggcatctctgtctgggttggggcagggaccacctcatgctatccttgttatataaattgtcaggccgacagactacccacttctgggaaaaaggaaaggtataataggacttttatttaatatggcaaagacagataatcccttaggcgtccagaactttagacagtgggaraatcaatttgcagaaagcacccagagaccctcctgggaagaatggactgagagcccaactcctctctgagacctggagctggtacctgtgaaagcccagtgtcagagaagggtgtgaacaatcttgaaacaaaggtatcttgagagcagaaacagaacagcaggctgctcagtacagagtattaagggagaaatgggagagaatagttctaggtttaggacacaa

SEQ ID NO: 156176 - DNA, 420 bp, Homo sapiens
aaggtgccagcagtttcagtatcttgtgagggtccatttcctggttcatacagggtcttcttgctgtatcctcacatggaggaagggtggagggctctatcctcatgacctaatcacctcccaaagaccccacctcttaatgctaccatttcattagttaggacttcaacatatgaatttcggatacaaacattaagaacatagccattttccttttaatatattgccggattcaattttctataattttgtttttgtttttcttttaattgacattttgtttttaattgacattttgctcttaattgacatttacyagagatgtagattggtaattatctgttctcacctctgcttttctaatgtctgtctgactggtagcagtgtaataatgccttcatcactgaataaattgggaag

SEQ ID NO: 156177 - DNA, 609 bp, Homo sapiens
acaaatatacagttagatagaaggaataagttcttagactgtgaatttcttaagagaaaaaaagaaggaataagttctaatgtttgatagtagaatagggtgactgtaattaacaacaatgtattacatatttcaaaatagctgaaagcaaagacttgaaatgttcccaacacacagaaatgataaatgtttgaagtgatggatatccttaacaccctgacttgatcattacacattctatgcatgtaacaaaatatcagatgtatcccataaatatgtaaaaatattatgtattaataaaaataaataaaaattttwaaaattttaggtaatttataacgtgcagccagggttgaaagccagtgctccaatttcctggtctttattattaaaacccatggtttatgaatacattacgctaaagtccaacacagcagttctgggtgctgttgtgagccatggtaaacaaggggtgtatctgagccccagctctccagtgatcagcaaggacaggccacctgtgcctccaggggcagcctctgtagagtcacagatcctctcagtgcggagaacctgtcttggttcctcaaggggaaccaagggaagata

SEQ ID NO: 156178 - DNA, 609 bp, Homo sapiens
acaaatatacagttagatagaaggaataagttcttagactgtgaatttcttaagagaaaaaaagaaggaataagttctaatgtttgatagtagaatagggtgactgtaattaacaacaatgtattacatatttcaaaatagctgaaagcaaagacttgaaatgttcccaacacacagaaatgataaatgtttgaagtgatggatatccttaacaccctgacttgatcattacacattctatgcatgtaacaaaatatcagatgtatcccataaatatgtaaaaatattatgtattaataaaaataaataaaaatttttaaaattttaggtaatttataacktgcagccagggttgaaagccagtgctccaatttcctggtctttattattaaaacccatggtttatgaatacattacgctaaagtccaacacagcagttctgggtgctgttgtgagccatggtaaacaaggggtgtatctgagccccagctctccagtgatcagcaaggacaggccacctgtgcctccaggggcagcctctgtagagtcacagatcctctcagtgcggagaacctgtcttggttcctcaaggggaaccaagggaagata

SEQ ID NO: 156179 - DNA, 444 bp, Homo sapiens
ttttcacatctgtataatagaggtggtattgtttcacttccatttgtgaagtttaaatgagatytgttattgttgtttttatgttaatccctagtacatggcctgctgtaaacacccagaacacccaggatatggtcattgctgttcgattttcctcatccccagtctcaaggggaagccaggacaatgagaacagtcacttggcacaggagtcactgaaagggccacagggtgctgtggtggggagataagaaccatgagagaagttggcacaaaggagttatgggacaaagggtccaagataggcagaaaagaaaattgtgccagttgatggggaagaaaagaagtcagagggcttagatactgagtgggacagaacatcttcatgtgcactctcatctcttgtagtcagcaacaggtatccacggggagagccctacatca

SEQ ID NO: 156180 - DNA, 389 bp, Homo sapiens
agatctctaccacgaaaactgtaaaacagtgatgcagaaaattgaagaagacacacaraaaaggaaaagatactccgtgttcatggattggaagaatcaatattgttaaaatgtctgtactacccaaagcaatctacaggttcaatgtaatccctatcaaaataccaatgacattcttcacagaaatagaaaaaaaaaatcctgaaatttgtatggaatcacaaaagagacagaatagccaaagccatcctgagcaaaaaacaaaactggagaaattgcattacctgacttaaaattatactacagtcacttcctggtcttttttggcttagatcaagtgcaaagtttactagaaaggtataccaaaacagcatggtactggtataaaa

SEQ ID NO: 156181 - DNA, 389 bp, Homo sapiens
agatctctaccacgaaaactgtaaaacagtgatgcagaaaattgaagaagacacacaaaaaaggaaaagatactcygtgttcatggattggaagaatcaatattgttaaaatgtctgtactacccaaagcaatctacaggttcaatgtaatccctatcaaaataccaatgacattcttcacagaaatagaaaaaaaaaatcctgaaatttgtatggaatcacaaaagagacagaatagccaaagccatcctgagcaaaaaacaaaactggagaaattgcattacctgacttaaaattatactacagtcacttcctggtcttttttggcttagatcaagtgcaaagtttactagaaaggtataccaaaacagcatggtactggtataaaa

SEQ ID NO: 156182 - DNA, 284 bp, Homo sapiens
gaattcagataaaatgtgcctatgttctgctrttgtttgatctaatcttaatcacagtgagctcttcattagcacaatatgtggtttgccccaagtgtgcactatttaatactttgtaatatgccaccaagagtactgacatttagagttgtttaaaggccgagaactggaaacagcctttccctcattttctgtgtattggtgatgggagtaataacattttgggggagctttttaaatttcacagaagaggaaagttgcctgctctggcaggtatgtgcaag

SEQ ID NO: 156183 - DNA, 650 bp, Homo sapiens
tctaatgtctgtgttccaaaacacatcacattattaggatgtagggagatatgtatgtgtgctccctggggtggggatttctagttactagaccatctccatttttagcatttggcatcctcatgatacttttataaatacgacattaacaggagagcagcagtacgattttgccgatggaataacagatttgccggcaatcactgaaagagtgcaaayatcgggtccttgtgacttcaacggactcttccaaattgtatgaatgtatcaatgtattagataaacccagtttcagaatgataaagaaaaaatgttagaccaaataatgcggctagttaacagtggtacgatttctcgcccgtggctttaaaatgcacttaaagtcctgtccttgccttttattttctgaacttgatgtttttgcattctttgagttcagtttaaagacaactacgagcatctgtaaccaatctgacaataatgtgttcatcaggtgcctgtggattaaatcacatactggcatatttaagctgaatgtcaatctggaaaataaattgactgtattaacggaaataccactctttgtgtagatatttgtcgtatatttaagaaaaagctaaaaagaatggaaatcgcatgactataactta

SEQ ID NO: 156184 - DNA, 650 bp, Homo sapiens
tctaatgtctgtgttccaaaacacatcacattattaggatgtagggagatatgtatgtgtgctccctggggtggggatttctagttactagaccatctccatttttagcatttggcatcctcatgatacttttataaatacgacattaacaggagagcagcagtacgattttgccgatggaataacagatttgccggcaatcactgaaagagtgcaaacatcgggtccttgtgacttcaacggactcttccaaattgtatgaatgtatcaatgtattagataaacccagtttcagaatgataaagaaaaaatgttagaccaaataatgcggctagttaacagtggtacgatttctmgcccgtggctttaaaatgcacttaaagtcctgtccttgccttttattttctgaacttgatgtttttgcattctttgagttcagtttaaagacaactacgagcatctgtaaccaatctgacaataatgtgttcatcaggtgcctgtggattaaatcacatactggcatatttaagctgaatgtcaatctggaaaataaattgactgtattaacggaaataccactctttgtgtagatatttgtcgtatatttaagaaaaagctaaaaagaatggaaatcgcatgactataactta

SEQ ID NO: 156185 - DNA, 650 bp, Homo sapiens
tctaatgtctgtgttccaaaacacatcacattattaggatgtagggagatatgtatgtgtgctccctggggtggggatttctagttactagaccatctccatttttagcatttggcatcctcatgatacttttataaatacgacattaacaggagagcagcagtacgattttgccgatggaataacagatttgccggcaatcactgaaagagtgcaaacatcgggtccttgtgacttcaacggactcttccaaattgtatgaatgtatcaatgtattagataaacccagtttcagaatgataaagaaaaaatgttagaccaaataatgcggctagttaacagtggtacgatttctcgcccgtggctttaaaatgcacttaaagtcctgtccttgccttttattttctgaacttgatgtttttgcattctttgagttcagtttaaagacaactacgagcatctgtaaccaatctgacaataatgtgttcatcaggtgcctrtggattaaatcacatactggcatatttaagctgaatgtcaatctggaaaataaattgactgtattaacggaaataccactctttgtgtagatatttgtcgtatatttaagaaaaagctaaaaagaatggaaatcgcatgactataactta

SEQ ID NO: 156186 - DNA, 475 bp, Homo sapiens
tgcaacaacatggatagaactggaggtcgttaygttaagtcaggaacagaatgtcatgagccagacccagaaaatcgaactttgcatgttctcacttatttgtaggtgctaagcaaatgaaagtaattgaactcatggagatagagtagaatgatggttatcagagactgggaaggataaagtgggggtgaagtgcggatggttaatgggtataaaaatggagttagatagggctgggcacagtggcttacgcctgtaatcccagctctttgggaggccaaggcaggtggatcatgaggtcaagagacccagaccatcctggccaacacggtgaaaccccatctctaccaaaaatacaaaaattagctgggtgtggtggtgtgagcctgtagtcccagctactctggaggctgaggcaggagaaacccttgaacccaaaaggcaaaggttgcagtgagctgagatcgcacaactg

SEQ ID NO: 156187 - DNA, 486 bp, Homo sapiens
gagccacggcgcccggcctactttgccaaacttttgactactgatggtgtacgcgtgccctggcagggatggccattgtgctgtcagtatcaagggatggctaacagcacccaccacaatgtcagctatgaaaggattcagaaaatagccttctgtaagtcagaatttattaattaaggagtagggccatggaagatgtcaacataggaataggtttcagattctaaactgtagatttagatgatcacttcttagtgtttgtataaaatttactttattttttattataacatgaagttcgctttccacctttatactatgaaaaatgccgtgtctcacaatagggacatacctgtgttaaagtatatggaagtaaatcagccacaatagcaaacattgcctgcatggactcacccaaaaatgcctttctyggcctgccattgatctgaacctcatttctaccttgcattgtctgcaattagagtc

SEQ ID NO: 156188 - DNA, 640 bp, Homo sapiens
gtcgtcttgaatgaaaatgttgctcaatttctgatgaggagactaattcatcaatatctgttatcattgactgatgacctcacataataaaagatcttgacttgagtgtacgttaataatcaacataatgggtaatgtatcaaaagagtatatggaagataataaaaagatataaattgaaatcttaaacagttttgtgctaaaatatgtttagaattgcttgaacccaggaggcggaggttgcagtgagctgagattatgccactacactccagcctgggcaacaagatccaacctccgtctcaaacaaacaaacaaacaaacaaacagaaacaacccaaacaaacacaaaaarttactataattgtatctcttttgactatagcctggaagaaatcactctctccccaacttaaggaaggggagacttatctctagccaagctttgagtataaacatataaaaagtaattttcattttcttgaaactgactgcatgaaaaggcatatggtgttcccaaaaaatgtctgatgagtgagaatattaaaataactaaactgatgggacatatttaatttaatatttaaacttgataaaaaatagttaagcatttaactcaagaatttcaaaatggtacagc

SEQ ID NO: 156189 - DNA, 640 bp, Homo sapiens
gtcgtcttgaatgaaaatgttgctcaatttctgatgaggagactaattcatcaatatctgttatcattgactgatgacctcacataataaaagatcttgacttgagtgtacgttaataatcaacataatgggtaatgtatcaaaagagtatatggaagataataaaaagatataaattgaaatcttaaacagttttgtgctaaaatatgtttagaattgcttgaacccaggaggcggaggttgcagtgagctgagattatgccactacactccagcctgggcaacaagatccaacctccgtctcaaacaaacaaacaaacaaacaaacagaaacaacccaaacaaacacaaaaagttactataattgtatctcttttgactatagcctggaagaartcactctctccccaacttaaggaaggggagacttatctctagccaagctttgagtataaacatataaaaagtaattttcattttcttgaaactgactgcatgaaaaggcatatggtgttcccaaaaaatgtctgatgagtgagaatattaaaataactaaactgatgggacatatttaatttaatatttaaacttgataaaaaatagttaagcatttaactcaagaatttcaaaatggtacagc

SEQ ID NO: 156190 - DNA, 640 bp, Homo sapiens
gtcgtcttgaatgaaaatgttgctcaatttctgatgaggagactaattcatcaatatctgttatcattgactgatgacctcacataataaaagatcttgacttgagtgtacgttaataatcaacataatgggtaatgtatcaaaagagtatatggaagataataaaaagatataaattgaaatcttaaacagttttgtgctaaaatatgtttagaattgcttgaacccaggaggcggaggttgcagtgagctgagattatgccactacactccagcctgggcaacaagatccaacctccgtctcaaacaaacaaacaaacaaacaaacagaaacaacccaaacaaacacaaaaagttactataattgtatctcttttgactatagcctggaagaaatcactytctccccaacttaaggaaggggagacttatctctagccaagctttgagtataaacatataaaaagtaattttcattttcttgaaactgactgcatgaaaaggcatatggtgttcccaaaaaatgtctgatgagtgagaatattaaaataactaaactgatgggacatatttaatttaatatttaaacttgataaaaaatagttaagcatttaactcaagaatttcaaaatggtacagc

SEQ ID NO: 156191 - DNA, 640 bp, Homo sapiens
gtcgtcttgaatgaaaatgttgctcaatttctgatgaggagactaattcatcaatatctgttatcattgactgatgacctcacataataaaagatcttgacttgagtgtacgttaataatcaacataatgggtaatgtatcaaaagagtatatggaagataataaaaagatataaattgaaatcttaaacagttttgtgctaaaatatgtttagaattgcttgaacccaggaggcggaggttgcagtgagctgagattatgccactacactccagcctgggcaacaagatccaacctccgtctcaaacaaacaaacaaacaaacaaacagaaacaacccaaacaaacacaaaaagttactataattgtatctcttttgactatagcctggaagaaatcactctctccccaacttaaggaaggggagacttatctctagccaagctttgagtataaacatataaaaagtaattttcattttcttgaaactgactgcatgaaaaggcatatggtgttcccaaaaaatgtctgatgagtgagaatattaaaatractaaactgatgggacatatttaatttaatatttaaacttgataaaaaatagttaagcatttaactcaagaatttcaaaatggtacagc

SEQ ID NO: 156192 - DNA, 630 bp, Homo sapiens
gtccaaacttactagagaagaaaagtggactcattggctatattttcaaattrcattcaacaggaaattaaaggtttgaattttttccaccttcatccttccaagttaatagacttaaaccagaatactccattcttccaaagcctgtagccaggcaaacttttactgtattacttcttgcttttcaatggatataaagcagagtcctggtaggcacattttgtatacctgcaaagatgcaaaactaaacagttccctcggttcaatattaaaacaaaagtcctgtaaacctcagatggtgagtgtaatacttcagcactagcacgaaagcctcaaatataaaaagataccaagaaccttgctagcaaaccaaagtaagctcttggccgggagcagtagttcacgcccgtactcccagcatattggcaagctaaggtggggtaagtcaggagttaaagaccagcctgggcagcatagcgaattcatatctctacaaagaaaatttaaaaattagctgggcttggcggcacacacctgtagtcctagagctacttgggaggctgaggtgggaaaatcacttgagcccagaagtttgaggctgcagtagctacgatcatgccactgcactcc

SEQ ID NO: 156193 - DNA, 631 bp, Homo sapiens
tgtccaaacttactagagaagaaaagtggactcattggctatattttcaaattacattcaacaggaaattaaagktttgaattttttccaccttcatccttccaagttaatagacttaaaccagaatactccattcttccaaagcctgtagccaggcaaacttttactgtattacttcttgcttttcaatggatataaagcagagtcctggtaggcacattttgtatacctgcaaagatgcaaaactaaacagttccctcggttcaatattaaaacaaaagtcctgtaaacctcagatggtgagtgtaatacttcagcactagcacgaaagcctcaaatataaaaagataccaagaaccttgctagcaaaccaaagtaagctcttggccgggagcagtagttcacgcccgtactcccagcatattggcaagctaaggtggggtaagtcaggagttaaagaccagcctgggcagcatagcgaattcatatctctacaaagaaaatttaaaaattagctgggcttggcggcacacacctgtagtcctagagctacttgggaggctgaggtgggaaaatcacttgagcccagaagtttgaggctgcagtagctacgatcatgccactgcactcc

SEQ ID NO: 156194 - DNA, 626 bp, Homo sapiens
agaaaagtggactcattggctatattttcaaattacattcaacaggaaattaaaggtttgaattttttccaccttcatccttccaagttaatagacttaaaccagaatactccattcttccaaagcctgtagccaggcaaacttttactgtattacttcttgcttttcaatggatataaagcagagtcctggtaggcacattttgtatacctgcaaagatgcaaaactaaacagttccctcggttcaatattaaaacaaaagtcctgtaaacctcagatggtgagtgtaatacttcagcactagcacgaaagcctcaaatataaaaagataccaagaaccttgctagcaaaccaaagtaagctcttggcygggagcagtagttcacgcccgtactcccagcatattggcaagctaaggtggggtaagtcaggagttaaagaccagcctgggcagcatagcgaattcatatctctacaaagaaaatttaaaaattagctgggcttggcggcacacacctgtagtcctagagctacttgggaggctgaggtgggaaaatcacttgagcccagaagtttgaggctgcagtagctacgatcatgccactgcactccagttggggtgacag

SEQ ID NO: 156195 - DNA, 561 bp, Homo sapiens
aaatccacctctggggtggcaatgattcacttaacatacatccagctgttgaaagtgatgatgccaggatatatttctcccatagaaacatgcttaaaatatagtaagtgacaaaagaccatgtattgtgattctactttttaaaatgtttacagcataaaaagtgtgaaaagcaacaaaccrgaatgttttgagtggcaaaattaaagatttttctttacattttgtcatccaaattattacaaaaacaatgtgatttcctttataatcatggaaaagtgttattttcatttatttatatttacatttcttttctttttcttcttttttctcctgtatgtatcccacataggctacagagcttaaatccctgcctcttgagagaaatcagcccattttcaggacatgcaatacacaaagctgtcccatcttccctttatttttatttttatcttatttatttatttatttatttatttatttatttatttatttatgttgagatggagtctcactctgttgcccaggctggagtgcggtggcgcatctcagctcactgca

SEQ ID NO: 156196 - DNA, 561 bp, Homo sapiens
aaatccacctctggggtggcaatgattcacttaacatacatccagctgttgaaagtgatgatgccaggatatatttctcccatagaaacatgcttaaaatatagtaagtgacaaaagaccatgtattgtgattctactttttaaaatgtttacagcataaaaagtgtgaaaagcaacaaaccagaatgttttgagtggcaaaattaaagatttttctttacattttgtcatccaaattattacaaaaacaatgtgatttcctttataatcatggaaaagtgttattttcatttatttatatttacatttcttttctttttcttcttttttctcctgtatgtatcccacataggctacagagcttaaatccctgcctcttgagagaaatcagcccattttcaggacatgcaatacacaaagctgycccatcttccctttatttttatttttatcttatttatttatttatttatttatttatttatttatttatttatgttgagatggagtctcactctgttgcccaggctggagtgcggtggcgcatctcagctcactgca

SEQ ID NO: 156197 - DNA, 483 bp, Homo sapiens
gtgcacttacgtgaggatgcactcgggccagccagtggctttgcccacctccctcagacaccgctccrgggtccgtcagcgccaggcccatgggccatggctgtctgcaactcccgacacaagctgcaaggcaagagagccgctgggaaaccgcaccgcaaggatgctggcattggaacaggaattaaaagaaatgaaaaaatgtgtaagcaaaaactcagctgtatgtaaaaaaaacccaattccccctgagaatgagaaagagccttagtcctttaaaaaaactacctgttttcctatggctagtgagccttatcgctcccttcccaggcattatcaaaaccctaattccctaactgtgcaactgcaaggtcactaaacaaacaaatgcaagtcacaaaacatatttttcctaaaaacgtaaaaaaaaaaaaacataatgcgtgcttcaattaaataaccctctgtttctcgcttctgtaa

SEQ ID NO: 156198 - DNA, 578 bp, Homo sapiens
cgaccacttcattgtatctcatggatcctataggtgagaaattccagcaggattcgtctgagtgattcttcctctctcatatcattaactagggtgactcagtgctatgcggctggcaaacaagtcagtctggaaggtgcaaggtgctttttttctgtcttatgtattggtggggttgtctggaaggcaaggctcagatgggagggactcgtagttatagtgcctgcayagggtgaacttcttttttttttttttttagacggagtctcactgtcccccaggctggagtggtgtggcccgatctcggctcactgcaagctccgcctcccgggttcacgccattctcctgcctcagcctcccaagtagctgggactataggcgcccacgaccaggcccggctaattttttgtatttttagtagagacggggtttcaccgtgttagccaggatggtctcgatctcctgacctcgtgatccgccctcctcggcctcccaaagtgctgggattacaggcctgagccaccgcgcccggcctgtgctcacccatatttctgtttgctgtgtggtgcagtgcgac

SEQ ID NO: 156199 - DNA, 578 bp, Homo sapiens
cgaccacttcattgtatctcatggatcctataggtgagaaattccagcaggattcgtctgagtgattcttcctctctcatatcattaactagggtgactcagtgctatgcggctggcaaacaagtcagtctggaaggtgcaaggtgctttttttctgtcttatgtattggtggggttgtctggaaggcaaggctcagatgggagggactcgtagttatagtgcctgcatagggtgaacttcttttttttttttttttagacggagtctcactgtcccccaggctggagtggtgtggcccgatctcggctcactgcaagctccgcctcccgggttcacgccattctcctgcctcagcctcccragtagctgggactataggcgcccacgaccaggcccggctaattttttgtatttttagtagagacggggtttcaccgtgttagccaggatggtctcgatctcctgacctcgtgatccgccctcctcggcctcccaaagtgctgggattacaggcctgagccaccgcgcccggcctgtgctcacccatatttctgtttgctgtgtggtgcagtgcgac

SEQ ID NO: 156200 - DNA, 578 bp, Homo sapiens
cgaccacttcattgtatctcatggatcctataggtgagaaattccagcaggattcgtctgagtgattcttcctctctcatatcattaactagggtgactcagtgctatgcggctggcaaacaagtcagtctggaaggtgcaaggtgctttttttctgtcttatgtattggtggggttgtctggaaggcaaggctcagatgggagggactcgtagttatagtgcctgcatagggtgaacttcttttttttttttttttagacggagtctcactgtcccccaggctggagtggtgtggcccgatctcggctcactgcaagctccgcctcccgggttcacgccattctcctgcctcagcctcccaagtagctgggactayaggcgcccacgaccaggcccggctaattttttgtatttttagtagagacggggtttcaccgtgttagccaggatggtctcgatctcctgacctcgtgatccgccctcctcggcctcccaaagtgctgggattacaggcctgagccaccgcgcccggcctgtgctcacccatatttctgtttgctgtgtggtgcagtgcgac

SEQ ID NO: 156201 - DNA, 578 bp, Homo sapiens
cgaccacttcattgtatctcatggatcctataggtgagaaattccagcaggattcgtctgagtgattcttcctctctcatatcattaactagggtgactcagtgctatgcggctggcaaacaagtcagtctggaaggtgcaaggtgctttttttctgtcttatgtattggtggggttgtctggaaggcaaggctcagatgggagggactcgtagttatagtgcctgcatagggtgaacttcttttttttttttttttagacggagtctcactgtcccccaggctggagtggtgtggcccgatctcggctcactgcaagctccgcctcccgggttcacgccattctcctgcctcagcctcccaagtagctgggactataggcgcccacsaccaggcccggctaattttttgtatttttagtagagacggggtttcaccgtgttagccaggatggtctcgatctcctgacctcgtgatccgccctcctcggcctcccaaagtgctgggattacaggcctgagccaccgcgcccggcctgtgctcacccatatttctgtttgctgtgtggtgcagtgcgac

SEQ ID NO: 156202 - DNA, 416 bp, Homo sapiens
agatctgttccatgtatttgtgatcctcctcagccctcccsggtacttgaagcatgttattgttgtggccaaagtcaggagtgcaacctgcctgtgcaaaaacatgccaggcttctgttgccttaaatcctctaagatacccctttggcttaagcagagtcacacagcaaggatcaaagtcaaggagtggggaattatatctgtcccttagagatggagataggagagagtgtgaacaaatgcaggaaaatgatctcatctaccagagtgtccttaaagattttaacataataaattcagtattgtttttgtttgtttgaatgaagctttgcatggacacagtacagtacaaaagtactatttgaactctttctccacattcataaaattgctacatagtttctaccatgattata

SEQ ID NO: 156203 - DNA, 405 bp, Homo sapiens
ttccatgtatttgtgatcctcctcagccctcccgggtacttgaagcatgttattgttgtggccaaagtcaggagtgcaacctgcctgtgcaaaaacatgccaggcttctgttgccttaaatcctctaagatacccctttggcttaagcagagtcacacagcaaggatcaaagtcaaggagtggggaattatatctgtcccttagagatggagataggagagagtgtgaacaaatgcaggaaaatgatctcatctaccagagtgtccttaaagattttaacataataaattcagtattgtttttgtttgtttgaatgaagctttgcatggacacagtacagtrcaaaagtactatttgaactctttctccacattcataaaattgctacatagtttctaccatgat

SEQ ID NO: 156204 - DNA, 525 bp, Homo sapiens
ctatacaacatgcaacaggagagaaatatcagatgaattagaatatttgcagcctatggcaattatctgtagccacatttttttttgtcttcagaaaaatgtagatgattttggaaatggattagttctagtctcaatctaggaagaattacttatggaagttttgtgtacaggatactgatgttttcaaatataaygcattattattttagtttagtttcttttgccacatacttagaaattgttcaagtgaacaggctattaaaacgaatggtatagataaatggtatagataggcattgtaaacatcccacttttcccaagccatgaattttaacactggattaaggagatgaaaatggagccattgggaatgtggattctttgctaataattatttttcttctttaaaaagattcttcaaaaggcaagaacatggaagtatttcaggagatattcttgaggtatctaaaatacatactcttcctatcaaaatcaataaatagatggatgtaagtaagataa

SEQ ID NO: 156205 - DNA, 571 bp, Homo sapiens
taaacaagaaacatgtgtaatatttgtaaaaacacaaagcttttgggccgggtgcagtggcttatgcgtataattccagcactttaggagcctgaggctggcggatcatgaggtcaggagattgagaccatcctgactaaaaaggtgaaaccacatctctactaaaaatacaaaaaattagccaggcgtggtggtgggtgcctgtagtcccagctacttgggaagctgaggcaggagaatggcgtgaacccaggaggtggagcttgcagtgagctcagatcgtgccactgcactcgagcctgggctacagagcgagactccttctcaaaataaataaataaataaataaataaaacttctatttctttcactttctaatataattttaatatctcctcctgggatttcactaagacacattttggacctcattctgatcttcctctcccctccaagcccaccaacttctgccctatcatcyatcctcatgtctctctgtgtgacatgctgacttactttttggagagaatcgcctaaacaattaattctttcttctcgtgtctaatccatc

SEQ ID NO: 156206 - DNA, 571 bp, Homo sapiens
taaacaagaaacatgtgtaatatttgtaaaaacacaaagcttttgggccgggtgcagtggcttatgcgtataattccagcactttaggagcctgaggctggcggatcatgaggtcaggagattgagaccatcctgactaaaaaggtgaaaccacatctctactaaaaatacaaaaaattagccaggcgtggtggtgggtgcctgtagtcccagctacttgggaagctgaggcaggagaatggcgtgaacccaggaggtggagcttgcagtgagctcagatcgtgccactgcactcgagcctgggctacagagcgagactccttctcaaaataaataaataaataaataaataaaacttctatttctttcactttctaatataattttaatatctcctcctgggatttcactaagacacattttggacctcattctgatcttcctctcccctccaagcccaccaacttctgccctatcatccatcctcatgtctctctgtgtgacatgctgacttactttttggagagaatcgyctaaacaattaattctttcttctcgtgtctaatccatc

SEQ ID NO: 156207 - DNA, 494 bp, Homo sapiens
tggaaaagagggtgcattataagagaaaatgggggcatttcataattatgaaakaaccaattcatcagaggacaataatattgcttatattattgtcctctgatgaattggttattatattattgtcctaatatgacatatatgtccataattatgaaatgcccccatttcataattatgaaagggacaccaacttaataataaagcctcataattcatgaaggaaaaagcagaattgaagggagaaatggataaatgacaataataattaaagattttaacatccctctgttcatcactgattgaacagtaagacaaaccattcgtatggctatagaacatttcaacttcattataaatcaccttgatcttattgacatttataaaaactacatttcaaatgctgaatatacgttgttttcttgtgtattgaaagcaccaccaacataggccaaatgctgaatcaaagagtaagtttaaatgaatttaagctt

SEQ ID NO: 156208 - DNA, 494 bp, Homo sapiens
tggaaaagagggtgcattataagagaaaatgggggcatttcataattatgaaagaaccaattcatcrgaggacaataatattgcttatattattgtcctctgatgaattggttattatattattgtcctaatatgacatatatgtccataattatgaaatgcccccatttcataattatgaaagggacaccaacttaataataaagcctcataattcatgaaggaaaaagcagaattgaagggagaaatggataaatgacaataataattaaagattttaacatccctctgttcatcactgattgaacagtaagacaaaccattcgtatggctatagaacatttcaacttcattataaatcaccttgatcttattgacatttataaaaactacatttcaaatgctgaatatacgttgttttcttgtgtattgaaagcaccaccaacataggccaaatgctgaatcaaagagtaagtttaaatgaatttaagctt

SEQ ID NO: 156209 - DNA, 494 bp, Homo sapiens
tggaaaagagggtgcattataagagaaaatgggggcatttcataattatgaaagaaccaattcatcagaggacaataatattgcttatattattgtcctcygatgaattggttattatattattgtcctaatatgacatatatgtccataattatgaaatgcccccatttcataattatgaaagggacaccaacttaataataaagcctcataattcatgaaggaaaaagcagaattgaagggagaaatggataaatgacaataataattaaagattttaacatccctctgttcatcactgattgaacagtaagacaaaccattcgtatggctatagaacatttcaacttcattataaatcaccttgatcttattgacatttataaaaactacatttcaaatgctgaatatacgttgttttcttgtgtattgaaagcaccaccaacataggccaaatgctgaatcaaagagtaagtttaaatgaatttaagctt

SEQ ID NO: 156210 - DNA, 569 bp, Homo sapiens
ccaaacttaaaaatactcatatccattctgagccctgagatcagaaatcagctgctaaatgagtaattccctggtaaaaccattactaggaaactcacattgtttgggcagagcttcggccagtctccttaaactagtcagactatccgcaccaagctggtttaagatgctgggtagcatttctgtcagctgctttgtctcagcatggcctgtaatggtgaaagtgttcgctgccagagatgcctgaactttagggttgttaaagtggatcactgttccttggtttgtaaacatattcacctattaagaaaagaaamatttaaattagcaatgctgaccagtctctttaaaaacaaatgttttattaaactaagtctggctaactagtatttcactgtgaagcacaggtgaaattttgcctggaatggaatatgtattctaatagcattcagacttaatgagctccctgatatttattaatttatggtagaaacacatcttagggactttgaagtccctaagttaaaaaaaaaaaaacaacccatttaatgcattaacgttaacttttc

SEQ ID NO: 156211 - DNA, 566 bp, Homo sapiens
tgctaatgagagagacacaactccagttagcttaggccacaaaggataccaggaatgccaggggtttaaatagctttaggcttgactaaacctaggttctcagtgataccctagaatactgtctctcacctttgattctctggctctgcttctgctgcggtggttttattttctggtagccttttgctaggttatggcaaagagagcctccagtttttccaggctcacaacctgacaaatgtagccctaccgaaaatgatctcctcttcccagttccrgcaaagtcccaggaattactcagattggcctggctcaaaggttgtgtctcctcctggccatacctgggtcacctaccatcactggagctaaggagtgggatggtggctcccaagaggaaaataatgagtcaattaccagaagacatacaacaagttgggggaggaaaaatagcaagaaatgggatatgacgacaagaagagtgtgaataaatccattcttagtttcagattttggctgggattcattgcggcaaaccaacagcaaagtactttcctgtcaagatgcct

SEQ ID NO: 156212 - DNA, 554 bp, Homo sapiens
tgtgccagtaagaaaaggctacctgggggccaggcatgttcaacatggagactccatcttctcttttctttgtcaaccacatgtgcaataaagaagcaggcaacatggcgctggccaagtagagaacccattcaaataatatagattacggtggggtggccagcttctttgcccgctatgtaaatggcacacctggtccaaccaatcttttgggccctatgtaaatcagatactgcctcctcaagagtttttctctttcttttgcctgttaaacctctgctcttaacctcactccttgtgtgtccacatccttgatttccttggcataaggcaacaaacctcaggtattaccccagacaaatgatgccrcttcatcagggctggattgaattagaataaactggttttatgggaatatgcagtgtggtcctttatcaagcagtttaagtctcctttgtaagagccattggatattattgtactcaaccaggctgctgagtgttttgttactctgcaggccctgaagtggtcaggaagattttctttcagtgttg

SEQ ID NO: 156213 - DNA, 622 bp, Homo sapiens
ttaatttattatgtttatgagagttaagcacttgggaaggtttatgctaatggggtcaagcatttgcaatgctgcttaaaagaatcatttttttaaatgtataaatgctattaagttgtttaaaggaatttgaattgtaaatgggattgttaaaacaaatttagtctgttcaactcaatgagggcatttcattttctaggaacaaaataccctcttagacattaaaaagccgcatgcctgttccctcagctatagttaactggaccatggtggtacaactgactcaacccttctctaagcagggatttgtaattgggatttataatgaaattcctgatctgggaaaaygggaggctgggaatgctatgtctaggtcatcagcggagaaagttggtttgtagagaatgaacaagaatgaaacctaagtgcaaagaaaataaagattatcctgctttaatagttcagactagaggagagagaaaccatcttagttcctgatgacttcctattgccctattctggttgtacctcttcccccaggggtccatgatatttttggattccctctaacacttgtttgcttaggtgactgtgagtggttttctcttatttacaaccaaat

SEQ ID NO: 156214 - DNA, 607 bp, Homo sapiens
aatctattagtaaaaagctgtaaacacttgggaagaaattcaaattcacagtgcctggaaacttctggcactgagttgcctccataccacataggcaaaggtgctcaggcgttttagtcattttgtgagtaaattggcaacacgagaaagatattgtcaagaagctattattagtttcatttagacactagggagatttttggtaatgaaaagaaatcgttttaatggagagattttaaaaatatatcttgctaactttccctccaycccattgtttcctgctaaaatggcttgctcttgttgttccatagcgagtgcttattggtggcaggaattctttaatttgtttcttatatttaaagcaggagtaaagggatttgcaatatagcaggtgctcaataaatagtgcagactaatcccacttttcaaagcttagaggttaaatagatgatcagtagataagtagaggaaagaaatagagcaagagactagaagagcagatttaaaacaccagtggtttgtttattttagaaagggaaagttatctgtccaaatacacatctggctaagtaagagaaaacacatgccatctcttttatcctcatta

SEQ ID NO: 156215 - DNA, 607 bp, Homo sapiens
aatctattagtaaaaagctgtaaacacttgggaagaaattcaaattcacagtgcctggaaacttctggcactgagttgcctccataccacataggcaaaggtgctcaggcgttttagtcattttgtgagtaaattggcaacacgagaaagatattgtcaagaagctattattagtttcatttagacactagggagatttttggtaatgaaaagaaatcgttttaatggagagattttaaaaatatatcttgctaactttccctccatcccattgtttcctgctaaaatggcttgctcttgttgttccatagygagtgcttattggtggcaggaattctttaatttgtttcttatatttaaagcaggagtaaagggatttgcaatatagcaggtgctcaataaatagtgcagactaatcccacttttcaaagcttagaggttaaatagatgatcagtagataagtagaggaaagaaatagagcaagagactagaagagcagatttaaaacaccagtggtttgtttattttagaaagggaaagttatctgtccaaatacacatctggctaagtaagagaaaacacatgccatctcttttatcctcatta

SEQ ID NO: 156216 - DNA, 454 bp, Homo sapiens
gaaagaaatagagcaagagactagaagagcagatttaaaacaccagtggtttgtttattttagaaagggaaagttatctgtccaaatacacatctggctaagtaagagaaaacacatgccatctcttttatcctcattatatctagaagaactaatttatttcatagataggaatggaaattttgaagataaatttttatatatggccaaaaatttctcttaactaatttagggatttaagtatatgccaaaatttagaagtttttccttttctttttttccttgaaaaataaggatgtggaaagaagccacaaagggataattcttacacattatacaggttttaagttttccaaagcattttcacataaattgtattayttgattctcacaacctctcctaccccacaagaaaaatgcaaataattatgaaaactgatctaatgtttaattt

SEQ ID NO: 156217 - DNA, 512 bp, Homo sapiens
aaatgtaattatagccaactcttcagagatgagccatccatgccttgagacttcagggtctcagtaaagatagaggtatttttgttcttgattactaagataacaattgagccatgtttttagatgcaatccggtgtgtctacaagcctttatcatattttagagttatttccttcctacagtatgtttttcagcttgatactcagtgatctcaggcttattcctggggacccagagcctcctgctgaagcaaaacatccaggcttgctcaacatagacagtcccttaacttacagtgggagatgcaagtcttgtggctcaactgtgactctaggagttgagtggtagtagcatcacccagtgaaaatttcagactaaaaaaaagacagaaaatgacatggcatctccaataatgtttacttttgtggaaaattgtaatctccttgattactttatattgcatttktgaaacttactctattatagcttgttaaagttatttaactgtaatt

SEQ ID NO: 156218 - DNA, 525 bp, Homo sapiens
aaaatctatattttaaccagatccccaggtgatttctgtgtatgttaagatttgagaagaactgttttggttatgactggctccataactgaaagaggaatgcatattaaatgttaaacatgaaatactctgaataattagagacttcagtagcacagaaatagtatattgcttacaatttccttactgtaggattatggtgccaattactttcatktagtctcttttaacagtagttaaaatagagactaaatgaagaagaggtctttgtggaagtgggatgccattataagccacagactttaatgtgctagaagacattatggtctatgatgcaaatggggagtatttaaaatataattataacaacacatggcaataaagttgcacagtaattataaaggagtaattactgtttgcttgcttagtggagtatttctagtcttccaaactttgtattaaacatgcaacatacaatgcataaactgatataatgatcagatggcttataggatttggtgtttt

SEQ ID NO: 156219 - DNA, 584 bp, Homo sapiens
atggacatacagacccagggtggtctcactttccaacttttaaagataagctgaattcttgaattttgatttgaaatttctccatatttaaatattgggtccagtttgtcccaagaactcccagtttgtgactcctgcccaaggtttttctggttctcctcagacctctctggccattccttcttctcttcctgcacagattggtaagccagagcttcatttttaacatacttatgccacatgattttcgtaagcaatctcattcagtctcatggttttaaaccctggcttccacgttgactcctaaatctcagtccccaatactaacctcatctaataatttsagactcatttatccaactacttgctacatatctccatggaaatctccctcagacatctcaaagtcaccatgacccaaactaatctcatgagctttccagaactttcttctaactgaaacctgttcctcttgtgtgtttctgctccctgtttccctgcaagctaatgacatgaccattttccctgtagtcaaaccatacatctaagacccaatcaagaccctttccttctccctcaccacc

SEQ ID NO: 156220 - DNA, 563 bp, Homo sapiens
ctcagtagttcaggtatctgttgcaagaaacaaaataactcatgtgtctggtttatttgcatttgaatcttttgatcatgtttgcttttgttgctcaaagtgccttgcaatgttcaagttctaatctgtcttctcacatgccatttactcaggagagagtgattaaaattgaccttttgtggcaaggagatgaaagtgagaaatacgtgatagtccaaaagttgtcacatgggtggaaaaagaaaatttgggatttttgcttttaataaaggtcatataaatggaataagagtcacacaagaggacctatttaaccatgtgttggcagttgatttgaatctaaacaatatcaagtttcttttagagtttacccctccaaggggagtggggacaaaattagaattttccatttttagaaggggaccctaggcctatgccatattccaatctcctttttaagatccctggctaaagaaattgcagtgagccaaaagctcttttttcrtctttaaaaaatcagatatattttgtgccatgtaacccctaattttgaaatgattgcc

SEQ ID NO: 156221 - DNA, 620 bp, Homo sapiens
agtgaacttggattcaagattgagatattaatggttcacagtgtcacaagttcagatatgtgatcttggaaagacatgaggtcctcactgcacatagtgcacacaaaagcctttaattaaacacatgaaatggttttaatcacatgctcttgagaaaactataaaaaggacccatcccaggcccagatgtgcccttggaaaaaattgggccagcagaagagaagaaggggtgggagttttagctgtgattacttccatctgttcttcagaacaaatttcttaaatgtacactaaatgtgagaaaaattataagaagctgatattaaagttggatgaaataagtagagttaatacattaatagccctaaattttgaaacaggattttagatttcaaattttgttaaagcctcaattgctagttgcttttatcccccttgacttcattattcttaacttttatgcttctattataagcctagarcatgccatatattatgacaaataagtctaccccatggagcttaacgtgatcagaatttttccacacaaacttttggacatttaatatagtcactgatatcaattttcttcaatcatttaaatagcagaggctgctcca

SEQ ID NO: 156222 - DNA, 620 bp, Homo sapiens
agtgaacttggattcaagattgagatattaatggttcacagtgtcacaagttcagatatgtgatcttggaaagacatgaggtcctcactgcacatagtgcacacaaaagcctttaattaaacacatgaaatggttttaatcacatgctcttgagaaaactataaaaaggacccatcccaggcccagatgtgcccttggaaaaaattgggccagcagaagagaagaaggggtgggagttttagctgtgattacttccatctgttcttcagaacaaatttcttaaatgtacactaaatgtgagaaaaattataagaagctgatattaaagttggatgaaataagtagagttaatacattaatagccctaaattttgaaacaggattttagatttcaaattttgttaaagcctcaattgctagttgcttttatcccccttgacttcattattcttaacttttatgcttctattataagcctagagcatgccatatattatgacaaataagtctaccccatggagcttaacgtgatcagaatttttccacacaaacttttggacattwaatatagtcactgatatcaattttcttcaatcatttaaatagcagaggctgctcca

SEQ ID NO: 156223 - DNA, 553 bp, Homo sapiens
ctaagttactaaggaagcaccagagaaaggtgaataccaacttaaagaaatttttwaaatgtcacataatatggacagaaaaatcttcagagaaataggtaccataaataaaaaacaattacaacttctggaaatgaagaacacacttatagaaaggcaaaatacactggaaaatctcagcattaaaatcaaacaagtagagagggaacctcagagctcaaagataaggctttcaaattaacccagtccaacaaagacaaagaaaaaagaatcaaaacaaaatgaacaaagcctctaagaagtttggccttgtattgaacaaccaaacctaagaaaaattgtttccgagaaaaaatagaaatgtaaaactctggaaaacatgtctcagggaataatcaaagaaactttcctggccttgctagtgatctagacatccagatacaagaagctgaaagagcacctgggaaattaatcatgaaaagatcatcacataggcatatagtcatcaggttatctaaagtcaagacaaaggaaagaatctcaagagcagtga

SEQ ID NO: 156224 - DNA, 553 bp, Homo sapiens
ctaagttactaaggaagcaccagagaaaggtgaataccaacttaaagaaattttttaaatgtcacataatatggacagaaaaatcttcagagaaataggtaccataaataaaaaacaattacaacttctggaaatgaagaacacacttayagaaaggcaaaatacactggaaaatctcagcattaaaatcaaacaagtagagagggaacctcagagctcaaagataaggctttcaaattaacccagtccaacaaagacaaagaaaaaagaatcaaaacaaaatgaacaaagcctctaagaagtttggccttgtattgaacaaccaaacctaagaaaaattgtttccgagaaaaaatagaaatgtaaaactctggaaaacatgtctcagggaataatcaaagaaactttcctggccttgctagtgatctagacatccagatacaagaagctgaaagagcacctgggaaattaatcatgaaaagatcatcacataggcatatagtcatcaggttatctaaagtcaagacaaaggaaagaatctcaagagcagtga

SEQ ID NO: 156225 - DNA, 553 bp, Homo sapiens
ctaagttactaaggaagcaccagagaaaggtgaataccaacttaaagaaattttttaaatgtcacataatatggacagaaaaatcttcagagaaataggtaccataaataaaaaacaattacaacttctggaaatgaagaacacacttatagaaaggcaaaatacactggaaaatctcagcattaaaatcaaacaagtagagagggaacctcagagctcaaagataaggctttcaaattaacccagtccaacaaagacaaagaaaaaagaatcaaaacaaaatgaacaaagcctctaagaagtttggccttgtattgaacaaccaaacctaagaaaaattgtttccgagaaaaaatagaaatgtaaaaytctggaaaacatgtctcagggaataatcaaagaaactttcctggccttgctagtgatctagacatccagatacaagaagctgaaagagcacctgggaaattaatcatgaaaagatcatcacataggcatatagtcatcaggttatctaaagtcaagacaaaggaaagaatctcaagagcagtga

SEQ ID NO: 156226 - DNA, 516 bp, Homo sapiens
tggtgatgaggcataaatattttctgtgactaagtgggcatatgaattagaaggcctttggatattagataaaatggaaartaagtttatatgtttatacaaaagaaattaaaaacgtgtaaacttcccctgaaatcggtgattctcaaccttggctgcacattggaatcacctggaaagctttaataatattgatgcctgggtcccaccccaaagtctgccttatctggtcttggttgtgtcctagacgtcaggattttttaaagctgccttaaacaaaactgcttgacagactgaaatgtattataatttgttgacttttcctaggtgttttataatgctgttaatatcatgatgaaatatagtcaccagtcagtaagaagcagaatagtgtttaatcccatcttggttctttccttaaattcacctacagattgtgtcctttatttaatgtctgtcctaccctcaaactgtatgctctctgaatgcagggagtatccctgtgctattctcaac

SEQ ID NO: 156227 - DNA, 479 bp, Homo sapiens
ctacaaactgactaaatttggtgtgacacacaatgaatttttgaatgatcaacatattggcagtagtatggtttagggttttgctctaatgtataataacctacttgcaaaattctttatagacagtctttcagcaaaacaagtgattttgaacattatcccattttgtgaacaactcaarttttaaatattgatattacaactgagttaccagaatgactaataagaaataccattggattacttagagaattaacaatacttcatagtacaggttagtcaaaattccttctccacatgttcttggcaataaatcccatttcacaaattttcaaaaacatatcagtgccttttcaaatattctcaggtgcctttctcagatgtttacaaggaatgtgcattgagtcctataatcccataaatttgtgagctgaattgcgttatataatacttgttctttattggccattcagtgcaaa

SEQ ID NO: 156228 - DNA, 514 bp, Homo sapiens
tgtgtagcttgcaggttagagcttcttttcttaagctcaggggagccataaaacccttgaagctgcatgtagactagtacacttgtgggtctgtgcattttcaggagtgttggtctttggatattgagcttcttgaagaagtctaagagctgataaaacttaagagctgtctagacrgatgccttttaccaagcaagaattaggatgggtcaagtgaagggctggaagaattactaccatatgcatagatcatgcagagagggcctcgagatggtccatgaaaaatctcatactttgtaactaagatgtgaacacacagtttattttatgtaatttcttttgatgtggtataaaaaaatttaagtgtggtagtatccaaggtggccctcaattattctcacctgctgttattcatgctcttatatagtccccttgcacactgaatcaaggctgggctgtgtactcattaaatatggaaaaagtgaagtgaaaatatgtaactttcagaggctaa

SEQ ID NO: 156229 - DNA, 440 bp, Homo sapiens
gtgtttgaacaaatatgaaatctgggcaccttgaaaaaagaacaggataacagcaattgttcagggaataagagagataaccttaaactctgaccaccggtgagccgggcggaacagagccctatttctcttctttcaaaagcaaatgggagaaatattgctgaattctttttctcagcaaggaacatccctgggaaagagaatatgcgcctgggggtataggcctatagacggcccccctgggtgtggtcatctcctatggtctatagactctaggggtgaaatagacyccagtctcccatagtgctcccaggcttattaggaagaggaaattcgcacctaataaattttggtcagaccggttgctctcaaaaccctgtctcctgataagatgttatcaatgacagtggtgcccaaaacttcattagcaattttaattt

SEQ ID NO: 156230 - DNA, 526 bp, Homo sapiens
acacacacatttttttatatctcacaagaacaaacataacaaacctttgagatatgaatgtatagattttgattagctgtgatgtttaatatattgcaattaattaagaagaaatttaacattttttcttatggtcacaaagggctatataagaaggaccatgtgtctacatgtgtattagcatactctcagaacgtgcacagacgcttcaagatagccatgtctctcttctcacaggaaacattctccactctaacattttggccacttctctgtgtctgggcaaggcactgtgctaagcagtaaagatggaataaggaagataggaagtctattcttctggcacccatttaggctagacagtgaaatcaacagcatgatataatgtaatagaatatgtagtatacaaaggaattgatcccagaaggaaggtgtgaaarggggtaaaggagacaccagtggtagttgggtgggggttgtttacaaacttttgtatgaggctgtagattcaagatgtgtaacatcc

SEQ ID NO: 156231 - DNA, 552 bp, Homo sapiens
aaaatcacttaattttgcacatgtaaacatgctgttcatctctatactgaaaaatggtatttgttgcagtaaggaaaaaaataagttgctttttttcctagtaagaattccaggaaaagcaaaaaactcttttatgtatttaatctttcttttctgtgtgactcatggtttcctttttgctcctgacaaacataagtatctttgtatctgtgcatcagcctgcctaaggcttcgtctctttccatctcccaaagacagagccttggggacactttcaggagtcagctaaggagaatgcayacacttaaaacccacacctgttaatcccctatcttttccaaaagagtttcttattccattttagactgagagcctttgtgtaagagtccagaatattttaatattttaacatttcctgcttcatcggcaactcggagccaaaagtatagcactagtttcttccaagattttttataagcaaagaatcatgtgctccacaatcattcttagttaaagatgcctcaggtttcacactttggggacagaaaagga

SEQ ID NO: 156232 - DNA, 443 bp, Homo sapiens
attaagtaagttcaggaaacacttccctaaggaagtggcaaaggagaagaaakcagaaagaagagtaaggttcaattagatggagtgagttgtcacataaggcaatccaggcattaactaagggaaaataatattatgtaatattagtgtggctgaagcagagggcattaggggagtaagagccagatcttacatggcatcacaggccatgtaagggattttgttatttagcctaaggacagggtttaaagcaaataggaatggaaagtttgggtgtgtttgaggttattgcacttgcattttgtagtgctctccttggttgcagtgtatggaacacactgaagaatggccaccagagaaagcagagggagaccagtaaattatctgttgcagtggtccaaatggccagtgattgtatatggcttgaattcagacagatgtat

SEQ ID NO: 156233 - DNA, 443 bp, Homo sapiens
attaagtaagttcaggaaacacttccctaaggaagtggcaaaggagaagaaatcagaaagaagagtaaggttcaattagatggagtgagktgtcacataaggcaatccaggcattaactaagggaaaataatattatgtaatattagtgtggctgaagcagagggcattaggggagtaagagccagatcttacatggcatcacaggccatgtaagggattttgttatttagcctaaggacagggtttaaagcaaataggaatggaaagtttgggtgtgtttgaggttattgcacttgcattttgtagtgctctccttggttgcagtgtatggaacacactgaagaatggccaccagagaaagcagagggagaccagtaaattatctgttgcagtggtccaaatggccagtgattgtatatggcttgaattcagacagatgtat

SEQ ID NO: 156234 - DNA, 578 bp, Homo sapiens
ctgacttagggaactactgaattaagctacatgaaccacacagcatgaattcttatcactcttcagctaaagatttgatgctgctacatgaatatcagcccattgacrgcgcgttcagctgcaaggagcagaaaagccaccccaccatggcttaaacaagtaagatctttgtttttctcaaggataatgatgttcacaagtggacagttaagggaaagtggagctgttgaagcacatcattgatgtaccagattccatcttccaagcccaccatctttagtctgtggctttcatcttcatagtagcagaatggctgctacacctccaagcacagcatctgtgctccaggccaaaggaagggagaaggagtaaagggccctctttataaaatgtatgcttttatgtgatggaagaagcattctctagaagcttctgccaatgtctcattggccaaaactaggccacatgagcattcagagatgcaagggaggctgagagatcaaggggaatgaggcaagggagaaggcagatggaatgggtactgtgaattatcctatagagaccactagatatagcca

SEQ ID NO: 156235 - DNA, 346 bp, Homo sapiens
ggggaaagagggaggtggatagccaaaggttggttaatggatacaaacatacaaccatatagtaggaataagttctaatgtttcatagcactgtagggtgtctataactaacaatttattgtatatttttaaatagctggaagagaggattttgaacgtttccaatatgaagaaatgatacatgtttgaggtgatggatgtactgattaccgagatttaatcactgtacattgtgcacatgtattgaaacatcacatggtaccccctaaatatgtacaattatyatgtgtcaattataaatgataatttttgaaataccatatgcaaagttataataataaaagcc

SEQ ID NO: 156236 - DNA, 631 bp, Homo sapiens
aacgtggctctaggctgctagctgtgataacccgaagatgggaggtgggcacccccaactgccataggatcaatgggatagggacactgaggagagcagtgaggctgcttttacagctgctgctcttgagacaatggcaaggtttctcaaaatggcaggtggaaatgaaatccatccagccaaggtgatcaatccacacctggtcgactgattgggcacttgtattcccacataccttctgcagagttataggaggyacaaaatgtatgcttgctcattcattccaatattcaattcttaccagaagctaccagaaaactaaaacaaaatgtatattctaccaaagtaaaaatggcagattaatcttttggtgttatataaagcttagatcaagtacatcatttgtaaagatgatcaccaatctattagtgcctcccttaatgattgttaaattacccctttaatggataattaatgcacttaatgtctctcactattatgattacttttatgcaaatttagaatgataatagctgataaatacaatactccctttgtcataatttagtcatctaaatgccctagctacaaaagacaggccaccttatatgcttttaataataattcaatt

SEQ ID NO: 156237 - DNA, 566 bp, Homo sapiens
cttcatagtgcaaagtgcatgtgtagccaagctcttcactgacctgatttcagtgattgctctgaaggctggtcatggggccagtgaccacggaactgctaagtccttggtcagtaggrtatttggaggtccccaggactggctggaccaaccacatcctggattgattttcttacaaattgcagacttcctggctgacgtaatctgtgatgacaatcccacaatgccctgattgggtgggagggcggggacattgggagcagctccctcagtgaaatttggacagcttttgacagggccaggatcaacaatataggttaattgtcattcaccagagagagaacttatgggataaaactgagttgagcttatggggtggtgtttcaaaattatcctttttggccctctctgtgtgggctgctgttgtccatctgaaactcatcgttgttgtgttatatatgaactaaaaactgtctttcagctttgctttttctctttgctgagaacttgcagagttcagtgccaagaggaggcctcaggtcattgcaaagacactgctgactcag

SEQ ID NO: 156238 - DNA, 431 bp, Homo sapiens
tactttagaaaactagaaaaagaagagcatattaaatctaaagtaagcagaaaaaatgtatattttttattctgcaaagcagaaatcaatgaaattaaaaacagaaaatcagtagtatcaatgaaaccaaaaatttgttctttttaaaattatagtacaaagatccaaataaaaattaacaaagggaaggggtacatgaggcaaagtcccaaggaatccaggtgcaaccttccaagagttctgccccagtgcaatcacagagattatacttaattcttctattaatgagttgtaataatacattggaagtggtgtctaacagagactcagcaytcaggatttttattgggggttggtcctgtagcaatactactttcaaacttaacctagttaacatttatagaactccatacctaacaactgaagagcac

SEQ ID NO: 156239 - DNA, 619 bp, Homo sapiens
ctcaggtggattcatttgtcagtactcattgaattgtatgctaaagaactgcgcatttttccatatagaaattcatgcctcaataaaaaaaattaaagtcactaaagacctttcaattctttttgaattattaattcaagaagtttatagaaacagaactcaagttaaaaaattccatccctaaccattttttaaagcaaaattcactgtaagatgtcacccagaaataaaaacatcatacttttctgctgaaagaccaatcaatggcactcctcactgtgcggaaataccttgaccagcccatgaaccgctcaatgccaattggaaggaccccttctcttaagcagtctgctttytaggacacatgtcagcagcacttcttcccacagcacctgatatggtttggctctatgtccccacccaatctcatcttgaattgtaatccaaattataattcccaggtgtcgagggagggacctgatgggaggtgactgggatcatgggagcagtttcccctgctgtcctcatgacagtcagtgaattctcatgagatgtggatgtttgataagtatgccccttcatgcttgttttctctctctccctctctctcacctgccgc

SEQ ID NO: 156240 - DNA, 545 bp, Homo sapiens
ccctttccagctcaccatgggtgtctatactcctctatcaaatcctttttccatgtagccatcttccctgagttctggaaaccctagttttcctctcttcaggtcataagtatggccagctctggggtatgccaccattgccttttggtctatctgaacaccactgcatgttggtttcacttaaccccgagtatacatttgaaaatatttccttaattaaactttccttgatcaccccacttgaatatgcattgttgtacccacaaagcaaaagacacagatgagggtgatgacaaggacacatcttccagagagacatgcagccggtggtcagctttggtactgccatctttttttgtgcttaatgatttatgtctgcctttctattycccatataaatgggaatataggaaagtgaacactatttccaaattgtgaccacatgccactaaaagaaatatgtctagcaaagctcaaactttaagatttgctccttctgttttcctagtggtgaggaaaggtcacaaaactcaaagtgccaattt

SEQ ID NO: 156241 - DNA, 256 bp, Homo sapiens
tcttgtcttgtaccaagggtcagaaatcatccatttaagaactgttacattggagaaataaagtaagttgttcagatttacattttcattccttctggtgttgagattccttcccctctgtccttgggatagagttgtttatcactccgttaacagtgtagattaatctttgctgctttgtagctagagcaattagacgagtatttcccaaagtrtcggagaggtaccaccagtgatccatgaaaaaaacgtaaga

SEQ ID NO: 156242 - DNA, 595 bp, Homo sapiens
taggtgcaaatgttccttgacttagtatggggttacagccggataagcccatcataagttgaaaatatcataaatcaaaaatgcatttactacacctaacatatggaacatcatagcttagcctagcctatggtaaatgtgctcagaacactgacgttagcytacagttgggcaaaatcatctcacaacacagtgcactgcatagtgctggttgttgaccctcgtggtcacgtggctgactgggagctgccacttactgccactctcctgcatggagagcactggactgcatattgttagcctgggaagagatcaaaattcaaaattcaaagtatggtttctattcactgcatgtcacttttgcaccatcataaatttgaaaaatcctaagttgcagacgatttatatttgtgctttccctcatatttcatgattatctttcaggataggtgagtccagactcaccatctaattccagaacaatatcaactgaaaacgatgatcaaactacaaaccagccattccatccctctactttgatttgagaagatcttagatctcaggcactcagtgggaagaacccagttcccacagt

SEQ ID NO: 156243 - DNA, 248 bp, Homo sapiens
ctcagaaaggagcacaggctcgyggcggcaggcgggatcgcacgcggggcggatcgggctggggatgggactgggtgggagctcggggctctggctagggcagcgctgcgtgaccgcccgcagctgctcctccggccgcggcgcccgacaggggaaagcacggagggcggtgctgccaccacggcttgggctcaccagcgctgggctcccggcatccggccgcagcgcagatccccctgcgtgcccga

SEQ ID NO: 156244 - DNA, 611 bp, Homo sapiens
acatatgtagtctatgatatatctacatagactatcatagacatatctatcatatgtatatctatgacaacatataaatgtaatgattcagtgggcatactttaaacagattctacgagacactatgttgttctagtagttttcctttaacatggttggttatgaaaaaaatatacatttctccctcaggctttttattgatttaatcctattccttgatattttgcttttgtcctgtctcttttatgcttcaatctgtcttttttttttttacatcttaattcctagttattttggatagttgattatttttctgagcagaaagatcttcagttgaatgtagttcagaaagcaaaaaggcacaaaaattattaaccttctatttccaatttatcmtgagattatctgttagagtcttccattaaattctattagaagtcaagaaaggagaagggggattatttgcagaagctgcagaaatcatatgctacaatctaaagaagaaatcatacttttttatcaccagtaataaaaaaaggtttaagaagaggccagttagtgaaagatagagataccagcaatattataaaatcaagagttgttccaaaaag

SEQ ID NO: 156245 - DNA, 414 bp, Homo sapiens
  misc_feature (1)...(414): n = A,T,C or G
gggaagggtgcatatcttgacagaggccgncgccactgcagccttcctcctgctctgaagtgctctcatcaggggtcagctggggatcatttgcctacatgccaatgcctggcactcacccattcatgcacttgctcattcaccaagtacacatgtatgtatgcagccaggccccacagaagctcaatgaagattacctgaagagcttgtatttgtatattgcaactaggaatgacaacaacaactcactggcaggagccaatgtgccaggcacagtgctaagtgctttgcatattttatttcatttaaccttcatcacagcctataagatagaaggtactggtctcctttctcatttaagggtataggytcagaaatgttaaactacaaggcaacgctgaagaggaaatgtca

SEQ ID NO: 156246 - DNA, 596 bp, Homo sapiens
ctacaccttgaagctcaagatgcatggaagtgaatatgctgtttcgtctccatattcattatatgaatagtagtgactgtttccagtcactatgctgctgtgtttaggaaagaaatgtaccatctttcaagtagaaagctgaagctgctacttctcatgctgtcactgctgcttggaatgttgccctctccgtctctcctttccctgcttgcctccacagactcctattctctttcagggtactttgctaaagttgaaaaacaagtgacaacatgctatgcaaaccaagatttcgatattggacatgtactcacacataccaggcataggacragaagaacatacatgcaccaaagtgggatttttttctatgcacttttctacattttgcatatttcttccactgaacatatattaattttatgaacatggaagagagcacccctcatttcctccatgaaggcttctcccacccccacagccagcaaatcagtccatcttctgacctctaacttgtgcatgcaccccagtaggttgtaattggctttgtatttcttcctattttctcactagacatgagtcgtcgctcaaagggg

SEQ ID NO: 156247 - DNA, 492 bp, Homo sapiens
ttgcttctgtgctaggacagtggcctcttgtatagtgtaccttcctagggatgaggctcttctgcccttccatctctcacttctttgcttagccacaattcctttgttctttttctgcttctgacttaaatcctcatctgaggatgcattacatcacccctcggtatatccaagctcaacctctttgatggcasctcccaagcccttctctcttttgctaaaatgaccctctgtttttatctgtatcactgggagttcaggattccaacagcccttctcctcttgccttcaaatccttaccatttaggaatctttgtgatttgatacgatggtcaaaacagaagcatgtctaatcttccatatactaaagttactccaattttactaaagttttaagagggagaactatccccagagatatttcttagcgcacacacacacacacacacacacacacacacacacaaacacttttctgtaattaggaacttg

SEQ ID NO: 156248 - DNA, 607 bp, Homo sapiens
aagtaaggactgaacactaccaagtgccagaaaggaagaggaataagagatttgacctcatcaggggacaggggagctcagctaacatttgaaggatgggtaggaattaactaggaaatgagaggagaggaggcaagagcatcccaggaagagggagcagcatggacaagagggcctgaggttgagaacataacytgtagaagctggagccaaagaggtgggggaccacagtgcaaggtgagactggagaagtggagagggtaggcaggagagacattgtaaggggcccttttgctggatgatgttggatacccattcagcatcacatccattcccaccaaaagaattccaactttgtggaggtagtcagcccttccccatacagctttgtgatgcaggaaaagatggcaccatcctcagctccagggagggttccaatagattgaggccagtccttctggatcccaggtttaagcactgcacaagacaactgctaatggtgcccaggcaggaatgtaacctaaactggaccaatgggacccccaagtgacaggaggactttcatgctgtacttttctgtttccctctaggcatccataaggaagcc

SEQ ID NO: 156249 - DNA, 530 bp, Homo sapiens
gaggctttcattggcaggtttgggccacattcccactcctaaggtcagaggcgaagtcaacttcatccaacttaaatctaagagtcatgaacaaagccttccccatggaaaakcaaaagcagctaccagcagaagggggaatgaatcctgggcagcaaaaccaatagataaatgggtatccatagagccagagataagtgaagtcagaaatatcgaaaaggggccatgagtgtgtgtcccctctgtctattagaatgcttgggtcactaatactttttactagctttggtccttccccaatggtatcccagtctctcaggtctctgggtccattgggtttgttggcctattggggaagcttcctaatatatttcctctcttgtgcgggaaagccttgtctccaactaaatgcatttttctaaagcccttaatggaatgaccttaatggaaagagtgttttagtcccaatccctggaaacacatcatagttcagctatgtcagctgttgagtccagccttagtgggagaaa

SEQ ID NO: 156250 - DNA, 398 bp, Homo sapiens
gaattctgcctaccacagtcattaaaatggggacaaaaggaaagggtcttccaggctaaatggagggcataagcaaagacatagggaatgacagggcattgggtgaamaatttggggaacagtagcactgtatccccctttaatccctgctgggaccccttctgcttctaacaccccaactaaaaacagataaaagaaagtgagaagatgagaaaatagaaattaaatcatgctaagatttctaaataatatttcccttggttgtatcctaatcattagtttatgaaatgatgacttaaggatctaaagaagtgccatcacattctttcccaagagagcaagagataacattcattggtctactgacaatgatataatgatgtcaaaatatagccact

SEQ ID NO: 156251 - DNA, 612 bp, Homo sapiens
tggtgccactgcttaccaactgggcagtaacttgccctccctgtaccttgttgtttctcctgaatcaaacagaaatggcagcagaacccactttagagggcatggggaacgttaactctgggggttgccgcagggcactcaacagtgcttggaacactgaaagctttccttacacttgtgttttcttctttactttctctatcatgtttctggattgtggggccctgtgctggtccaggttttccaagaaayagatgttgagatgggattttatcaggggaaacaccagtgagaaaacatgggcagtaaagtggggtagaccaggagacatgtcagaacacaatgccagtgaaggagagggaaggaaggctgagtggaagcccttagacccccatgccgtaggagagacttcaagtcaaaacaggccatcacaggaggatcgcttgaggccagcctgggcaacacagggagaccgtgccttttaaacaacagcagcaatagcaacagaagactcccagggtttccttggaatgggcctgcattaacaatactcctgctggactgagttggctggtgctgcctgcagaaggagtgaactcagtgcaaacgcca

SEQ ID NO: 156252 - DNA, 605 bp, Homo sapiens
ccagggtttccttggaatgggcctgcattaacaatactcctgctggactgagttggctggtgctgcctgcagaaggagtgaactcagtgcaaacgccaggatgggtttcctgagtcctttactctttctgtagttgagggtctgtgaggcttatcctgtggcctcatagacccctccagactttgagatcgcacagggctctggctcatcccctgctggtaatccctgagcccagcctgactgtgacccacacaagcatccctcaatgtgtgtgggatgaatgagcagactggagtctgcagtcctgatgtggatggttttgaagctggtttccttgcacgggagagtgctccagtgtattcttctcaatctcctttctttctggaaattaatgaaatgacttcttgtgagctcagctggctggtctgcactttctctttgaggggaaactccttttatgtgtaaactgccccaagtgccttctcaacttggcccctgccaccatctgagccaygttctctacaatcgctcccttgccaataatgccgccaaagctacaactgaaaatcaaagaacatttttaatgaaaaagaccctttatatct

SEQ ID NO: 156253 - DNA, 370 bp, Homo sapiens
ccacaatgcttagtatatttttatcactcaataactctatgttgggtgaatgaatggtgaacgaggtgattgtaatgattgggtttctttggttgaaaataacagaaatttaaattaaaatagcttagtcaaagaggggacttcactggctgatgaaaccaaactacagcaagggtggggatgggactagctttgtgacaattgggaccaggcactcagaggctggcagggtttcyttgttcttcatctctctctctctctttgtctgcacgatggcttgaatttctcttcctgggtgcgattccttccacatcgtgtggccatggctgcctgaagacctctaccctcatcctgagagcttaccagacag

SEQ ID NO: 156254 - DNA, 370 bp, Homo sapiens
ccacaatgcttagtatatttttatcactcaataactctatgttgggtgaatgaatggtgaacgaggtgattgtaatgattgggtttctttggttgaaaataacagaaatttaaattaaaatagcttagtcaaagaggggacttcactggctgatgaaaccaaactacagcaagggtggggatgggactagctttgtgacaattgggaccaggcactcagaggctggcagggtttccttgttcttcatctctctctctctctttgtctgcacgatggcttgaatttctcttccygggtgcgattccttccacatcgtgtggccatggctgcctgaagacctctaccctcatcctgagagcttaccagacag

SEQ ID NO: 156255 - DNA, 561 bp, Homo sapiens
gttgaacatacaatcatctcaggtttatttatatacatgattaaataaaatataatagagatcattttgaaatccagtgcattctaaagacactgcaaatgaacattcatgtgagtgtagaaatgagtcattcatgtttatttactggctggtaacagtagargtcagttggtttcaaagaccatttagttgaatgctacagcattgaattaaacagtcatttaaaaatacttttactttgcattaatataaattgaatttaagttatttgaattgctttttaaaatatagagaccagcattttaatgggcatttgttgtactatttaaataaatctaggctgggcatggtggctcacgcctataatcccagcactttgggaggctgaggcaggtgaatcacttgagtccaggagttcaaggctgcagtgagctgtgatcacatcactgcactccagcctggacagcagagtgagaccctgtctctaaaataataaataataaataataaatctagagtctgtccttaagtggacagaatttaaacatttataaacaatct

SEQ ID NO: 156256 - DNA, 581 bp, Homo sapiens
tctgttattttcctcacataaatgttcttctattacataagagtctctcttctttactctagttcagctaaatattttatttttatttacatatttataaagggctataggcacacacacagcactttcagagcagtaaagagaaccaaaatcaaaacatgatcttcaccccaagagcttaaaatctattttcatatttccagtatttttcagaactgccctaaaatgagtcttttaggagaaagcttgaatatacaattgtatttgcaatatctgcagaacctagacaactcagaaataaatttactttatcccaggcacagctatcggggttgtaaatatgtaaataggttcyggcctttcacacctgaatgaatggattgtatactgcagaaacctgcttggcttgagagatttaattaagacaggaatgcaagagttttcttgggacaaacagaattacagcatttcatagataatatggaaaaatttatgagcatatcacagtcaccaaatttaacattagttagttggattttcctgttgttatgtctagatgacttttgaatacagctttgagc

SEQ ID NO: 156257 - DNA, 601 bp, Homo sapiens
ggcaggggacacattttcaaaatgtaccaaggtcattaatgcaccaaatgtaaatggtctcccatttatcaaatgccccagagaaatcaggggataattgaaatgatagatgaagagatgaaattctaggctaatgggttgtatatcaatgaatcaatgtcagatttttgaaagcttttggaaaatgattcctattctttgcttatttttaaagttttaaagcctaggaagacaagtaataggagaactgaaaagcaattaaaaagagatcccatcgatctatcagaaatatttctactatgatttttctcagagtgatttgcatttccctamattaattttaacagaatttatcattatctctacctttttgtgtaatacttgtgccgcctttctttctctttttgtgtaatcatcagtttataaaattacctcacctggagatcaattctcctacttcttccttctgacaaagttaaaggaattttatgttaaccatcattctaagcaaactatcacaaggacagaaaaccaaacactgtatgttctcactcataggtgggcattgaacaatgagaacacatggacacagggcggggaa

SEQ ID NO: 156258 - DNA, 601 bp, Homo sapiens
ggcaggggacacattttcaaaatgtaccaaggtcattaatgcaccaaatgtaaatggtctcccatttatcaaatgccccagagaaatcaggggataattgaaatgatagatgaagagatgaaattctaggctaatgggttgtatatcaatgaatcaatgtcagatttttgaaagcttttggaaaatgattcctattctttgcttatttttaaagttttaaagcctaggaagacaagtaataggagaactgaaaagcaattaaaaagagatcccatcgatctatcagaaatatttctactatgatttttctcagagtgatttgcatttccctacattaattttaacagaatttatcattatctctacctttttgtgtaatacttgtgccgcctttctttctcttttygtgtaatcatcagtttataaaattacctcacctggagatcaattctcctacttcttccttctgacaaagttaaaggaattttatgttaaccatcattctaagcaaactatcacaaggacagaaaaccaaacactgtatgttctcactcataggtgggcattgaacaatgagaacacatggacacagggcggggaa

SEQ ID NO: 156259 - DNA, 464 bp, Homo sapiens
aaaaaaacttattaccatatgctctttaatgcctaaagcaaagatctcttatggaatcgagaatcataatgaggtcaatctcagttccatcaatgttatgttctattaaaatcaaatccaatcacattccttatttcaacccagcatggcttggctttgaggtatgttcaraaatgcacttaaattagaagaaaaacattaacattttatcgtgtgaataccactaatggcacaagaagattaataccacaatcttcacaagaagattagtagtaacacattctggagacttcctctactgaaaatgtacctttaataatattctcacacacttaactgtaactgtgggagttatggtttcaactgacgaagttcaggaactcatgcttaaaaaaaaaaaaaaatgaaaaacaactcccaccaaaacaggtggcatttattctctctataaatgaaaaccccta

SEQ ID NO: 156260 - DNA, 458 bp, Homo sapiens
ttaatattctcctctgtggtaatcttgaaattgagtttgtgctttgtaagtaaagtccaaggggccaatggagtatgcatgcaacagaagcttggagttctggcacacaatttgtagcacctcccataracgaattcttccttcttcctctcagcctcacctccagcccactaccctagacacagggtggcagcgtctaggtctggtgaagaaggaggacctggatgtgggtacaggaaggctgatcaggcatgcatcacagtcaggtggcctggcagttccatgatgcagccagcagtcaactcttgtccaccccgaatccagatgtctagtgccctagctggcaatcccttggaaatcacctgtccattaactatgggaagaggagactgactttctcaccttcaagtgtaggcttacactttttttcacttagttttacaaattacatagatgag

SEQ ID NO: 156261 - DNA, 498 bp, Homo sapiens
ggcccaacatggcacacagatgtacgactgagtgaggaccatgcccgcccttagccatcccatccacatggcctgaggaaagaaaagagacacaagcagcagcaggagctgcaggaaggtggcttttagtccccaggtgaacgtttcagaasagacagttctgggctcaggccgcggtcgtgccctcgggagcgtccttccaactaggactccattctctcatctccttcagccatgcctccagctcccaggcctgtggcgggcccctctggaagcctcggcctccaatgtcttacctcctccctgatgtgttccacctgctcctccagcagctcgttcctctcgggtagggtcttgttcttcttcaacaacgactggccgatgcgagcggccaattctaaatcccgctctttctacaaaaggaaagagggagaacagagattcaaaagaccctgtgtttcctgaaggagtcaatggtgctcagtgtcaaatgaggaa

SEQ ID NO: 156262 - DNA, 498 bp, Homo sapiens
ggcccaacatggcacacagatgtacgactgagtgaggaccatgcccgcccttagccatcccatccacatggcctgaggaaagaaaagagacacaagcagcagcaggagctgcaggaaggtggcttttagtccccaggtgaacgtttcagaagagacagttctgggctcaggccgcggtcgtgccctcgggagcgtccttccaactaggactccattctctcatctccttcagccatgcctccagctcccaggcctgtggcgggcccctctggaagcctcrgcctccaatgtcttacctcctccctgatgtgttccacctgctcctccagcagctcgttcctctcgggtagggtcttgttcttcttcaacaacgactggccgatgcgagcggccaattctaaatcccgctctttctacaaaaggaaagagggagaacagagattcaaaagaccctgtgtttcctgaaggagtcaatggtgctcagtgtcaaatgaggaa

SEQ ID NO: 156263 - DNA, 635 bp, Homo sapiens
gcaaaatatgtgtaccaaggctgataactgttgtgtgaaagctcactaagctggatgtttggagagtccaaatatcactgcagcagcaaaccagtcattctgatgggctgcagagctgatacctggtaggataagcagtaaactaggtgagtgttttcagtgtggtcatgatggccagggtgtgaaacttgatattgcagacttgaaaaaaaggataatttaaaaaatgaatactttatgattctgrtatttattcaaaatgtgcctttttagaagtaatttcactctttaaaaacttatggcagccaacaatttacatatctgtgtatcactgtgtcacttaaaaaaaagtatagcaatcctcctacctgcagataacttggttcaaaaccagcttatgttgcatctttaaagatttcttgtaattatttttactaatacaggctgatctctccaattttcttgaatttgtgagattatttgtaataaacaaattggtactgcaagtttctcctttagggtgtatctagggatgttttcagttctctttattagatattaataagaaaaaggttttgcttacattgacccataaaccctacagagtctttgtgaatactgcagataatcagttt

SEQ ID NO: 156264 - DNA, 593 bp, Homo sapiens
tataataaaactctattcatatttatccatctgtgggactagatgtgaaaggaaaagaagaaaaggcaaatttatccaaatattttgattaacagaaagaacaattttcagagaattaaaggcatgtagagcaaaactacacagaacttaattcatcctttctttgttaattgaggaggtggttaggattttctctcatatgtatcatgattaatgattacttgttaactctgcggaacataggaaagagtactagttacagaagggtaataagtaacatttaaacccgtataccaggcactgttcaaaaacttgaaatgtattatacatcaaattctcatgacaaccccataaggyaggaactgttactatccctattttacaggttaagaaactaaggctcagaagtgaggtacttgttccaggttacacaggagtagtcaggatgctcattgttagagtggtaaagagtctattgtaattagctgaagggatcctatgaacaaagaccaaaggaagttcatgtgtttggtttcagcagtctcgtgcgtaacatgagtgtttgtatcccagagccttaggcagggggtttc

SEQ ID NO: 156265 - DNA, 610 bp, Homo sapiens
cttaaaaactgagttcctagtcatgatgggatgggaagtcagacacgcctcattatgtctcctccccattgtggttasatgcaacttaacaacattaatgttaaaataaccataaagctgacagaatagactctttatagcagtaggacacaaagttataaacaggatctgaggccattccaggtaagggttaagtcactccctgcccctacacttaaagaataaactatgttttaactgccacaaggtttttccttttccctagcagctaaagaagcactgaccttgacataagcaatggtgaaacaatttacagctcattcactgccaaatgctgactaactgaccccctgttccaccagccttgatgggacaagaggctgatttcagtaactttctcctgataagaaaaccactgaccatggactggttctggctggacacagtggctgcacacttgagtacctttgtgtcctgaaaaaaaactttttgatatgtagggcctaattgtaatatatttatttatttatttttattttttttttattattattatactttaagttttagggtacatgtgcacaatgtgcaggttagttacatatgtata

SEQ ID NO: 156266 - DNA, 498 bp, Homo sapiens
gctttatatacttcataaaaagcagatatccactgtgttagtccatttgtgttgctataaagaaatacctgagactgagtgatatggtttggctgtgtccccacccaaatttcatcttgaattatagctcccataattcccatatgttgtaggagagacctggtgggagatcattgaatcatgggggtggtttcccccatactgttctcatataagtgaataagtctcatgatatctgatgtttttataaagggtttcctctttcacttggytctcatttttctctcttgcctgctgccatgtaagacatgccttttgccttccaccatgattgtgaggcctccctagccacgtggaactatgagcccattaaacctctttttctttacaagttgcccagtcttggatacgtctttatcagcaatgtgaaaatggactaatacactaggtaatttataaagaaaggagatttatttggcttacagttttgcaggctgc

SEQ ID NO: 156267 - DNA, 424 bp, Homo sapiens
attttgggacccaggctggatgggaggtagcttcctggggaatgctgttctgatgacagatggcagaagccgaagaaagcaaaccaamccatgcaagtacatttaatgcctttggttgaatgggcatatggtacccctactcacattccaagtcacagatcaaacccaaaaccagtggagcaagggtgtatacatgtatacatggccaacaagagagccttggcaaggacaacaaaggatgaggaacaagtaacaccatctttctgtccagcctacaaaaggcatgcagctggcttctccctttttccataaaggcacagggacaccaagtgttgctctctgatgactgaccgtatcagccacatcccagcccccaaaagtcacttaacacccagtttcccatgagtcactcaaaaatgaattc

SEQ ID NO: 156268 - DNA, 553 bp, Homo sapiens
ggaattcatcctcttgaggagagtctagctacgactgtgtccacatggcccaggccaggagagagcaggaggtggttgaaggatgggaagacacgtgatgggaaggacctccagacactgcttcaggctgtgggttgagtttaattttctacatgtcacttattttgggacccaggctggatgggaggtagcttcctggggaatgctgttctgatgacagatggcagaagccgaagaaagcaaaccaaaccatgcaagtacatttaatgcctttggttgaatgggcatatggtacccctactcacattccaagtcacagatcaaacccaaaaccagtggagcaagrgtgtatacatgtatacatggccaacaagagagccttggcaaggacaacaaaggatgaggaacaagtaacaccatctttctgtccagcctacaaaaggcatgcagctggcttctccctttttccataaaggcacagggacaccaagtgttgctctctgatgactgaccgtatcagccacatcccagcccccaaaagtcacttaacacc

SEQ ID NO: 156269 - DNA, 597 bp, Homo sapiens
atacagttattcaacactgaataaagttctcctaaccctcaaagatagaagagaacagtagctatccctyaattccaacttcaaaagaggggtcctaattggcctgcaatctatattcccatccatatacatttctttttcagtgctaacactgcaatttaagtgtgagtcagtagctctgacataaatgatgattctgcatcttttttaaaacatttgactcaccttttattagtatcaaaagttctgtaaaagcttccctcattgacgattcaaatgccaaataatcagagacaaagcaatggtgtgtgtctattgagttgcaataaaaaagacagaggcaaataaaagacaggtacatataaacaggggcaaatttcatttccagactaatctgcctgaagctaggaaggaactcaactagttagaaatgtgtaagcaagtaaccacaaaattggcacataattgaaatctcctttttgtacgtttcctaaaccagtttatttctggacttctgttcctttattccctactttgctacctctttaaatgggagtatgaaaataccagtggtcccagtaaattctgtctcaaaaa

SEQ ID NO: 156270 - DNA, 603 bp, Homo sapiens
ggattaggctttgattcattaccagtgaaatctcagaagtacttgaaagattttcttcctttcaaatttccttgtttgccttttgattgctattattcttagttttctgcctaaatgaccatttgggttttgtcccttaaacttaaatattatcaagaattagtccacagatttctattttgcaaatccgttttgcatgattaggctttggctggtttgatcttctatctagactgctcaaactttctccatattgacaataagtctgttttccttccttatcatgtatgtattcattggagtagcactgttaatttccttcagaaacttttcytttggattcacaacttggctgactggtgcaactgacttatattttaatgtatcttggcttttgacatgccttcctcactaagctcaatcatttctagcttttgatttaaaatgtgacacttgtgatcctttctttcacttgcacatttagaagccattgcaggataattaatcggcctaatttcgaaactgttatgtcttagggaaaagggaagcctgaggggagggagagagatgggagaattgctggtcagtggagtagtcagaaca

SEQ ID NO: 156271 - DNA, 513 bp, Homo sapiens
tttaaggaattatatttagaactaagttataattgtttcatgatggagagagatgcatgctctttttctgcatccttcatgttgagttgtgatcagaacaaagttatctacattggaatgtgaagctagccaacataaaaaaatgtggaaatatgtgtgctaatactacaataaatgaactcttatggaagttcacctactgctggtggctgacatcccgtgagcgtatacccccactgactttcaagagatgtgtggttcaagttcccagaagaaaaagaaaataaaagaaaaacctatgggaaccaagagtacatcattcaggaaaaagttcaataagaaagtatttccgtagagattacagtgattactggtagagcaaacattcgtctcagagttgaaaggttagttgtcttcaaattagatgatgaagccactggcactattaytaagtttgccagcaatggaatgtctcatagcttagaaaatacaataaaatcagaagtgatgtta

SEQ ID NO: 156272 - DNA, 626 bp, Homo sapiens
gtctattccagtgacgacaaacctctgccctttccatgatggaagaggtccaatataatcaacctgccaccaggtagctggctgatccccctgaggaagggtgccatatggagtgctcagtattggtctctgctgctggcaaattgggcactcagcagtggacatagccaggtcatctttgctgagtggaggtccttgttactgagtccatgcagagcctccatccctgccaccgtagacactttgttcatgggcccattgggtgatgtcagggagtggctggggaaagaggctgaacactgtccacagaaccagtcatcccacccacttgatgactcaaattctcttctgctggggtcaccctttggtgagcactcacatgggacacaaatgtcttgacagtttttgaccactcacagagttccagccacatacttcttccccaaatwttgttgtcacaaatttttgaatcatgcttcttccaagtcactgaaaccactggctacagccaatgaatcagtatgtagtcacacacctggccatttctccttccatgcaaaatgcatggccaggtgcactgattgaagttctgctcactggggagatttcccttcactgttgtcctt

SEQ ID NO: 156273 - DNA, 572 bp, Homo sapiens
catcatttggcaggtcccgagttcttgtcctgcatccaggaagaatgaggtacatcaacaactggagggtgggcaaggtggagaggagcttcattgagtgaaagaacagttgttgggagacccgaagtgggtagctcctttccataggtaggttatttcagtgagtgtccaactctgagcagagaggagatccagaatggatagctgcttttcacaggcaggtagtcctgagaagtgcagccctcagcaaagagaagacccagaatgtgtagctcctatctgtaggcaggttgtcccagtgagtgtccagccctcagcagagaagaaaccagagtagctcctttctgcaggcaggtaggtagtgctgatgagtgcagccctcagaagaaaggagacctggagtggrtagctcctatccacaagaagtatccagaaagtatccagctgtcagtggataggagaactggactgagtagcttctttctttaggcaggtcatcccaatgagtgttcagctctcagtggagaggagacccagagagggtagctcctttctgcagtcaggttgtcctg

SEQ ID NO: 156274 - DNA, 608 bp, Homo sapiens
aaattctcactctgggctatagactccacctggaattgatagccgggctcccaggcttcaggccatccctggcttaaaggtgggactatgttggggacccacccctttccactcaagagcctgtctgcctcctgccaccatcaatcacrtcatgcacagcacccaggatgttcctgcccaggggcacctgcaggcattcaccaatctgctcttagcccccccccacttcctaccacatttattggtgcccaaagcaaagttcagaggaggccaaggtggcagagggctggtgtgtccgtgccagcctgattgcatgcacatgtggccagtttgtgacagtgcccaggcttgaccacaactttgctccaacccagactgggcactgggtatggggagaggccaggcagctggagcaggtgcttctgagcctgaggctgcttggggacttcctgggcccccaagagtgcaaggatgactgggtctgcagctacagctgcgtgactgcagctctacctgggagtaccaggctccttccccaccaactcagaaggaggcgggtctcctgcctgttcccagctccctccagctccatggagtacacaggccaa

SEQ ID NO: 156275 - DNA, 608 bp, Homo sapiens
aaattctcactctgggctatagactccacctggaattgatagccgggctcccaggcttcaggccatccctggcttaaaggtgggactatgttggggacccacccctttccactcaagagcctgtctgcctcctgccaccatcaatcacgtcatgcacagcacccaggatgttcctgcccaggggcacctgcaggcattcaccaatctgctcttagcccccccccacttcctaccacatttattggtgcccaaagcaaagttcagaggaggccaaggtggcagagggctggtgtgtccgtgccagcctgattgcatgcacatgtggccagtttgtgacagtgcccaggcttgrccacaactttgctccaacccagactgggcactgggtatggggagaggccaggcagctggagcaggtgcttctgagcctgaggctgcttggggacttcctgggcccccaagagtgcaaggatgactgggtctgcagctacagctgcgtgactgcagctctacctgggagtaccaggctccttccccaccaactcagaaggaggcgggtctcctgcctgttcccagctccctccagctccatggagtacacaggccaa

SEQ ID NO: 156276 - DNA, 604 bp, Homo sapiens
tctgcatccatgttgctgcaaaggacatgactttattcttttttatgactgcatgctaccccacagtgtatatgtacaacattttcttaatccaacctaccattaataggcagcaaagttgatttcatgtttttaatattctgaatagtgctgtgatgaacatatgagtgcctgtctcttttttgtagaataatgtgttttcttttccacatatacccagtaataggcttgctgagttgaatagtagttctatgttttaggtctttgataaatctccgaactgcttcccaaagtggctaaacaaatttacatttccccaagagtgtataagagttcccattgctctgcagctttgccagcatcttgtctttttyagtaaaagccattctgactggtttgagaaggtgtctcattgtggttttaatttacatttctctgaggattagcgatttgaccattttctctattttcattggccacttgtgtgtcttaagaaatatctgttcatatcatttgcccacttttaatggagttatttggttttgtcctgttgagttgttaagttccttatagattctgaatattagacctttgttggaagcat

SEQ ID NO: 156277 - DNA, 699 bp, Homo sapiens
aaacttgagtttatctttctactaagaacctctaaagtttaaaagataataaataggagctttccagtaccttttttctttcttcttagtaaaagaaaattctttgggagacaaagatgggcggatcacaaggtcaagacatcaagaccatcctggccgatatggtgaaactccgtctctactaaaaatacaaaaattagctgggcatggtggcacacacctgtagtcccagctacttgagaggctaaggcaggagagtcrcttgaacccgggaggcggaggttgcagtgagccgagatcgcaccactgcaccccagcctggtgacagagtgagactccatctaaaaaaaaaattaaaaaacagaacagaaaaagaaaatgcaaagcatcagagggtatggtgtcctgggatctaagataatttttactttatttttagtagaagggagaggaaaatacgcaaatactaatgatagttccacagtgactgagaactgaatactggaatttgcaacgtgtgatttgatgaccttaagaacactggttttaaataattggtgggataaagcattggctggaatgagtttgagagaaaatggtatgaaagtatttggagaaagaatgttaatacactgttagggcaagtggaatttccttttagtggcagaaatgacatcatatttatatgccaatggtaag

SEQ ID NO: 156278 - DNA, 627 bp, Homo sapiens
aattagaacattatttgaacattcgaattttttaaatgatataaaaagatgaaaatgtcataacatttacttgaaaataaataaatatcatagtgtaattatatgcatatatagacatataaaaatctaaaatatagctttttcaatgttagatacatttgaggagaaaaaatgatacaatgttttcattgcacattattcaacatcagtataatataacttcaaatatttcttgtatattcctataaaaataacataataaataattctacaagttaaaaaaattacataggataaaatatagaaagtatataatattatttaccatagtaaagtagaagtaagcatagaaataggagaatactcactcatgaatgggagttgaacaatgggaacatatgggcacagggaggggaacatcacacactagggcctgttgttgggtggggagcaaggggagggatagcattaggagaaatacctaacatagatgtaggtgatgggttgatggatgcagcaagrcaccatggcacaagtatacctatgtaacaaacctgcacattctgcataagtttcccacaacttaaagtataataaaaaatgagtaattaaaaaaaagaaattgga

SEQ ID NO: 156279 - DNA, 627 bp, Homo sapiens
aattagaacattatttgaacattcgaattttttaaatgatataaaaagatgaaaatgtcataacatttacttgaaaataaataaatatcatagtgtaattatatgcatatatagacatataaaaatctaaaatatagctttttcaatgttagatacatttgaggagaaaaaatgatacaatgttttcattgcacattattcaacatcagtataatataacttcaaatatttcttgtatattcctataaaaataacataataaataattctacaagttaaaaaaattacataggataaaatatagaaagtatataatattatttaccatagtaaagtagaagtaagcatagaaataggagaatactcactcatgaatgggagttgaacaatgggaacatatgggcacagggaggggaacatcacacactagggcctgttgttgggtggggagcaaggggagggatagcattaggagaaatacctaacatagatgtaggtgatgggttgatggatgcagcaagacaccatggcacaagtatacctatgtaacaaacctgcacaytctgcataagtttcccacaacttaaagtataataaaaaatgagtaattaaaaaaaagaaattgga

SEQ ID NO: 156280 - DNA, 592 bp, Homo sapiens
tgtctcactttgttgccagggctggtcatgaactcccagcctcaaaccatcctctcaccttggcctcacaaagtgttggaattacaggtgtgagccactgcrctaggcccaaaaacatcatttctaaccactgtatgagtcaacttaaaatctggtgatctaggaaaaaaaaatctaactgtgtgtcactgctttcactgtgtttttataagtaaagtaaaatgtagttagggcacgtcattccagtataatatttataccaagtgtgtgaatattttatatacaaaaaatgtgctttaaggtggcttacactatacttagcatgtgttaacatggtcttgggtaatcgccagtgtatttgatgctttccagcagtttaaaataatcaatgttgcttctgtcacactccctgtatcttggttggcatttacaatgcaaagtaactgtttttacacaagatcttagatgctattattcttgatttaaaataactgcttggtcaggatactgacaaaaatagtgacaaggaaaagaagctgggtatataatagtattaattgtatttcagtgtgatttcattggtttaatttaa

SEQ ID NO: 156281 - DNA, 592 bp, Homo sapiens
tgtctcactttgttgccagggctggtcatgaactcccagcctcaaaccatcctctcaccttggcctcacaaagtgttggaattacaggtgtgagccactgcactaggcccaaaaacatcatttctaaccactgtatgagtcaacttaaaatctggtgatctaggaaaaaaaaatctaactgtgtgtcactgctttcactgtgtttttataagtaaagtaaaatgtagttagggcacgtcattccagtataatatttataccaaktgtgtgaatattttatatacaaaaaatgtgctttaaggtggcttacactatacttagcatgtgttaacatggtcttgggtaatcgccagtgtatttgatgctttccagcagtttaaaataatcaatgttgcttctgtcacactccctgtatcttggttggcatttacaatgcaaagtaactgtttttacacaagatcttagatgctattattcttgatttaaaataactgcttggtcaggatactgacaaaaatagtgacaaggaaaagaagctgggtatataatagtattaattgtatttcagtgtgatttcattggtttaatttaa

SEQ ID NO: 156282 - DNA, 592 bp, Homo sapiens
tgtctcactttgttgccagggctggtcatgaactcccagcctcaaaccatcctctcaccttggcctcacaaagtgttggaattacaggtgtgagccactgcactaggcccaaaaacatcatttctaaccactgtatgagtcaacttaaaatctggtgatctaggaaaaaaaaatctaactgtgtgtcactgctttcactgtgtttttataagtaaagtaaaatgtagttagggcacgtcattccagtataatatttataccaagtgtgtgaatattttatatacaaaaaatgtgctttaaggtggcttacactatacttagcatgtgttaacatggtcttgggtaatcrccagtgtatttgatgctttccagcagtttaaaataatcaatgttgcttctgtcacactccctgtatcttggttggcatttacaatgcaaagtaactgtttttacacaagatcttagatgctattattcttgatttaaaataactgcttggtcaggatactgacaaaaatagtgacaaggaaaagaagctgggtatataatagtattaattgtatttcagtgtgatttcattggtttaatttaa

SEQ ID NO: 156283 - DNA, 440 bp, Homo sapiens
gtgaatattggtacattataatcttaggactatttgttaacaataacctcagtttttattacctaacttgagtcaatatttcttctccttttcagtttggagaaatgttaattgaaaagctatcccaatatttagtatgtatgaagtcccatgcagggtacagatggcatcttaaccccatccatatgtttaaagcatctcgttcatttggaagtcttacaggcaccaaaacaatcatggagagaagtggtctttaaattttaattttatcaaaataaaccagatctcttgtgtataaaccattgccaaaaacggattttcttcaaacagacagcaagccaaacccatttgtaaaggccaaggaaaagactgattacgtatrcatttgattatatgagagttagattgaattatctttgttttggctatgttatttttgt

SEQ ID NO: 156284 - DNA, 588 bp, Homo sapiens
aaactttgataaacagattggtgagatgcctgtgcatttcctattcaatatcttaatggaaatagtcaggctagcttcttaggtgtccatttgataagacagtagtctgtattttggggtgacatgaataatagtcttattaagctcctaaattaagatatagtaacaaacataagctacagcttattgccttgactaagtttggtgaaaaattatatagtaaatatatttttacctgaatttaatgctccactttaaaaaagaaacacatatacaactttttaaaaatctattttattgcttaagccatgatttaaaagaaacacacacacacacacacacacacamacacacatatatatatatcactttttaaaaatatctttttattgcttaagccatgattcttcaataacaagtcaaacttcatttctcttgagtctgaaaacaagccaagatttattggaaggtgaagagaaggaaattgcatcagtgatgactggttttggaatgatgttaatttaaatataaaatttaaggaaagaagccattatcagattagagtttcatatctcagagaaatgttgc

SEQ ID NO: 156285 - DNA, 405 bp, Homo sapiens
gaaagcatgattctctctctctctctctctctctctctctctccattttaaaaattgtgataaaatacacgyaacataaaatttgctatttaaactattttaagtgtacaattttgtggcattaagtaacattgaacattgttatacaatgcatcatctcataaaacagctggactttattgataactgcagagtcagatatcttagcaatgaaatatgcctcaaggatataagtcttagagtaagagtctagcacgggtatttatatggctcatcatatcaaaacggtgaacaacatagctaacatccttaatacttcacaattcttttacttgatactcctaggatctattgcctgattttaaaggctaataaaatctctcttttacactttaatgatacgat

SEQ ID NO: 156286 - DNA, 405 bp, Homo sapiens
gaaagcatgattctctctctctctctctctctctctctctctccattttaaaaattgtgataaaatacacgtarcataaaatttgctatttaaactattttaagtgtacaattttgtggcattaagtaacattgaacattgttatacaatgcatcatctcataaaacagctggactttattgataactgcagagtcagatatcttagcaatgaaatatgcctcaaggatataagtcttagagtaagagtctagcacgggtatttatatggctcatcatatcaaaacggtgaacaacatagctaacatccttaatacttcacaattcttttacttgatactcctaggatctattgcctgattttaaaggctaataaaatctctcttttacactttaatgatacgat

SEQ ID NO: 156287 - DNA, 405 bp, Homo sapiens
gaaagcatgattctctctctctctctctctctctctctctctccattttaaaaattgtgataaaatacacgtaacataaaatttgctatttaaactattttaagtgtacaattttgtggcattaagtaacattgaacattgttatacaatgcatcatctcataaaacagctggactttattgataactgcagagycagatatcttagcaatgaaatatgcctcaaggatataagtcttagagtaagagtctagcacgggtatttatatggctcatcatatcaaaacggtgaacaacatagctaacatccttaatacttcacaattcttttacttgatactcctaggatctattgcctgattttaaaggctaataaaatctctcttttacactttaatgatacgat

SEQ ID NO: 156288 - DNA, 579 bp, Homo sapiens
tccaaccctcatttcttctgcctcagattaggtttttctttctaacctaagtcactgaaatctacttctaagttacatcattgactctaatttctcatttcattctattttcttttttttttctttttttttttttgccattagaaaggttcctctaaaaaacattgatctaaccaatcatcccatattggaaacctaggatgacactacacacctatcggaatgctaaaataaaatattcaacaaagaacaacaccaaatgctggcaaagatgtggggacagggtcactcgtatattgctggctggaagctagaatggtacagtgattttgcaagataattgggtagtttcttcaactgagtaattgcactgctgggcatttattccagggaaatagcatactcacacaaaaagttgcacacaaatattcatagcagctttattcttaataaccccaaactggaaacaaaccagatatccttcaatggctagatgattaaatataatataggatagtcttaccatggaatagcagtcagmaagaaaaagaaacaagccgctgataggtgcaacaattt

SEQ ID NO: 156289 - DNA, 579 bp, Homo sapiens
tccaaccctcatttcttctgcctcagattaggtttttctttctaacctaagtcactgaaatctacttctaagttacatcattgactctaatttctcatttcattctattttcttttttttttctttttttttttttgccattagaaaggttcctctaaaaaacattgatctaaccaatcatcccatattggaaacctaggatgacactacacacctatcggaatgctaaaataaaatattcaacaaagaacaacaccaaatgctggcaaagatgtggggacagggtcactcgtatattgctggctggaagctagaatggtacagtgattttgcaagataattgggtagtttcttcaactgagtaattgcactgctgggcatttattccagggaaatagcatactcacacaaaaagttgcacacaaatattcatagcagctttattcttaataaccccaaactggaaacaaaccagatatccttcaatggctagatgattaaatataatataggatagtcttaccatggaatagcagtcagcargaaaaagaaacaagccgctgataggtgcaacaattt

SEQ ID NO: 156290 - DNA, 545 bp, Homo sapiens
tcaactgagtaattgcactgctgggcatttattccagggaaatagcatactcacacaaaaagttgcacacaaatattcatagcagctttattcttaataaccccaaactggaaacaaaccagatatccttcaatggctagatgattaaatataatataggatagtcttaccatggaatagcagtcagcaagaaaaagaaacaagccgctgataggygcaacaatttacatgcgtctcatgggaataacactgaaggaaaaaaaaagaatctaaaaggtacatccagtgtgatttcatttatacagcatatgttaacaaaagccagaaatcaggattgggtgtggaggggaggtaggtgtgcctataaaaatgcatcactagggatcctcgtggtgatagagctgttttgggacttaactgtttccatgtcaatatctgagttgtgatattgtagcacagttttgcaagatgttaccatggggtggcaactggatgtgaatttataattatgtcaaattgagacgtttgattaaaatgaaaaacta

SEQ ID NO: 156291 - DNA, 545 bp, Homo sapiens
tcaactgagtaattgcactgctgggcatttattccagggaaatagcatactcacacaaaaagttgcacacaaatattcatagcagctttattcttaataaccccaaactggaaacaaaccagatatccttcaatggctagatgattaaatataatataggatagtcttaccatggaatagcagtcagcaagaaaaagaaacaagccgctgataggtgcaacaatttacatgcgtctcatgggaataacactgaaggaaaaaaaaagaatctaaaaggtacatccagtgtgatttcatttatacagcatatgttaacaaaagccagaratcaggattgggtgtggaggggaggtaggtgtgcctataaaaatgcatcactagggatcctcgtggtgatagagctgttttgggacttaactgtttccatgtcaatatctgagttgtgatattgtagcacagttttgcaagatgttaccatggggtggcaactggatgtgaatttataattatgtcaaattgagacgtttgattaaaatgaaaaacta

SEQ ID NO: 156292 - DNA, 523 bp, Homo sapiens
tttaaacatttatcaaaatttgctgtgtaggagatctgtgttctaaaagctgttaatttcaaagatgtyaccagagacaaaataatagagatttagagtttggagaaataggcttggtccctttttaaatgtcaccatgttacgtaagttgttttagccagctgagccctatgatcttataatacaggggaaaataaatgcctcatttatttcacagggctgttgtaaagatcaaataagataatacaggtgtgacagctcttagtaaactttaaccatgtaaacataaatgttatcatttttttaatggatatgatactgcttagtgactcctatctaaaataaaattaatctcagctgtacttctagggattttgttctacaattcagtgtgtgattttgtttaaaggggagccatcactcattaaagtgtggttgatgttcatgctgttcccatttgtccggttttttacctatcatccactgatagtcattcatgaacatttaaaatgtaccacaacag

SEQ ID NO: 156293 - DNA, 523 bp, Homo sapiens
tttaaacatttatcaaaatttgctgtgtaggagatctgtgttctaaaagctgttaatttcaaagatgtcaccagagacaaaataatagagatttagagtttggagaaataggcttggtccctttttaaatgtcaccatgttacgtaagttgttttagccagctgagccctatgatcttataatacaggggaaaataaatgcctcatttatttcacagggctgttgtaaagatcaaataagataatacaggtgtgacagctcttagtaaactttaaccatgtaaacataaatgttatcatttttttaatggatatgatactkcttagtgactcctatctaaaataaaattaatctcagctgtacttctagggattttgttctacaattcagtgtgtgattttgtttaaaggggagccatcactcattaaagtgtggttgatgttcatgctgttcccatttgtccggttttttacctatcatccactgatagtcattcatgaacatttaaaatgtaccacaacag

SEQ ID NO: 156294 - DNA, 523 bp, Homo sapiens
tttaaacatttatcaaaatttgctgtgtaggagatctgtgttctaaaagctgttaatttcaaagatgtcaccagagacaaaataatagagatttagagtttggagaaataggcttggtccctttttaaatgtcaccatgttacgtaagttgttttagccagctgagccctatgatcttataatacaggggaaaataaatgcctcatttatttcacagggctgttgtaaagatcaaataagataatacaggtgtgacagctcttagtaaactttaaccatgtaaacataaatgttatcatttttttaatggatatgatactgcttagtgactcctatctaaaataaaattaatctcagctgtacttctagggattttgttctacarttcagtgtgtgattttgtttaaaggggagccatcactcattaaagtgtggttgatgttcatgctgttcccatttgtccggttttttacctatcatccactgatagtcattcatgaacatttaaaatgtaccacaacag

SEQ ID NO: 156295 - DNA, 524 bp, Homo sapiens
attaaaattaaatactctatccatttaaagtagcaytccaataaatatatatagtatttagcttattataaaataatggaagaatcttcttatattaaaatctcacagagtgccaatattcctataatcatggtaataataatttagaatatgccctctcacaagaatctaggacagtctacaagtaataaacaaaaaaataaagcaatgtgggctcactgcccagatgatctcaaatatgtataatggaacaaagaaagaaaagaaatacttataagcaaaatcactccatgaaggaagaaaaaatggaatagtaattggtcaaaattgtggtagaaaataattatagggtgctcatgaatctcctttataaggagctatgtgtatctaagaatattttttcctgctttagaattcttcagaagtccctttgagataaatacaaaagaaacaaaggaagctacctgtacatctaccattttacaacacaagaaaactgcaactgacgtaaaatgtgcaaatct

SEQ ID NO: 156296 - DNA, 493 bp, Homo sapiens
gttgaaagttctcctaatgcagatcctgtgttccattgtcttttgtgagctccttttactcagaatagtgtttggcatatttttaggctgttatgaatatttctgttattgttagtgatagatttatttgttagattattttattgataaaagctctgtattggttccatgccagattccacacaacagaattgactttcacaaattatttattaaaaattatctgtctcaagcttcttcttatagtaaggaaacataaataagttggtaggcaggtaggtaggtagatagaaaaaatagaaggaaaatcataatttcctttaaaactaattgctcaatatcatactcttttcaattaccagagattttagtaatacaaccattagtttcatatagtaktcttttaaataagcagtatatatttagtgtagccttttttccccagaatctgtgccaacttcttaagatacaaaagagatgacatgaaacatgt

SEQ ID NO: 156297 - DNA, 588 bp, Homo sapiens
attttgtagttaatataggtccaggaatattttttgagcaattacatggactagacaggtgcatgtcatgcccctaacacctctcggagtacaagaactcaaatcttagggaatcattcttcacactcatgagaatctggagcaattcctatatttggtacaccaggagtgggcttctctcacaagcaggtgaggaaatgggagatctgctagtgtggagatgcaaagtagtacctgagaarcagctattgaaaaaacatggaggaaacctggagaacagagtgacaatgaaaacaaaaaaattcaagtagaacaaaaaaattgtaaatatttttaatcataatttagataagttgtttggaaaatatggacttgatttgacttgaatcttacttatttccaaactcaggtatgctgagaaaaattgaagaaaaccaagaaagcttttaaatatgtgcctctgctgggttttcttttccctctcatttgggcctttcttgtttactagattattacttaccctaaggtaacttcaaattaaattttactactaacaaaacaacaggacaagagaaatcttagtgataa

SEQ ID NO: 156298 - DNA, 588 bp, Homo sapiens
attttgtagttaatataggtccaggaatattttttgagcaattacatggactagacaggtgcatgtcatgcccctaacacctctcggagtacaagaactcaaatcttagggaatcattcttcacactcatgagaatctggagcaattcctatatttggtacaccaggagtgggcttctctcacaagcaggtgaggaaatgggagatctgctagtgtggagatgcaaagtagtacctgagaaacagctattgaaaaaacatggaggaaacytggagaacagagtgacaatgaaaacaaaaaaattcaagtagaacaaaaaaattgtaaatatttttaatcataatttagataagttgtttggaaaatatggacttgatttgacttgaatcttacttatttccaaactcaggtatgctgagaaaaattgaagaaaaccaagaaagcttttaaatatgtgcctctgctgggttttcttttccctctcatttgggcctttcttgtttactagattattacttaccctaaggtaacttcaaattaaattttactactaacaaaacaacaggacaagagaaatcttagtgataa

SEQ ID NO: 156299 - DNA, 588 bp, Homo sapiens
attttgtagttaatataggtccaggaatattttttgagcaattacatggactagacaggtgcatgtcatgcccctaacacctctcggagtacaagaactcaaatcttagggaatcattcttcacactcatgagaatctggagcaattcctatatttggtacaccaggagtgggcttctctcacaagcaggtgaggaaatgggagatctgctagtgtggagatgcaaagtagtacctgagaaacagctattgaaaaaacatggaggaaacctggagaacagagtgacaatgaaaacaaaaaaattcaagtagaacaaaaaaattgtaaatatttttaatcataatttagataagttgtttggaaaatatggacttgatttgacttgaatcttacttatttccaaactcaggtatgctgagaaaaattgaagaaaaccaagaaagcttttaaatatgtgcctctgctgggttttcttttccctctcatttgggcctttcttgtttactagattattacttaccctaargtaacttcaaattaaattttactactaacaaaacaacaggacaagagaaatcttagtgataa

SEQ ID NO: 156300 - DNA, 395 bp, Homo sapiens
gtaaccctgccatcatacattgtatttattcatcatttatgaaattagagttgtattcttgcattctttgctatgtgtctttattctttactgaagaaattgcctgcaaatgaccatttaattatcaaatgttaatrtcttcatcttcttaaacctcttaattttttttctcttttttaaaagttttatgatgttgggcaagctatctagctctataaattttaatgttttcatctgtaaaataaactggcatccagtttttaggtttgtcatataaataattgaaatacttatacaatgtcaataatggtatcttcttctaattgacttctccatctcttatctttctctaatcagccattgaactttcacactgctaataatttgaaaataat

SEQ ID NO: 156301 - DNA, 541 bp, Homo sapiens
tccatttgttatgttaaatattttcaattacctttgaactattctcaggttaacaatataaatatttcaaagattataattttaaagaataaggctgagaaaactgatattataattactgtttttaagaatttacatcagcaaatatgtaaccagcaatagccaggatatgaaatacatccttgggatatttaactataatctgctttacctttttttttcactcactatattcagctgataaaactccaatgttaatcttcaattaacctatattaatttgtctaatgattaacagaaataaatctcgattgtgtttctgcagttgtgcctccatctgttcatatgagggaaggggtgacaatgagaattatttcaagtatttggaaagagtccttgacccagttaacagataacataaattttctcatccgatttcctactgcttagtaccctataatgtagagattcaaagccttaycatgttggaacatgaaaagcttgacaaatgctcaaatgtatttaattttacagcagatat

SEQ ID NO: 156302 - DNA, 556 bp, Homo sapiens
ataacataaattttctcatccgatttcctactgcttagtaccctataatgtagagattcaaagccttatcatgttggaacatgaaaagcttgacaaatgctcaaatgtatttaattttacagcagatattttagaaagtagtaattttttattctatgaatcacagcagcacccaatgtcttatgtgtttctttttattctgcgtgccgataatgcctcttacacatttctatttgcagatcactaggaacaattctttagttcacacttaagttggaaacaaatgctctatgacgatagaaatctctcacaaaggctaagaacacagatatacattttgcaatggttgctgtactaataataatctgatacactctgttcattttatagatgaaaaaattgaggctctagaattttaattgacagagatggtattcaaaagtaaaaatcttgctttgatttttctttaaygttagtgcctaaactttcaaacaagtatacctaatgctagatgacgagttaatgggtgcagcacaccaacatggcacatgtatac

SEQ ID NO: 156303 - DNA, 508 bp, Homo sapiens
tgggcaacatggcaaaaccctgtttttacaaaaaatacaaaaacaaaacaaaaaccaccaaaaacctagttgaggatggtgacgcgtgtctgtagttccagctactcagtatgctgaggtgggaggatagcttgagtactgggggttgaggctgcagtgagccaagatcataccactgcactccagcctgggtgacagagcaaaatcctgtctcaaaaaaaaatgtcattgaactgaaatccactcgtataattttatggacacaatgtttcttgttgccattatggaagaggcacttcagaattttcaaataagttcatgaaacttatgaacttattcatgaaacatgaaaagggacagtcatttggtacatggttaaagcaaagacaagacaatttctatgtacacccaaggaycataggggttgactatttagtgtgactcgctaggaattctactattggcatcttactttaatatatattcagtggcaatccatgtcaagaca

SEQ ID NO: 156304 - DNA, 462 bp, Homo sapiens
caaataaacaattaaaacagctaatcgtgccatctccctctctttccccttgctgaaagacacaggaggcttttcagccttctttttcaactccccctctcttgttcttttgttttcaaagctgatcagaaataagataccctaaatatatatataatattgctaacattagaatgggctccaagaaattaaaataacactactaatattaaattatatatgataaaattaattggataaaagataataaaaggatggaagtggtagtaaattgagttgcagatatcagctgcagctgactcacagacatcagaatactaagatgaggactgcattgataagktgatttccctgctaatatctgttttctttattggtaaagaaaagattacagagtcaaatgtaaaaaagtgagtcaaataaggccaaagaaggtaaatagcatagtaaataattcaagaa

SEQ ID NO: 156305 - DNA, 305 bp, Homo sapiens
tggccgggttgagtgaaggacagagtagatgagaaaactagaaaaaaaataaagactgttgagtattcaggagctcagtttttgattgagtagtttcttgacagattgctaaaggggacgttttagagcaaagttccaaattagctttcagtgaaaagtgccaaagtttgtatttaagatatacaagagctaccaaatgtgttaacagtttcaaaggtatcaagaaaatattagcmatatggaataggggtggattactttatttttatggttgataatggtgtcagaaaaatacaggaagcttt

SEQ ID NO: 156306 - DNA, 305 bp, Homo sapiens
tggccgggttgagtgaaggacagagtagatgagaaaactagaaaaaaaataaagactgttgagtattcaggagctcagtttttgattgagtagtttcttgacagattgctaaaggggacgttttagagcaaagttccaaattagctttcagtgaaaagtgccaaagtttgtatttaagatatacaagagctaccaaatgtgttaacagtttcaaaggtatcaagaaaatattagccatatggaatagsggtggattactttatttttatggttgataatggtgtcagaaaaatacaggaagcttt

SEQ ID NO: 156307 - DNA, 565 bp, Homo sapiens
ctatgatgcaaagaaggaaaatttcatagtgattttcttccctttagacatttgatttacatttgatcatctctgttaattaaagctctcttttgccacaacaaagattaattcaaagaaacctagtaaatcttgctttctaytaggttttgcttaagattgcttttactttttctttatcatgccagaacattacaaaacaaaaaagtgaggaatatgtgtattttctgttcatatgaaatggtgttaagtaattaaaacatgaggaaagtccaacattaattatcaaaggtaattaccaaagatcacttatggtgaactaatatagcaatgacattttgaattatcttatttacttttattatagttaaataggatagataaattgttgatgtccattctgtactcttgcacacagatttctgtcagagaatatgaggtaactctctcagatttaattttgaattttgatttttttataagcagtctaatggaagcaacatgtatattttataagtaaagaattgttttaatacttctttgctaaggttttacaaatatggct

SEQ ID NO: 156308 - DNA, 565 bp, Homo sapiens
ctatgatgcaaagaaggaaaatttcatagtgattttcttccctttagacatttgatttacatttgatcatctctgttaattaaagctctcttttgccacaacaaagattaattcaaagaaacctagtaaatcttgctttctactaggttttgcttaagattgcttttactttttctttatcatgccagaacattacaaaacaaaaaagtgaggaatatgtgtattttctgttcatatgaaatggtgttaagtaattaaaacatgaggaaagtccaacattaattatcaaaggtaattaccaaagatcacttatggtgaactaatatagcaatgacattttgaattatcttatttacttttattatagttaaataggatagrtaaattgttgatgtccattctgtactcttgcacacagatttctgtcagagaatatgaggtaactctctcagatttaattttgaattttgatttttttataagcagtctaatggaagcaacatgtatattttataagtaaagaattgttttaatacttctttgctaaggttttacaaatatggct

SEQ ID NO: 156309 - DNA, 397 bp, Homo sapiens
ctaggcatagaaggaacatacctcaaaataataaaagctgtatatgacaaacccacaaccaacattactgaatgggaaaaagttgaaagcatttcccctaagtactggaataagayaagtatgcccattttcaccactactattcaacatactattagaagctctagccagagcaatcaggaaagaaaaagaaataacaagcattcaaactggaaatgaggaagtcaaattatctgtgtttgctgctgctgatgtaatctgattcctagaaaatcctaaagactcttccaaaagactcctagatttaacacataaatttattaaggattcagggtacaaaaccaatgtagaaaaatcagtagtcattgtatatactgatagtaaccaagctgagatc

SEQ ID NO: 156310 - DNA, 606 bp, Homo sapiens
atattcaaatgggatttttatccaaagccctttcataatctggagcaaagaaagtgacctttctaggtaaaatgccctcataattctctactctaatgttttaaacccaaagcctagtgaaggaaagtaatttaataatacagcatcttaaaataactaagaaattccagcattcttgtgtggctggtgaatatgaaggataaaataaaaaggaccactaacgtgaagacacagaagtcctttcctactagattttgtaaaagactaaaatagatcgacaatgctaggcttgagtatatgcagrgcaaaaagtgttgctacctacatttaacattcttaggatttttcccccctctagtgtagaagatgaaatgacagaaagtagagcattataagagtcccagtttcttgcttcatctgagaggagtattttttgtaagccaaaaaagaacattgaatactttgcatgctagaaattctgtggctcaaggctggtgcattagacactgaagccccagaatttgcaggctagagacaagtggaaagagcaaagtgtcctcaaagcagtgcaatagaaagacgggactcttttatttgtggcctgtt

SEQ ID NO: 156311 - DNA, 606 bp, Homo sapiens
atattcaaatgggatttttatccaaagccctttcataatctggagcaaagaaagtgacctttctaggtaaaatgccctcataattctctactctaatgttttaaacccaaagcctagtgaaggaaagtaatttaataatacagcatcttaaaataactaagaaattccagcattcttgtgtggctggtgaatatgaaggataaaataaaaaggaccactaacgtgaagacacagaagtcctttcctactagattttgtaaaagactaaaatagatcgacaatgctaggcttgagtatatgcagagcaaaaagtgttgctacctacatttaacattcttaggatttttcccccctctagtgtagaagatgaaatgacagaaagtagagcattataagagtcccagtttcttgcttcatctgagaggagtattttttgtaagccaaaaaagaacattgaatactttgcatgctagaaattctgtggctcaaggctggtgcattwgacactgaagccccagaatttgcaggctagagacaagtggaaagagcaaagtgtcctcaaagcagtgcaatagaaagacgggactcttttatttgtggcctgtt

SEQ ID NO: 156312 - DNA, 421 bp, Homo sapiens
tccagaggcatgaagctttgctaacaccttgattttggacttctgaccttccagaactgtgagagaatacaaatttgtgttgttttgagccactractttgtagtaattaattataacatcaggaggaagctaatacaatgtctaggagctgggacaccatgggagctcagtacatattagataaatgaatgaaaaaattaatgaagcacatcagtatccataaaaccttgtttctttatggttttctcttacgtgttgttgtattggatggcaactctgtgagtaagattacaatgaaatagaggtttccatccctggagaaatatgtgctttcaagctgcaatttgaatatttgacatggaaagtctaggtattttattcatcacagagatgtatgaggcatataaatacacattgtgg

SEQ ID NO: 156313 - DNA, 435 bp, Homo sapiens
taattccttcctgaagcctccagaggcatgaagctttgctaacaccttgattttggacttctgaccttccagaactgtgagagaatacaaatttgtgttgttttgagccactaactttgtagtaattaattataacatcaggaggaagctaatacaatgtctaggagctgggacaccatgggagctcagtacatattagataaatgaatgaaaaaattaatgaagcacatcagtatccataaaaccttgtttctttatggttttctcttacgtgttgttgtattggatggcaactctgtgagtaagattacaatgaaatagaggtttccatccctggagaaatatgtgctttcaagctgcaatttgaatatttgacatggraagtctaggtattttattcatcacagagatgtatgaggcatataaatacacatt

SEQ ID NO: 156314 - DNA, 320 bp, Homo sapiens
ctggtttcaaagggctcctgggcaatgagtctcctcatctagcactggcagaatcactgtaaatcaagctgagtataaagcatagagctgacyttcccaaagggaactacctgaatagacaaggttcttcaacccccacactggcttttctggtgtgaatgccgcaatcattgccccctgtccttatctgggagaagtcctttccaaggcctctgtcgcttgaggctggcagctgttttggaatcacagagaatgatcctggaaatgagttttgactggatggatgagcatggtttctagacccagtctcaagctatcgt

SEQ ID NO: 156315 - DNA, 320 bp, Homo sapiens
ctggtttcaaagggctcctgggcaatgagtctcctcatctagcactggcagaatcactgtaaatcaagctgagtataaagcatagagctgaccttcccaaagggaactacctgaatagacaaggttcttcaacccccacactggcttttctggtgtgaatgccgcaatcattgccccctgtccttatctgggagaagtcctttccaaggcctctgtmgcttgaggctggcagctgttttggaatcacagagaatgatcctggaaatgagttttgactggatggatgagcatggtttctagacccagtctcaagctatcgt

SEQ ID NO: 156316 - DNA, 531 bp, Homo sapiens
gaaagtgatgtggtgtggggtagaatcatttattttattttcatttctctttctccggcatccttccacaagaagatgaggacccctcatccacatgtgcactctgcagtctgggctcctcttcctggcatctgtctcactcttacagttrgtctagtgcaggaggtacagcttgatggctctgtctgaccttccatcaactctgaaagtgaaccttcagaagaaatcaaagctgaagagggtggttgggcacaggcgcttgggggaagggaccagggctcacctatcttccaaccccatactctttctgctccaaccccacgctttgccctcttcctcttacatcctcaggcttctcacagaggggttggaaatgaagcccagagtctaggggcaagagaggagagtgagaaggactcaattaacttggaattcagccaaaaatacacaaatatgtccaataaaatctgcatgcgcacttctggatccttgattgtaatggtcaggatgatgagaaatcattgtgaacta

SEQ ID NO: 156317 - DNA, 531 bp, Homo sapiens
gaaagtgatgtggtgtggggtagaatcatttattttattttcatttctctttctccggcatccttccacaagaagatgaggacccctcatccacatgtgcactctgcagtctgggctcctcttcctggcatctgtctcactcttacagttggtctagtgcaggaggtacagcttgatggctctgtctgaccttccatcaactctgaaagtgaaccttcagaagaaatcaaagctgaagagggtggttgggcacaggcgcttgggggaagggaccagggctcacctatcttccaaccccatactctttctgctccaaccccacgctttgccctcttcctcttacatcctcaggcttctcacagaggggttggaaatgaagcccagagtctaggggcaagagaggagagtgagaaggactcaattaacttggaattcagccaaaaatacacaaatatgtccaataaaatctgcatgcrcacttctggatccttgattgtaatggtcaggatgatgagaaatcattgtgaacta

SEQ ID NO: 156318 - DNA, 169 bp, Homo sapiens
gccacgcttgggccggaaggtctcattctgttcgtctctatggactgattgaatttgggatggccagctccagaatgttccacrtgggggcactctgtgggcagagaggatgagcccttgcccacactggcaccaaagaggttgcacgatgcagcttgcagtgggtcca

SEQ ID NO: 156319 - DNA, 169 bp, Homo sapiens
gccacgcttgggccggaaggtctcattctgttcgtctctatggactgattgaatttgggatggccagctccagaatgttccacgtgggggcactctgtgggcagagaggmtgagcccttgcccacactggcaccaaagaggttgcacgatgcagcttgcagtgggtcca

SEQ ID NO: 156320 - DNA, 449 bp, Homo sapiens
catacccactagcatggctaaaattaaaaaataaaaaagactgacaacacgaaatgttggcaagaatgtggaacaactggaaatctcacacattactgaaatataaattggtaaagttagtttgaaaattggttttgaaatgttttataaaattcaagctgtgctgactttataacccacaaaattcacccctagttatttactaaagagaaatgaaaaatatatgttaacaaaaaagtacgcaagaatgttcagtcactttattcatagtagccaaaaactaaaattaatcaaatgttcatcaaccgtggatggataaattgtgytttatacaatgaaatagtattagtagtaaacagacaaataaaaaacctgctcatacacagtaacagcatggaagaatcttaaaaatattatgctgcaaaagaaaacaggcacaaaggagtata

SEQ ID NO: 156321 - DNA, 483 bp, Homo sapiens
gtattagtagtaaacagacaaataaaaaacctgctcatacacagtaacagcatggaagaatcttaaaaatattatgctgcaaaagaaaacaggcacaaaggagtatatcttgtatgattttacttgtataaagttctagagcaagatawctaagcaatggaatcatgagtggttgcttgaggtaaaggcagtgacaaggattaacctaagaagaatttctaggatgctaagaatgttttatatcttgatagattatggattatttggatgtatgcaaatattcaaactacaaattttgcatttaaaatgtatgcatttcactgcatattagttattcctctattaaaatatttcttttttattgctaaaaatatgctattaaaatcactaaatgcaattaattacctttaccatgcgctaaataaaacacgaatcccagttagcaaacttttaaagaaaataatgcagtttttttttcacttt

SEQ ID NO: 156322 - DNA, 614 bp, Homo sapiens
ctttgcatctgtgtgtttctttaaaaccctgtgttacctccgaaatatcttttctttctttagccatatttctatctatgagcaaggcttgaaaggtgacttaaagggggagtaaaggttctgccaaagcttacaacattcttattgatgttaaatatgaagaattttctagaatgcttacaaaataatcattctgcatttatttctgtttaagagaccaatagaagataaaacagctgagagataaattctgaaatctgttcaattatatcttgggaattcaaaatgcacattaacctatcagagacttcaagaagtcttgcagtaagtaaatctgtttagctttgtttatcgtagggtttcccaacttttcggacaacataatggcagttacataacatggmagtttctacttgggaaattgccaagaatgataaagttgaaatggaaaaaatatattcaaactatgtgtatatatattaaaaggtcaatatattaccactatcacacaatttatgagatacttccaaatatgccattttattttacttccataaatatgttgtgagttagaaagggcaagtattaatcacattcattttgaagatgaagta

SEQ ID NO: 156323 - DNA, 472 bp, Homo sapiens
tatatatgacaatcaaatcaaaatgaatgaaatactttaacccaagaatttatactatgaaactactacaaggcaacattggggaaactctccaggacactggcctggacaaagatttcttgagtagtatttcacaaacacaggtaaccaaagcaaaaatggacaaatgggatcacataaagttaaaacgcttctacacagcgaagagaacaaccaacaaagtgaagaaacagcacacagaatgggagaaaatatttgygagctatatacctgaaaagggattaataaccagaatatataaagagcttaaacaaatcaatagaaataatctaataatctgattttaaaatgggcaaaggatctaaatagacatttcttaaaagaagacatacaaatagcaaagagtaatatgaaaaagtgttcaacatcactgatcatcagaaaaatgcaaatcaaatctacaatgagctat

SEQ ID NO: 156324 - DNA, 590 bp, Homo sapiens
ctccagcctgggcgacaaagcgagattgtgtctcaaaaatttaaatgtctttgaggagtgattttggtcctgagaatttagtgattatggataaggccttatgttcagtgatttcaacgtgatcaccaattccttccaaatttccaggatgatgctgactggagctttaaaaagtgactaaaggacatatcacaagaaaaggagcactaatccttaatcatttagaaagacctaggtgtactaagaaatattaagtcttcttggaaacattttcagtttgcactatcactgtttctggcatttcaagctatgtgatgctcctattatgttttctctgatattatcatatctagttcattttgttattctattagacaataaaatatgaagttttattatagatattatatttggtataatacaaaaactcgagaaaatttgaatatgtaaacatttaacactaatactttatartattaggttaaagttaaataaattcaaatgagtatgtcacgtattcttcttatccaggctgatggggaaagaaggctgattattacaaacattttttaacctttataaaaggtgga

SEQ ID NO: 156325 - DNA, 556 bp, Homo sapiens
tatactttcactaaagtattttgtttttatgtattgtcttttgtttatattttccctgctttcatggggccttaaaatccttgatggcggacgtttttgtcttatctttggttatttagtattaactctatgttgcttttatgtgataagttattttaaaaatctgcaaaaagcaacagcttttcagaaaacttagagacttgacaaataaaaatctctgaaatgctctaatgatggagacagataatcttacctgaattttagcacagtcgaatcacactaaaattggtaacctttatgttgatggttttcccattaatctgtccatagaattktgttaaatttttcctttttttgttaagtaaaatttttttatatatgaccatttattttactctctggtttcaaagggtattttgtaaaatgtgattatttaagtttataactcagattgatggctattatgcttagtagacattttttctagatatttcacaacatatatctaagatttctaggctacaggccgtgtttttcttctccagttggaaacatt

SEQ ID NO: 156326 - DNA, 506 bp, Homo sapiens
aagcaaacatagtcactgcccctggtaagaaggcaggggaataactatcttagaaaatttgatgaaaatcaagtttgtaaaatattaatacctgaaaagtcatatacttacatctccaacattcatttaaaactgagttgtgggatatgtaagttgcatttgtgtgcatgtgtatgtatgtatgtatgtatgcagaaacattttgatttgtggatgttttatgccttaaaatatttactggcttgaaaatatattttaactggcttaaaattttagaggtgagctccctgtgaatatccgtgttaaattgaccattttgaaatttaagacaatatatatatcgtttcagatattgttccactattttgatcagaaaagtatgctagagaaccatattttacatawaagaatatatatattaacatttttcagtcagcagatatttattttatgtcatgcccatttcattttctttttcactgttagggacttttgccgtcaggatg

SEQ ID NO: 156327 - DNA, 506 bp, Homo sapiens
aagcaaacatagtcactgcccctggtaagaaggcaggggaataactatcttagaaaatttgatgaaaatcaagtttgtaaaatattaatacctgaaaagtcatatacttacatctccaacattcatttaaaactgagttgtgggatatgtaagttgcatttgtgtgcatgtgtatgtatgtatgtatgtatgcagaaacattttgatttgtggatgttttatgccttaaaatatttactggcttgaaaatatattttaactggcttaaaattttagaggtgagctccctgtgaatatccgtgttaaattgaccattttgaaatttaagacaatatatatatcgtttcagatattgttccactattttgatcagaaaagtatgctagagaaccatattttacataaaagratatatatattaacatttttcagtcagcagatatttattttatgtcatgcccatttcattttctttttcactgttagggacttttgccgtcaggatg

SEQ ID NO: 156328 - DNA, 529 bp, Homo sapiens
aaattattttttgacaattttgtgaatgtacatcaaagatagccagagagaattgcagagaaagctgattgattcagcatatggagtcttaacttgaagaaacaatttccttttaaaatctgttttcttcttcttttttttttttttttttttacagatttgagtggtacagtaattagctccttttgtgttttacagggacatctttttgttaggcaagtggcacacttattcaagggaaaatgctgtcttcaacaatcaaacctgtaacactgctgtaatgattttccccttgccaatagtaaaagttttaaattgcagactcaatccacctgatgagaattgtcctttattttgtaggaatagttgagatatggggatastaaatgtagtagtctctgaatattctgaataggaaaatattatcttttgacattttgttattttaaaagtacttttgttccattttaaccacataccttcctctttcacagaaataaagctgaaaagaggtgttttctagtcgtga

SEQ ID NO: 156329 - DNA, 529 bp, Homo sapiens
aaattattttttgacaattttgtgaatgtacatcaaagatagccagagagaattgcagagaaagctgattgattcagcatatggagtcttaacttgaagaaacaatttccttttaaaatctgttttcttcttcttttttttttttttttttttacagatttgagtggtacagtaattagctccttttgtgttttacagggacatctttttgttaggcaagtggcacacttattcaagggaaaatgctgtcttcaacaatcaaacctgtaacactgctgtaatgattttccccttgccaatagtaaaagttttaaattgcagactcaatccacctgatgagaattgtcctttattttgtaggaatagttgagatatggggatagtaaatgtagtagtctytgaatattctgaataggaaaatattatcttttgacattttgttattttaaaagtacttttgttccattttaaccacataccttcctctttcacagaaataaagctgaaaagaggtgttttctagtcgtga

SEQ ID NO: 156330 - DNA, 583 bp, Homo sapiens
ttttgcatttgcattcagtgtcaaagacttggcaggaaatactactgccagtggttagatgtgtttctttccctctgagaacagacatgccattttagcagaatactctggaatattactgcctctgcacggttatgtcccccaggtaatgagctgataagggagagggaagcttaaagtataaggaagaacttaagtyagtgggtgatgaaataatgaaaagcaatcattcaaaaacttttgagtgttacaaatagaagtgaggaagggcggggaaagcttgtttttagtgtttggtaatacagacagcagatatgctaagtgtatgctcatcaagcagctgagactgcctaaagggtcactgtaaaaaaagactcatttttaagaaaggatgtgagggcttaggaagtcaattttatttactttatagctaaacttcacatatacatttaagaagtaggaaaggagtctactgaccttacattactttgtttcgtcattgtatcattgacaaagctgttacctaagttattttgataattttacagttaaagcagatgatataccacattggaacaactgt

SEQ ID NO: 156331 - DNA, 583 bp, Homo sapiens
ttttgcatttgcattcagtgtcaaagacttggcaggaaatactactgccagtggttagatgtgtttctttccctctgagaacagacatgccattttagcagaatactctggaatattactgcctctgcacggttatgtcccccaggtaatgagctgataagggagagggaagcttaaagtataaggaagaacttaagttagygggtgatgaaataatgaaaagcaatcattcaaaaacttttgagtgttacaaatagaagtgaggaagggcggggaaagcttgtttttagtgtttggtaatacagacagcagatatgctaagtgtatgctcatcaagcagctgagactgcctaaagggtcactgtaaaaaaagactcatttttaagaaaggatgtgagggcttaggaagtcaattttatttactttatagctaaacttcacatatacatttaagaagtaggaaaggagtctactgaccttacattactttgtttcgtcattgtatcattgacaaagctgttacctaagttattttgataattttacagttaaagcagatgatataccacattggaacaactgt

SEQ ID NO: 156332 - DNA, 583 bp, Homo sapiens
ttttgcatttgcattcagtgtcaaagacttggcaggaaatactactgccagtggttagatgtgtttctttccctctgagaacagacatgccattttagcagaatactctggaatattactgcctctgcacggttatgtcccccaggtaatgagctgataagggagagggaagcttaaagtataaggaagaacttaagttagtgggtgatgaaataatgaaaagcaatcattcaaaaacttttgagtgttacaaatagaagtgaggaagggcggggaaagcttgtttttrgtgtttggtaatacagacagcagatatgctaagtgtatgctcatcaagcagctgagactgcctaaagggtcactgtaaaaaaagactcatttttaagaaaggatgtgagggcttaggaagtcaattttatttactttatagctaaacttcacatatacatttaagaagtaggaaaggagtctactgaccttacattactttgtttcgtcattgtatcattgacaaagctgttacctaagttattttgataattttacagttaaagcagatgatataccacattggaacaactgt

SEQ ID NO: 156333 - DNA, 583 bp, Homo sapiens
ttttgcatttgcattcagtgtcaaagacttggcaggaaatactactgccagtggttagatgtgtttctttccctctgagaacagacatgccattttagcagaatactctggaatattactgcctctgcacggttatgtcccccaggtaatgagctgataagggagagggaagcttaaagtataaggaagaacttaagttagtgggtgatgaaataatgaaaagcaatcattcaaaaacttttgagtgttacaaatagaagtgaggaagggcggggaaagcttgtttttagtgtttggtaatacagacagcagatatgcyaagtgtatgctcatcaagcagctgagactgcctaaagggtcactgtaaaaaaagactcatttttaagaaaggatgtgagggcttaggaagtcaattttatttactttatagctaaacttcacatatacatttaagaagtaggaaaggagtctactgaccttacattactttgtttcgtcattgtatcattgacaaagctgttacctaagttattttgataattttacagttaaagcagatgatataccacattggaacaactgt

SEQ ID NO: 156334 - DNA, 580 bp, Homo sapiens
attttcttgcaaatttttaatccaatgttacattatttttttaagttctaaaatgaagacagaacaagaattacagaacatgtacttgtctgtattacataattaattagtgtcctctctcagatgcttgtagccctgaatcttaatcttcattgagggtttacttttgttgacagttacatgtatagctagctgaatatacgtgggcttcccagatttcctacctaccaatagttaggtgggattatggaactgcttttggccagtggccaawgaatggaagttatgtggattacttgcaaagccacacatttatgagcccgttttagagaccttgaagcatatgtattgagatgcctggatctctgaatcactatttggaagtaagttgtccttaatagctgctaggaccacaacagatttatacgagagagaaatgaagttttctatgttaagccactgaagtttcaaggcttgcaagaccgcttattttaacctgactaaaacaacaatcacatgtgtgagaaaaagatatacactttattaggagaagatgaatttaggtttatgttgatttaca

SEQ ID NO: 156335 - DNA, 596 bp, Homo sapiens
tattgttttatgtccacaagtgcccaatgtttagctcccacacttaagtgagaacatgtactatttgggttttctgtttctgcattaatttgcctaggataatggcctccagctccatctatgttgctgccaggaacatgatttcattcttttttatagctgaatagtattccatggtgtatacatagcaatttttctttctccaatccactttcgttgggcacctaagttgattccatgtctttgctattgtaaatagtgctgggatgaacataagaattcatgtgtctttttggcagaatgctttattgttctttggatatatatycagtaatgggattgctgggtcaagtagttgttctatttttagtttttaaagaaatctccaaactgtggctccaaagttaagccacagtggcttaacttacattctcaccaacagtgtatagcatttccttttctccacaaccttaccagcatttgttatattttgactttttaataacagccattctgattggtgtgagatgatatctcattgtggttttgatttgcatttctgtgatgattagtgatgagcattttttcttatgttt

SEQ ID NO: 156336 - DNA, 601 bp, Homo sapiens
gtatttgggtagttgttctagtccatgctaatgcttgaaaagcactgagcaaggacattggcatgatggtccagtttccagactgggaatatctgagattaagggtccagttggggccagtgctgtggctcatgtctgtaatcccagcacttggggagcccaaggcaggcagatcacttgagaccaggagttatagaccagcctgaccaacatagtaaaaccctatgtctaccagaaatacaaatttattagcggggtttggtggtgagcacctgtagtcccagctactcaggaggctgaggtgggagtatcacacttaaacagtgggagctaattgaatcagaggtcattacgtcttaggagagtttttgtgaatgtggcagatagagcttcttactgmatcaaaatggtgctataaagccaattatttagaagcaacattatggagctgtattcctgttattttcagaatttttatgctttgatatatggaaaataccttttagtcaattccatcttttttaaaaaatcgcaggtcatcttggaatcatagttgaaataaatagtatttctcattaaagcattaacatgtcagttcatc

SEQ ID NO: 156337 - DNA, 607 bp, Homo sapiens
ttcatgcattctgattatgttaccataacatgggcaaataatttttggttttggcattggttttggatctttgctttgtacactatgcccrgctttatcacatgccttgcagtattgccacacagtaccagagttaatctgtccttccatgttttatcacctgatgccttttttggacttttatgaatgtaggtgctattggtcatcttcttccagcagagccaggtttcatcacaattgaagatttgctttggatggtatcctttctccttaatcaattcctttaaatctgctggaaatgtgcagcttcttcatctgcagatacagcctcttcagtaatttttatattttcaggttcaaacctattcctgaatctgtataattatctcttacttgtagtaaatggcttggtgtcactcatttcaaagaatcccttgctgaagtctttatataggctgaatgggcccaagtacaacaggttgccttcaatcagtatatgttttattttttgctcatgacttccacccacaatttaaggccttttccatcataactaagcacttatcatgcactgtgcccataaatttttcagtttgagtagcaagag

SEQ ID NO: 156338 - DNA, 440 bp, Homo sapiens
cagagtacaactaccccaccaaagcagtccgcctggatctgaatcaagaaaaatgtgcctgctacamcaaacataaaaacctggatctgtggggcgtggggcacagagagagatttatggtgtttgtgaaaggttcaacaaccattggaaagataggttttctccaatttacctcactaaggagcaggaagctaagttaaacactctgattccttgctgtatttgatcattatttttatttcactctttcggtggtgaactctatttctggaagccatcctgaattataaccataaggtaaagcttccttgaaaaaggaacaaagccccattaagcccttcgtcgtgatggttgtggttgcggctgctgctgctgttgttgttctgtttatttgtttgtttttaatgaacatactgatatataagtgctctgggggaatt

SEQ ID NO: 156339 - DNA, 355 bp, Homo sapiens
ttccgttcctcctttgtaaattatgaaatatttattgtttagactgagtaatatgacatgaaacaacaaacctgcacatttctaatttataacaaatctgtttccttaatgggtggaaggaaatctgaggacagttctaaggagtcttgtctgctttcagtgcgatcttctagtcatactgaagacaatacctctccagattggtctttccccttcttctcctctccccggtcaacgtcaatcacatgcaccactccaggttttagaatcaggtcatccgtctctacctgactcctgttgtcctccacctccrtgtagcttccttttgtttgctgggcagctttgctgaaggctt

SEQ ID NO: 156340 - DNA, 563 bp, Homo sapiens
gggaggagaaggcgtcctccctctcccagactccctgcccaccaccctccccagagaagctccacaaggtgagacacactgtcctataggcccatgtaacagaaagccatcaaaaagaccgtagagaaaagccgttttccatagagccttctgctcaggggcccacagtttccctaaccacacccgcttttcctgacttcccgagctctgcaccatgaaggcaggaaaggtaccggggcattgctggcacaccccagcctccaggctccctttggcaggtttatctgcattgtacggtcagggtcaaggggtgagagagggtcgggcacgaggagaggctgtccttcctcccctaaaagcatcccccactcccatctctccccacctccagcggccaggatgcaccgggccggcgggcaggcgggcgarctcgcggggccgcttctgcgtgtgcacctggccgccgcccgggagcctgccacgggccgggaatggccgctgctccgccctctgagaggtgctccaggctccctggggacggaggtttacacgtccccgtgccg

SEQ ID NO: 156341 - DNA, 557 bp, Homo sapiens
tagaatggtggttaccaggggtttggggtaggggtcagggctgaggacatgttggtcaaaggatacaaaatttcagttagacaggaggaagtaagttcaagagacctattgaacaacatggtaattatagttaataacaatgtattatactcttgaaaatcactaagaaagtcaattctaagtgttcttaccacaaaaaaataacaatgtgaggtaatgtgtatgttaattagctcaatttrgctactccacaatgtatacatatttcaaaacttaggttgtacataataaacatatataatttttgtcaattaaaaaacacatttttgaaaatagaaaaagaaaagtcatatatatagctatgtaatggagaataaattcttcaatgaagacaccatttggaaataaggagagcctgagaatatgctcttaataaaaatttcttattgttattgtttttcaattttctgctaataaggtaacttccataatagccctgcaatagaataagtatgagtagagtaagtgttattatgtgtcacatttatcaatagcca

SEQ ID NO: 156342 - DNA, 592 bp, Homo sapiens
aggggtgtggggaggaggtggagatggtcaaaatatacaaaaacaataattagaaggaatgaacaagacctagtatttaacagcccaacagggtggctacagtcaataataatttcatggtacattttaaaataactaaaagagtgtgattgggttttttgtaacacaaaggataaatgcttgaggggatggataccccatattccatgatgtgattattacgcattgcatgcctatataaaagcatagtttgtaccccataaatatatacacatagtatgagtacatgagatgctttgtaaccacaaaaattaaaaataacaaattagaaataaaaacaaagtaaaataaaataaaattaggaccattgatcctgacagtacaatagatatatctgggaaaatttaaaaaaatactgttgtctagrctccgtcttttacaactaggatctctaggagtgggagtaagccaagcggcaatacacaatagtagtgctttataataggaagaaagtgtgagtcaccatgttgaagatgtgtacaaatgtttgaggaactaacacaggtccagaaacttctaaccttcttacctg

SEQ ID NO: 156343 - DNA, 295 bp, Homo sapiens
gaattctcctggattttgtccaacaccatcaaggtggtacctctataagcctgcaagaaacatagcrttacttggcttggggtaccccctaaagcaggtgcagcttagatcacaacacccaagtctttttgaatacctggaaagccttcccaagaaggataggtacaaagaagcccagactacagagatggtgaaaaaatacttaactcttcaatgctcagacacagacaaacatctgcaagtatcaagactgtccaggaaagtatgagctcaccaaatgaactaagtaagtcac

SEQ ID NO: 156344 - DNA, 419 bp, Homo sapiens
gttgattacagattatactataatgtaagtatggacttctaaaaaacgttataaacctaggttgttgtatatatctaaaatctaactggaggtaaaaggggaaagaactagttatccattgatcwccaaggtatgctaggaactatgcttgttgcttgacacatattattttactaaatccttacaataatcttatgactgttattattggccccattgaaaattaacaaaattgagatgcagaaggagtagaagcttacccaaagaattacaacaagaaatcaatactagagctaggatcctacctgagcccacactgcctaactaggtgacatagctccattcattctgagctcttagatcaccatgtacccaagtaaatttaaccttcatttgatgaaaatatttgcctattaagc

SEQ ID NO: 156345 - DNA, 383 bp, Homo sapiens
agatgaccaatatacacttctcctaacacctgcatcgagcacattcctctctgaacacactgcaacctagatacraaatttcactaattaaggtcttttttttgcaggttcacacagaatgggaccctagcgatatgaaagtcaagaaaaagtaaggagtatcattagaggaaagtaaatgctggacctccaatgcttatcttagtggtcttaactcatgaaaccattcctcaccattatagcatctctttgatgggtgaaggttattgtcatatgttgtgactatcagaactcttgatatgagagtaagagaaaaaccagctcaaactagcttatgagaaagggacataattagcacacagaagtagactttaggaaggctt

SEQ ID NO: 156346 - DNA, 512 bp, Homo sapiens
aattcacttgttagcattctacttttacattactctataactagaaatrtttttaatttacagggctattttacaaatgtctttctctcattagatatattaatatatatgtatattcatttggtatatgtgcgtgcgtgtctgtgtgtttttggtgaatttgtgatttaaaactttagtgtttgtttcagtgcctgggagaatgttttaattgttttcctcctaaaaggatgcaaactgtgttcagagaggtggtgcctcacttattctacaagatgcagtgttcagggtctactaaccatcatagaataggatttctgatcaacccggagagtgattacttcacaacaggtgggatatattttaaggcctctttgcttcttttttggagttgaagaagagtgggtaaaaaaagatggccccttagatgttatctgaacaagctcaatctaaaagatttctccattttatcattttatttccttaaaacatcggctggacacaaagggaac

SEQ ID NO: 156347 - DNA, 584 bp, Homo sapiens
cttactcaagtcagagaatcaatgtaatttttcctctcgagtactgccagactcaaggtgatattacccattacctgtttcagatatataaacaggatactcaattttagactcaccaagtaatatagcaatctcttaaatgagccaaagaatatgatcaaaagaaagggtaaaattgttccaaatatttccttaagacaataaaamtcgcacgcataaatttcttgcatagatccataaagggtaaatggcaaaacgcttgggaaacctatctgttttcaaaaagcttatataaaaaatgataaaaacatcagattgagaactgaaaccaaagccacatttgcacaaatgtctcttagagttgtgataaatccatccagagccacatagaaatcagcaggtgtcataagaatcacttccatttcagtgtggtcacggagaatatctcactcttactaatactttgcaataacaaaaattagtattttagagcataacttgcattccattaataggttctttacaatttaaaatttttaattttagttatgaaacttctttgtgataggtaaatagatattgtt

SEQ ID NO: 156348 - DNA, 615 bp, Homo sapiens
gatagattaacaaatataacggggatggattttccccaaatacagtttggcttggctgttctcacttaagcaccatttgacacctctccaccccttgccccatcctggcccaccaaagagatgcttctcccaaacacagcagaagctgactgcattcagggcccctgaggccctgctccctgctctcctgaggtctgaggcaggctgctatctgactgctggcccactctaagcttccaccatcctcctgccttaccccatcccgcccccagcacagaagggctgatgggcctcttggagtccagggttatgtgtttgtagcccctcaggtctctttggcttcagacacttcaaggaggtgattaacttyccattgggatttttctggtgagggtcagagaggctgtcagccttcccagtggtttccttcaatttccttcctgaactgctatagcgcattcaagtctgcagactaaagtgactgtggttgtctaaatgaccagtggtcagggcccagagatgctcacgagttcttgctttaatgaaacacagagatctgtggattgcatggacttggctctggagtccatccacaggaaagagaatgtgtatttt

SEQ ID NO: 156349 - DNA, 615 bp, Homo sapiens
gatagattaacaaatataacggggatggattttccccaaatacagtttggcttggctgttctcacttaagcaccatttgacacctctccaccccttgccccatcctggcccaccaaagagatgcttctcccaaacacagcagaagctgactgcattcagggcccctgaggccctgctccctgctctcctgaggtctgaggcaggctgctatctgactgctggcccactctaagcttccaccatcctcctgccttaccccatcccgcccccagcacagaagggctgatgggcctcttggagtccagggttatgtgtttgtagcccctcaggtctctttggcttcagacacttcaaggaggtgattaactttccattgggatttttctggtgagggtcagagaggctgtcagccttcccagtggtttccttcaatttccttcctgaactgctatagcgcaytcaagtctgcagactaaagtgactgtggttgtctaaatgaccagtggtcagggcccagagatgctcacgagttcttgctttaatgaaacacagagatctgtggattgcatggacttggctctggagtccatccacaggaaagagaatgtgtatttt

SEQ ID NO: 156350 - DNA, 615 bp, Homo sapiens
gatagattaacaaatataacggggatggattttccccaaatacagtttggcttggctgttctcacttaagcaccatttgacacctctccaccccttgccccatcctggcccaccaaagagatgcttctcccaaacacagcagaagctgactgcattcagggcccctgaggccctgctccctgctctcctgaggtctgaggcaggctgctatctgactgctggcccactctaagcttccaccatcctcctgccttaccccatcccgcccccagcacagaagggctgatgggcctcttggagtccagggttatgtgtttgtagcccctcaggtctctttggcttcagacacttcaaggaggtgattaactttccattgggatttttctggtgagggtcagagaggctgtcagccttcccagtggtttccttcaatttccttcctgaactgctatagcgcattcaagtctgcagactaaagtgactgtggttgtctaartgaccagtggtcagggcccagagatgctcacgagttcttgctttaatgaaacacagagatctgtggattgcatggacttggctctggagtccatccacaggaaagagaatgtgtatttt

SEQ ID NO: 156351 - DNA, 614 bp, Homo sapiens
gcagcaccagttgggtccagccctggagccccagcctagaggtgggcaggcggtggggccctgtccagcagaggcctagagtggcctgccattcccaaccaatcactccaaaatcaccctttgtcatgcctgcatgagcccaaacagccacccaaacccgatgacagagagggaacaatctccactctgcgcrggtgagccttgcacggcgttctgcctgccctcgccctcctccggtcttggctctcctcggtcattcccccgcctctcctccctctctttcccttctctgctcagtggtagcccttcctgcaaccaccctaatccaaagtgacacttcttataactgcctttctctctaggaactttgggtccaggtaccccaggtgctttctgttcacatgagaacatgggaagagggagctaatggaataacccgcactcagcagcaccaccttcccagcccacagcagacagaggagtcccaggcagagtgaggcgcatgctgggcttcttttctgcataaatcttcatggggcacagaattgttcagatctgggctaaccctctcatgacacccatctcccacccaaagctatccttggatgttggtc

SEQ ID NO: 156352 - DNA, 614 bp, Homo sapiens
gcagcaccagttgggtccagccctggagccccagcctagaggtgggcaggcggtggggccctgtccagcagaggcctagagtggcctgccattcccaaccaatcactccaaaatcaccctttgtcatgcctgcatgagcccaaacagccacccaaacccgatgacagagagggaacaatctccactctgcgcgggtgagccttgcacggcgttctgcctgccctcgccctcctccggtcttggctctcctcggtcattccccygcctctcctccctctctttcccttctctgctcagtggtagcccttcctgcaaccaccctaatccaaagtgacacttcttataactgcctttctctctaggaactttgggtccaggtaccccaggtgctttctgttcacatgagaacatgggaagagggagctaatggaataacccgcactcagcagcaccaccttcccagcccacagcagacagaggagtcccaggcagagtgaggcgcatgctgggcttcttttctgcataaatcttcatggggcacagaattgttcagatctgggctaaccctctcatgacacccatctcccacccaaagctatccttggatgttggtc

SEQ ID NO: 156353 - DNA, 490 bp, Homo sapiens
cccatgagtctctggttctcagttctgagaatcgaaagcagcaaagtggtctggatgagggatacagatgcccctaaaagctgtttttggtagaggtcctcagatacgtctgattcattgaactttcttgtcctgctaacacatagcacttgacagaggggggcaactaaggttgtcaggagtcttgatgtttcctcaaaagagatgatcaagaggcatttatcgttggacctttaaggccaacatggttgaggcattgtcatctcctgttgtctgctagctgaccatatttccccagaaacccatggacccactctgagccacagcttacgagagcaggagaggactgactgtccctgggcaagaagtcaaatgagctggcgagggaagctcttcctgaatccacacagatatgagctttagcrtatggactctgagtttgatcaggcattaggtcagaccccactctgaagatcagggcgaataacca

SEQ ID NO: 156354 - DNA, 525 bp, Homo sapiens
ctagaaggctgctgtgaggatttatcacacaattcctatgtaaaacacttggtaaagcatggggcacagcgtaaatgcttaaaaaatgtcagctgctgcccctgagtgggtttgagctcaaagggatgagggaagcattctgtccacctccacgacatgaccaatatgagtagtaagtggctgtaataatgaygcatccatggtcacagcctgcttttctgtttttccttttcttctgggccctggtttctttccccacattgggggcccctggtgttgattccacaagctgtccctggcagatggatgagatcccgtggctcccacgagctgtcgccatcgggagctcctcacattcccacagccacgttctgggcaggctgtcctggtggtcacaacacatctgaagtgacaaggagagaagactggcagcgtcgagacatggctcagctggcagctcttcgtctcctggagggaaagccatctcagacttttgggctgcatgcagtcggcagggattcattc

SEQ ID NO: 156355 - DNA, 504 bp, Homo sapiens
aattcctatgtaaaacacttggtaaagcatggggcacagcgtaaatgcttaaaaaatgtcagctgctgcccctgagtgggtttgagctcaaagggatgagggaagcattctgtccacctccacgacatgaccaatatgagtagtaagtggctgtaataatgatgcatccatggtcacagcctgcttttctgtttttccttttcttctgggccctggtttctttccccacattgggggcccstggtgttgattccacaagctgtccctggcagatggatgagatcccgtggctcccacgagctgtcgccatcgggagctcctcacattcccacagccacgttctgggcaggctgtcctggtggtcacaacacatctgaagtgacaaggagagaagactggcagcgtcgagacatggctcagctggcagctcttcgtctcctggagggaaagccatctcagacttttgggctgcatgcagtcggcagggattcattcacatagccg

SEQ ID NO: 156356 - DNA, 595 bp, Homo sapiens
ttggctgtttgtaattaattatggttttaagtgcaaaatggctgatgcagagtaggactgatttatgccttccttgttctaaatacaatttccctaaataaaactaygattacaaaggtttctggcagcactatcaaactggtttatcacaaaggagttgagctcattaccatcattcatatagtccctttattttatcttataacttccgatgtcaacttttacaacccaaagcactgcactcaagttaaacaaatcaactccaaaaactagaattaaagaatcctcacttcctacaagttaaaatgagaatcttcagtgcaatacaaataacatgaaaaattagctgggaggaaacatccaaaagggaacttcagatagaaaacaattagctttgttcctccagcaggcaaaagaatattgtggcttcaatttttcttttgattccatttaattttctttcattggcaattatcctattaaactggctcttttgtttttgcataagtaattaatccctcagagctcaagattacctccttcaatggcaaaatttagccctgtgcagtttttccaggattttgaaggctgcaaa

SEQ ID NO: 156357 - DNA, 532 bp, Homo sapiens
tacaaggtatcaaaaacaaatatggtttagaagtatcatatgcccagatactttcaacatgaacttttattcttaagcarttatgggaactgctcaatatattcaaatcaagttttgtcagtctttttccaaacctaaagtcattatgttcaataagtattggaaagtattagctctatctaaaagatggaagcattacctgaaaaaaagctgagtttaaaaacaaattcaataaatattagaaagtattagctctatctaaaagatggaagcattacctgaccaaaaaaaaaaaaaagctgagtttaaaaacactaacagtaccagatattcctctaaaaaatccatttattgagagtttatttgtattattattatcttcacttcctggatgataacagatcatgaaattaaatgtacaattatttccccccatttttcaatataaaactaatttagagtaattaatcaccatgaatttgcaattgatggagtcgtgttcctcatcttaattgttttctagacagatgga

SEQ ID NO: 156358 - DNA, 532 bp, Homo sapiens
tacaaggtatcaaaaacaaatatggtttagaagtatcatatgcccagatactttcaacatgaacttttattcttaagcaattatgggaactgctcaatatattcaaatcaagttttgtcagtctttttccaaacctaaagtcattatgttcaataagtattggaaagtattagctctatctaaaagatggaagcattacctgaaaaaaagctgagtttaaaaacaaattcaataaatattagaaagtattagctctatctaaaagatggaagcattacctgaccaaaaaaaaaaaaaagctgagtttaaaaacactaacagtaccagatattcctctaaaaaatccatttattgagagtttatttgtattattattatcttcacttcctggatgataacagatcatgaaattaaatgtacaattatttccccccatttttcaatataaaactaatttagagtaattaatcaccatgaatttgcaattgatggagtygtgttcctcatcttaattgttttctagacagatgga

SEQ ID NO: 156359 - DNA, 532 bp, Homo sapiens
gcatttgttccatctattgcatggcattgctctgtgattttccagactacattgatttcctcattgtctaaactagaatcttgacaataacatttttgaataaatatttctagatggcgttctctaattgtttctggtgtttaagcctcttctccccaggattctatcttctactcttcgaattggttctgatgtgctcagtacaagactctatagtaggtactcaaatagattgaggcattgaatatgtatgtacacacaagactctcaaagcctcttgctagccaatgggtgtattaacacaaagcaatgtgtgttgcaataaaattccagtgtaaagtcatggattaaaggactctttgaagttatttgtaattccattctcttattgcaaaatttaatctaactagatgctaataaaaataagttggtacttaaccaccagaaagaaaggaatctttcttccccctggtggttatagaatgcagcctcaacatatcttggtraggtgggaggctttatgcattattct

SEQ ID NO: 156360 - DNA, 408 bp, Homo sapiens
ccacaatatgttccaaatgagggacatttgctttgatacctatctacattttacaaataacaatagatcatactttctggaggaaaataactattcacaccaacagcatcctcaaaaggaacattaggcttatccatttagaaagaatttctgtatgcctgtagaaacatccatgaatttcgagtgctcaaatcttaatactccttgctaagggtactttgaggaaaaagcaacaaagagaaagtgccttaaagtagaatctacttttacactgttgctttaattcatccatctcatgtttcatgggtcgttcaagtgtrcattaaaatcacaggacacaaagttccacatcaaaagaggataagaaggagtcctggaaaactgtataaaactagtttttaaatagct

SEQ ID NO: 156361 - DNA, 580 bp, Homo sapiens
tttttgagcatgttcatatgacatcatttgaggtgtcaccttatgaacagaaacacataagaagatacagtgtgtcacagaattaaatgttagaggattctgataaccgtctaccctacactaacaccaaaacatttattaactctaagataatatatgaatggcatcatttccatttctgcttcagagtcacatgaggttaagcataaaggcaagttgtaacaataatgataataataagttacataatctcttcatctttacctraaacatgagagtctgctaaaaattttggcctggagtaatcacgggagggattatttgaaattaacttgacctaggagtgatttatggcaactttaacatattcttataaagagttagaattcaaatattttctgaaagtaagagaggagctgaacaaatcattcattcattctttgcattgctgagcattctttaggaagggactatgtcttatttaaatttatatccctgtaatctagcacaacttggaggcaggatgtgtgttctgcaaatgaatataataatttttaaaatttatcttcacttgcaacta

SEQ ID NO: 156362 - DNA, 578 bp, Homo sapiens
taaacacagcccgaaggaacaagatgtccagcaagaagtttctgggggcacaaatgaccaaggagtttatgtgtctaaagaaaaacattgagttccatcttctctcttcatctcactacttccaaccctatgatcattgtggcactagtccattggttttcctggcccttcctcatatccagctttcctgatttttcctcagcttatttccaattaatttccyttcttctcacttatcggtccttcaatgtgcagcctccataatgcagttgttaaagtcaggaatcagaaagaggtatcttcttttggaggaatgcagaatgttttattgtgcttaataaacatcccataatgcctctgaaaaggctcttagagtttatcatgtaagtatgtgtaaacagataatatttagatatgtattttatgcttgatagaatataatttctctcttgaggaattcagatggagctatagtatatatttagttcttctaaactgtaattaatttcctgatagagcaaggaacttgaatgaactatcctacaaatatatgcagtatgaaaaatgttttaaagcag

SEQ ID NO: 156363 - DNA, 533 bp, Homo sapiens
aatctttcttccccctggtggttatagaatgcagcctcaacatatcttggtaaggtgggaggctttatgcattattctcctgattttacaagacaggaaatagacacagagagaggctaagtgacttgcccaaggacaaagagtgagtcagatgcagagctgggaatcaagcccacttctcttggttcccagtgtacagcttttctcagcaagccataatgcctttcagaaggatcatttcctaaaatgtattaagttgttaaaaattcaatatgggtgttacattactttccagctagctctgtttctcactaccttactagagctattatcagaagytaaactaattgtcagattagtaattccatatctataatttttaagcaatacctcattaaaactggatatatacaaatatctaagaagaatcagagtttttagagaatgaggttaggagtaacctttacagttgccacaaaaaaaaaaatgtagcttcaaagttaggagaaagtggaaatgatcatgtagaacaa

SEQ ID NO: 156364 - DNA, 545 bp, Homo sapiens
aattctggatcatggacaggcaccatccttttcagtgataattactagagcctcttattgtgctaactcaaccagaaatggtaactaagcaggccagatactcaaacttctatacacagtcctccagctgtgatcactggaaacatcactaactgataacaatgccctttaccaatgaatccagactcagtataggatctctttctatagagcagtatgaacagccaccaccaattggtcatgactggtccgaaacattaaacccattcactatatctagcatctacttatctatgcactcccttctgcaagccaagatatagaatccttatagacccaktgtcttacctcccagttctgatcaaatcctttgctattgtcttttatatgacttgcttatgcttctttttaagtcaacatacctaacacagatttccctaaaaatgatcaatatgcagtagtctgttttataaaacgtatctatatttttcctcagaaactttgaaaacagtggatttcaaatgccttaaggagcatcataagaa

SEQ ID NO: 156365 - DNA, 472 bp, Homo sapiens
ggggtgtgtggtggattcggtgattaatcagtgaattcccatccgctggcatctctcactgcccctcttgcgtgatgtaagatcagacgtaccctgcattgaaaagtcaagacacacgggcgtctcgctcgcgctcacacacgctctgcctcctctctcccgcacgcgcgcatccctccaccttccacatcctgctccaggcaggagaaggctgactggctggactcattgagctgaagaatttccagtgacatttgtaaatgacgccgctcgattccaggctccaagcggccsctgccgccgccgccgccgccgggccgaaggtgccgccgagcagtctccagcgcaggcttccttaccgggcgaccacaatgtccgagtttctcctcgccttactcactctctcgggattattgccgattgccagggtgctgaccgtgggagccgaccgaggtaaggagaacacctcccc

SEQ ID NO: 156366 - DNA, 352 bp, Homo sapiens
gaagcttctgtccactactgctcagatcaagtagctgagctaattagaaccttaaacttttgctaaaatagatattatagagatttaaaaatgattcagtttttagattatctaagacattttgtgcatttmcaaagcttttaatggtatatttttattgggacaaaaatgttagaatagcaagtgtgctttattgaaatattccactttatccaactctattaacttttaaggcatttttttcatgactaagatctggaagtacagtgataatgacaccacctcgtgagtgagattcttgcctcatcaggtgaaagcactacagattgtgcccactgggcatccatatttt

SEQ ID NO: 156367 - DNA, 531 bp, Homo sapiens
ggaaagggttaatattctaatcagataataaattatttcaggctattttaaatgggtacattccattttgcagtgccttttattgatttgtgtaaaacatggttcacaataaaagtcacatgatggtcatatgtgggccctacaatattgtttactttcttattgctttttcttttatatttcagaattattaataccatatttcctaacaccctgtgtttgyctatgccatgtctgtaaaatggaattaattgagtctgactcacagtattctttagggaattagttaaaatgatacacttagcaatgttttaagcattgacaagtatggaagcaataattttgctgttatttctatcaacataaaccagcataatagcaaaagaaacaggcattggcctatgaagacttatttgggtttgtttgttgaagaaatttgcagtgttttaaagaaagagctccttttcaattgtccctgaattcttgacatgattgagaagagtttgtactgacactcaagttcctgctgat

SEQ ID NO: 156368 - DNA, 515 bp, Homo sapiens
agacagcagagatatgattctgataagtagacaaattctcatactgagatacaaatgagatcacatttaggtttgtattttatctttctgttccttgggaagctgtgactaaacaagggccaactgtgtgctctattaccacacactgacttcagacttcatacatgtgtttcacataagaattagtttatccaaactcattatttgacgaagtatttttttaactttatattttgatataattttagacttacagaaaatttgtaagtctaatacagagtttccatwtacccttcaaccaattccccagatactaacataatacataactataatacaatattaaaacaaaaatgtagcattggcaagacaacattattaatgagggtatagattttattcatattttaccagttttttccactaatgaccttctatcccaatatccaatccaggatgcaatgttcactgcattaaattgtcatgcatcctttgattcatccagttggtgagag

SEQ ID NO: 156369 - DNA, 515 bp, Homo sapiens
agacagcagagatatgattctgataagtagacaaattctcatactgagatacaaatgagatcacatttaggtttgtattttatctttctgttccttgggaagctgtgactaaacaagggccaactgtgtgctctattaccacacactgacttcagacttcatacatgtgtttcacataagaattagtttatccaaactcattatttgacgaagtatttttttaactttatattttgatataattttagacttacagaaaatttgtaagtctaatacagagtttccatatacccttcaaccaattccccagatactaacataatacataactataatacaatattaaaacaaaaatgtagcattggcaagacaacattattaatgagggtatagattktattcatattttaccagttttttccactaatgaccttctatcccaatatccaatccaggatgcaatgttcactgcattaaattgtcatgcatcctttgattcatccagttggtgagag

SEQ ID NO: 156370 - DNA, 607 bp, Homo sapiens
ctatataatttgaaaaacacaattttccgtgttaatccttattgaatgtgcctacatatagctaattgtacatttttgaaccgagtggtctgcactaaatatatataggcaccaaatatatataaatatatagtatgtagtattaaatatscagtacatatatactatatagttatatatagtaaataactaataaatatatagtttacatagtactaaatatatagagtatatataattatagtactaaatatataatatctataatactaaatatataatatctataatactaaatatatagtatctataatactaaatatatagtatttgttgcagaccactgccataaattgcaggttgaaaaatgtacaattagctgtaggtaggcatattctacaagaaaacttaacatagacaactgtggggttttttgttttttttgagatggagtcttgctctgtcgcccagactggagtgcagtggcacgatcatggctcactacagccttcaccttctcttcccgggttccagtgattctcctgcctcagcctcctgagtagctgggattaccggcaccttctaccacgcccagctaattttcata

SEQ ID NO: 156371 - DNA, 505 bp, Homo sapiens
tcctagtaattcttaaagctcttcaattcctatagagtttagcctttgtcaatagccaaaatatgtgcttgaaaaataacttctttgagtttcaaagcaaatgaaaacataaaacaagcaaaaaaggcttttttgttgttgtttttctctgcatatctaggrtttgtttcttcattcataaatacggttttcaaaaagcattgcctcagccaaaattattgccctttttaaaaatgtttttcatgtatacactttctacataactgcttttctttacacctcttttctacattaattctaatgaaaggtcatcttgcttacctaaattcagtgccagcttccacatgactaactagtcagctatggttgtggcttggaatgaccatgtgctccttgaagcttttgtataatgataatggcttccttgtcactaacaggtctctacaacctactaccaaaggcaagttacaaatcttcttctcaaacttggagccttaattaaaag

SEQ ID NO: 156372 - DNA, 505 bp, Homo sapiens
tcctagtaattcttaaagctcttcaattcctatagagtttagcctttgtcaatagccaaaatatgtgcttgaaaaataacttctttgagtttcaaagcaaatgaaaacataaaacaagcaaaaaaggcttttttgttgttgtttttctctgcatatctagggtttgtttcttcattcataaatacggttttcaaaaagcattgcctcagccaaaattattgccctttttaaaaatgyttttcatgtatacactttctacataactgcttttctttacacctcttttctacattaattctaatgaaaggtcatcttgcttacctaaattcagtgccagcttccacatgactaactagtcagctatggttgtggcttggaatgaccatgtgctccttgaagcttttgtataatgataatggcttccttgtcactaacaggtctctacaacctactaccaaaggcaagttacaaatcttcttctcaaacttggagccttaattaaaag

SEQ ID NO: 156373 - DNA, 505 bp, Homo sapiens
tcctagtaattcttaaagctcttcaattcctatagagtttagcctttgtcaatagccaaaatatgtgcttgaaaaataacttctttgagtttcaaagcaaatgaaaacataaaacaagcaaaaaaggcttttttgttgttgtttttctctgcatatctagggtttgtttcttcattcataaatacggttttcaaaaagcattgcctcagccaaaattattgccctttttaaaaatgtttttcatgtatacactttctacataactgcttttctttacacctcttttctacattaattctaatgaaagrtcatcttgcttacctaaattcagtgccagcttccacatgactaactagtcagctatggttgtggcttggaatgaccatgtgctccttgaagcttttgtataatgataatggcttccttgtcactaacaggtctctacaacctactaccaaaggcaagttacaaatcttcttctcaaacttggagccttaattaaaag

SEQ ID NO: 156374 - DNA, 557 bp, Homo sapiens
ctgaaattctgcatttctgtaagctcccaggtaatattgatgctgctggcccatggatcacattttgagtagcaatgatctgcaccagtgctgtccaatagaatttttgcagtgatggaaattttctacatctgcactgtccactatggttactgaacacttgaaatgtagttagtgcaactgagaaatggagtttctaattaaattaatttttttaaagagtaggggtcttgctctgctgcccaggctggagggcagtagcatgatcatggctcactgcagccttgaactcctggtctcaagcaatcctcccacctcagccttcasaatagctgggactacaggcgcatgccaccatgcctagctagttaaaaaaattttttttcagagacagggtctcactatgttgccgaggctggtctcaaactcctggcctgaagccatcttccctcctaagcctcctgagtcaccggaattacaggcttgtgccattatgcctggcttaattaaattacatttaaatttagatagccacatgtagctacaatattggacag

SEQ ID NO: 156375 - DNA, 219 bp, Homo sapiens
gaaggagggctgcctggaagaagtgacctttcatccgagtcttgarggaagagtgagaaaaggagcaatttaagcatgggaaccagcttaggaagaggcccagaggagtgtgaatgcatgctactttcaggaaatctcagagagtttggggtgactgaaaggttggcatagtatatgcaagattgtgtggaatgtagatgaagaggtgaggaggagcca

SEQ ID NO: 156376 - DNA, 466 bp, Homo sapiens
ctgccactgaaatagccatcaatgtgaaggcgctgtataatgaaacagaatctttgctagttggcagggttcctttggtaaggaaaagaatgactggtaacataagaatgatgaattaaatgtctgggtcttaccttcattggggaacaggcatttggcagattctaaggcagaagcagccttctggcttccatcctgagagctgcctcttcacctggtttttgtcttcaagaaaatatatggctgaagttgggagtcatgattcaggctaacaggagtggagatttcccctcatatatgccatcctgtttttaggsagccctgctctgccccattcagcttcgagagacgtgagctttataaagtgtagtagacattccttaggtacttattattgcacacaagtagaggaactcatggagtttgttccctgaattagcatttgaatatgagtggtatggtcctc

SEQ ID NO: 156377 - DNA, 481 bp, Homo sapiens
gacactgccactgaaatagccatcaatgtgaaggcgctgtataatgaaacagaatctttgctagttggcagggttcctttggtaaggaaaagaatgactggtaacataagaatgatgaattaaatgtctgggtcttaccttcattggggaacaggcatttggcagattctaaggcagaagcagccttctggcttccatcctgagagctgcctcttcacctggtttttgtcttcaagaaaatatatggctgaagttgggagtcatgattcaggctaacaggagtggagatttcccctcatatatgccatcctgtttttagggagccctgctctgccccattcagcttcgagagacgtgagctttataaagtgtagtagacattccttaggtacttattattgcacacaagtagaggaactcatggagtttgttccctgaattagcatttgaatatgastggtatggtcctccaggtttgctt

SEQ ID NO: 156378 - DNA, 614 bp, Homo sapiens
atttcataacttgttactcaaatactaatatttcttagtcttcatccttatcctcttgtctcattttatttagtttttcaaggacattttatccttacctctggttttaactatgcaaataactccctaatttattcttcagttctgtatatctaatttcctattagacacttccaactaaatatcccagttactccaaaatttgtatgttcaaaaggtaaataaaactttctccctaaacgatctcctcctgtattctctatctcagtargagccattaaaccaaacccaaccagtaggccaagctggaaactggtcttcccctcaattcctacagactacctcgcctagtaaattgccaaatcctgacttgtcattctcctaaacttctctcaaatctaccctctctcttccaccagctgaactgctacttactattcacgcaccagttcaaaaacttccctccctaaaataggcttggctcatatctctcctttatccctccttgcccaaatagtaaccacctcctttgtgctctctaagtggtttataatttaatcctctggtgccactgtttgcatacttccctcctgttgtaagttccatgaggacaa

SEQ ID NO: 156379 - DNA, 560 bp, Homo sapiens
tacacattatatacagaggaaccaaggacaacagacttcacatctatatgaaccggaaaacaagacaatggagcactatcttcaaagtactaagaagaagaaaaaaaaaaaagcatcaacccagatatactcaatgaaaatgtatttcaaaaattaaggcaaaataaatttattcacatgaataagggccrtgaaaattcaccaccagttgaccaccactagagtaactatggaaagaaattcttcaggcaaagtaaaacaataccagatggaaatctgaatcttacacgaaggaataaagaacatctgaaatggtaaatatgagggtaacagaagttattcttcatttttcaatcccttttaaacagttaaaatataactgtttaaaaatagtaacaattaattagagggtttaagacagacatattgataaaatgtatgacaaaataggataaaaaatgtggcaggggagatggagacaaaaaaagactgtcatagatttctacattaaacatgaagtgatgttatttgaagaaaacctgtaataagttatcttgtaa

SEQ ID NO: 156380 - DNA, 556 bp, Homo sapiens
taatccacaaaacacctaaagaaaacatattaaaacaacttatttattgatcttaacaattcaggcaagcattttgtgctaaattaatttattttaactcagtcattaaaagaaaaataaaaatgaaaacaaaaataatctgagcaccccccccaatttacttgcaatccagcaagaatatttgaaaaatatatgaatattggtaccttaatgagatagaaaattattataaaaatcttatattttggttcaaaattataaaatagtttacacccttacctattcaatctcactgcccttttttattgcaaagtgtcaaagagaaagatctgaaaaacaagttttttaaaaaacattttaaaaatagaagcttaagtagagaatattacaaaaagaattccaacttccctgcctcccaagacactcttatctctatggcaacagtgaatgctcttgacattcttatttcttgggcagaagggtttgataatagacgaatgagaaatctgyacatatcaaattagatacattctttgtataggaagcttaagagcat

SEQ ID NO: 156381 - DNA, 637 bp, Homo sapiens
ggtggtttgatggcccatggagaatagaaagttgtttgccattatccatgtatatgggataacagtggtaatctgctgtacttgaagcataaaatcaccattttgactcctagagatttgtagggtttttgtggcagctgtactactctgatggaagtacaaattctatctatctcatgacaaaaaggtttttttccaaagagaacatgaggtctcatttctcagttaactttcaaattgcctctaatatatctaatgacctcttttctaaaattagtttcatgaaggggttgattgattttaggctctttatagatttaatttaatgttcattctccattgtattattgcccagcatgagtcaagacaatcatacttatgattagagaaataaagcaaggcctttgggggccaagtatagaactaccttatccctgagctgggaggctgagccacaygtggactgaattgctgatggacaaactctaatggcttttttaatgcaaaaaatgcattctggaagcaggaagctgctgggagagcctgctctgaaattgcatcagcacactcttcacatccttggttctgtcttaggaaaacaaatgctctctgaattattaagccgacatgtggcttc

SEQ ID NO: 156382 - DNA, 585 bp, Homo sapiens
tttacattatttgccaggactcaggggagtcgcccaaagtatcattttagggttggtgcaaagcacccagctccagggttttgaaaggaaacagggacaaccaaagtttaagtccagcaggaataggagaagtggcaatattcagaagattaacttgataagataatgtttagcctctctttacaacctcaaatgcaagatgtggattcttaaagtttttgttcctattatctccagtttgtgctactgacaactgcagttcccaagaggacatgtgcagccttccttcttgtgtgaagaggtggggaaagcagggaattggctttgggctctaacactaattaggactgcagacaagtcttgtcatctctttctctggatctaagtttgcttgtccataaaattagagggttagaatagatgccatgagttcttctaggtctaggattctatagctttatctaacaaaaagattcagatagaacaccaatgaccagtggctggactttaaggtagaggtgaagataggagttgttgctgggatataccayattcccctataaatatttcttttgaaggttgtag

SEQ ID NO: 156383 - DNA, 585 bp, Homo sapiens
tttacattatttgccaggactcaggggagtcgcccaaagtatcattttagggttggtgcaaagcacccagctccagggttttgaaaggaaacagggacaaccaaagtttaagtccagcaggaataggagaagtggcaatattcagaagattaacttgataagataatgtttagcctctctttacaacctcaaatgcaagatgtggattcttaaagtttttgttcctattatctccagtttgtgctactgacaactgcagttcccaagaggacatgtgcagccttccttcttgtgtgaagaggtggggaaagcagggaattggctttgggctctaacactaattaggactgcagacaagtcttgtcatctctttctctggatctaagtttgcttgtccataaaattagagggttagaatagatgccatgagttcttctaggtctaggattctatagctttatctaacaaaaagattcagatagaacaccaatgaccagtggctggactttaaggtagaggtgaagataggagttgttgctgggatataccacrttcccctataaatatttcttttgaaggttgtag

SEQ ID NO: 156384 - DNA, 527 bp, Homo sapiens
ccttgctgataccttgattttagcctggtgagaccctcaccagacttctcacctacactacggtaggataatacacagatgctgtttaagcgctaagtttatatagtctgttattgcagcaacagaaayctattaagatcctttgtatctctgcaaagtcacagcagcccagacccagtcaaattctgatcattgagggcactgagacagcacatgcagtaattctgatcactagacttttggcataatgtcagcttacgaaaacagctcaggcccaggggcacaagtgggcctttccctgtgctcatgaactagaggaacacatttttaactggctgccaagcataggtcacatttttgaaacacctggacagagtctcagcaaacaacaggtgtcacagacatcacatattcaagaagtaaaccaggcgtgtgtgcccaggttaagcgaatgtgtactatttaaacatctttaaaggtagtgctctattgggtttaaggctcattcacttttactggacagcccc

SEQ ID NO: 156385 - DNA, 527 bp, Homo sapiens
ccttgctgataccttgattttagcctggtgagaccctcaccagacttctcacctacactacggtaggataatacacagatgctgtttaagcgctaagtttatatagtctgttattgcagcaacagaaacctattaagatcctttgtatctctgcaaagtcacagcagcccagacccagtcaaattctgatcattgagggcactgagacagcacatgcagtaattctgatcactagacttttggcataatgtcagcttacgaaaacagctcaggcccaggggcacaagtgggcctttccctgtgctcatgaactagaggaacacattttyaactggctgccaagcataggtcacatttttgaaacacctggacagagtctcagcaaacaacaggtgtcacagacatcacatattcaagaagtaaaccaggcgtgtgtgcccaggttaagcgaatgtgtactatttaaacatctttaaaggtagtgctctattgggtttaaggctcattcacttttactggacagcccc

SEQ ID NO: 156386 - DNA, 572 bp, Homo sapiens
gaaacaaggatgaagaacaaatatatatacaagtgaccatgcaaaaatgcaggggttaggggtggcacagtaaaaaatccacttagaaattttgagtccccaaaagcttaattaatagcctactgttgactggaagccttactgataacataagcagtcaattaacacgtattttattttatatgcattgtgtattgtattttcacaataaagttagctagagagaaaaatgttaggaaaactataaagaaaaaatatatctactatttattaagtggaagaggatcatcataaagctcttcatcgtcctcatcttcacattgagtaggctgaggtgggggaggaagaaaagggggtggtcctgctgtctcagttgacagaggtggaggaggtggggaaggtagaaasggaggcaagagaggcagatacacttgggttatgaaaagacatcctaactgatgtctaattgctttttaatttctctaaaaatgtttctgtatggcaacaactcttccaccattttctttaatttttccgcccctatcacaaaacagtttatgtcataaaataag

SEQ ID NO: 156387 - DNA, 370 bp, Homo sapiens
tggtttggaaccacttacctccatcaaatctccttccattaattcctcctgtgtgctgtctattaactccaagattctccaagattcatatcttgaacccccctccaacacatcatttttgccatatccrctatctctttcatgatttgtttgattgtctctgttgtaagtccttaaggtcatgcacaacatctggacacagtttttccagtaggaatttattgttttaggcttgatggctttcacagctttttctgtagcaacagtggcatcttcaatggtgtaattcttccagactttcatgatgttctactggggttctcttccatagcactgacaatcctttccataaattaccatgcataatgag

SEQ ID NO: 156388 - DNA, 442 bp, Homo sapiens
ccccctgccaaattgtctactgtcagtttgttttctggcattacttcttctacatcttcttcctcatcacctggtactggtttggaaccacttacctccatcaaatctccttccattaattcctcctgtgtgctgtctattaactccaagattctccaagattcatatcttgaacccccctccaacacatcatttttgccatatccgctatctctttcatgatttgtttgattgtctctgttgtaagtccttaaggtcatgcacaacatctggacacartttttccagtaggaatttattgttttaggcttgatggctttcacagctttttctgtagcaacagtggcatcttcaatggtgtaattcttccagactttcatgatgttctactggggttctcttccatagcactgacaatcctttccataaattaccatgcata

SEQ ID NO: 156389 - DNA, 584 bp, Homo sapiens
taatctcttatgtaaactttcaaagcagttataaacactttaaccatctgaaatgaatcatgcaagctccaatcaagaagacaatacttctagccaattatcttagctccaagatctctttataccaacaacacatgcatttcactcgtatagtacctacataataattaaggtctgttttttgtgacataagaaatataaatgaaaatgaaaacctaaatatatcatattaattataccagggtagcaatttgatcccttctcaccacatacactggtgttttccagaagtgaagatattgataaaactttacctctgaaatagtaattttccttcccaggtattaataatccatgttaaggaagtataaatatagactttacatgcatatgtgttcatcaaagtgttatttataatagtaaaaacttaaataaacttaatatattcagcaattggaraattataaaataaagaatgatagagcaataaatattcaattatatagccattataatagaatattggacaatgatcaacattcatgtaactatgttaagatcaaaaggctaatatataccccaat

SEQ ID NO: 156390 - DNA, 497 bp, Homo sapiens
tagaatatgttactttcaccttcttgcaagtttcatcagcaatggtacacagtacactagatacatctaaattatacccgtcttaggttgtatgttgctgctgctcaatgttacaatataattacatttctgttttcttctttttccaaccacatttaactgtttgggagttaaactcattattcacaggccattccaaatgcttttggaaaaacaaaattcttctccctaataacagtatatattcatagtaccagatttaacaaccattcatggctggcatcatcattattcaccttttatacatgaggcaagggggactcaggaagtttagaagtctgtactacatttttctgataatgaatatttgctayggaaaattattaggggccacacacactgtgtgaccaaatattacaaaacaagtaacaaagtttatattcacaatttattttattttattggaataactgtggaaaacaaagtaacagaagatt

SEQ ID NO: 156391 - DNA, 633 bp, Homo sapiens
ttttgtttatgttaaccacaaaagttctaaatttacctttgtttttttaatactctgaaccaaattactctcctgaacaaattttttactctcccaaattaaaatttcaaagaattttggaggtctatacacatgaggaaaacaaaaaacttagaccttcatagtttaagtccacataaacttattaagaaaataaaatgtcatattttacactctcaactaaaaacaaactttattaaaatttaagcagtttttctggtataatttatttgrtaattttaaatatctgtgacagttccttcaaattttatctgaaataagagaggactttatgaaaggtactaagaactattacccaagttagaaggcatttacattctagcagcacctagcttatcagccagaagcagagatcctgttccaagaaggaatgtttgcctctactgcacattaatgacaagttcctgtccgtaagaggcaaaatggaggaagtcacaatttctctgaataaaaataagtttttctacaaagccaaaatattactggtttttttcactggaagtggaggacaaatccagagggaagagatagagatgctatggaatgcagcttggaatgtgatgtggatttgaa

SEQ ID NO: 156392 - DNA, 608 bp, Homo sapiens
tcatttccaaagcttaaaataatctccaggaattaaattcatctcagtaaataaacacacacacacaactatatttttacttgtatctctgcaaggcatgctagttttatgaattatacttatttctccatgaacatgattgcttttatagcagttgtattaaaggaaacaaacacataattgcaaaaaaaaaaaaaaaacaagtggagacggatgaactaagtagtatatctttaaaataaaattgcttaagtattacaaaaagaataacaggcatgttttaactgaggaataaaaaaaagtacttctagtgaaaagttcaacactttcttcatgagaaaatggatacaaagttgacagatttagtcaaggatacctaaatggaagtscttttaaaatatcctgaagtaattccatacttgttttcttcttgatctctacctatttcttataagctcaatgtaaatagacattttctttttttttaaatcagcttcttcctcaaagttgattcattctgctgttctcaaatccaagccatgaacctgacctttctacatggtgagatcagactaactccagccattttcatgggtcagtaaaaacca

SEQ ID NO: 156393 - DNA, 483 bp, Homo sapiens
cagtggctcatgcctgtaatcccagcggtttgggaggctgaggtggatggatcgcttaggccaagggattcaagacctgggcaacatggtgaaaccctgtctgtaccaacaaaaaagtacgaaaattatccaggcacacacctctagtcccagctacttgggtggctgaagtgggaggacccatttgagcccaggaggttaataacaattgtaggtagggtagttggtggtagttggtgagaacttccctgaagagataattcttgagtaacaacttggaagacatgaggctaatatcatctatatctgggggaagaaccttccaggcggggaaactgaaggctgttttcttcactgcaggtggctgccacataaggctagtacttccctttcaaggtagggagtatsgaggaagaggcaaacacttattgctcagagaagaaaaaaggactaattttgctttagcaaacctgttatttttgt

SEQ ID NO: 156394 - DNA, 625 bp, Homo sapiens
aaatatggcttttttggggggggtcaatgaataacgtgatagatgtgtattattctttggtttattttctaccatcccccctttcctatttgcagtttagtcttgttttttggataattacctattaatgacgcgcatcttccctgccactctgtactatgacagttgcaggaaccgtgagtctttcctgcaagataagtgrccagcccagctaatcatcagcttagtccaaaaaccttgcatctgagtgagtaaatatggagatatgggactcattacagagtaggggttggggtggctcatgaaatatacttctccttcagcattattttggcagtggtcccaaagactaaactcagaaagtctgatcctgtgcctgctgaagcatgtcattattcaagttcacaacttgacactttccctttcactagcgttatagtattgaatgataaagccacgtatacccaagaattggaagaatctgtgggaggacttaggtttcagtatcacttccatccttccccacttaaagccctccgtgttcttagaagcacctacctgtccctgtagtactactggtccctgtagtagaggttgttagctctttgcttgaagatatactact

SEQ ID NO: 156395 - DNA, 527 bp, Homo sapiens
ttctcagtaaatgagacaagggataaagtaatagcctttgccatccccttgttggataccaaggtgtttgtccagacttccagacctcagaacactcaatatagaaatgggtttctccagatatgggacgggttcatttggctgacagccactaagggacacttaagccagatagctcccttatgctgggagcaaagaaatcactcccttgataactggccaaacacaactcgtgttatgggatggattccacctggacagtgccgacatactatactgttacaacagagggacctatttgccacagactggtctcagcaacctggcttgaattggtatgctcccaacggaacccagtggctctgcagcccaaacttatggccttggcttccctcaggttggttaggaygctgcactctaggtattccctgggcacaaggacgctgggtaaaaaccatggaagtctatccttatcttccacatgtggttaaccaagggactagggccattgttcacaggaatgatca

SEQ ID NO: 156396 - DNA, 591 bp, Homo sapiens
aagtgtgatcctgacatgtgctattgaaatgctgtaggagagaaaagtgtggaagagttactggccaggcaggaacaacaccatctctgctttatccccagtgaaagaacctaagataaacacagatgggagcaagagaaatcaatgcccacttattttaaggtgtgattttctgcgcaggaaagatgctcacagaagtgctatgcatttgtttgtctgacaaatgctatagccatggtcacagccttgacctgtgagggactgaattagctttgacattactgttccggcctctgaatgacttctagtctgccgttcactgatgagctgaagaaaatacattcacacacataatgaaacctcttctgtcatcaagtttttatttaagtgtcagagctgagtagccaaaataacttgagaagccactgagaacatgaggcaagtacattactgaggcttaagggaagagtgtgacttaagccatcttggaggtagctagaccttttgaagcatttcttcaggaaattccattggaaaaaacrgtttggagtattttgggggtttgtttttgttttctttttggagagggct

SEQ ID NO: 156397 - DNA, 522 bp, Homo sapiens
tttgctatgcagcagtaaataattaaatagaaataatacccatgaaattgcaaatgtgattaaatatttttcctagcataaattaaaaattttttaaagtcagtcaatgcatcagataaaactatcttatctaccacttaataatccccttatcagactttggaaaatattggtttaacaagacaacaataataatgataacaagtataatagcaattaataatttagcggctactcttttccagaccttgggctaaatggtttacatrcatgacctaatttaatcccctcaacaacactgtcagttaggtgctgttattcccattttgtagataatgaaagatgaggaagctcagaaaggtaggtaatttgtcaaaggtcacatgaaggtcatgtttgatgactcttagaactttttatggagtagaaacttcccatgatctgaaagaaaatgaatgagatccactctttgtataaatgtttctctgccttttagttaagaattgctgatatcattgcttg

SEQ ID NO: 156398 - DNA, 522 bp, Homo sapiens
tttgctatgcagcagtaaataattaaatagaaataatacccatgaaattgcaaatgtgattaaatatttttcctagcataaattaaaaattttttaaagtcagtcaatgcatcagataaaactatcttatctaccacttaataatccccttatcagactttggaaaatattggtttaacaagacaacaataataatgataacaagtataatagcaattaataatttagcggctactcttttccagaccttgggctaaatggtttacatacatgacctaatttaatcccctcaacaacactgtcagttaggtgctgttattcccattttgtagataatgaaagatgaggaagctcagaaaggtargtaatttgtcaaaggtcacatgaaggtcatgtttgatgactcttagaactttttatggagtagaaacttcccatgatctgaaagaaaatgaatgagatccactctttgtataaatgtttctctgccttttagttaagaattgctgatatcattgcttg

SEQ ID NO: 156399 - DNA, 569 bp, Homo sapiens
tctttctccccaaatggagtaagagtccacagaaaagtctacagcaaccctgtctaagtaatctgtcccatccgccacccaccactccaaccattttaatcacactttatctgtgcaagtggccttccagggccccatgctggacacaggagttcaacaactcctggctgcagtatgatatttagagtccaagaatatttcccactaactggatctgatagagtttctacctcaatgaaaatgaggaaaatatttggagtcagattaatcaatcttaatgggtcaaacaaaaggygggaggtaagcttcaaggtcaagcatatgaggaccccaggggagctatgagtccaggaagttgagagtggctgtaggtgggcctggtctggaagaactccctgaactgaaaaacaatcagccccataaagtttccattgcacttgagtccttgtgtgggcacagacaatttcttgttacatttgttcttagcctagaataagatggtaataatcaaggatgcagagctagagaaacttctctactataccaaaattttctaaaaggcaacctaa

SEQ ID NO: 156400 - DNA, 569 bp, Homo sapiens
tctttctccccaaatggagtaagagtccacagaaaagtctacagcaaccctgtctaagtaatctgtcccatccgccacccaccactccaaccattttaatcacactttatctgtgcaagtggccttccagggccccatgctggacacaggagttcaacaactcctggctgcagtatgatatttagagtccaagaatatttcccactaactggatctgatagagtttctacctcaatgaaaatgaggaaaatatttggagtcagattaatcaatcttaatgggtcaaacaaaaggcgggaggtaagcttcaaggtcaagcatatgaggaccccaggggagctatgagtccaggaagttgagagtggctgtaggtgggcctggtctggaagaactccctgaactgaaaaacaatcagccccataaagtttccattgcacttgagtccttgtgtgggcacagacaatttcytgttacatttgttcttagcctagaataagatggtaataatcaaggatgcagagctagagaaacttctctactataccaaaattttctaaaaggcaacctaa

SEQ ID NO: 156401 - DNA, 513 bp, Homo sapiens
ctttaatctttgaggttgctgacctgtggatgrgtttttttttcttttatcctatttggtgaccttgagggtttgattgtgatatatggtgtattcagccaactggcctcatttctgggagattttagggggccaatactcagtccccaactcctagactgtgagctctaactctgagggacttgtattgggtcccaactttgtcctctggctcctcaaggtttggagtccactgtgctggggggtgggctgaggtgcagcagctttaacagagtgccagtggacgtgggggtgcctgtctccctgggggaatttaccacagtggaggaggcaaggcagctggggactctgtgtgctgttgcactggaggtggtgctggcttggggcaaggtgctggccagcacaggtctgggtgccttctttgccctgcaaacaggagtaatagctcagggggtgggaggatcccctgttctctgcacagtgttagcacaagggcagggtactggcagtggt

SEQ ID NO: 156402 - DNA, 513 bp, Homo sapiens
ctttaatctttgaggttgctgacctgtggatgggtttttttttcttttatcctatttggtgaccttgagggtttgattgtgatatatggtgtattcagccaactggcctcatttctgggagattttagggggccaatactcagtccccaactcctrgactgtgagctctaactctgagggacttgtattgggtcccaactttgtcctctggctcctcaaggtttggagtccactgtgctggggggtgggctgaggtgcagcagctttaacagagtgccagtggacgtgggggtgcctgtctccctgggggaatttaccacagtggaggaggcaaggcagctggggactctgtgtgctgttgcactggaggtggtgctggcttggggcaaggtgctggccagcacaggtctgggtgccttctttgccctgcaaacaggagtaatagctcagggggtgggaggatcccctgttctctgcacagtgttagcacaagggcagggtactggcagtggt

SEQ ID NO: 156403 - DNA, 513 bp, Homo sapiens
ctttaatctttgaggttgctgacctgtggatgggtttttttttcttttatcctatttggtgaccttgagggtttgattgtgatatatggtgtattcagccaactggcctcatttctgggagattttagggggccaatactcagtccccaactcctagactgtgagctctaactctgagggacttgtattgggtcccaactttgtcctctggctcctcaaggtttggagtccactgtgctggggggtgggctgaggtgcagcagctttaacagagtkccagtggacgtgggggtgcctgtctccctgggggaatttaccacagtggaggaggcaaggcagctggggactctgtgtgctgttgcactggaggtggtgctggcttggggcaaggtgctggccagcacaggtctgggtgccttctttgccctgcaaacaggagtaatagctcagggggtgggaggatcccctgttctctgcacagtgttagcacaagggcagggtactggcagtggt

SEQ ID NO: 156404 - DNA, 513 bp, Homo sapiens
ctttaatctttgaggttgctgacctgtggatgggtttttttttcttttatcctatttggtgaccttgagggtttgattgtgatatatggtgtattcagccaactggcctcatttctgggagattttagggggccaatactcagtccccaactcctagactgtgagctctaactctgagggacttgtattgggtcccaactttgtcctctggctcctcaaggtttggagtccactgtgctggggggtgggctgaggtgcagcagctttaacagagtgccagtggaygtgggggtgcctgtctccctgggggaatttaccacagtggaggaggcaaggcagctggggactctgtgtgctgttgcactggaggtggtgctggcttggggcaaggtgctggccagcacaggtctgggtgccttctttgccctgcaaacaggagtaatagctcagggggtgggaggatcccctgttctctgcacagtgttagcacaagggcagggtactggcagtggt

SEQ ID NO: 156405 - DNA, 552 bp, Homo sapiens
agttccttaggattttgccatgttggagagcagcctgctggaagcctacacttcttttagaagcccacactgtcatttctaccacaacattggaacagatctttatttcagcaggtgaaatagctggtattaggtgttgtagcatttaaacagtaggatttttaaacaaagggattacactcaatgcagcaagatacttttactctgagagaaatatggaacccccaccccaagctcattaaataaactggcagatagaaatgatctcactatttarattgttgtccacatgttatgaagcacatggtgtagaggagtggttaagagtctgtccactggaaacagactgaaagcctgctccatcactgactagcttgtgctgtgaccttaggcaacttatttaacctctctgtggctcagtttcccatctgtgaaatgaggaaaataatacaaccaacctcatagaggttattgtgagacataaatgagttaataaaggtaaagcccatgtgtctgactcatgctaaatgctatagaacatttaggtattat

SEQ ID NO: 156406 - DNA, 552 bp, Homo sapiens
agttccttaggattttgccatgttggagagcagcctgctggaagcctacacttcttttagaagcccacactgtcatttctaccacaacattggaacagatctttatttcagcaggtgaaatagctggtattaggtgttgtagcatttaaacagtaggatttttaaacaaagggattacactcaatgcagcaagatacttttactctgagagaaatatggaacccccaccccaagctcattaaataaactggcagatagaaatgatctcactatttagattgttgtccacatgttatgaagcacatggtgtagaggagtggttaagagtctgtccactggaaacagactgaaagcctkctccatcactgactagcttgtgctgtgaccttaggcaacttatttaacctctctgtggctcagtttcccatctgtgaaatgaggaaaataatacaaccaacctcatagaggttattgtgagacataaatgagttaataaaggtaaagcccatgtgtctgactcatgctaaatgctatagaacatttaggtattat

SEQ ID NO: 156407 - DNA, 569 bp, Homo sapiens
agagagaaaacagccaagttgcatcatttgatttgactatatgactagayatttacattttttttttttttttgagatgaagtctcactctgtcgcccaggctggagtgcagtggcacgatctgggctcactgcaacctccgcctcctgggttcaagtgattctcctgccttggcctcctgagtagctgagattacaggtgtgcaccactacacccagctaattttttgtatttttagtaaaggcagggtttcaccatgttggccaggctggtctcaaactcctgaccttgtgattcacctgcctcagcctcccaaagtgctgggcttacaggcatgagccaacgtgcctggctgatatttactgtttttactccatcatgtctatacttggcttctatatcatttgaagaaggtattctgctgtttactgaaaactgaacaaagaaaaaaccccatagataaaaaatttttggtgttagtaaactgaaaaaggctgttttaaacaggaaaatattgagataactttaatcaatgagtttaagattttactctctccactggaaagaac

SEQ ID NO: 156408 - DNA, 570 bp, Homo sapiens
aagagagaaaacagccaagttgcatcatttgatttgactatatgactagacatttacattttttttttttttttgagatgaagtctcactctgtcgcccaggctggagtgcagtggcacgatctgggctcactgcaacctccgcctcctgggttcaagtgattctcctgccttggcctccygagtagctgagattacaggtgtgcaccactacacccagctaattttttgtatttttagtaaaggcagggtttcaccatgttggccaggctggtctcaaactcctgaccttgtgattcacctgcctcagcctcccaaagtgctgggcttacaggcatgagccaacgtgcctggctgatatttactgtttttactccatcatgtctatacttggcttctatatcatttgaagaaggtattctgctgtttactgaaaactgaacaaagaaaaaaccccatagataaaaaatttttggtgttagtaaactgaaaaaggctgttttaaacaggaaaatattgagataactttaatcaatgagtttaagattttactctctccactggaaagaac

SEQ ID NO: 156409 - DNA, 570 bp, Homo sapiens
aagagagaaaacagccaagttgcatcatttgatttgactatatgactagacatttacattttttttttttttttgagatgaagtctcactctgtcgcccaggctggagtgcagtggcacgatctgggctcactgcaacctccgcctcctgggttcaagtgattctcctgccttggcctcctgagtagctgagattacaggtgtgcaccactacacccagctaattttttgtatttttagtaaaggcagggtttcaccatgttggccaggctggtctcaaactcctgaccttgtgattcacctgcctcagcctcccaaagtgctgggcttacaggcatgagccaacgtgcctggctgatatttactgtttttactccatcatgtctatacttggcttctatatcatttgaagaaggtattcygctgtttactgaaaactgaacaaagaaaaaaccccatagataaaaaatttttggtgttagtaaactgaaaaaggctgttttaaacaggaaaatattgagataactttaatcaatgagtttaagattttactctctccactggaaagaac

SEQ ID NO: 156410 - DNA, 581 bp, Homo sapiens
gagaggaaaaatagaaaaggatcaatgtgcttgctgctgggaaacaggacattgggacaaggttgtccaaaattaagccagagtgaaccaaaatcactgatggsagttaagcctggaaatgaatttgaggaagattgaaggtgcccaaggcccccaacagctccaaccctatctgatattaaaatctccccacaggagcctggggtaaaattgacagtaaagaaacaaaaagtggatttcttagtccacattggcactccttattcagtggttaacaccccagtaactggactttctaatacttctgttaatgtggttgggataagcagagaactaagatcggaatggttcctgtgtcccctctcttgtaaagtgggcaatgaattaatactcttaaattcctttatgtgccagagttcccagtccctttacttggcagagacctgctatgtacctgctatgtaagtctgtaatcccgagaaacaccagatgtgtctcccaagtgcctctggaacatgggtttcagctgcaggcgctcctaacagactcagaggcttccaactctaaaacagggactattc

SEQ ID NO: 156411 - DNA, 562 bp, Homo sapiens
taaagagggaactatactggaagattagaatagtataaccagtcatatcttatttttcttggcaagaaattcatttttctaaatctcaacttarcgctttctatcataaaacaaggtgatttggctaggcttggatagcaaatagggccctgtattagtccgttttcacactgctgtaaagaactatctgagactgggtaatttatgaagaaaagaggtttaattgactcacagttctgcatggctggggaggcctcaggaaacttacaatcgtggcagagggcgaatgggaagcaaggcacatcttcccatggtgacgcaggtgagagaagggggaggtgccatacacttttaaataatcagatttcatgagaactcactcactatcatgagaacagagagaagggaaatcctccccaatgatccaatcgcctcccaccaggtctctcccttgactcctggggattacaattcgacatgagatttggttggggacacagagccaaaccatatcaggcccagtgccaaccctaagcaattaatggtaacttcctggagccct

SEQ ID NO: 156412 - DNA, 562 bp, Homo sapiens
taaagagggaactatactggaagattagaatagtataaccagtcatatcttatttttcttggcaagaaattcatttttctaaatctcaacttaacgctttctatcataaaacaaggtgatttggctaggcttggatagcaaatagggccctgtattagtccgttttcacactgctgtaaagaactatctgagactgggtaatttatgaagaaaagagrtttaattgactcacagttctgcatggctggggaggcctcaggaaacttacaatcgtggcagagggcgaatgggaagcaaggcacatcttcccatggtgacgcaggtgagagaagggggaggtgccatacacttttaaataatcagatttcatgagaactcactcactatcatgagaacagagagaagggaaatcctccccaatgatccaatcgcctcccaccaggtctctcccttgactcctggggattacaattcgacatgagatttggttggggacacagagccaaaccatatcaggcccagtgccaaccctaagcaattaatggtaacttcctggagccct

SEQ ID NO: 156413 - DNA, 562 bp, Homo sapiens
taaagagggaactatactggaagattagaatagtataaccagtcatatcttatttttcttggcaagaaattcatttttctaaatctcaacttaacgctttctatcataaaacaaggtgatttggctaggcttggatagcaaatagggccctgtattagtccgttttcacactgctgtaaagaactatctgagactgggtaatttatgaagaaaagaggtttaattgactcacagttctgcatggctggggaggcctcaggaaacttacaatcgtggcagagggcgaatgggaagcaaggcacatcttcccatggtgacgcaggtgagagaagggggaggtgccatacacttttaaataatcagatttcatgagaactcactcactatcatgagaacagagagaagggaaatcctccccaaygatccaatcgcctcccaccaggtctctcccttgactcctggggattacaattcgacatgagatttggttggggacacagagccaaaccatatcaggcccagtgccaaccctaagcaattaatggtaacttcctggagccct

SEQ ID NO: 156414 - DNA, 562 bp, Homo sapiens
taaagagggaactatactggaagattagaatagtataaccagtcatatcttatttttcttggcaagaaattcatttttctaaatctcaacttaacgctttctatcataaaacaaggtgatttggctaggcttggatagcaaatagggccctgtattagtccgttttcacactgctgtaaagaactatctgagactgggtaatttatgaagaaaagaggtttaattgactcacagttctgcatggctggggaggcctcaggaaacttacaatcgtggcagagggcgaatgggaagcaaggcacatcttcccatggtgacgcaggtgagagaagggggaggtgccatacacttttaaataatcagatttcatgagaactcactcactatcatgagaacagagagaagggaaatcctccccaatgatccaatcgcctcccaccaggtctctcccttgactcctggggattamaattcgacatgagatttggttggggacacagagccaaaccatatcaggcccagtgccaaccctaagcaattaatggtaacttcctggagccct

SEQ ID NO: 156415 - DNA, 604 bp, Homo sapiens
tgctgggggtagggtgggcaatatttaaagaaaattattaatattagctatatcacttacagtgactcatggtgaaaaatatttctcagtttattgccttcatctgaacagcaaatctatgtagaaaatctgatcaaagaacactctttaataatgcatcatctstcattattgacatttttaagttgtgttgacttttacaacactgattgtaaggtaggagaaggctaacattcgtaagtggactgatatttaaaatatatattctccacttgagtatgtggaaagtcatttgaatggtgtctgaggtcaaatatatgttaaaaaaaatatctgccaacagtttatggaatgaatgtggatcagtatggatggtatttgtctctgtgcattctcttctcatctggtagaagaataagacatacatcctgctgtgtattaaggctgcactttagctattgggtatccagtgggttggtcatgaagggactgatttgtgagtggtgagttttctgatttcaacactagcaaaggtgtttcaagagtgttgtctcctcagttggtattctaatgacctttcaacactgaattgagataaagcaat

SEQ ID NO: 156416 - DNA, 527 bp, Homo sapiens
ctaactttatcttcacaacaaacagatcaactgggtagattttgtctttgcacccaatttatcaatgagttatgagaagaagcttgcagcccttaagaatgacaaacatgcttatttctaaatcttcatctcagtctctcccaccttggttacatgtcccatctcctagtttgccacagaccagtcttacagtaaggaagtagtagctagggaaacagttgttaaattataaatctcaaccatccaaccattaccctaaagcaacctgcattgctcaggacccctgtggtgagactctgctctgacctgtgtaactgttaaattactcagctcatattacatgtctcccaatagttcttattgatacaaacacaaacaaaagaatamcccatcagcttttgcccaaaatatgtgattcagtggctttgtttagacacctcatagaacgaacatttgtcttctgagataccagcctttccacttctgccctaaatcctataattttcacttaccttctatttcatttc

SEQ ID NO: 156417 - DNA, 593 bp, Homo sapiens
ctgaattccatcatggtggatgagagccaggactaaattgcagctctgactccaacagacagagcagtgtgtggaggcccgcatcataaattttagctccagaatgactgcaggaataaatcaggaaacctgagaggacccacagactgtctgaaggaagtggattgttcctgcagaaccstgaagaccccccaaatactgtaccggtatacacagctgagagacccatagatggttcacatcacaggactctctgaagacagctcccagtaccatcctggagcctggtagacttgctgggtagctaaacccagaaaagagataacaatcactacggctcagatctcaggaagccacatccataggaaaatgggaagagtactacatcaagggaataccctgagggacaaaagaatctgaaaaacagccttcagctctagccctttcctctgacaaagcctacccagatgaaaaggaaccagaaagtctactctggtaatacgatgcaacaaggctctttaacacccctaaaaaatcacaatgactcaccacaatagatcctaaccaaaaaaaaaaaaaaaaaagagagagaa

SEQ ID NO: 156418 - DNA, 474 bp, Homo sapiens
aatttggaagctgagctgttcyggggggctaccgctgctagaaatgttcatatggttcaaagtgctcccttactctttgtgattgaaggaaatcctctgatgtcctgtacctgctttttgtcaagtatagtgatttaaaaatcaagttctctggagggactgtaaaatttggatgctatatgtgtgatacaagcccttcacccctcaggaaaagctaggaattggagttttcttcttgattataaggtattatgagtagggtgggattcatgtaaaaatttacctttgcttttcctccccattttaatgtggatattttctcagtagtctgatgtgtaggaacttttcaactggattttggctataccttgaagacagttgatccacgtgtagatgtttatttgatgtgcctgtggaaggagggatagtcaggagcctcctatttgcccatgttgctgatgtcactgttacgat

SEQ ID NO: 156419 - DNA, 547 bp, Homo sapiens
tttgatggtcttgctagggtagaatagaagatttatagtcttaaacacctccaacacaaagccaaatttgtttcaagatatttgatgaattttgaagttacgcatggaaagtgactaaaggccaactggaaagactctgaaagtaagaatggagtttccagaaatcttgtggtaccaaagagaaatctttgtgagagaagagttgtgatgattaaaccaattcttcagttgaagttgctcagtaaccaacttaccctttatatgactaggaaataaatggaaaaactctctggaacactataatattatttagagaytctaaaattattttatcatgctgtgtaataaataatgtgaccaatgaccacggatatattaaggaaatcaagaaaaataagaagatataagttatgatctggattttggagttatcagaggaagagtttaaaataatcatggttaatatttaaaagaaaatattggaaaaaaatggaaaaatattgacagattgtaaaatttactataaaatagaaatttttttaaaaaa

SEQ ID NO: 156420 - DNA, 549 bp, Homo sapiens
ttgacctcagtcattttgttcagtaattcttcaaaagcaggccagaggctcactggtgaacatgcttgcaatactaatgtttgtgaaatggaaaattttaggaagggaattctatttccctgagcaagtttccaagcactaaactctctttcaaataataaaagaggttagagactaacttagggaacagattcaatttttcaatgtggcattaataggggcaaagcaaagagacagattgcattgacagagaaacaaaaatggataatggatttaatagcttgagttctaatggaaaaaataacattctcccagagattgtcatattttttaaaaaatgtggctaccawtaatagtacatacatgaacaaaaaaagcttacatggtggtatataaatcattaaaaagttttcaacaaaattaagtagacaagcatttctgtttccttctgtatattatctccttcattattcatatcctcaataatttcttgtatacttgcattgaagattaacctgtagttttcaactttttgctggttataacaaa

SEQ ID NO: 156421 - DNA, 549 bp, Homo sapiens
ttgacctcagtcattttgttcagtaattcttcaaaagcaggccagaggctcactggtgaacatgcttgcaatactaatgtttgtgaaatggaaaattttaggaagggaattctatttccctgagcaagtttccaagcactaaactctctttcaaataataaaagaggttagagactaacttagggaacagattcaatttttcaatgtggcattaataggggcaaagcaaagagacagattgcattgacagagaaacaaaaatggataatggatttaatagcttgagttctaatggaaaaaataacattctcccagagattgtcatattttttaaaaaatgtggctaccattaatagtacatacatgaacaaaaaaagcttacatggtggtatataaatcattaaaaagttttcarcaaaattaagtagacaagcatttctgtttccttctgtatattatctccttcattattcatatcctcaataatttcttgtatacttgcattgaagattaacctgtagttttcaactttttgctggttataacaaa

SEQ ID NO: 156422 - DNA, 537 bp, Homo sapiens
ccagtttaaaggcttttttttagtgaccaactttatccccatctttactattaaaaatcacctatcaggataattttttcttttctctgcagtctgtgccagtcatattttagtacataactctatcaaatacacaggtaattacttgtatattttcattgtgttctctcattgctttagttggggacattccttcagtatagttttctattacaaatgctaatttttatyagtcccacattcatgtgtggatgtatataaacctcttagctaattttttaaaaaagtgaattcttgatgaatcagaactaatgaaagaagcttagtgtgacatgaaataaatgcaggtcatgttgctgaatggaaactttcaggaaggacaaatgaactcaatgttgagatggaagaagactgtcaaccgttatactggtggcctcctgtgagtttcatagaggcagcagaaggatttgagacagtaattttgattaaaaacatcaaaagctattgtttccactcaatagatgaccaaccatgtca

SEQ ID NO: 156423 - DNA, 482 bp, Homo sapiens
ggacaggggaagaattcccagataagtatacatattctacaaagacatgaaaatgtaacaaaacatgttgagtatgacaatttgagaacttttctatttgttttgtgatgtagacaaagcatttagagatgtttytaaaaaatatagttgcagtcatattttagaagtccctttataagatattaatagattggaaatttttctctgatcattatagagttaagatggttctatttgtttgtttaaaaaaaaaaaaacagatgagcctatttcacattccactttagaaaactatctctgataaccatatgaaggatactttggattgggagagattgtggtgaacgtacctgttttgagcctctgtaataatctacataaatcatgctgaagaactgaatgaacatagtaaaagtggagatggtagggaagaagatgtaagacacatttagaagagagagttgatgaaatttggtgactga

SEQ ID NO: 156424 - DNA, 323 bp, Homo sapiens
tccttcttaaaatgttcctctcttaaatgttatttccctttggttcttttatgatgattcatttcttaaaatcctccacagctttatcttttgatctccttctttgaaagtgtattgcttatcctcttttttctttacatttggtcattccccactgccataccttcaactaccatttcatattagttattctaaacacawatatttttgtttattcagaaacttttgaggatcgctattccagaaagtaatcattaaaaaaaaaaaaaaaaacagtgtagttgttcttttctttaggaacaaagtaagccacatgaacaaaa

SEQ ID NO: 156425 - DNA, 587 bp, Homo sapiens
ccatctctcataagaacttatgttgttgcaatcaaaatttgatatagctttgttcaatattccagaatgttccatggattttgtagttaaaagttgaaggtgattgggccaatgagttcctggctccaaggaattaagtttttcttgagggacagagcttatgagacacaaaawattgagaggagctttttcttattccagatgtcatcctatattggccattatctctaatccagagatgaaaaagtctttggggaaactggattactcctacagccacaatctttaacactggctgaattcttttctctcttaacgtatctaaccagaatttatcccagatgcagacaatgatctgtagtagagtccaagtgtcattgttttaaaatatattttcttaatatacaaattatatataaatttaatgtaatatatattataaatatatatttaacatatagttttgtcacatggatatattacttagtagtaaagttggcttttagtgtagccatcacccaaataatggacattgtacccattatgtaatttcttatccatcaccccctcccaccctcccacctttc

SEQ ID NO: 156426 - DNA, 600 bp, Homo sapiens
ctcaatgcaaaagaggagaagaacaggaaattgatttgagagtaaacaggcaaattccagcacagattccatgaggctacataagcactatacagtgggtggtataaacaaagacatacaggtgagaaagtaagaaatatgttctggagtaacaagcagtacagtttggctgttgcatataaatcatttggaaaattaggctggagaagtagagaaatgagacaacactgggaaatatggggacctggctaagttattaaaatttaatttattgagaagacaattttgactaggcatatgttgcaattggcatgttgtttggaaaacagtaatttgaaagttgcatgtagaatggtcttgagaagactggagaagctgaagaaagttgtctagcaacgaagaaattgcaatagtttaggggataaatgatamgacaatgtggcaaagacctgtaatttattgttcatctaatatgcgccagctactgttctgcataatttatatataaacattatcccagctgattctcatgaagagttttcaaggtgaacatcattatctgacataaagaccaactaagaatcagaaaattgaagtgag

SEQ ID NO: 156427 - DNA, 563 bp, Homo sapiens
aaggctggctaatttttgtatttttaggagagacagggtttcaccatgttggccaagctggtctcaaactcctgacytcagatgatccacctgccttggcctcccaaaatgctgagattacaggtgtgaaccactgcgcccagcccagttatgtatcttttaagtggagcatttaggccatttacattcaatgttagtattgagatgtgaggtaccattccattcatcatgctatttgttgcctgtgtaccttggttttttggttcttgtttttgttttttaaattgtatttttgttttataggtcctgtgagatttatgctttaaagaagttctgttctgatgtgtttccaggatttgtttcaagatttagagttccttttagcagttcttgtagtgggggctttgtagtggtgagttctctcaacatttgtttgtctgaaaaagactgtatctttctttcatatatgaagcttagttttgctgggtacagaattattggctgataattgttttgtttgaggaggctacaaattgggccccaatcccttctagcttgtaggg

SEQ ID NO: 156428 - DNA, 590 bp, Homo sapiens
tttttgcctccacagagtagaagcactcatggacgtccttgaggcagtcattcacacacccactgctgtgtgaatgatgaaaacacacacagagacaggcaatggagtacagagcatgctgtagccatcactgcctcatgctgcctagcagcttgaagaagccaaaagcctcacatcaaattatcccagccagagtttcatacttatctatatcctgatggggaatactcataaaaagcacactttccccatcctaagcagtgtacagctaagtgattcattaatgagcataaaatcaaaacatcatctacctccactaaaataactgctcttacatttgctaaaattttgcatgatttgatcacacataatcctgctaaaatctctacctctgaggatctcataaagtactaaagatggaactgatctcagcattgatgagtttgacttcacaggagaatgcaaggcttcctgggaacttacttcattgaatgcttgcttcagcagtttctgatggacatctcasctggatctccacagctgtgaagatcttgtttcttatgcaatatgaatttgacttctctgaaagg

SEQ ID NO: 156429 - DNA, 358 bp, Homo sapiens
aatatcttaaataatgactatcactcacaatcagtgactcaatgtgttttggttttgctctacaattttttattgaggtaaaatccacttaacataaaattaatcataaccatgttaaagtgtgcaattcagcggtgttycatacattcacaatgctgagcaaccatctagatccaagacattttcataaccccaaaaggaaatctcctacctattaagcagccactccgtctctctccaggccttgaaaaccaccagtttactctgtatctgtggacttgcctatgctggacattccatagaaatggcatcatacaacacgtgactttcgtgtctggtgtctttcatttagcatcat

SEQ ID NO: 156430 - DNA, 585 bp, Homo sapiens
tgctggctcccttcccaaaaaccaaccctgcagaaactatggaagtgacggaaagttttaaatacagaaaccaaacagccacagcaagaacaacaaagcaagctcttcctggggagccatggggtatgtgtttgaaatgtgcatgggaggtgggtggctacagcctggggagaagggctgcaggagacagcactgagggacaggctggaaaaaagctttttaagttccatttctgccatttccaccccgtctccacgcctattccttacctatcattttctgaacattttatgaatgttacataccacaggggtgtaaactactaatgccagtgtttgagaattcatatcagaacagcacaaaagcctgggtagggtaaggaactggcaaaagcaagtrcatgaggcagacttcacaaaacctgaaaatcagcctcaaacgacctcaagctctgattagattaagctgaccactctgctaagtgcctttaaggagcagaagtcagtcttctttggacgaagtcatctcaagcctcaaatttatttctacactttaaaaaacacaacatcaggcattcagtaaaaa

SEQ ID NO: 156431 - DNA, 585 bp, Homo sapiens
tgctggctcccttcccaaaaaccaaccctgcagaaactatggaagtgacggaaagttttaaatacagaaaccaaacagccacagcaagaacaacaaagcaagctcttcctggggagccatggggtatgtgtttgaaatgtgcatgggaggtgggtggctacagcctggggagaagggctgcaggagacagcactgagggacaggctggaaaaaagctttttaagttccatttctgccatttccaccccgtctccacgcctattccttacctatcattttctgaacattttatgaatgttacataccacaggggtgtaaactactaatgccagtgtttgagaattcatatcagaacagcacaaaagcctgggtagggtaaggaactggcaaaagcaagtacatgaggcagacttcacaaarcctgaaaatcagcctcaaacgacctcaagctctgattagattaagctgaccactctgctaagtgcctttaaggagcagaagtcagtcttctttggacgaagtcatctcaagcctcaaatttatttctacactttaaaaaacacaacatcaggcattcagtaaaaa

SEQ ID NO: 156432 - DNA, 568 bp, Homo sapiens
gaattcccataactctatcttttctctctgtgtcttttctttgtctcccatcatatcttttccactaaactataacctctttggtccatacacggtgatgctgtacctcacatgttcctcaagccaaaaatgttccattcctccttacataatagatccaggatgtcctggccaccaggaaccaataacaggcacatattagtactcaggacatcctcccccagtgattctaatttcatatggaagaataaagccatgttcaatacaactcaaaaatacttacaaatcatttttatgtattgcccaacayaaaatatttcatttcaaagtgaaatttcccattcctactttctatgctgtagaattataaccaaagaaccttgcccatactttacatatgaaacagtttaaaatgggggctaccctctgacctgatttttccgggtaatcctgctgcgagtgtctcaggacgcggtaacagagccgcagcatgtacttgtagggtgcatatctttgatcccccagatcttcaagtctcagcatcgagccttctcctgctttctcttta

SEQ ID NO: 156433 - DNA, 606 bp, Homo sapiens
ttggtgccttatcttgtcattctattgacactgtcttttgcagaacagaagtttttaaatttcatgaagtccagcttatcatttgattctttcacggattgtgcctttggtattgtatctaaaaagtcattgccacacttgaggtcatctagatttttttcctatgttattttctaggagttttatggttttgcacttcacatttaggtctatgatccatttttagttaatttttgtgaagggtgaaaagyctttgtctagatttagtttcttgcatgtggatgtccagttgttctagcataatttgttcaaagactacctttacttaattttattgcctttgttccttagtcaaagatctgttgatatttttatgtaagtctatttctgggctatctgttctgttcctttgatctgtttgtctgttctttcacaaacatgacagtgtcttgattactgtagctttatagcaggttttgaagttaaatagacctgttcgtttcactaaagaaaggttgaggaggagggtagggaagatggataccaaatttccaccttttatgtaatagaggctagatgtaaagatctggctttaggtattttggc

SEQ ID NO: 156434 - DNA, 547 bp, Homo sapiens
aacttccctcttcccaatacagaggctcaagtattttaaagtataagcacttttacaatcctgactagctttgacaggagaggcaaagaggcaaagcaatgtggtgttctcatttcatcctttggcccttctctgaaacctcatggaggagagtaaacttattatccaatttccactgccacttaagaggttaataatatggcattagcagtaagggttataaacaggatgactcaccacaaacacacaggataaacatagaaacaacattcaactggakaaattttttttttttttttttttttttttttagtataaagcatgtaactcctgacttggaaatccactgcaattttctgaacttctttgagtagcagcgaattacaaactactaaaaacatcttcacttaatacatggagaagtttttgtcttctgttatttaaactaaagatttgttagaatccatactgacacctgtgaacttaaatttaaaggtgtagaatttaagactataacaaactaataggtctacaggttgctttaaca

SEQ ID NO: 156435 - DNA, 547 bp, Homo sapiens
aacttccctcttcccaatacagaggctcaagtattttaaagtataagcacttttacaatcctgactagctttgacaggagaggcaaagaggcaaagcaatgtggtgttctcatttcatcctttggcccttctctgaaacctcatggaggagagtaaacttattatccaatttccactgccacttaagaggttaataatatggcattagcagtaagggttataaacaggatgactcaccacaaacacacaggataaacatagaaacaacattcaactggagaawttttttttttttttttttttttttttttagtataaagcatgtaactcctgacttggaaatccactgcaattttctgaacttctttgagtagcagcgaattacaaactactaaaaacatcttcacttaatacatggagaagtttttgtcttctgttatttaaactaaagatttgttagaatccatactgacacctgtgaacttaaatttaaaggtgtagaatttaagactataacaaactaataggtctacaggttgctttaaca

SEQ ID NO: 156436 - DNA, 547 bp, Homo sapiens
aacttccctcttcccaatacagaggctcaagtattttaaagtataagcacttttacaatcctgactagctttgacaggagaggcaaagaggcaaagcaatgtggtgttctcatttcatcctttggcccttctctgaaacctcatggaggagagtaaacttattatccaatttccactgccacttaagaggttaataatatggcattagcagtaagggttataaacaggatgactcaccacaaacacacaggataaacatagaaacaacattcaactggagaaattttttttttttttttttttttttttttagtataaagcatgtaactcctgacttggaaatccactgcaattttctgaacttctttgagtagcagcgaattacaaactactaaaaacatcttcacttaatacatggagaagtttttgtcttctgttatttaaactaaagatttgttaraatccatactgacacctgtgaacttaaatttaaaggtgtagaatttaagactataacaaactaataggtctacaggttgctttaaca

SEQ ID NO: 156437 - DNA, 413 bp, Homo sapiens
tctctttctactccctaatgatcttacctgcgctctgaaaacccaaatctaacactggtcaatccccaaacttccagasgttttgaaatcttccctagtggacaatttcatccagacattttataagcataatcaaatttgaatggattatttccctcatcaatttggcacctcttctcattttccctaatttggtgaatgacatcgctagttctccaaagccagaatcctattccttaacccttaacacctgacggcttaccactgcatcagttctgtctcccaagaatgccttcaacccttcccttcctcaccattactgaagcctctcccttggttcaagtgctcaaaattactaaagcaaaaactgttgatgacctttccaaagcaatataggtcaagtaatgcaaaat

SEQ ID NO: 156438 - DNA, 491 bp, Homo sapiens
acacagcctcaaagaaatgtaagaaaccattaggacattaacatacttgtaatgggagtgtaagaaggactgaagagagaaaagaatcagacaaaaatactttaaagcataatggctgaattcttttcaaaatggatgaaaaagattaaactacacatgtcagatgctcaattaactttaagtagaataaaatcaaagagacacattcagacacatcatgataaatatattgctaagctaaaaaacaaagagaaaatattgaaagcagcaaaggaaaacaactcatcrcttacaatgaacccacaataagattaacagctgatctctcattacaaacaataatgtcaagaagtcaagaatcctatatccaggagaagtatgttgcaaaaatgaaggtgaagtaaacacatttccaaaagcaaaaactaagagaattcattgctagaagacccaccttataaaaaatcctgaaggaagttctttgagcagaa

SEQ ID NO: 156439 - DNA, 532 bp, Homo sapiens
aaatttctcattctgggccctatgtcaagaatagccttttggaaaacaaggttgtaacctggcagtccagttgcagctataacaagcctctaaatgagagataattatggtttgaacagggcggatgaaataagtgaccatatttttagcatataaaaataggatttgatgttagattaggtttggtgtaagagaaagaaatgtgtgaatgctgactccaaggttttttatcttggtatctgaaaaatgggaattgcatttcccgaaataaaaactgtaggaaaaacaagttttgcctggaaattgggagtctagttaggaaagcattaagttgatttgcctgtagctatctaaatggtaaacttgagtagaccattactatgcaagtgtggagttcacagatatatatgtgtatgtgtatacacacatatacacacaygtaaacttgaacatgattaatttatggatggtatgtaatgccatgggaatggatgagatcaccaaaagagtgagtgtgaagaataaagcagac

SEQ ID NO: 156440 - DNA, 610 bp, Homo sapiens
gtggaattctgaaagatgttaggggcacatagacacacraaaacctttttgggaaatttttaacttttaggattttggaaatgttcagaaaagttgacagccagactccagtgtcattaatatttactatgtcccttctttattcatggacattccagcatcatttatatcatctttgtgaaccagttcaaatgaaaaagtcccaagatagaactctcaatcatccatgcgtgaaacaatatgtaattaaaactgacaattgaaatatacaaataattccatattttatgtaactattgtcatatgtttccctacttatcatttaccagaactggaattttccaaggaggggaaaaaatcataacagttaacattcactgagcacttaaattcggtgccagccacaattctaagcactcagctaaacttcacaaaaccctaggtcatcgataatattgtccccattttatagatgggggcaactgaggtacacgggatcaggaatttggccatagttaaacatctagtaagtagcagagcctggatttgaaatcagggagtccagggccatcctctttaatgctgaattatgccacagtggagtgatatg

SEQ ID NO: 156441 - DNA, 610 bp, Homo sapiens
gtggaattctgaaagatgttaggggcacatagacacacaaaaacctttttgggaaatttttaacttttaggattttggaaatgttcagaaaagttgacagccagactccagtgtcattaatatttactatgtcccttctttattcatggacattccagcatcatttatatcatctttgtgaaccagttcaaatgaaaaagtcccaagatagaactctcaatcatccatgcgtgaaacaatatgtaattaaaactgacaattgaaatatacaaataattccatattttatgtaactattgtcatatgtttccctacttatcatttaccagaactggaattttccaaggaggggaaaaaatcataacagttaacattcactgagcacttaaattcggtgccagccacaattctaagcactcagctaaacttcacaaaaccctaggtcatcgataatattgtccccattttatagatgggggcaactgaggtacacgggatcaggaatttggccatagttaaacatctagtaagtagcagagcctggatttgaaatcagggagtccagggccatcctctttaatrctgaattatgccacagtggagtgatatg

SEQ ID NO: 156442 - DNA, 361 bp, Homo sapiens
atcattacacaaaactttccttccatttctctgtgattctttcagaaatctaccaacatgccattttgatccactataaccattcaatgtatttctgaaaaacatttttcagaaacatcaatacaatttccagagattctaccaaattctttattgaggctgttcatgmgtagtaaataataaaaataataaataatgaaaaagtaacaacataaacaaaccacatctctatcccattcaactcccagagagatatttaaagaactatagaatagacaaaatctggtctagtgaagggagacagaggcaaagaaaggaggttggttaagccacgaatgcaaaaatgggagacttccagcag

SEQ ID NO: 156443 - DNA, 361 bp, Homo sapiens
atcattacacaaaactttccttccatttctctgtgattctttcagaaatctaccaacatgccattttgatccactataaccattcaatgtatttctgaaaaacatttttcagaaacatcaatacaatttccagagattctaccaaattctttattgaggctgttcatgcgtagtaaataataaaaataataaataatgaaaaagtaacaacataaacaaaccacatctctakcccattcaactcccagagagatatttaaagaactatagaatagacaaaatctggtctagtgaagggagacagaggcaaagaaaggaggttggttaagccacgaatgcaaaaatgggagacttccagcag

SEQ ID NO: 156444 - DNA, 650 bp, Homo sapiens
gatgattgctcacatactgaatgaggaggcttttcccaatccaatccacaaaaataggtgtccttgggtgtcttatgcagaatattaagaactgtttgacccaggagcctgagttcttcatgagacagaccggagttcaagtcttgggttttctccttactaactgtatcaccttaggaagttgcttaactactggaacatcactttctttatcctgaagtttaaataaaaakgcagacaaatgcttagcccagggctttgtgcacagcaggcatccaaacgttagaagctcttactggcattatcattattaggttggtgcaaaagtaattgtgggttttgctgttactttcaatgacaaaaattgcaattacttttaaaccaatctaaaagtaccttgcccatagcaggtcttgtctatcagtcatggtatgcattgcacccttccctcagaatactttcccaaactgggtttcaagcagccagtactaagtggatgacattgtcacatgacagtgctcccattgttatccttggcttggagagttatctgcagttatgcaaatatgagacatgttgtagggacaacgggataggggtgggcaagccaggaggggtcagagctgggagcctgctcagggataaggaag

SEQ ID NO: 156445 - DNA, 650 bp, Homo sapiens
gatgattgctcacatactgaatgaggaggcttttcccaatccaatccacaaaaataggtgtccttgggtgtcttatgcagaatattaagaactgtttgacccaggagcctgagttcttcatgagacagaccggagttcaagtcttgggttttctccttactaactgtatcaccttaggaagttgcttaactactggaacatcactttctttatcctgaagtttaaataaaaaggcagacaaatgcttagcccagggctttgtgcacagcaggcatccaaacgttagaagctsttactggcattatcattattaggttggtgcaaaagtaattgtgggttttgctgttactttcaatgacaaaaattgcaattacttttaaaccaatctaaaagtaccttgcccatagcaggtcttgtctatcagtcatggtatgcattgcacccttccctcagaatactttcccaaactgggtttcaagcagccagtactaagtggatgacattgtcacatgacagtgctcccattgttatccttggcttggagagttatctgcagttatgcaaatatgagacatgttgtagggacaacgggataggggtgggcaagccaggaggggtcagagctgggagcctgctcagggataaggaag

SEQ ID NO: 156446 - DNA, 607 bp, Homo sapiens
gttgaatttggagatggaggaagcggccacagccaaggartgcaggtggcctccagaagtagaaaaggcaaggaaatgaattttcccagagagcctcatgaaggaatgcagttctgccaacaccttgatttcagcacagtcagagtgattttgaacttctgacctccagaactttaagagaataaatttatgttgttttaaaccactaagtttgtggcactgtgttacagcagcaataggaaactaatacagtcttgttcaggattgtaattgttttttcttggcacattctgacacttagcatctgcccatgggctttgaaaaaaatcgtaccaaagatatcacttgggtctgtctctatgtcatcatttcattcatttactcaaaaatatcaatgtagcgtggtgatgaggagtcagacttaagatctggattggaaccctggctctgccattcaccagctctgtgttcttgggcaagctacctgggtttcagttttcccatcttcaaaataaaatagcagtcagcaaactatgggctttaagtcaaacatattctgctgcctgtttttgcaaataaagtttaattggaacgcagccatgtcatt

SEQ ID NO: 156447 - DNA, 553 bp, Homo sapiens
tgctattcattcaactgcggtttcccaatgatctgtgtaactttaataatgcttcactaaaaattatgtggcagaatagtatttaatgacacagaaggaaaaatgttcatgatattttttaagtgaaaaaaatgccttacaacatgataatgtgtggtccctgtcttaggattgtacatcttattatattgagtaattacagatttttatttcctcttttttgttgtttctcttcatttataatatttttatccaattaatatgtatttactttattaaaacttttcaaaaataaaagtgaaataggtagttattataggctgctcaaacaactaaaactccagagtgtagtggtgtaaagaaccagagatttagttcttactcacttaacagaaaacagtgtaggttccaggttggttggtagtggctctattccatgcagtcattcagggacctaggctaacaraggacttgccatattgaacaagtagctcccaagtcaccatggtaatcttcattcccactagcagaaatgaagaaagatcatagaata

SEQ ID NO: 156448 - DNA, 605 bp, Homo sapiens
gtaacgtagtgagacgctctgtctctataaaaataaaaaataaaataaaaaattagctaggcttggtggcatgtgactgtagtcccagctactcaagaggctgaggtgggaggatcacttgaacctggaggtcaaggctgcagtgaaccacgatcgagtcactgcactccagcctgagtgacaaagtaagaccctgtctcaaaaaaaaaaaaaaaaaaaaaaaaagaagaagaagaagaagtaagaaagaaaaaagaaaaaaagaaaaataagtagaaatgtcaatagtagttggatacatagttctggagtacaraagaaagtcagtgttggtgatatgtaatcactagatatagttatgaatccatagatcgagagagagagacagaaccaaatatagtgtaaccagataattacagccatgatacaggatgaagtcactcaagaagagtgtttaggtagagaaggaagcccaagacagatgccagggctatgcctgcattaaaggtttacaagaggatgagaaaccagcaaataagactgcagtgaccagtaagacagacagaaaagtatgagatcatggtgttagggaagttaacaaaaat

SEQ ID NO: 156449 - DNA, 605 bp, Homo sapiens
gtaacgtagtgagacgctctgtctctataaaaataaaaaataaaataaaaaattagctaggcttggtggcatgtgactgtagtcccagctactcaagaggctgaggtgggaggatcacttgaacctggaggtcaaggctgcagtgaaccacgatcgagtcactgcactccagcctgagtgacaaagtaagaccctgtctcaaaaaaaaaaaaaaaaaaaaaaaaagaagaagaagaagaagtaagaaagaaaaaagaaaaaaagaaaaataagtagaaatgtcaatagtagttggatacatagttctggagtacagaaraaagtcagtgttggtgatatgtaatcactagatatagttatgaatccatagatcgagagagagagacagaaccaaatatagtgtaaccagataattacagccatgatacaggatgaagtcactcaagaagagtgtttaggtagagaaggaagcccaagacagatgccagggctatgcctgcattaaaggtttacaagaggatgagaaaccagcaaataagactgcagtgaccagtaagacagacagaaaagtatgagatcatggtgttagggaagttaacaaaaat

SEQ ID NO: 156450 - DNA, 364 bp, Homo sapiens
  misc_feature (1)...(364): n = A,T,C or G
tacttgccatctgttgactgtttttatagtcttrgccttttcttcacgttcagtgtaaggccctagaagttgaggcaaaagctaaaggccgagggagggaagcctggcctctggtgccaatttcctagtgggtattgtgacttctcttagggagcacacttgccttcacctgccctgaccacatggacgcctgcccacatagggtcttttaagcacttcctgaaatggatctgttctgatctagcctttttgcttttttctagtcatacttttttattgtcttttttttgagatggagtctcgctctgtctctcangctggagtgcagcggcgtgatcttggctcactgcaacctctgcctccc

SEQ ID NO: 156451 - DNA, 364 bp, Homo sapiens
  misc_feature (1)...(364): n = A,T,C or G
tacttgccatctgttgactgtttttatagtcttggccttttcttcacgttcagtgtaaggccctagaarttgaggcaaaagctaaaggccgagggagggaagcctggcctctggtgccaatttcctagtgggtattgtgacttctcttagggagcacacttgccttcacctgccctgaccacatggacgcctgcccacatagggtcttttaagcacttcctgaaatggatctgttctgatctagcctttttgcttttttctagtcatacttttttattgtcttttttttgagatggagtctcgctctgtctctcangctggagtgcagcggcgtgatcttggctcactgcaacctctgcctccc

SEQ ID NO: 156452 - DNA, 364 bp, Homo sapiens
  misc_feature (1)...(364): n = A,T,C or G
tacttgccatctgttgactgtttttatagtcttggccttttcttcacgttcagtgtaaggccctagaagttgaggcaaaagctaaaggccgagggagggaagcctggcctctggtgccaatttcctagtgggtattgtgacttctcttagggagcacacttsccttcacctgccctgaccacatggacgcctgcccacatagggtcttttaagcacttcctgaaatggatctgttctgatctagcctttttgcttttttctagtcatacttttttattgtcttttttttgagatggagtctcgctctgtctctcangctggagtgcagcggcgtgatcttggctcactgcaacctctgcctccc

SEQ ID NO: 156453 - DNA, 364 bp, Homo sapiens
  misc_feature (1)...(364): n = A,T,C or G
tacttgccatctgttgactgtttttatagtcttggccttttcttcacgttcagtgtaaggccctagaagttgaggcaaaagctaaaggccgagggagggaagcctggcctctggtgccaatttcctagtgggtattgtgacttctcttagggagcacacttgccttcacctgccctgaccacatggacgcctgcccacatagggtcttttaagcacttcctgaaatggatctgttctgatctagcctttttgcttttttctagtcatamttttttattgtcttttttttgagatggagtctcgctctgtctctcangctggagtgcagcggcgtgatcttggctcactgcaacctctgcctccc

SEQ ID NO: 156454 - DNA, 478 bp, Homo sapiens
tttatttatttatttttgagacagagtctcactctgtcgcccaggctggagtgcagtggcatgatctcgactcactgcaacctccccttcctgggttcaggtgattctcccacctcagtctcttgagcagctgggattacaggtgcccaccaccaggcctggccaatttttgtgttttttgtagagacgggattttgccatgttggccagggttttgccaygttggccaggctggtctcgaactcctgacctcaagtgatccgcccgccccaaagtaccgggattataggcatgagccaccatgactggcccagaaaatctgcatttaaaacctgctttgagtgattcttcacacagaaccagaagtggtggattcgtttcagaaatgacattctaaattatgagggcaaagtttactaatactcttaaaatatttttaaaagaagacttaaatttgagcaagttaggcagtttaata

SEQ ID NO: 156455 - DNA, 494 bp, Homo sapiens
agaattcttctgtctggcattayatgaagaaatcccgtttccaacgaaggcctcaaagaggtccaaatatccacttgcagattctgcaaaaagagtgtttcaaaaccgctccattaaaaggaatgttgaactctgtgagttgaatgcaaacatcacaactcagtttctgagaatgcttctgactagattttatggtaagatatttccttttctaccgtaggcttcaatgccctctaaatacacccttgcaaattctacaaagagactgtttcataactgctctataggaagaaaggttcaactctgtgagttgaatgcagagatcacaacgtggtttctgcgaatgattctttgtagtttttacatgaagatatttcgttgtcaaccgtaggcttcaaagcactcaaagtattcacttggaacttttacaaaaagagtgttagaaaactgctctttccaaagtaaggttcaactctgtgagttgaatgcacaca

SEQ ID NO: 156456 - DNA, 494 bp, Homo sapiens
agaattcttctgtctggcattacrtgaagaaatcccgtttccaacgaaggcctcaaagaggtccaaatatccacttgcagattctgcaaaaagagtgtttcaaaaccgctccattaaaaggaatgttgaactctgtgagttgaatgcaaacatcacaactcagtttctgagaatgcttctgactagattttatggtaagatatttccttttctaccgtaggcttcaatgccctctaaatacacccttgcaaattctacaaagagactgtttcataactgctctataggaagaaaggttcaactctgtgagttgaatgcagagatcacaacgtggtttctgcgaatgattctttgtagtttttacatgaagatatttcgttgtcaaccgtaggcttcaaagcactcaaagtattcacttggaacttttacaaaaagagtgttagaaaactgctctttccaaagtaaggttcaactctgtgagttgaatgcacaca

SEQ ID NO: 156457 - DNA, 494 bp, Homo sapiens
agaattcttctgtctggcattacatgaagaaatcccgtttccaaygaaggcctcaaagaggtccaaatatccacttgcagattctgcaaaaagagtgtttcaaaaccgctccattaaaaggaatgttgaactctgtgagttgaatgcaaacatcacaactcagtttctgagaatgcttctgactagattttatggtaagatatttccttttctaccgtaggcttcaatgccctctaaatacacccttgcaaattctacaaagagactgtttcataactgctctataggaagaaaggttcaactctgtgagttgaatgcagagatcacaacgtggtttctgcgaatgattctttgtagtttttacatgaagatatttcgttgtcaaccgtaggcttcaaagcactcaaagtattcacttggaacttttacaaaaagagtgttagaaaactgctctttccaaagtaaggttcaactctgtgagttgaatgcacaca

SEQ ID NO: 156458 - DNA, 496 bp, Homo sapiens
gaagaaatcccgtttccaacgaagrcctcaaagaggtccaaatatccacttgcagattctgcaaaaagagtgtttcaaaaccgctccattaaaaggaatgttgaactctgtgagttgaatgcaaacatcacaactcagtttctgagaatgcttctgactagattttatggtaagatatttccttttctaccgtaggcttcaatgccctctaaatacacccttgcaaattctacaaagagactgtttcataactgctctataggaagaaaggttcaactctgtgagttgaatgcagagatcacaacgtggtttctgcgaatgattctttgtagtttttacatgaagatatttcgttgtcaaccgtaggcttcaaagcactcaaagtattcacttggaacttttacaaaaagagtgttagaaaactgctctttccaaagtaaggttcaactctgtgagttgaatgcacacataacaatcaagaagtttctgagaattc

SEQ ID NO: 156459 - DNA, 494 bp, Homo sapiens
agaattcttctgtctggcattacatgaagaaatcccgtttccaacgaaggcctcaaagaggtccaaatatccasttgcagattctgcaaaaagagtgtttcaaaaccgctccattaaaaggaatgttgaactctgtgagttgaatgcaaacatcacaactcagtttctgagaatgcttctgactagattttatggtaagatatttccttttctaccgtaggcttcaatgccctctaaatacacccttgcaaattctacaaagagactgtttcataactgctctataggaagaaaggttcaactctgtgagttgaatgcagagatcacaacgtggtttctgcgaatgattctttgtagtttttacatgaagatatttcgttgtcaaccgtaggcttcaaagcactcaaagtattcacttggaacttttacaaaaagagtgttagaaaactgctctttccaaagtaaggttcaactctgtgagttgaatgcacaca

SEQ ID NO: 156460 - DNA, 494 bp, Homo sapiens
agaattcttctgtctggcattacatgaagaaatcccgtttccaacgaaggcctcaaagaggtccaaatatccacttgcagattctgcamaaagagtgtttcaaaaccgctccattaaaaggaatgttgaactctgtgagttgaatgcaaacatcacaactcagtttctgagaatgcttctgactagattttatggtaagatatttccttttctaccgtaggcttcaatgccctctaaatacacccttgcaaattctacaaagagactgtttcataactgctctataggaagaaaggttcaactctgtgagttgaatgcagagatcacaacgtggtttctgcgaatgattctttgtagtttttacatgaagatatttcgttgtcaaccgtaggcttcaaagcactcaaagtattcacttggaacttttacaaaaagagtgttagaaaactgctctttccaaagtaaggttcaactctgtgagttgaatgcacaca

SEQ ID NO: 156461 - DNA, 496 bp, Homo sapiens
gaagaaatcccgtttccaacgaaggcctcaaagaggtccaaatatccacttgcagattctgcaaaaagagtgtttcaaaaccgytccattaaaaggaatgttgaactctgtgagttgaatgcaaacatcacaactcagtttctgagaatgcttctgactagattttatggtaagatatttccttttctaccgtaggcttcaatgccctctaaatacacccttgcaaattctacaaagagactgtttcataactgctctataggaagaaaggttcaactctgtgagttgaatgcagagatcacaacgtggtttctgcgaatgattctttgtagtttttacatgaagatatttcgttgtcaaccgtaggcttcaaagcactcaaagtattcacttggaacttttacaaaaagagtgttagaaaactgctctttccaaagtaaggttcaactctgtgagttgaatgcacacataacaatcaagaagtttctgagaattc

SEQ ID NO: 156462 - DNA, 494 bp, Homo sapiens
agaattcttctgtctggcattacatgaagaaatcccgtttccaacgaaggcctcaaagaggtccaaatatccacttgcagattctgcaaaaagagtgtttcaaaaccgctccatkaaaaggaatgttgaactctgtgagttgaatgcaaacatcacaactcagtttctgagaatgcttctgactagattttatggtaagatatttccttttctaccgtaggcttcaatgccctctaaatacacccttgcaaattctacaaagagactgtttcataactgctctataggaagaaaggttcaactctgtgagttgaatgcagagatcacaacgtggtttctgcgaatgattctttgtagtttttacatgaagatatttcgttgtcaaccgtaggcttcaaagcactcaaagtattcacttggaacttttacaaaaagagtgttagaaaactgctctttccaaagtaaggttcaactctgtgagttgaatgcacaca

SEQ ID NO: 156463 - DNA, 496 bp, Homo sapiens
gaagaaatcccgtttccaacgaaggcctcaaagaggtccaaatatccacttgcagattctgcaaaaagagtgtttcaaaaccgctccattaamaggaatgttgaactctgtgagttgaatgcaaacatcacaactcagtttctgagaatgcttctgactagattttatggtaagatatttccttttctaccgtaggcttcaatgccctctaaatacacccttgcaaattctacaaagagactgtttcataactgctctataggaagaaaggttcaactctgtgagttgaatgcagagatcacaacgtggtttctgcgaatgattctttgtagtttttacatgaagatatttcgttgtcaaccgtaggcttcaaagcactcaaagtattcacttggaacttttacaaaaagagtgttagaaaactgctctttccaaagtaaggttcaactctgtgagttgaatgcacacataacaatcaagaagtttctgagaattc

SEQ ID NO: 156464 - DNA, 451 bp, Homo sapiens
aaatatccacttgcagattctgcaaaaagagtgtttcaaaaccgctccattaaaaggaakgttgaactctgtgagttgaatgcaaacatcacaactcagtttctgagaatgcttctgactagattttatggtaagatatttccttttctaccgtaggcttcaatgccctctaaatacacccttgcaaattctacaaagagactgtttcataactgctctataggaagaaaggttcaactctgtgagttgaatgcagagatcacaacgtggtttctgcgaatgattctttgtagtttttacatgaagatatttcgttgtcaaccgtaggcttcaaagcactcaaagtattcacttggaacttttacaaaaagagtgttagaaaactgctctttccaaagtaaggttcaactctgtgagttgaatgcacacataacaatcaagaagtttctga

SEQ ID NO: 156465 - DNA, 495 bp, Homo sapiens
gaagaaatcccgtttccaacgaaggcctcaaagaggtccaaatatccacttgcagattctgcaaaaagagtgtttcaaaaccgctccattaaaaggaatgtkgaactctgtgagttgaatgcaaacatcacaactcagtttctgagaatgcttctgactagattttatggtaagatatttccttttctaccgtaggcttcaatgccctctaaatacacccttgcaaattctacaaagagactgtttcataactgctctataggaagaaaggttcaactctgtgagttgaatgcagagatcacaacgtggtttctgcgaatgattctttgtagtttttacatgaagatatttcgttgtcaaccgtaggcttcaaagcactcaaagtattcacttggaacttttacaaaaagagtgttagaaaactgctctttccaaagtaaggttcaactctgtgagttgaatgcacacataacaatcaagaagtttctgagaatt

SEQ ID NO: 156466 - DNA, 494 bp, Homo sapiens
agaattcttctgtctggcattacatgaagaaatcccgtttccaacgaaggcctcaaagaggtccaaatatccacttgcagattctgcaaaaagagtgtttcaaaaccgctccattaaaaggaatgttgarctctgtgagttgaatgcaaacatcacaactcagtttctgagaatgcttctgactagattttatggtaagatatttccttttctaccgtaggcttcaatgccctctaaatacacccttgcaaattctacaaagagactgtttcataactgctctataggaagaaaggttcaactctgtgagttgaatgcagagatcacaacgtggtttctgcgaatgattctttgtagtttttacatgaagatatttcgttgtcaaccgtaggcttcaaagcactcaaagtattcacttggaacttttacaaaaagagtgttagaaaactgctctttccaaagtaaggttcaactctgtgagttgaatgcacaca

SEQ ID NO: 156467 - DNA, 496 bp, Homo sapiens
tgagaattcttctgtctggcattacatgaagaaatcccgtttccaacgaaggcctcaaagaggtccaaatatccacttgcagattctgcaaaaagagtgtttcaaaaccgctccattaaaaggaatgttgaactcygtgagttgaatgcaaacatcacaactcagtttctgagaatgcttctgactagattttatggtaagatatttccttttctaccgtaggcttcaatgccctctaaatacacccttgcaaattctacaaagagactgtttcataactgctctataggaagaaaggttcaactctgtgagttgaatgcagagatcacaacgtggtttctgcgaatgattctttgtagtttttacatgaagatatttcgttgtcaaccgtaggcttcaaagcactcaaagtattcacttggaacttttacaaaaagagtgttagaaaactgctctttccaaagtaaggttcaactctgtgagttgaatgcacaca

SEQ ID NO: 156468 - DNA, 495 bp, Homo sapiens
gaagaaatcccgtttccaacgaaggcctcaaagaggtccaaatatccacttgcagattctgcaaaaagagtgtttcaaaaccgctccattaaaaggaatgttgaactctgtgagwtgaatgcaaacatcacaactcagtttctgagaatgcttctgactagattttatggtaagatatttccttttctaccgtaggcttcaatgccctctaaatacacccttgcaaattctacaaagagactgtttcataactgctctataggaagaaaggttcaactctgtgagttgaatgcagagatcacaacgtggtttctgcgaatgattctttgtagtttttacatgaagatatttcgttgtcaaccgtaggcttcaaagcactcaaagtattcacttggaacttttacaaaaagagtgttagaaaactgctctttccaaagtaaggttcaactctgtgagttgaatgcacacataacaatcaagaagtttctgagaatt

SEQ ID NO: 156469 - DNA, 494 bp, Homo sapiens
agaattcttctgtctggcattacatgaagaaatcccgtttccaacgaaggcctcaaagaggtccaaatatccacttgcagattctgcaaaaagagtgtttcaaaaccgctccattaaaaggaatgttgaactctgtgagttgaatgcaaacmtcacaactcagtttctgagaatgcttctgactagattttatggtaagatatttccttttctaccgtaggcttcaatgccctctaaatacacccttgcaaattctacaaagagactgtttcataactgctctataggaagaaaggttcaactctgtgagttgaatgcagagatcacaacgtggtttctgcgaatgattctttgtagtttttacatgaagatatttcgttgtcaaccgtaggcttcaaagcactcaaagtattcacttggaacttttacaaaaagagtgttagaaaactgctctttccaaagtaaggttcaactctgtgagttgaatgcacaca

SEQ ID NO: 156470 - DNA, 493 bp, Homo sapiens
gaattcttctgtctggcattacatgaagaaatcccgtttccaacgaaggcctcaaagaggtccaaatatccacttgcagattctgcaaaaagagtgtttcaaaaccgctccattaaaaggaatgttgaactctgtgagttgaatgcaaacatcwcaactcagtttctgagaatgcttctgactagattttatggtaagatatttccttttctaccgtaggcttcaatgccctctaaatacacccttgcaaattctacaaagagactgtttcataactgctctataggaagaaaggttcaactctgtgagttgaatgcagagatcacaacgtggtttctgcgaatgattctttgtagtttttacatgaagatatttcgttgtcaaccgtaggcttcaaagcactcaaagtattcacttggaacttttacaaaaagagtgttagaaaactgctctttccaaagtaaggttcaactctgtgagttgaatgcacaca

SEQ ID NO: 156471 - DNA, 326 bp, Homo sapiens
gagaattcttctgtctggcattacatgaagaaatcccgtttccaacgaaggcctcaaagaggtccaaatatccacttgcagattctgcaaaaagagtgtttcaaaaccgctccattaaaaggaatgttgaactctgtgagttgaatgcaaacatcacaactcaktttctgagaatgcttctgactagattttatggtaagatatttccttttctaccgtaggcttcaatgccctctaaatacacccttgcaaattctacaaagagactgtttcataactgctctataggaagaaaggttcaactctgtgagttgaatgcagagatc

SEQ ID NO: 156472 - DNA, 494 bp, Homo sapiens
agaattcttctgtctggcattacatgaagaaatcccgtttccaacgaaggcctcaaagaggtccaaatatccacttgcagattctgcaaaaagagtgtttcaaaaccgctccattaaaaggaatgttgaactctgtgagttgaatgcaaacatcacaactcagtttctgagaaygcttctgactagattttatggtaagatatttccttttctaccgtaggcttcaatgccctctaaatacacccttgcaaattctacaaagagactgtttcataactgctctataggaagaaaggttcaactctgtgagttgaatgcagagatcacaacgtggtttctgcgaatgattctttgtagtttttacatgaagatatttcgttgtcaaccgtaggcttcaaagcactcaaagtattcacttggaacttttacaaaaagagtgttagaaaactgctctttccaaagtaaggttcaactctgtgagttgaatgcacaca

SEQ ID NO: 156473 - DNA, 494 bp, Homo sapiens
agaattcttctgtctggcattacatgaagaaatcccgtttccaacgaaggcctcaaagaggtccaaatatccacttgcagattctgcaaaaagagtgtttcaaaaccgctccattaaaaggaatgttgaactctgtgagttgaatgcaaacatcacaactcagtttctgagaatgctkctgactagattttatggtaagatatttccttttctaccgtaggcttcaatgccctctaaatacacccttgcaaattctacaaagagactgtttcataactgctctataggaagaaaggttcaactctgtgagttgaatgcagagatcacaacgtggtttctgcgaatgattctttgtagtttttacatgaagatatttcgttgtcaaccgtaggcttcaaagcactcaaagtattcacttggaacttttacaaaaagagtgttagaaaactgctctttccaaagtaaggttcaactctgtgagttgaatgcacaca

SEQ ID NO: 156474 - DNA, 494 bp, Homo sapiens
agaattcttctgtctggcattacatgaagaaatcccgtttccaacgaaggcctcaaagaggtccaaatatccacttgcagattctgcaaaaagagtgtttcaaaaccgctccattaaaaggaatgttgaactctgtgagttgaatgcaaacatcacaactcagtttctgagaatgcttctgaytagattttatggtaagatatttccttttctaccgtaggcttcaatgccctctaaatacacccttgcaaattctacaaagagactgtttcataactgctctataggaagaaaggttcaactctgtgagttgaatgcagagatcacaacgtggtttctgcgaatgattctttgtagtttttacatgaagatatttcgttgtcaaccgtaggcttcaaagcactcaaagtattcacttggaacttttacaaaaagagtgttagaaaactgctctttccaaagtaaggttcaactctgtgagttgaatgcacaca

SEQ ID NO: 156475 - DNA, 496 bp, Homo sapiens
gaagaaatcccgtttccaacgaaggcctcaaagaggtccaaatatccacttgcagattctgcaaaaagagtgtttcaaaaccgctccattaaaaggaatgttgaactctgtgagttgaatgcaaacatcacaactcagtttctgagaatgcttctgactagattttatrgtaagatatttccttttctaccgtaggcttcaatgccctctaaatacacccttgcaaattctacaaagagactgtttcataactgctctataggaagaaaggttcaactctgtgagttgaatgcagagatcacaacgtggtttctgcgaatgattctttgtagtttttacatgaagatatttcgttgtcaaccgtaggcttcaaagcactcaaagtattcacttggaacttttacaaaaagagtgttagaaaactgctctttccaaagtaaggttcaactctgtgagttgaatgcacacataacaatcaagaagtttctgagaattc

SEQ ID NO: 156476 - DNA, 494 bp, Homo sapiens
agaattcttctgtctggcattacatgaagaaatcccgtttccaacgaaggcctcaaagaggtccaaatatccacttgcagattctgcaaaaagagtgtttcaaaaccgctccattaaaaggaatgttgaactctgtgagttgaatgcaaacatcacaactcagtttctgagaatgcttctgactagattttatgrtaagatatttccttttctaccgtaggcttcaatgccctctaaatacacccttgcaaattctacaaagagactgtttcataactgctctataggaagaaaggttcaactctgtgagttgaatgcagagatcacaacgtggtttctgcgaatgattctttgtagtttttacatgaagatatttcgttgtcaaccgtaggcttcaaagcactcaaagtattcacttggaacttttacaaaaagagtgttagaaaactgctctttccaaagtaaggttcaactctgtgagttgaatgcacaca

SEQ ID NO: 156477 - DNA, 494 bp, Homo sapiens
agaattcttctgtctggcattacatgaagaaatcccgtttccaacgaaggcctcaaagaggtccaaatatccacttgcagattctgcaaaaagagtgtttcaaaaccgctccattaaaaggaatgttgaactctgtgagttgaatgcaaacatcacaactcagtttctgagaatgcttctgactagattttatggtmagatatttccttttctaccgtaggcttcaatgccctctaaatacacccttgcaaattctacaaagagactgtttcataactgctctataggaagaaaggttcaactctgtgagttgaatgcagagatcacaacgtggtttctgcgaatgattctttgtagtttttacatgaagatatttcgttgtcaaccgtaggcttcaaagcactcaaagtattcacttggaacttttacaaaaagagtgttagaaaactgctctttccaaagtaaggttcaactctgtgagttgaatgcacaca

SEQ ID NO: 156478 - DNA, 496 bp, Homo sapiens
gaagaaatcccgtttccaacgaaggcctcaaagaggtccaaatatccacttgcagattctgcaaaaagagtgtttcaaaaccgctccattaaaaggaatgttgaactctgtgagttgaatgcaaacatcacaactcagtttctgagaatgcttctgactagattttatggtaasatatttccttttctaccgtaggcttcaatgccctctaaatacacccttgcaaattctacaaagagactgtttcataactgctctataggaagaaaggttcaactctgtgagttgaatgcagagatcacaacgtggtttctgcgaatgattctttgtagtttttacatgaagatatttcgttgtcaaccgtaggcttcaaagcactcaaagtattcacttggaacttttacaaaaagagtgttagaaaactgctctttccaaagtaaggttcaactctgtgagttgaatgcacacataacaatcaagaagtttctgagaattc

SEQ ID NO: 156479 - DNA, 483 bp, Homo sapiens
ttccaacgaaggcctcaaagaggtccaaatatccacttgcagattctgcaaaaagagtgtttcaaaaccgctccattaaaaggaatgttgaactctgtgagttgaatgcaaacatcacaactcagtttctgagaatgcttctgactagattttatggtaagatatttcctttyctaccgtaggcttcaatgccctctaaatacacccttgcaaattctacaaagagactgtttcataactgctctataggaagaaaggttcaactctgtgagttgaatgcagagatcacaacgtggtttctgcgaatgattctttgtagtttttacatgaagatatttcgttgtcaaccgtaggcttcaaagcactcaaagtattcacttggaacttttacaaaaagagtgttagaaaactgctctttccaaagtaaggttcaactctgtgagttgaatgcacacataacaatcaagaagtttctgagaattc

SEQ ID NO: 156480 - DNA, 494 bp, Homo sapiens
agaattcttctgtctggcattacatgaagaaatcccgtttccaacgaaggcctcaaagaggtccaaatatccacttgcagattctgcaaaaagagtgtttcaaaaccgctccattaaaaggaatgttgaactctgtgagttgaatgcaaacatcacaactcagtttctgagaatgcttctgactagattttatggtaagatatttccttttmtaccgtaggcttcaatgccctctaaatacacccttgcaaattctacaaagagactgtttcataactgctctataggaagaaaggttcaactctgtgagttgaatgcagagatcacaacgtggtttctgcgaatgattctttgtagtttttacatgaagatatttcgttgtcaaccgtaggcttcaaagcactcaaagtattcacttggaacttttacaaaaagagtgttagaaaactgctctttccaaagtaaggttcaactctgtgagttgaatgcacaca

SEQ ID NO: 156481 - DNA, 497 bp, Homo sapiens
tgaagaaatcccgtttccaacgaaggcctcaaagaggtccaaatatccacttgcagattctgcaaaaagagtgtttcaaaaccgctccattaaaaggaatgttgaactctgtgagttgaatgcaaacatcacaactcagtttctgagaatgcttctgactagattttatggtaagatatttccttttctrccgtaggcttcaatgccctctaaatacacccttgcaaattctacaaagagactgtttcataactgctctataggaagaaaggttcaactctgtgagttgaatgcagagatcacaacgtggtttctgcgaatgattctttgtagtttttacatgaagatatttcgttgtcaaccgtaggcttcaaagcactcaaagtattcacttggaacttttacaaaaagagtgttagaaaactgctctttccaaagtaaggttcaactctgtgagttgaatgcacacataacaatcaagaagtttctgagaattc

SEQ ID NO: 156482 - DNA, 495 bp, Homo sapiens
gagaattcttctgtctggcattacatgaagaaatcccgtttccaacgaaggcctcaaagaggtccaaatatccacttgcagattctgcaaaaagagtgtttcaaaaccgctccattaaaaggaatgttgaactctgtgagttgaatgcaaacatcacaactcagtttctgagaatgcttctgactagattttatggtaagatatttccttttctaccgtagrcttcaatgccctctaaatacacccttgcaaattctacaaagagactgtttcataactgctctataggaagaaaggttcaactctgtgagttgaatgcagagatcacaacgtggtttctgcgaatgattctttgtagtttttacatgaagatatttcgttgtcaaccgtaggcttcaaagcactcaaagtattcacttggaacttttacaaaaagagtgttagaaaactgctctttccaaagtaaggttcaactctgtgagttgaatgcacaca

SEQ ID NO: 156483 - DNA, 494 bp, Homo sapiens
agaattcttctgtctggcattacatgaagaaatcccgtttccaacgaaggcctcaaagaggtccaaatatccacttgcagattctgcaaaaagagtgtttcaaaaccgctccattaaaaggaatgttgaactctgtgagttgaatgcaaacatcacaactcagtttctgagaatgcttctgactagattttatggtaagatatttccttttctaccgtaggctycaatgccctctaaatacacccttgcaaattctacaaagagactgtttcataactgctctataggaagaaaggttcaactctgtgagttgaatgcagagatcacaacgtggtttctgcgaatgattctttgtagtttttacatgaagatatttcgttgtcaaccgtaggcttcaaagcactcaaagtattcacttggaacttttacaaaaagagtgttagaaaactgctctttccaaagtaaggttcaactctgtgagttgaatgcacaca

SEQ ID NO: 156484 - DNA, 477 bp, Homo sapiens
gaagaaatcccgtttccaacgaaggcctcaaagaggtccaaatatccacttgcagattctgcaaaaagagtgtttcaaaaccgctccattaaaaggaatgttgaactctgtgagttgaatgcaaacatcacaactcagtttctgagaatgcttctgactagattttatggtaagatatttccttttctaccgtaggcttcaatgccctstaaatacacccttgcaaattctacaaagagactgtttcataactgctctataggaagaaaggttcaactctgtgagttgaatgcagagatcacaacgtggtttctgcgaatgattctttgtagtttttacatgaagatatttcgttgtcaaccgtaggcttcaaagcactcaaagtattcacttggaacttttacaaaaagagtgttagaaaactgctctttccaaagtaaggttcaactctgtgagttgaatgcacacataacaatc

SEQ ID NO: 156485 - DNA, 496 bp, Homo sapiens
gaagaaatcccgtttccaacgaaggcctcaaagaggtccaaatatccacttgcagattctgcaaaaagagtgtttcaaaaccgctccattaaaaggaatgttgaactctgtgagttgaatgcaaacatcacaactcagtttctgagaatgcttctgactagattttatggtaagatatttccttttctaccgtaggcttcaatgccctctaaatacacccttgcaawttctacaaagagactgtttcataactgctctataggaagaaaggttcaactctgtgagttgaatgcagagatcacaacgtggtttctgcgaatgattctttgtagtttttacatgaagatatttcgttgtcaaccgtaggcttcaaagcactcaaagtattcacttggaacttttacaaaaagagtgttagaaaactgctctttccaaagtaaggttcaactctgtgagttgaatgcacacataacaatcaagaagtttctgagaattc

SEQ ID NO: 156486 - DNA, 494 bp, Homo sapiens
agaattcttctgtctggcattacatgaagaaatcccgtttccaacgaaggcctcaaagaggtccaaatatccacttgcagattctgcaaaaagagtgtttcaaaaccgctccattaaaaggaatgttgaactctgtgagttgaatgcaaacatcacaactcagtttctgagaatgcttctgactagattttatggtaagatatttccttttctaccgtaggcttcaatgccctctaaatacacccttgcaaattctacaragagactgtttcataactgctctataggaagaaaggttcaactctgtgagttgaatgcagagatcacaacgtggtttctgcgaatgattctttgtagtttttacatgaagatatttcgttgtcaaccgtaggcttcaaagcactcaaagtattcacttggaacttttacaaaaagagtgttagaaaactgctctttccaaagtaaggttcaactctgtgagttgaatgcacaca

SEQ ID NO: 156487 - DNA, 496 bp, Homo sapiens
gaagaaatcccgtttccaacgaaggcctcaaagaggtccaaatatccacttgcagattctgcaaaaagagtgtttcaaaaccgctccattaaaaggaatgttgaactctgtgagttgaatgcaaacatcacaactcagtttctgagaatgcttctgactagattttatggtaagatatttccttttctaccgtaggcttcaatgccctctaaatacacccttgcaaattctacaaagagastgtttcataactgctctataggaagaaaggttcaactctgtgagttgaatgcagagatcacaacgtggtttctgcgaatgattctttgtagtttttacatgaagatatttcgttgtcaaccgtaggcttcaaagcactcaaagtattcacttggaacttttacaaaaagagtgttagaaaactgctctttccaaagtaaggttcaactctgtgagttgaatgcacacataacaatcaagaagtttctgagaattc

SEQ ID NO: 156488 - DNA, 496 bp, Homo sapiens
gaagaaatcccgtttccaacgaaggcctcaaagaggtccaaatatccacttgcagattctgcaaaaagagtgtttcaaaaccgctccattaaaaggaatgttgaactctgtgagttgaatgcaaacatcacaactcagtttctgagaatgcttctgactagattttatggtaagatatttccttttctaccgtaggcttcaatgccctctaaatacacccttgcaaattctacaaagagacygtttcataactgctctataggaagaaaggttcaactctgtgagttgaatgcagagatcacaacgtggtttctgcgaatgattctttgtagtttttacatgaagatatttcgttgtcaaccgtaggcttcaaagcactcaaagtattcacttggaacttttacaaaaagagtgttagaaaactgctctttccaaagtaaggttcaactctgtgagttgaatgcacacataacaatcaagaagtttctgagaattc

SEQ ID NO: 156489 - DNA, 565 bp, Homo sapiens
cttctgtctggcattacatgaagaaatcccgtttccaacgaaggcctcaaagaggtccaaatatccacttgcagattctgcaaaaagagtgtttcaaaaccgctccattaaaaggaatgttgaactctgtgagttgaatgcaaacatcacaactcagtttctgagaatgcttctgactagattttatggtaagatatttccttttctaccgtaggcttcaatgccctctaaatacacccttgcaaattctacaaagagactgyttcataactgctctataggaagaaaggttcaactctgtgagttgaatgcagagatcacaacgtggtttctgcgaatgattctttgtagtttttacatgaagatatttcgttgtcaaccgtaggcttcaaagcactcaaagtattcacttggaacttttacaaaaagagtgttagaaaactgctctttccaaagtaaggttcaactctgtgagttgaatgcacacataacaatcaagaagtttctgagaattcttctgtcctggtttatatgaaaaaatcccgtttccaacgaaggcctcaaa

SEQ ID NO: 156490 - DNA, 494 bp, Homo sapiens
agaattcttctgtctggcattacatgaagaaatcccgtttccaacgaaggcctcaaagaggtccaaatatccacttgcagattctgcaaaaagagtgtttcaaaaccgctccattaaaaggaatgttgaactctgtgagttgaatgcaaacatcacaactcagtttctgagaatgcttctgactagattttatggtaagatatttccttttctaccgtaggcttcaatgccctctaaatacacccttgcaaattctacaaagagactgtttcayaactgctctataggaagaaaggttcaactctgtgagttgaatgcagagatcacaacgtggtttctgcgaatgattctttgtagtttttacatgaagatatttcgttgtcaaccgtaggcttcaaagcactcaaagtattcacttggaacttttacaaaaagagtgttagaaaactgctctttccaaagtaaggttcaactctgtgagttgaatgcacaca

SEQ ID NO: 156491 - DNA, 496 bp, Homo sapiens
gaagaaatcccgtttccaacgaaggcctcaaagaggtccaaatatccacttgcagattctgcaaaaagagtgtttcaaaaccgctccattaaaaggaatgttgaactctgtgagttgaatgcaaacatcacaactcagtttctgagaatgcttctgactagattttatggtaagatatttccttttctaccgtaggcttcaatgccctctaaatacacccttgcaaattctacaaagagactgtttcatawctgctctataggaagaaaggttcaactctgtgagttgaatgcagagatcacaacgtggtttctgcgaatgattctttgtagtttttacatgaagatatttcgttgtcaaccgtaggcttcaaagcactcaaagtattcacttggaacttttacaaaaagagtgttagaaaactgctctttccaaagtaaggttcaactctgtgagttgaatgcacacataacaatcaagaagtttctgagaattc

SEQ ID NO: 156492 - DNA, 497 bp, Homo sapiens
tgaagaaatcccgtttccaacgaaggcctcaaagaggtccaaatatccacttgcagattctgcaaaaagagtgtttcaaaaccgctccattaaaaggaatgttgaactctgtgagttgaatgcaaacatcacaactcagtttctgagaatgcttctgactagattttatggtaagatatttccttttctaccgtaggcttcaatgccctctaaatacacccttgcaaattctacaaagagactgtttcataactgctctmtaggaagaaaggttcaactctgtgagttgaatgcagagatcacaacgtggtttctgcgaatgattctttgtagtttttacatgaagatatttcgttgtcaaccgtaggcttcaaagcactcaaagtattcacttggaacttttacaaaaagagtgttagaaaactgctctttccaaagtaaggttcaactctgtgagttgaatgcacacataacaatcaagaagtttctgagaattc

SEQ ID NO: 156493 - DNA, 496 bp, Homo sapiens
gaagaaatcccgtttccaacgaaggcctcaaagaggtccaaatatccacttgcagattctgcaaaaagagtgtttcaaaaccgctccattaaaaggaatgttgaactctgtgagttgaatgcaaacatcacaactcagtttctgagaatgcttctgactagattttatggtaagatatttccttttctaccgtaggcttcaatgccctctaaatacacccttgcaaattctacaaagagactgtttcataactgctctayaggaagaaaggttcaactctgtgagttgaatgcagagatcacaacgtggtttctgcgaatgattctttgtagtttttacatgaagatatttcgttgtcaaccgtaggcttcaaagcactcaaagtattcacttggaacttttacaaaaagagtgttagaaaactgctctttccaaagtaaggttcaactctgtgagttgaatgcacacataacaatcaagaagtttctgagaattc

SEQ ID NO: 156494 - DNA, 496 bp, Homo sapiens
gaagaaatcccgtttccaacgaaggcctcaaagaggtccaaatatccacttgcagattctgcaaaaagagtgtttcaaaaccgctccattaaaaggaatgttgaactctgtgagttgaatgcaaacatcacaactcagtttctgagaatgcttctgactagattttatggtaagatatttccttttctaccgtaggcttcaatgccctctaaatacacccttgcaaattctacaaagagactgtttcataactgctctatasgaagaaaggttcaactctgtgagttgaatgcagagatcacaacgtggtttctgcgaatgattctttgtagtttttacatgaagatatttcgttgtcaaccgtaggcttcaaagcactcaaagtattcacttggaacttttacaaaaagagtgttagaaaactgctctttccaaagtaaggttcaactctgtgagttgaatgcacacataacaatcaagaagtttctgagaattc

SEQ ID NO: 156495 - DNA, 496 bp, Homo sapiens
gaagaaatcccgtttccaacgaaggcctcaaagaggtccaaatatccacttgcagattctgcaaaaagagtgtttcaaaaccgctccattaaaaggaatgttgaactctgtgagttgaatgcaaacatcacaactcagtttctgagaatgcttctgactagattttatggtaagatatttccttttctaccgtaggcttcaatgccctctaaatacacccttgcaaattctacaaagagactgtttcataactgctctataggargaaaggttcaactctgtgagttgaatgcagagatcacaacgtggtttctgcgaatgattctttgtagtttttacatgaagatatttcgttgtcaaccgtaggcttcaaagcactcaaagtattcacttggaacttttacaaaaagagtgttagaaaactgctctttccaaagtaaggttcaactctgtgagttgaatgcacacataacaatcaagaagtttctgagaattc

SEQ ID NO: 156496 - DNA, 493 bp, Homo sapiens
gaattcttctgtctggcattacatgaagaaatcccgtttccaacgaaggcctcaaagaggtccaaatatccacttgcagattctgcaaaaagagtgtttcaaaaccgctccattaaaaggaatgttgaactctgtgagttgaatgcaaacatcacaactcagtttctgagaatgcttctgactagattttatggtaagatatttccttttctaccgtaggcttcaatgccctctaaatacacccttgcaaattctacaaagagactgtttcataactgctctataggaagaarggttcaactctgtgagttgaatgcagagatcacaacgtggtttctgcgaatgattctttgtagtttttacatgaagatatttcgttgtcaaccgtaggcttcaaagcactcaaagtattcacttggaacttttacaaaaagagtgttagaaaactgctctttccaaagtaaggttcaactctgtgagttgaatgcacaca

SEQ ID NO: 156497 - DNA, 492 bp, Homo sapiens
aattcttctgtctggcattacatgaagaaatcccgtttccaacgaaggcctcaaagaggtccaaatatccacttgcagattctgcaaaaagagtgtttcaaaaccgctccattaaaaggaatgttgaactctgtgagttgaatgcaaacatcacaactcagtttctgagaatgcttctgactagattttatggtaagatatttccttttctaccgtaggcttcaatgccctctaaatacacccttgcaaattctacaaagagactgtttcataactgctctataggaagaaagrttcaactctgtgagttgaatgcagagatcacaacgtggtttctgcgaatgattctttgtagtttttacatgaagatatttcgttgtcaaccgtaggcttcaaagcactcaaagtattcacttggaacttttacaaaaagagtgttagaaaactgctctttccaaagtaaggttcaactctgtgagttgaatgcacaca

SEQ ID NO: 156498 - DNA, 575 bp, Homo sapiens
cataactgctctataggaagaaaggttcaactctgwgagttgaatgcagagatcacaacgtggtttctgcgaatgattctttgtagtttttacatgaagatatttcgttgtcaaccgtaggcttcaaagcactcaaagtattcacttggaacttttacaaaaagagtgttagaaaactgctctttccaaagtaaggttcaactctgtgagttgaatgcacacataacaatcaagaagtttctgagaattcttctgtcctggtttatatgaaaaaatcccgtttccaacgaaggcctcaaagacgtttaaatatccacttgcagacttcacaaacagagggtttccaaactgctctatgaaaagaaaggttaaactctgtgagttgaacgcacacatcacaaagtagcttctgagaatgatactgtctagtttttatacgaagatatttcctttctaccattggcgtcaaagcgctagaattctccacttgcaaattccacaaaaagagtgtttccaatctgctctgtctaaaggaaggttcaactctgtgagttgaatacacacacacaaagaag

SEQ ID NO: 156499 - DNA, 496 bp, Homo sapiens
gaagaaatcccgtttccaacgaaggcctcaaagaggtccaaatatccacttgcagattctgcaaaaagagtgtttcaaaaccgctccattaaaaggaatgttgaactctgtgagttgaatgcaaacatcacaactcagtttctgagaatgcttctgactagattttatggtaagatatttccttttctaccgtaggcttcaatgccctctaaatacacccttgcaaattctacaaagagactgtttcataactgctctataggaagaaaggttcaactctgtgasttgaatgcagagatcacaacgtggtttctgcgaatgattctttgtagtttttacatgaagatatttcgttgtcaaccgtaggcttcaaagcactcaaagtattcacttggaacttttacaaaaagagtgttagaaaactgctctttccaaagtaaggttcaactctgtgagttgaatgcacacataacaatcaagaagtttctgagaattc

SEQ ID NO: 156500 - DNA, 502 bp, Homo sapiens
gtttcaaaaccgctccattaaaaggaatgttgaactctgtgagttgaatgcaaacatcacaactcagtttctgagaatgcttctgactagattttatggtaagatatttccttttctaccgtaggcttcaatgccctctaaatacacccttgcaaattctacaaagagactgtttcataactgctctataggaagaaaggttcaactctgtgagttgaatrcagagatcacaacgtggtttctgcgaatgattctttgtagtttttacatgaagatatttcgttgtcaaccgtaggcttcaaagcactcaaagtattcacttggaacttttacaaaaagagtgttagaaaactgctctttccaaagtaaggttcaactctgtgagttgaatgcacacataacaatcaagaagtttctgagaattcttctgtcctggtttatatgaaaaaatcccgtttccaacgaaggcctcaaagacgtttaaatatccacttgcagactt

SEQ ID NO: 156501 - DNA, 494 bp, Homo sapiens
agaattcttctgtctggcattacatgaagaaatcccgtttccaacgaaggcctcaaagaggtccaaatatccacttgcagattctgcaaaaagagtgtttcaaaaccgctccattaaaaggaatgttgaactctgtgagttgaatgcaaacatcacaactcagtttctgagaatgcttctgactagattttatggtaagatatttccttttctaccgtaggcttcaatgccctctaaatacacccttgcaaattctacaaagagactgtttcataactgctctataggaagaaaggttcaactctgtgagttgaatgcagrgatcacaacgtggtttctgcgaatgattctttgtagtttttacatgaagatatttcgttgtcaaccgtaggcttcaaagcactcaaagtattcacttggaacttttacaaaaagagtgttagaaaactgctctttccaaagtaaggttcaactctgtgagttgaatgcacaca

SEQ ID NO: 156502 - DNA, 496 bp, Homo sapiens
gaagaaatcccgtttccaacgaaggcctcaaagaggtccaaatatccacttgcagattctgcaaaaagagtgtttcaaaaccgctccattaaaaggaatgttgaactctgtgagttgaatgcaaacatcacaactcagtttctgagaatgcttctgactagattttatggtaagatatttccttttctaccgtaggcttcaatgccctctaaatacacccttgcaaattctacaaagagactgtttcataactgctctataggaagaaaggttcaactctgtgagttgaatgcagagawcacaacgtggtttctgcgaatgattctttgtagtttttacatgaagatatttcgttgtcaaccgtaggcttcaaagcactcaaagtattcacttggaacttttacaaaaagagtgttagaaaactgctctttccaaagtaaggttcaactctgtgagttgaatgcacacataacaatcaagaagtttctgagaattc

SEQ ID NO: 156503 - DNA, 568 bp, Homo sapiens
gtttccaatctactctgtctaaaggaacgttcaactctgtgagttgaatacacacacacagaaagaattcactgagaattcttctgtctggcattacatgaagaaatcccgtttccaacgaaggcctcaaagaggtccaaatatccacttgcagattctgcaaaaagagtgtttcaaaaccgctccattaaaaggaatgttgaactctgtgagttgaatgcaaacatcacaactcagtttctgagaatgcttctgactagattttatggtaagatatttccttttctaccgtaggcttcaatgccctctaaatacacccttgcaaattctacaaagagactgtttcataactgctctataggaagaaaggttcaactctgtgagttgaatgcagagatcacaacktggtttctgcgaatgattctttgtagtttttacatgaagatatttcgttgtcaaccgtaggcttcaaagcactcaaagtattcacttggaacttttacaaaaagagtgttagaaaactgctctttccaaagtaaggttcaactctgtgagttgaatgcacaca

SEQ ID NO: 156504 - DNA, 496 bp, Homo sapiens
gaagaaatcccgtttccaacgaaggcctcaaagaggtccaaatatccacttgcagattctgcaaaaagagtgtttcaaaaccgctccattaaaaggaatgttgaactctgtgagttgaatgcaaacatcacaactcagtttctgagaatgcttctgactagattttatggtaagatatttccttttctaccgtaggcttcaatgccctctaaatacacccttgcaaattctacaaagagactgtttcataactgctctataggaagaaaggttcaactctgtgagttgaatgcagagatcacaacgtgktttctgcgaatgattctttgtagtttttacatgaagatatttcgttgtcaaccgtaggcttcaaagcactcaaagtattcacttggaacttttacaaaaagagtgttagaaaactgctctttccaaagtaaggttcaactctgtgagttgaatgcacacataacaatcaagaagtttctgagaattc

SEQ ID NO: 156505 - DNA, 497 bp, Homo sapiens
tgaagaaatcccgtttccaacgaaggcctcaaagaggtccaaatatccacttgcagattctgcaaaaagagtgtttcaaaaccgctccattaaaaggaatgttgaactctgtgagttgaatgcaaacatcacaactcagtttctgagaatgcttctgactagattttatggtaagatatttccttttctaccgtaggcttcaatgccctctaaatacacccttgcaaattctacaaagagactgtttcataactgctctataggaagaaaggttcaactctgtgagttgaatgcagagatcacaacgtggtttcwgcgaatgattctttgtagtttttacatgaagatatttcgttgtcaaccgtaggcttcaaagcactcaaagtattcacttggaacttttacaaaaagagtgttagaaaactgctctttccaaagtaaggttcaactctgtgagttgaatgcacacataacaatcaagaagtttctgagaattc

SEQ ID NO: 156506 - DNA, 496 bp, Homo sapiens
gaagaaatcccgtttccaacgaaggcctcaaagaggtccaaatatccacttgcagattctgcaaaaagagtgtttcaaaaccgctccattaaaaggaatgttgaactctgtgagttgaatgcaaacatcacaactcagtttctgagaatgcttctgactagattttatggtaagatatttccttttctaccgtaggcttcaatgccctctaaatacacccttgcaaattctacaaagagactgtttcataactgctctataggaagaaaggttcaactctgtgagttgaatgcagagatcacaacgtggtttctrcgaatgattctttgtagtttttacatgaagatatttcgttgtcaaccgtaggcttcaaagcactcaaagtattcacttggaacttttacaaaaagagtgttagaaaactgctctttccaaagtaaggttcaactctgtgagttgaatgcacacataacaatcaagaagtttctgagaattc

SEQ ID NO: 156507 - DNA, 496 bp, Homo sapiens
gaagaaatcccgtttccaacgaaggcctcaaagaggtccaaatatccacttgcagattctgcaaaaagagtgtttcaaaaccgctccattaaaaggaatgttgaactctgtgagttgaatgcaaacatcacaactcagtttctgagaatgcttctgactagattttatggtaagatatttccttttctaccgtaggcttcaatgccctctaaatacacccttgcaaattctacaaagagactgtttcataactgctctataggaagaaaggttcaactctgtgagttgaatgcagagatcacaacgtggtttctgcraatgattctttgtagtttttacatgaagatatttcgttgtcaaccgtaggcttcaaagcactcaaagtattcacttggaacttttacaaaaagagtgttagaaaactgctctttccaaagtaaggttcaactctgtgagttgaatgcacacataacaatcaagaagtttctgagaattc

SEQ ID NO: 156508 - DNA, 494 bp, Homo sapiens
agaattcttctgtctggcattacatgaagaaatcccgtttccaacgaaggcctcaaagaggtccaaatatccacttgcagattctgcaaaaagagtgtttcaaaaccgctccattaaaaggaatgttgaactctgtgagttgaatgcaaacatcacaactcagtttctgagaatgcttctgactagattttatggtaagatatttccttttctaccgtaggcttcaatgccctctaaatacacccttgcaaattctacaaagagactgtttcataactgctctataggaagaaaggttcaactctgtgagttgaatgcagagatcacaacgtggtttctgcgaawgattctttgtagtttttacatgaagatatttcgttgtcaaccgtaggcttcaaagcactcaaagtattcacttggaacttttacaaaaagagtgttagaaaactgctctttccaaagtaaggttcaactctgtgagttgaatgcacaca

SEQ ID NO: 156509 - DNA, 494 bp, Homo sapiens
agaattcttctgtctggcattacatgaagaaatcccgtttccaacgaaggcctcaaagaggtccaaatatccacttgcagattctgcaaaaagagtgtttcaaaaccgctccattaaaaggaatgttgaactctgtgagttgaatgcaaacatcacaactcagtttctgagaatgcttctgactagattttatggtaagatatttccttttctaccgtaggcttcaatgccctctaaatacacccttgcaaattctacaaagagactgtttcataactgctctataggaagaaaggttcaactctgtgagttgaatgcagagatcacaacgtggtttctgcgaatgwttctttgtagtttttacatgaagatatttcgttgtcaaccgtaggcttcaaagcactcaaagtattcacttggaacttttacaaaaagagtgttagaaaactgctctttccaaagtaaggttcaactctgtgagttgaatgcacaca

SEQ ID NO: 156510 - DNA, 497 bp, Homo sapiens
tgaagaaatcccgtttccaacgaaggcctcaaagaggtccaaatatccacttgcagattctgcaaaaagagtgtttcaaaaccgctccattaaaaggaatgttgaactctgtgagttgaatgcaaacatcacaactcagtttctgagaatgcttctgactagattttatggtaagatatttccttttctaccgtaggcttcaatgccctctaaatacacccttgcaaattctacaaagagactgtttcataactgctctataggaagaaaggttcaactctgtgagttgaatgcagagatcacaacgtggtttctgcgaatgattctttgtagtttttacatgmagatatttcgttgtcaaccgtaggcttcaaagcactcaaagtattcacttggaacttttacaaaaagagtgttagaaaactgctctttccaaagtaaggttcaactctgtgagttgaatgcacacataacaatcaagaagtttctgagaattc

SEQ ID NO: 156511 - DNA, 493 bp, Homo sapiens
gaattcttctgtctggcattacatgaagaaatcccgtttccaacgaaggcctcaaagaggtccaaatatccacttgcagattctgcaaaaagagtgtttcaaaaccgctccattaaaaggaatgttgaactctgtgagttgaatgcaaacatcacaactcagtttctgagaatgcttctgactagattttatggtaagatatttccttttctaccgtaggcttcaatgccctctaaatacacccttgcaaattctacaaagagactgtttcataactgctctataggaagaaaggttcaactctgtgagttgaatgcagagatcacaacgtggtttctgcgaatgattctttgtagtttttacatgaagrtatttcgttgtcaaccgtaggcttcaaagcactcaaagtattcacttggaacttttacaaaaagagtgttagaaaactgctctttccaaagtaaggttcaactctgtgagttgaatgcacaca

SEQ ID NO: 156512 - DNA, 492 bp, Homo sapiens
gaattcttctgtctggcattacatgaagaaatcccgtttccaacgaaggcctcaaagaggtccaaatatccacttgcagattctgcaaaaagagtgtttcaaaaccgctccattaaaaggaatgttgaactctgtgagttgaatgcaaacatcacaactcagtttctgagaatgcttctgactagattttatggtaagatatttccttttctaccgtaggcttcaatgccctctaaatacacccttgcaaattctacaaagagactgtttcataactgctctataggaagaaaggttcaactctgtgagttgaatgcagagatcacaacgtggtttctgcgaatgattctttgtagtttttacatgaagatayttcgttgtcaaccgtaggcttcaaagcactcaaagtattcacttggaacttttacaaaaagagtgttagaaaactgctctttccaaagtaaggttcaactctgtgagttgaatgcacac

SEQ ID NO: 156513 - DNA, 496 bp, Homo sapiens
gaagaaatcccgtttccaacgaaggcctcaaagaggtccaaatatccacttgcagattctgcaaaaagagtgtttcaaaaccgctccattaaaaggaatgttgaactctgtgagttgaatgcaaacatcacaactcagtttctgagaatgcttctgactagattttatggtaagatatttccttttctaccgtaggcttcaatgccctctaaatacacccttgcaaattctacaaagagactgtttcataactgctctataggaagaaaggttcaactctgtgagttgaatgcagagatcacaacgtggtttctgcgaatgattctttgtagtttttacatgaagatatktcgttgtcaaccgtaggcttcaaagcactcaaagtattcacttggaacttttacaaaaagagtgttagaaaactgctctttccaaagtaaggttcaactctgtgagttgaatgcacacataacaatcaagaagtttctgagaattc

SEQ ID NO: 156514 - DNA, 494 bp, Homo sapiens
agaattcttctgtctggcattacatgaagaaatcccgtttccaacgaaggcctcaaagaggtccaaatatccacttgcagattctgcaaaaagagtgtttcaaaaccgctccattaaaaggaatgttgaactctgtgagttgaatgcaaacatcacaactcagtttctgagaatgcttctgactagattttatggtaagatatttccttttctaccgtaggcttcaatgccctctaaatacacccttgcaaattctacaaagagactgtttcataactgctctataggaagaaaggttcaactctgtgagttgaatgcagagatcacaacgtggtttctgcgaatgattctttgtagtttttacatgaagatattwcgttgtcaaccgtaggcttcaaagcactcaaagtattcacttggaacttttacaaaaagagtgttagaaaactgctctttccaaagtaaggttcaactctgtgagttgaatgcacaca

SEQ ID NO: 156515 - DNA, 494 bp, Homo sapiens
agaattcttctgtctggcattacatgaagaaatcccgtttccaacgaaggcctcaaagaggtccaaatatccacttgcagattctgcaaaaagagtgtttcaaaaccgctccattaaaaggaatgttgaactctgtgagttgaatgcaaacatcacaactcagtttctgagaatgcttctgactagattttatggtaagatatttccttttctaccgtaggcttcaatgccctctaaatacacccttgcaaattctacaaagagactgtttcataactgctctataggaagaaaggttcaactctgtgagttgaatgcagagatcacaacgtggtttctgcgaatgattctttgtagtttttacatgaagatatttygttgtcaaccgtaggcttcaaagcactcaaagtattcacttggaacttttacaaaaagagtgttagaaaactgctctttccaaagtaaggttcaactctgtgagttgaatgcacaca

SEQ ID NO: 156516 - DNA, 494 bp, Homo sapiens
agaattcttctgtctggcattacatgaagaaatcccgtttccaacgaaggcctcaaagaggtccaaatatccacttgcagattctgcaaaaagagtgtttcaaaaccgctccattaaaaggaatgttgaactctgtgagttgaatgcaaacatcacaactcagtttctgagaatgcttctgactagattttatggtaagatatttccttttctaccgtaggcttcaatgccctctaaatacacccttgcaaattctacaaagagactgtttcataactgctctataggaagaaaggttcaactctgtgagttgaatgcagagatcacaacgtggtttctgcgaatgattctttgtagtttttacatgaagatatttcrttgtcaaccgtaggcttcaaagcactcaaagtattcacttggaacttttacaaaaagagtgttagaaaactgctctttccaaagtaaggttcaactctgtgagttgaatgcacaca

SEQ ID NO: 156517 - DNA, 494 bp, Homo sapiens
agaattcttctgtctggcattacatgaagaaatcccgtttccaacgaaggcctcaaagaggtccaaatatccacttgcagattctgcaaaaagagtgtttcaaaaccgctccattaaaaggaatgttgaactctgtgagttgaatgcaaacatcacaactcagtttctgagaatgcttctgactagattttatggtaagatatttccttttctaccgtaggcttcaatgccctctaaatacacccttgcaaattctacaaagagactgtttcataactgctctataggaagaaaggttcaactctgtgagttgaatgcagagatcacaacgtggtttctgcgaatgattctttgtagtttttacatgaagatatttcgtygtcaaccgtaggcttcaaagcactcaaagtattcacttggaacttttacaaaaagagtgttagaaaactgctctttccaaagtaaggttcaactctgtgagttgaatgcacaca

SEQ ID NO: 156518 - DNA, 551 bp, Homo sapiens
ttgaatacacacacacagaaagaattcactgagaattcttctgtctggcattacatgaagaaatcccgtttccaacgaaggcctcaaagaggtccaaatatccacttgcagattctgcaaaaagagtgtttcaaaaccgctccattaaaaggaatgttgaactctgtgagttgaatgcaaacatcacaactcagtttctgagaatgcttctgactagattttatggtaagatatttccttttctaccgtaggcttcaatgccctctaaatacacccttgcaaattctacaaagagactgtttcataactgctctataggaagaaaggttcaactctgtgagttgaatgcagagatcacaacgtggtttctgcgaatgattctttgtagtttttacatgaagatatttcgttgtsaaccgtaggcttcaaagcactcaaagtattcacttggaacttttacaaaaagagtgttagaaaactgctctttccaaagtaaggttcaactctgtgagttgaatgcacacataacaatcaagaagtttctgagaatt

SEQ ID NO: 156519 - DNA, 493 bp, Homo sapiens
gaattcttctgtctggcattacatgaagaaatcccgtttccaacgaaggcctcaaagaggtccaaatatccacttgcagattctgcaaaaagagtgtttcaaaaccgctccattaaaaggaatgttgaactctgtgagttgaatgcaaacatcacaactcagtttctgagaatgcttctgactagattttatggtaagatatttccttttctaccgtaggcttcaatgccctctaaatacacccttgcaaattctacaaagagactgtttcataactgctctataggaagaaaggttcaactctgtgagttgaatgcagagatcacaacgtggtttctgcgaatgattctttgtagtttttacatgaagatatttcgttgtcaaccgtaggsttcaaagcactcaaagtattcacttggaacttttacaaaaagagtgttagaaaactgctctttccaaagtaaggttcaactctgtgagttgaatgcacaca

SEQ ID NO: 156520 - DNA, 493 bp, Homo sapiens
gaattcttctgtctggcattacatgaagaaatcccgtttccaacgaaggcctcaaagaggtccaaatatccacttgcagattctgcaaaaagagtgtttcaaaaccgctccattaaaaggaatgttgaactctgtgagttgaatgcaaacatcacaactcagtttctgagaatgcttctgactagattttatggtaagatatttccttttctaccgtaggcttcaatgccctctaaatacacccttgcaaattctacaaagagactgtttcataactgctctataggaagaaaggttcaactctgtgagttgaatgcagagatcacaacgtggtttctgcgaatgattctttgtagtttttacatgaagatatttcgttgtcaaccgtaggcttsaaagcactcaaagtattcacttggaacttttacaaaaagagtgttagaaaactgctctttccaaagtaaggttcaactctgtgagttgaatgcacaca

SEQ ID NO: 156521 - DNA, 496 bp, Homo sapiens
gaagaaatcccgtttccaacgaaggcctcaaagaggtccaaatatccacttgcagattctgcaaaaagagtgtttcaaaaccgctccattaaaaggaatgttgaactctgtgagttgaatgcaaacatcacaactcagtttctgagaatgcttctgactagattttatggtaagatatttccttttctaccgtaggcttcaatgccctctaaatacacccttgcaaattctacaaagagactgtttcataactgctctataggaagaaaggttcaactctgtgagttgaatgcagagatcacaacgtggtttctgcgaatgattctttgtagtttttacatgaagatatttcgttgtcaaccgtaggcttcaaarcactcaaagtattcacttggaacttttacaaaaagagtgttagaaaactgctctttccaaagtaaggttcaactctgtgagttgaatgcacacataacaatcaagaagtttctgagaattc

SEQ ID NO: 156522 - DNA, 496 bp, Homo sapiens
gaagaaatcccgtttccaacgaaggcctcaaagaggtccaaatatccacttgcagattctgcaaaaagagtgtttcaaaaccgctccattaaaaggaatgttgaactctgtgagttgaatgcaaacatcacaactcagtttctgagaatgcttctgactagattttatggtaagatatttccttttctaccgtaggcttcaatgccctctaaatacacccttgcaaattctacaaagagactgtttcataactgctctataggaagaaaggttcaactctgtgagttgaatgcagagatcacaacgtggtttctgcgaatgattctttgtagtttttacatgaagatatttcgttgtcaaccgtaggcttcaaagcactcamagtattcacttggaacttttacaaaaagagtgttagaaaactgctctttccaaagtaaggttcaactctgtgagttgaatgcacacataacaatcaagaagtttctgagaattc

SEQ ID NO: 156523 - DNA, 496 bp, Homo sapiens
gaagaaatcccgtttccaacgaaggcctcaaagaggtccaaatatccacttgcagattctgcaaaaagagtgtttcaaaaccgctccattaaaaggaatgttgaactctgtgagttgaatgcaaacatcacaactcagtttctgagaatgcttctgactagattttatggtaagatatttccttttctaccgtaggcttcaatgccctctaaatacacccttgcaaattctacaaagagactgtttcataactgctctataggaagaaaggttcaactctgtgagttgaatgcagagatcacaacgtggtttctgcgaatgattctttgtagtttttacatgaagatatttcgttgtcaaccgtaggcttcaaagcactcaaagtaytcacttggaacttttacaaaaagagtgttagaaaactgctctttccaaagtaaggttcaactctgtgagttgaatgcacacataacaatcaagaagtttctgagaattc

SEQ ID NO: 156524 - DNA, 496 bp, Homo sapiens
gaagaaatcccgtttccaacgaaggcctcaaagaggtccaaatatccacttgcagattctgcaaaaagagtgtttcaaaaccgctccattaaaaggaatgttgaactctgtgagttgaatgcaaacatcacaactcagtttctgagaatgcttctgactagattttatggtaagatatttccttttctaccgtaggcttcaatgccctctaaatacacccttgcaaattctacaaagagactgtttcataactgctctataggaagaaaggttcaactctgtgagttgaatgcagagatcacaacgtggtttctgcgaatgattctttgtagtttttacatgaagatatttcgttgtcaaccgtaggcttcaaagcactcaaagtattcacktggaacttttacaaaaagagtgttagaaaactgctctttccaaagtaaggttcaactctgtgagttgaatgcacacataacaatcaagaagtttctgagaattc

SEQ ID NO: 156525 - DNA, 496 bp, Homo sapiens
gaagaaatcccgtttccaacgaaggcctcaaagaggtccaaatatccacttgcagattctgcaaaaagagtgtttcaaaaccgctccattaaaaggaatgttgaactctgtgagttgaatgcaaacatcacaactcagtttctgagaatgcttctgactagattttatggtaagatatttccttttctaccgtaggcttcaatgccctctaaatacacccttgcaaattctacaaagagactgtttcataactgctctataggaagaaaggttcaactctgtgagttgaatgcagagatcacaacgtggtttctgcgaatgattctttgtagtttttacatgaagatatttcgttgtcaaccgtaggcttcaaagcactcaaagtattcacttggaacttktacaaaaagagtgttagaaaactgctctttccaaagtaaggttcaactctgtgagttgaatgcacacataacaatcaagaagtttctgagaattc

SEQ ID NO: 156526 - DNA, 496 bp, Homo sapiens
gaagaaatcccgtttccaacgaaggcctcaaagaggtccaaatatccacttgcagattctgcaaaaagagtgtttcaaaaccgctccattaaaaggaatgttgaactctgtgagttgaatgcaaacatcacaactcagtttctgagaatgcttctgactagattttatggtaagatatttccttttctaccgtaggcttcaatgccctctaaatacacccttgcaaattctacaaagagactgtttcataactgctctataggaagaaaggttcaactctgtgagttgaatgcagagatcacaacgtggtttctgcgaatgattctttgtagtttttacatgaagatatttcgttgtcaaccgtaggcttcaaagcactcaaagtattcacttggaacttttacmaaaagagtgttagaaaactgctctttccaaagtaaggttcaactctgtgagttgaatgcacacataacaatcaagaagtttctgagaattc

SEQ ID NO: 156527 - DNA, 496 bp, Homo sapiens
gaagaaatcccgtttccaacgaaggcctcaaagaggtccaaatatccacttgcagattctgcaaaaagagtgtttcaaaaccgctccattaaaaggaatgttgaactctgtgagttgaatgcaaacatcacaactcagtttctgagaatgcttctgactagattttatggtaagatatttccttttctaccgtaggcttcaatgccctctaaatacacccttgcaaattctacaaagagactgtttcataactgctctataggaagaaaggttcaactctgtgagttgaatgcagagatcacaacgtggtttctgcgaatgattctttgtagtttttacatgaagatatttcgttgtcaaccgtaggcttcaaagcactcaaagtattcacttggaacttttacaaaaagagtrttagaaaactgctctttccaaagtaaggttcaactctgtgagttgaatgcacacataacaatcaagaagtttctgagaattc

SEQ ID NO: 156528 - DNA, 484 bp, Homo sapiens
tttccaacgaaggcctcaaagaggtccaaatatccacttgcagattctgcaaaaagagtgtttcaaaaccgctccattaaaaggaatgttgaactctgtgagttgaatgcaaacatcacaactcagtttctgagaatgcttctgactagattttatggtaagatatttccttttctaccgtaggcttcaatgccctctaaatacacccttgcaaattctacaaagagactgtttcataactgctctataggaagaaaggttcaactctgtgagttgaatgcagagatcacaacgtggtttctgcgaatgattctttgtagtttttacatgaagatatttcgttgtcaaccgtaggcttcaaagcactcaaagtattcacttggaacttttacaaaaagagtgttasaaaactgctctttccaaagtaaggttcaactctgtgagttgaatgcacacataacaatcaagaagtttctgagaattc

SEQ ID NO: 156529 - DNA, 493 bp, Homo sapiens
gaattcttctgtctggcattacatgaagaaatcccgtttccaacgaaggcctcaaagaggtccaaatatccacttgcagattctgcaaaaagagtgtttcaaaaccgctccattaaaaggaatgttgaactctgtgagttgaatgcaaacatcacaactcagtttctgagaatgcttctgactagattttatggtaagatatttccttttctaccgtaggcttcaatgccctctaaatacacccttgcaaattctacaaagagactgtttcataactgctctataggaagaaaggttcaactctgtgagttgaatgcagagatcacaacgtggtttctgcgaatgattctttgtagtttttacatgaagatatttcgttgtcaaccgtaggcttcaaagcactcaaagtattcacttggaacttttacaaaaagagtgttagaaaacygctctttccaaagtaaggttcaactctgtgagttgaatgcacaca

SEQ ID NO: 156530 - DNA, 496 bp, Homo sapiens
gaagaaatcccgtttccaacgaaggcctcaaagaggtccaaatatccacttgcagattctgcaaaaagagtgtttcaaaaccgctccattaaaaggaatgttgaactctgtgagttgaatgcaaacatcacaactcagtttctgagaatgcttctgactagattttatggtaagatatttccttttctaccgtaggcttcaatgccctctaaatacacccttgcaaattctacaaagagactgtttcataactgctctataggaagaaaggttcaactctgtgagttgaatgcagagatcacaacgtggtttctgcgaatgattctttgtagtttttacatgaagatatttcgttgtcaaccgtaggcttcaaagcactcaaagtattcacttggaacttttacaaaaagagtgttagaaaactgctctttccaaagtaaggttcaactctgtgagttgaatgcacmcataacaatcaagaagtttctgagaattc

SEQ ID NO: 156531 - DNA, 592 bp, Homo sapiens
tcacaaacagagggtttccaaactgctctatgaaaagaaaggttaaactctgtgagttgaacgcacacatcacaaagtagcttctgagaatgatactgtctagtttttatacgaagatatttcctttctaccattggcrtcaaagcgctagaattctccacttgcaaattccacaaaaagagtgtttccaatctgctctgtctaaaggaaggttcaactctgtgagttgaatacacacacacaaagaagctactgagaattcttttttcaagaaattataagaagaaatcccgtttccaacgaaggcctcaaagagttccaaatatccacttgcacactgcacaaactaagtctttccaaactgctctatgcaaagaaatgttcaactctgtgagtttaatacacacatcacaaagcagtttctgagaatgatactgtctagtttttatacgaagatatttccttttgtaccattggcctcatactgctagaattttccacttgcaaattccacaaaaagagtgtttccaatccgctctgtctaaaggaaggttcaactctctgatttgaatacatacatcccaaaagaagt

SEQ ID NO: 156532 - DNA, 401 bp, Homo sapiens
tttccaatctgctctgtctaaaggaaggttcaactctgtgagttgaatacacacacacaaagaagctactgagaattsttttttcaagaaattataagaagaaatcccgtttccaacgaaggcctcaaagagttccaaatatccacttgcacactgcacaaactaagtctttccaaactgctctatgcaaagaaatgttcaactctgtgagtttaatacacacatcacaaagcagtttctgagaatgatactgtctagtttttatacgaagatatttccttttgtaccattggcctcatactgctagaattttccacttgcaaattccacaaaaagagtgtttccaatccgctctgtctaaaggaaggttcaactctctgatttgaatacatacatcccaa

SEQ ID NO: 156533 - DNA, 566 bp, Homo sapiens
cttggaacttttacaaaaagagtgttagaaaactgctctttccaaagtaaggttcaactctgtgagttgaatgcacacataacaatcaagaagtttctgagaattcttctgtcctggtttatatgaaaaaatcccgtttccaacgaaggcctcaaagacgtttaaatatccacttgcagacttcacaaacagagggtttccaaactgctctatgaaaagaaaggttaaactctgtgagttgaacgcacacatcacaaagtagcttctgagaatgatactgtctagtttttatacgaagatatttcctttctaccattggcgtcaaagcgctagaattctccacttgcaaattccacaaaaagagtgtttccaatctgctctgtctaaaggaaggttcaactctgtgagttgaatacacacacacaaagaagctactgagaattcttttttcaagaaattataagaagaaatcccgtttccaacgaaggcctcaaagagttccaaatatccacttgcacactgyacaaactaagtctttccaaactgctctatgcaaagaaatgttc

SEQ ID NO: 156534 - DNA, 274 bp, Homo sapiens
agcctcgggcgcagcctagcagcggaargggcggagcttcactcctcctttccatcagtcacccccaactttcccaggctacacctcgtaggaaactgttctcctgctttgatttcatgcgccacctttgggacaatctaagaacttacaggttttgcttggccagatttattaggaattgtatgcactgaaacactgaaaaccaactagtggttctgtgcttcccacgttgtggttttgacaccagcagcatccttgccacaatcaaaccccg

SEQ ID NO: 156535 - DNA, 274 bp, Homo sapiens
agcctcgggcgcagcctagcagcggaaagggyggagcttcactcctcctttccatcagtcacccccaactttcccaggctacacctcgtaggaaactgttctcctgctttgatttcatgcgccacctttgggacaatctaagaacttacaggttttgcttggccagatttattaggaattgtatgcactgaaacactgaaaaccaactagtggttctgtgcttcccacgttgtggttttgacaccagcagcatccttgccacaatcaaaccccg

SEQ ID NO: 156536 - DNA, 260 bp, Homo sapiens
ggtgggtttaaatagcctcgggcgcagcctagcagcggaaagggcggagctkcactcctcctttccatcagtcacccccaactttcccaggctacacctcgtaggaaactgttctcctgctttgatttcatgcgccacctttgggacaatctaagaacttacaggttttgcttggccagatttattaggaattgtatgcactgaaacactgaaaaccaactagtggttctgtgcttcccacgttgtggttttgacaccag

SEQ ID NO: 156537 - DNA, 273 bp, Homo sapiens
agcctcgggcgcagcctagcagcggaaagggcggagcttcacycctcctttccatcagtcacccccaactttcccaggctacacctcgtaggaaactgttctcctgctttgatttcatgcgccacctttgggacaatctaagaacttacaggttttgcttggccagatttattaggaattgtatgcactgaaacactgaaaaccaactagtggttctgtgcttcccacgttgtggttttgacaccagcagcatccttgccacaatcaaacccc

SEQ ID NO: 156538 - DNA, 273 bp, Homo sapiens
agcctcgggcgcagcctagcagcggaaagggcggagcttcactcctcctttccrtcagtcacccccaactttcccaggctacacctcgtaggaaactgttctcctgctttgatttcatgcgccacctttgggacaatctaagaacttacaggttttgcttggccagatttattaggaattgtatgcactgaaacactgaaaaccaactagtggttctgtgcttcccacgttgtggttttgacaccagcagcatccttgccacaatcaaacccc

SEQ ID NO: 156539 - DNA, 273 bp, Homo sapiens
agcctcgggcgcagcctagcagcggaaagggcggagcttcactcctcctttccatcagtcacccccaactttcccaggctacacctcgtaggaaactgttctcctgctttgatttcatgcgccacctttgggacaatctaagaacttacaggttttgcttggccagatwtattaggaattgtatgcactgaaacactgaaaaccaactagtggttctgtgcttcccacgttgtggttttgacaccagcagcatccttgccacaatcaaacccc

SEQ ID NO: 156540 - DNA, 260 bp, Homo sapiens
ggtgggtttaaatagcctcgggcgcagcctagcagcggaaagggcggagcttcactcctcctttccatcagtcacccccaactttcccaggctacacctcgtaggaaactgttctcctgctttgatttcatgcgccacctttgggacaatctaagaacttacaggttttgcttggccagatttattaggaattgtatgcactgaaacactgaaaaccmactagtggttctgtgcttcccacgttgtggttttgacaccag

SEQ ID NO: 156541 - DNA, 260 bp, Homo sapiens
ggtgggtttaaatagcctcgggcgcagcctagcagcggaaagggcggagcttcactcctcctttccatcagtcacccccaactttcccaggctacacctcgtaggaaactgttctcctgctttgatttcatgcgccacctttgggacaatctaagaacttacaggttttgcttggccagatttattaggaattgtatgcactgaaacactgaaaaccaactagtggttctgtgsttcccacgttgtggttttgacaccag

SEQ ID NO: 156542 - DNA, 437 bp, Homo sapiens
aaaagtatgatagtggacaggatatttgtttaatccatttttaagactgacaataataaccagactagttgcctcattcttgtttggttggtcagttgttayatatttgtgtatagccagtaggatgaatttaaactatatacaactgtttgtgtgtgtgacagagagagggacagacggtgagacagagacatagagacacagataaaattagagaatgtgttttaagtaaattatttaaaatactgaaactttcaggaaactgatctccctgaatggagacttctttacctactttgagaccttacaatttaaagtggggtcctcaaaccacagggatcgggatcacctaggagctttaaatggcgtatctcagaaccaccctgacctactgaatcaaaatctgcattttaataaaatccccaggtgatttttat

SEQ ID NO: 156543 - DNA, 439 bp, Homo sapiens
agtgaaattgcataagctcattaaaagtatgatagtggacaggatatttgtttaatccatttttaagactgacaataataaccagactagttgcctcattcttgtttggttggtcagttgttacatatttgtgtatagccagyaggatgaatttaaactatatacaactgtttgtgtgtgtgacagagagagggacagacggtgagacagagacatagagacacagataaaattagagaatgtgttttaagtaaattatttaaaatactgaaactttcaggaaactgatctccctgaatggagacttctttacctactttgagaccttacaatttaaagtggggtcctcaaaccacagggatcgggatcacctaggagctttaaatggcgtatctcagaaccaccctgacctactgaatcaaaatctgcattttaataa

SEQ ID NO: 156544 - DNA, 287 bp, Homo sapiens
tacaactgtttgtgtgtgtgacagagagagggacagacggtgagacagagacatagagacacagataaaattagagaaygtgttttaagtaaattatttaaaatactgaaactttcaggaaactgatctccctgaatggagacttctttacctactttgagaccttacaatttaaagtggggtcctcaaaccacagggatcgggatcacctaggagctttaaatggcgtatctcagaaccaccctgacctactgaatcaaaatctgcattttaataaaatccccagg

SEQ ID NO: 156545 - DNA, 476 bp, Homo sapiens
aaatggcagcaaaggagcatcgcttccactcaacacacagcaaagttttctgtagaccatatttccttttctttctttctttaatttcartttttattttagatttgggggttacatgggcaggtttgttatatgggtgtattggataactctgaggtttgggcttcaagtgatcatgtcacccaggtagtgagcatagtacctaataggtagtttttcagcccttgccccactccctctctctctcttctagtgtctattgttcccaccttggaaaccatgtttagcatctctctcacccaggtgacaccctctgtcagattccacccaactcttctgtaggttaagtaatcacaccagtgagatatttgtgttttaaaagctttcgtccttttcccatttgaaattactattactcaagactccacatttcaactaaagtgtgaaattagtaattatcattatcaatattaatc

SEQ ID NO: 156546 - DNA, 476 bp, Homo sapiens
aaatggcagcaaaggagcatcgcttccactcaacacacagcaaagttttctgtagaccatatttccttttctttctttctttaatttcaatttttattttagattygggggttacatgggcaggtttgttatatgggtgtattggataactctgaggtttgggcttcaagtgatcatgtcacccaggtagtgagcatagtacctaataggtagtttttcagcccttgccccactccctctctctctcttctagtgtctattgttcccaccttggaaaccatgtttagcatctctctcacccaggtgacaccctctgtcagattccacccaactcttctgtaggttaagtaatcacaccagtgagatatttgtgttttaaaagctttcgtccttttcccatttgaaattactattactcaagactccacatttcaactaaagtgtgaaattagtaattatcattatcaatattaatc

SEQ ID NO: 156547 - DNA, 476 bp, Homo sapiens
aaatggcagcaaaggagcatcgcttccactcaacacacagcaaagttttctgtagaccatatttccttttctttctttctttaatttcaatttttattttagatttgggggttacatgggcaggtttgttatatgggtgtattggataactctgaggtttgggcttcaagtgatcatgtcacccaggtagtgagcatagtacctaataggtagtttttcagcccttgccccactccctctctctctcttctagtgtctatygttcccaccttggaaaccatgtttagcatctctctcacccaggtgacaccctctgtcagattccacccaactcttctgtaggttaagtaatcacaccagtgagatatttgtgttttaaaagctttcgtccttttcccatttgaaattactattactcaagactccacatttcaactaaagtgtgaaattagtaattatcattatcaatattaatc

SEQ ID NO: 156548 - DNA, 457 bp, Homo sapiens
atagttaaactgacgtacattaaatgcatttgccattaaactttcattccccacttactaggtgtaaacttgggcaagtcaccaaaccactctgagcctcagtttctttttctggcaatggggatgataccttacaagcttgtggtgaggacaaagttgaataatgtaggtaaaatattgaatacatattaagtcccttctccttttcttagctcttaccattgcgaatgcctacacttgtctgataacattttatttaactaattactttttcctcaaaatacaaagtactactgaccatagaagttgttgattacttgaaaccaggggccatatcttacatgttgatcagtcaggtacgtactgaacgttactattttcctaacaagtcayagactaccaataacatgtagcaccatgctaggtacattgtcggtgagcaataaataaataaatg

SEQ ID NO: 156549 - DNA, 457 bp, Homo sapiens
atagttaaactgacgtacattaaatgcatttgccattaaactttcattccccacttactaggtgtaaacttgggcaagtcaccaaaccactctgagcctcagtttctttttctggcaatggggatgataccttacaagcttgtggtgaggacaaagttgaataatgtaggtaaaatattgaatacatattaagtcccttctccttttcttagctcttaccattgcgaatgcctacacttgtctgataacattttatttaactaattactttttcctcaaaatacaaagtactactgaccatagaagttgttgattacttgaaaccaggggccatatcttacatgttgatcagtcaggtacgtactgaacgttactattttcctaacaagtcatagactacmaataacatgtagcaccatgctaggtacattgtcggtgagcaataaataaataaatg

SEQ ID NO: 156550 - DNA, 543 bp, Homo sapiens
ctgttgtccagtggcctgaaaaaaaatgtattgtgtctagatttccatgtgctttaggaaatctagctcctgttactccatygtgagcagtagtaaaatttcaccacattttttttaattgacaagctaattctaaaacttattgtaaaagcaaaaaatatagattaataaatagaatgtcaaaaaagaagaacaaagttagaggatttcctctacctcatttcaaaatgtactataaagctacaatatggtattagcctaagaatagattatgtgttctcaatagaagtggtagcactcccaaggggatggaaactggttcttggaggggaaaacacttattcttttcatgtatgaagcacatatatacatatagcacataaacagatatgtatctctaatatcaaaattcatggagggatggcgaaaagacagtcatatcaacaactgttgctgggaaaactggatatccacatgcaaaagaatgaagctgggtccttatgtaacaccacacacaaaaattaactcaaaatggatctgtga

SEQ ID NO: 156551 - DNA, 543 bp, Homo sapiens
ctgttgtccagtggcctgaaaaaaaatgtattgtgtctagatttccatgtgctttaggaaatctagctcctgttactccatcgtgagcagtagtaaaatttcaccacattttttttaattgacaagctrattctaaaacttattgtaaaagcaaaaaatatagattaataaatagaatgtcaaaaaagaagaacaaagttagaggatttcctctacctcatttcaaaatgtactataaagctacaatatggtattagcctaagaatagattatgtgttctcaatagaagtggtagcactcccaaggggatggaaactggttcttggaggggaaaacacttattcttttcatgtatgaagcacatatatacatatagcacataaacagatatgtatctctaatatcaaaattcatggagggatggcgaaaagacagtcatatcaacaactgttgctgggaaaactggatatccacatgcaaaagaatgaagctgggtccttatgtaacaccacacacaaaaattaactcaaaatggatctgtga

SEQ ID NO: 156552 - DNA, 543 bp, Homo sapiens
ctgttgtccagtggcctgaaaaaaaatgtattgtgtctagatttccatgtgctttaggaaatctagctcctgttactccatcgtgagcagtagtaaaatttcaccacattttttttaattgacaagctaattctaaaacttattgtaaaagcaaaaaatatagattaataaatagaatgtcraaaaagaagaacaaagttagaggatttcctctacctcatttcaaaatgtactataaagctacaatatggtattagcctaagaatagattatgtgttctcaatagaagtggtagcactcccaaggggatggaaactggttcttggaggggaaaacacttattcttttcatgtatgaagcacatatatacatatagcacataaacagatatgtatctctaatatcaaaattcatggagggatggcgaaaagacagtcatatcaacaactgttgctgggaaaactggatatccacatgcaaaagaatgaagctgggtccttatgtaacaccacacacaaaaattaactcaaaatggatctgtga

SEQ ID NO: 156553 - DNA, 543 bp, Homo sapiens
ctgttgtccagtggcctgaaaaaaaatgtattgtgtctagatttccatgtgctttaggaaatctagctcctgttactccatcgtgagcagtagtaaaatttcaccacattttttttaattgacaagctaattctaaaacttattgtaaaagcaaaaaatatagattaataaatagaatgtcaaaaaagaagaacaaagttagaggatttcctctacctcatttcaaaatgtactataaagctacaatatggtattagcctaagaatagattatgtgttctcaatagaagtggtagcactcccaaggggatggaaactggttcttggaggggaaaacacwtattcttttcatgtatgaagcacatatatacatatagcacataaacagatatgtatctctaatatcaaaattcatggagggatggcgaaaagacagtcatatcaacaactgttgctgggaaaactggatatccacatgcaaaagaatgaagctgggtccttatgtaacaccacacacaaaaattaactcaaaatggatctgtga

SEQ ID NO: 156554 - DNA, 295 bp, Homo sapiens
ttaacacagcactcaattttaggatgtattttattaatttctaattatgtgtgtatatgtgtatgtgctttaaaaattagatggtaaatatgattcactgataattatatctctagtcctmagtccaatggaagactagcaattattcagtaaaataattcagtttgtttcaaatgaaagtacctgtgtctgatttgtggtatgaaatcatttgtactttaaagagaatgggaaggcatcataaggaagctgaaagagatttcttgatgcttttaaaggttctggagattatttg

SEQ ID NO: 156555 - DNA, 295 bp, Homo sapiens
ttaacacagcactcaattttaggatgtattttattaatttctaattatgtgtgtatatgtgtatgtgctttaaaaattagatggtaaatatgattcactgataattatatctctagtcctaagtccaatggaagactagcaattattcagtaaaataattcagtttgtttcaaatgaaagtacctgtgtctgatttgtggtatgaaatcatttgtactttamagagaatgggaaggcatcataaggaagctgaaagagatttcttgatgcttttaaaggttctggagattatttg

SEQ ID NO: 156556 - DNA, 643 bp, Homo sapiens
aagtaattaggctgcaaatattttcagatattactaagtcaaaagagtgttttggcatgcaaaagaatgtctcggcagaaaacaatgaaatgagaaaaatgggcacaggtattctctctttcatgtaactgatrttatcctggaaattccaaaatccaatttttataaaaattactagtgaagcaattcctcagcataatatagaaaaagatccctttttaaaataaagattcattttaattgcctttgtgtgtttacagatattgataatataaagtaccatatacctatagaaaaaaacattattcagagtaaaaggcataagatatattaagagaaacaaagactgtgcaaaaaaaaaaaaaccctcacatttattaaagtgggttaaggactgcagtttctcacactggaaagagaaaatgagctaataatattatataactaacaatttatgatgtcctgtaccaaacaggcactcagaaaatatatatgcttggtgataatgagttatgtagaactaaaaaaaagaagaagaaagctatggaataaacatgagattcacaaaagataaagcaaataatgaaaattataatatttgaatttttaaaaaattatttagcacttaattacaggtattaaa

SEQ ID NO: 156557 - DNA, 532 bp, Homo sapiens
gatattctaattacagatgaaccataatttacttaccaaatcttatcaataggcatttaagttgtttccagttttttactattgtaaattctatcatggtgtcatccaaaagaccaccaggatggctaatagtagagaggagagttttagtggcgatatcagtttgcaaactgggaagagacagtctccagcttgtaccagaggtgctctctcctcaaagaggaaaagagaagagttgggttttrtgcctcacagggcctgtattagataatagatttatgcatattcagcaagtttgggggaaaggctatacatatttatgaggtgtgttgaatgcatgcataataggcaaacatatgtaatatgcatcccatatttacttcggggtggggttttggcattaaaattatggaatttggctgtttacatcaataagtgaaccataggacacagtttgtgtgcagtctctataagctggttgaaatatgcttaaggtctgcagttgcttatcaggaaaggatgtaagaccagt

SEQ ID NO: 156558 - DNA, 532 bp, Homo sapiens
gatattctaattacagatgaaccataatttacttaccaaatcttatcaataggcatttaagttgtttccagttttttactattgtaaattctatcatggtgtcatccaaaagaccaccaggatggctaatagtagagaggagagttttagtggcgatatcagtttgcaaactgggaagagacagtctccagcttgtaccagaggtgctctctcctcaaagaggaaaagagaagagttgggttttatgcctcacagggcctgtattagataatagatttatgcatattcagcaagtttgggggaaaggctatacatatttatgaggtgtgttgaatgcatgcataataggcaaacatatgtaatatgcatcccatatttacttcggggtggggttttggcattaaaattatggaatttgrctgtttacatcaataagtgaaccataggacacagtttgtgtgcagtctctataagctggttgaaatatgcttaaggtctgcagttgcttatcaggaaaggatgtaagaccagt

SEQ ID NO: 156559 - DNA, 471 bp, Homo sapiens
tgtaccagttttgcatttccaccatcagtgaacaaggatctctgttccttacatcctaaccagcatttgatattgtcaggttttccctccctccacccctcctttccttccttccttccttccatccatccttccttctttccttccttccttcctcacttccttccttccattccaatagatttctagagtatcacatgtggctttatttttccatttctgtaatgactgatgtgccgagtgtcatttcatttgcttatttgcyatccatatatcttttttggagaaatgtctgttcagatcttttgcctattttatcttttttagagatgagatctcagtatgttgcccaggctgcagtgttatgattattcacaggtgatattataaggcactctagtcctgaattcttggactcaagtatctacctgcctcagcctcctgaatagctgtgactataggcccttgcaa

SEQ ID NO: 156560 - DNA, 663 bp, Homo sapiens
tatcagatggagataaggaacttgttggtaactggaataaaggtgacccttgctatcctttaacaaacagactgacagcattttgccctgccctagagatctgtggaaatttgaacttgagagagatgatttagggtacttgggggaagaaatttctaagcatcaaagcattcaagaggaagcagagcrtaaaacaaagtaagatggttgtaagggatggtcaagaatatacttcagctagagcaacggtttccaaatgcttatggatcactggttccactgtgaaaaattatcttttccagcatcaaaatatggtatactaagtgacttttttatcagaaattatatttttcttgcttttggtgttatgatgtttagtgtttcttgtttaatgttatgattttaattgtaaaatcatatttatgttgaaatagcatattttaatttcatgatattttcagcgcttatcggtttaatatatttttattttctcttctaagtggcctaaaatcttcaaattctggaatctattctttaaataatctctgtatcagtcaaggctcttagttgtatgaaacagaaaataactctggataattgaaagagagaaagaattcattagaaagatactggacagttcattaactctctaggagggggtta

SEQ ID NO: 156561 - DNA, 390 bp, Homo sapiens
tgacagtattaaccatcacagttggtgtattggatcttattgttttgctgaaaaaaataaaaagaaataatcagttytaaaccaggctaggttacacaactgatcaaattgcactgttgaaatgaatggcatatagctctgatttcctcaaattataaaataattctttatcatctgtgaaaaacaatattgccaaacattcacatgattgaggcatttttttatatataagattgttgaaactacaggacataatgtctatctcttgatatatctttaatatttttaaaaaataactatgtaattttctaataaatatgtattaatcaaaaaagaaaatctaagcaacaaaaagaactgagtgttacataccagaaagctgtactttta

SEQ ID NO: 156562 - DNA, 576 bp, Homo sapiens
acaaagaacaaaactgataaaactatttgctgtgcttaaatttgcattcattaaatttggggatgatttctttttattctttytattctcaagtgtatacattttattccaaatgagtaaaaaacaaaacaaacatacctttattactaaagttttccaacataataggttctctttcagttataaatatttataattttcaattttcccgattagtttttagtacatttagagccattgccacccataaaaatggtcttaacaaaatattatattaaaatattggggaatgacacactagatttaatacctgggtgattaagtaatctgcatggcaaacccccacgacacaaggtaacctatgtaacaaacctacacatgtaccccctaacataaaagttataaataaataagttaattaattaaataagtaagtaaaggaataggtgcgacatccgaagaaatttttaaaaacatttgatttcagaattttataatagtccttcatttggggaggggtgtagatatctgagattcagggtaaaagggttttaaatagtgagcagctgacccaca

SEQ ID NO: 156563 - DNA, 470 bp, Homo sapiens
agatatacctaatgctaaatgacgagttaatgggtgcagcacaccaacatggcacatgtatacacatgtaacaaacctgcacgttgtgtacatgtaccctaaaacttaaagtataataataataaagttaagaaaaaaataaaaacaacgatccaaaaattttttcataattctggaaatattttcatcagctattcctataaatcatttaaatatctttctatcatataagaagaggaccgcaattaagacttaatactaaaaaaaatcaaatcatttttcaactttttttgtaccttgtaaatttacttcagtaaagttgaccttttttggagatcagttcaagaaatcgtagcacgtgcagagattcgtgtaaccaccacaccaatcaggcttcagaatagtkatattacttacaaaaaaaatcttcctggggctaccctttatagtcacagcaggccccaacacct

SEQ ID NO: 156564 - DNA, 584 bp, Homo sapiens
tggctctccatggtctgcagtctatacatattccattttcagcaggttgtagagacttattaaccatttttcaatgctaattccaaattccaaggagaaaaaagtctgattggcccagttaactaatggacaaagacctaggatcatgcagaacaaagttagctgcccacaagccttctccatggaagaatgctaaggatatgacttgtggactaagcaaatgcttccaacatagtctataaaagacagttagggctgggcgaggtggctcacgcctgtaatcccagcacttttggaggctgaagcgggtggatcatgaggtcaggagttcaagactagcctgaccaacatagtgaaaccccatgtctaataaaaatacaaaaaattagccaggcatggtggcacaacacctgtaaattccagctgctaaggaggctgaggcaggagaattgcttgaacyctggaggcagaggttgcagtgagccgagatcttaccactacactccagcctgggcaacagagcaagactccatctcagttaaaaaaaaaaaaaaatacagtaatgttttcctcttcagatactg

SEQ ID NO: 156565 - DNA, 584 bp, Homo sapiens
tggctctccatggtctgcagtctatacatattccattttcagcaggttgtagagacttattaaccatttttcaatgctaattccaaattccaaggagaaaaaagtctgattggcccagttaactaatggacaaagacctaggatcatgcagaacaaagttagctgcccacaagccttctccatggaagaatgctaaggatatgacttgtggactaagcaaatgcttccaacatagtctataaaagacagttagggctgggcgaggtggctcacgcctgtaatcccagcacttttggaggctgaagcgggtggatcatgaggtcaggagttcaagactagcctgaccaacatagtgaaaccccatgtctaataaaaatacaaaaaattagccaggcatggtggcacaacacctgtaaattccagctgctaaggaggctgaggcaggagaattgcttgaactctggaggcagaggttgcagtgagccgagatcttaccactacactccagcctgggcaacagagcaagactycatctcagttaaaaaaaaaaaaaaatacagtaatgttttcctcttcagatactg

SEQ ID NO: 156566 - DNA, 554 bp, Homo sapiens
tcaagtttatggaccacacgatttgtttttctgtgagaaaaaatgactttaaacagacacctacatatgtgctcacatagtcatatattttacagtctatttaagtcattgtatcagaatctcgctttctaagggttttctttcaacataaacataatttttagggttttatttaaatataactaagatatatgttattrctgacactgatgggaaactccctgaatggaattacagaattatcattttgatgttagaagatcgaagcaaataaatgatttactagaggacaaagtgaaaggcagaagagagcctagagagcaatataaaatgcaaagatcttaagcctaaagctttggagctcagagtttagtaaagaccattctcccactaaaatgttgaaataggattgagcagaattattcacaattcctgtcccagtttgtagcttgtacatctatttcattgtatttcgtgcatagacaccagttatgaggcagtacactgactggttaaaagtgtaggtatgctctggaggcaaacaaatttaaatt

SEQ ID NO: 156567 - DNA, 520 bp, Homo sapiens
ttgaaacaccagatatgctcaatcaatatttgtttagcatataaagggtatattgaaaagagaaatgcataatcaaaactgggtgtaggaaaatgtatctaattgtatgcaggatggactgcaatgggaaaaagtattagtygaggagactagttaggaagctgcgtaatacagaggatgatgctagaaataagaagaaatgtgagaagtataagtcagttaaaaccagtagaattctgaaactgagctgaagggactctaggtcccttggaataaaaaagtgccattcatataaataaggaatgttagatgacaagtcagcctgggaaaattataaacgataattataagaacaatttcaaattttgcatttgagatgccattgataggcaaaatatatgggactcagacttagcagagaagtcaggaccaaagatgcatttatcagattgtataataattaccaaagtggcatttaggaatgggaaagcagcttagggctacatttccaaatcataca

SEQ ID NO: 156568 - DNA, 540 bp, Homo sapiens
ctgtggcattcgaaaatggtttcctcgggagttgaaaccataaactctataccccattactgagtgtgccctatgttacagaatactcyttattaaaggtgaaaaagcaatctactactctgcaggcttttggtctggagataaacacaagatcatagatcatgtattattatcagttattttaaggtctcagagcaattctttaaacatgtatcaattgtaaggagtaatataaaaggacgctagcttgtcaatttctttttgtcactcaggtctttggcatagactctgttagctttattaaacattaagtattgctttcagggtgaggtagaagagcataagcaagaaaagctttataggctaataaaaatgtaaatgagatgttcatcagcttgctgccctggaaaatgatggaagaaacattacctgaaaaattagattcaacgattattgctaaccaaatcaacctgatatgagaaatccctttgtaaccatttgtgttaatttgcatccttatgtcaatctttctatgcactg

SEQ ID NO: 156569 - DNA, 540 bp, Homo sapiens
ctgtggcattcgaaaatggtttcctcgggagttgaaaccataaactctataccccattactgagtgtgccctatgttacagaatactccttattaaaggtgaaaaagcaatctactactctgcaggcttttggtctggagataaacacaagatcatagatcatgtattattatcagttattttaaggtctcagagcaattctttaaacatgtatcaattgtaaggagtaatataaaaggacgctagcttgtcaatttctttttgtcactcaggtctttggcatagactctgttagctttattaaacattaagtattgctttcaggktgaggtagaagagcataagcaagaaaagctttataggctaataaaaatgtaaatgagatgttcatcagcttgctgccctggaaaatgatggaagaaacattacctgaaaaattagattcaacgattattgctaaccaaatcaacctgatatgagaaatccctttgtaaccatttgtgttaatttgcatccttatgtcaatctttctatgcactg

SEQ ID NO: 156570 - DNA, 556 bp, Homo sapiens
gaatttctatagcttgttaaagtcacatcctcagagtttggaaacctctgagctcactatgtctcaggaagaygggaaattcttcttcttcttcttcttccccttaattaggaatacattgtaataataatattttctatgtgacctttgaatacagtagtaaaataacaagtgggggctacttacttttctcagggatgattcatcctgggatggtgtttagacagtggcctttgagtattggatattctataaacatcgtgtgagttgttcttcttgatgactccctttagtggatctccgaagaccctttagaagcttgctgagggtgggatggaggaagaggctaaagcccccataactgactctcagcaactgtcctctctcacagaatctctcttttgcggtgacccttaaaggcacttggcccatctgctacttatcacttgttcatgtacaactatacattaggccaatatattaggttggtacaaaaataaatgtggtttttgccattatttttaatctaaaaaacctgcaattacttttgcacaaa

SEQ ID NO: 156571 - DNA, 594 bp, Homo sapiens
tagctgggtgtggaggcgtgcacttgtaatcccagctactcgggaggctgaggtagaagaattgcytgaacccaggaggcggaggttgcagtggcccactgcactccagcctgggagacaaagcaagactccgtctcaaaaaaaaaaaaactccaaaataagatttaatcacacattttccttgttgctttctgcagttataatgatctttcctttctctgactcatcagaatttcaacataaggaagaaatggatgaatgaaaaaggggagaataaggaaggaggaagggaggtagacaggaaacatttcttagatctcctattcattcattttaatccctcactacttctggccagttcatcccttgatgaaagataacagcagtagctaaggtgtgcttactatttacccagtcatttgtgttactgttttatataatctttataatgtcttaaagaaagtattcttatcctatagcacagataaaaggactgaggttgggagaggcaaagtagaaaccttgcccaaggttacagagctcataaatggctgagccagggctatgtttttcttctctcgaatcatccatggc

SEQ ID NO: 156572 - DNA, 496 bp, Homo sapiens
gctgccaatcatggcagaaggcaaagaagaagcaaggcacatcttacatggccagagcaggagtaagagagagcaggggggcggtgccacacgytctttaaacaaccatatctcttgagaactcactcaccatcatgagcacagcaccaaggggatggtgctaaaccattcatgagagtctgcccccgattcaaccacctcccatcaggccccacctccaacacttgggactacaatttgacatgagatttggtggggacacagattcaaaccatgtcattaactttctaccattttttttgtgtcatctataatcccaggttcatacccatacccatcttccctgcatactgttgttgaatattatatttattaatttaccattaatacatgtactatttacataatagcttattctcaaaatctgctattgagggagactgagggcaagtttagcaagcattgtcatttttttctgtgactgataagggtctga

SEQ ID NO: 156573 - DNA, 635 bp, Homo sapiens
gtcaactcaactactgagcaatgctgcctcggccacacaggygaccatgctcccagtacctgggtaacacaggagcccctcgcccctttccaacccactcttctcagaaacttcagaggattctttgcaccattaggaccctgaaggcaagcagctttcaggatgtggagtggagcaggatctcacagaggccttggggcagggacggcagtggccccttggccaggagcatgcagcagacagggcaggcaggcttgctcctggtgaaaaagtgacgcccactcagacacacccacaccacacacccagggccatatccaaattgatggcccatcagaaattaagaagccatccagaggaaagatcttttccccagcaacaggtacatgagtatgtgctgtgtgttgaacagaaggaccgagctcccacaagaggatccaaggaatgtgattggtttagtcctggcctcaccatctcccttaaaaatccagtcaacaggactcacttatgctccaagctctcgaaggagatagtcagaaaaaggagaaagagaaaccccataatatcctgccttcattcttcctccatgcccagacattaccctgaccagttctcttcggggctaatgtcaatat

SEQ ID NO: 156574 - DNA, 635 bp, Homo sapiens
gtcaactcaactactgagcaatgctgcctcggccacacaggcgaccatgctcccagtacctgggtaacacaggagcccctcgcccctttccaacccactcttctcagaaacttcagaggattctttgcaccattaggaccctgaaggcaagcagctttcaggatgtggagtggagcaggatctcacagaggccttggggcagggacggcagtggccccttggccaggagcatgcagcagacagggcaggcaggcttgctcctggtgaaaaagtgacgcccactcagacacacccacaccacacacccagggccatatccaaattgatggcccatcagaaattaagaagccatccagaggaaagatcttttccccagcaacaggtacatgagtatgtgctgtgtgttgaacagaaggaccgagctcccacaagaggatccaaggaatgtgattggtttagtcctggcctcaccatctcccttaaaaatccagtcaacaggactcactyatgctccaagctctcgaaggagatagtcagaaaaaggagaaagagaaaccccataatatcctgccttcattcttcctccatgcccagacattaccctgaccagttctcttcggggctaatgtcaatat

SEQ ID NO: 156575 - DNA, 586 bp, Homo sapiens
ctttataccccctcagctcctcacccatctttgttaaataggtatattatgataaaataagcagaagaaaagagatacgttatgattataaagaggtatatatgaacgaaacaaaggaaactgagcataagtctttggttaatgttgagttgagtataatttctggaaaagtagaatgaattggaaaggaccaatgttgaatatcatgttcagagcccctacttaatgttttcttcagacttgggttcacactattttggaaacataggcccccataaaaatgatgacagtgtcttcactgcttgccaaattatatcagggtaaacaccaaggacaaaygcctgattgtgccacagagttggcatagtgccagattttcagccatagtccctgaaaccttgaataagtgtctctaactgagaagttaagccatgtgggtcttgtgatggttgattacaaaatttttttatttctataggtttttggggaacaggtggtatttggttacacgagtaagttctttagtgatgatttgtgagattttggtgtacccctgtgacagttaattttatgtgtcaacatggtt

SEQ ID NO: 156576 - DNA, 570 bp, Homo sapiens
acattttcttttgccaacaaaaaagtttccatactcctaggaaagactaattattctgtagccatagtaacaggtaagcaccaaaatggattttaaacctgtttatttgtaataagacaatttcaaagtaatggagcatgagaagtcattgtaaacctatttaatccatcaacaactcccctcagtaaatatgcttctgaaagccaagtaatcagcatcagccttttgctttggaaaatcagacagtgggaaatggactccctccaatgaatagccttctagcrgtgaacccatccacaacagtctcacctgagtaactacgctcctacaggttacactaccctccactccacccatcagttacctactcttcttctaagagatcacgcccatccagcataactcttcctcacttaaggaaggcataaattcagttttgtgggtttttgttgttgtgctttgtttgtttgtttaagacactgagaagtggtctcatcctttgacactttattgcttctcagtagcactcaaatattgactggtctaagggccttctggctctcctttagg

SEQ ID NO: 156577 - DNA, 549 bp, Homo sapiens
ccttgccctagccaaacaactccagtaccctgcttccctggaactggacttgcccctagagtctgagctgctaagataccctcttcctggggagtggagtcattgctgtgctgctccctgacccccagggcccaaatgacagctgtgctctgccaygctggggtattcgctgccattgcacttggcttcacagagtctaggatacagccaagccccaccatcctggagtctagagtcactactacatggtgcctcattccgtgggacctgagctgccactgagccctattggctcagatccctgaattgcagctgtaccctgctccctaggcccaaacctccagagcaccccttcttccacagagtaaggccagtgctatggcctatcccccagtattagaatcacagttatgagccagtcccctgggcctgagctgctagcgggtgcctcagatcctggctctgtgggcaacctacatccaaccttgccacagagagcaaatctgtaccccaatacccaggtgccacaataggtttgtgagaccctaa

SEQ ID NO: 156578 - DNA, 601 bp, Homo sapiens
cgccacaactgcacagctgtggtagctttgctcacttttctattaataacattacatgttatttataagcaggacattgtaattgtgttgatttcattagtctcttcatatggcttcttttagggtttttaaaagtgaccagctggtttttacgaacatttattaaataattatgattcaaaaatttagcttcaaaacctaaaactttgcttaagttttacttggcaatgacagtgggcataaattatgcaagatgtgatacgtgacaggtggaatgagctgataaaatatctttttgtttctgctgtgagggtagaaaattattaatcccatctggaatactaatcaaaagaaagaagtgctttaaatggtgatgctaatgattttctagaattaaattgcatgtgaaaaatcagatggagtcatgaattaacaaaaattagygtttttagatgaattagggcaatcagaacaaaattacttctgccactttaaaacctgttacttttcgaaatcctcaataaatatgttctgcccttccctgaatcattgtgtctctgttaaaattcatctaccctccccttcaatatctgttattatt

SEQ ID NO: 156579 - DNA, 354 bp, Homo sapiens
ctgttttaagttctttgagaaatgtccagactgctttccacagtggctgaactaatttacattcccaccagcaatgtataagcattccccttcctctgcaacctcaccagcttctgttattttttgactttttagtaatagccattctgactggtgtgtgatggtaactcattgtagttttggtttagatttctgtaatgattagtgatactgagcattttttcatatgcttgttgctacttgtattagtatgtcttcttttgagaagtgtctgttaatrtcttttgcccactttttaaatagggttgtttgttttttgcttgttgatttatttgagttccttaaagattctgg

SEQ ID NO: 156580 - DNA, 560 bp, Homo sapiens
taaaactagctttatttatcaagttttmtgtatacataatacatagagacatagacaaaaatagattttatagtttttataaagaatttttattaattggcttttaaatatatattttttctttttagatgattaatcttttatttatctgttttattgccctaagtaattgataggcaataatttgtttttaaagcaatgactcttacatgaaacaagataaaaaatctgtaccttgaaagcacagagctgagacttcaggcctaaatattgtgctattatttgctcaaatcaaagaaaaagtttttatataaaatcccagttaagacaaaatgaccagaaaaagctcattaaacaaatgtaagactttgtattagtcctttctcacactgctatggagaaaaatctgagattgggtaatttataaaggaaagaggcttaattgactcacagttctgcatggctggggaggcctcaggaaacttacagtcatggtggaaggggaaacaaatgcatccttcttcacaaggtagcaggaaagaaaagtgctgagcaaaggg

SEQ ID NO: 156581 - DNA, 560 bp, Homo sapiens
taaaactagctttatttatcaagttttatgtatacataatacatagagacatagacaaaaatagattttatagtttttataaagaatttttattaattggcttttaaatatatattttttctktttagatgattaatcttttatttatctgttttattgccctaagtaattgataggcaataatttgtttttaaagcaatgactcttacatgaaacaagataaaaaatctgtaccttgaaagcacagagctgagacttcaggcctaaatattgtgctattatttgctcaaatcaaagaaaaagtttttatataaaatcccagttaagacaaaatgaccagaaaaagctcattaaacaaatgtaagactttgtattagtcctttctcacactgctatggagaaaaatctgagattgggtaatttataaaggaaagaggcttaattgactcacagttctgcatggctggggaggcctcaggaaacttacagtcatggtggaaggggaaacaaatgcatccttcttcacaaggtagcaggaaagaaaagtgctgagcaaaggg

SEQ ID NO: 156582 - DNA, 560 bp, Homo sapiens
taaaactagctttatttatcaagttttatgtatacataatacatagagacatagacaaaaatagattttatagtttttataaagaatttttattaattggcttttaaatatatattttttctttttagatgattaatcttttatttatytgttttattgccctaagtaattgataggcaataatttgtttttaaagcaatgactcttacatgaaacaagataaaaaatctgtaccttgaaagcacagagctgagacttcaggcctaaatattgtgctattatttgctcaaatcaaagaaaaagtttttatataaaatcccagttaagacaaaatgaccagaaaaagctcattaaacaaatgtaagactttgtattagtcctttctcacactgctatggagaaaaatctgagattgggtaatttataaaggaaagaggcttaattgactcacagttctgcatggctggggaggcctcaggaaacttacagtcatggtggaaggggaaacaaatgcatccttcttcacaaggtagcaggaaagaaaagtgctgagcaaaggg

SEQ ID NO: 156583 - DNA, 567 bp, Homo sapiens
caagatctggctctgacactacctgccttatgagtctttccactatattgtagtaggtagaaggaggctaggtaagayggatgggcaacgagcaagagagagtttatggtgggatggctgttagactttctggccaatgtgtgaaggaggcttctgccaaacagaaatgaccacagacagcaattattggctgaaagggagctttaataaaattgatgcatcttatatatctccaaaacaagcaataaacttcgctcagtaggaatatgagggattttaacttatggtcctttcctttgagccctaaaaataccatgacaattaagaatacatagatcaaataataatcataacttgcattcactaatgctcttatgctagctggacaccctactctcaatatcgtgttcaatccttccacaaccccttgaggtaggttttctgttactattcccactttatagaatagaaaactgaatattacactaaagctcacacaggtagaaagctgagatttgaacccaggtgtgtctcctccctggggctataatatttcctgtaaaaaag

SEQ ID NO: 156584 - DNA, 584 bp, Homo sapiens
ggataagacagattttgtgacatataccaatctagagctattttgttatatcttcctggagcaatggcagaagcccacagtttggtgtatctgaaatttccactgggaagacaataggataatggaagaaataaggcacaatctttggactgggaaggaagattttcctgtttctctcaggccagtagttcactgggyccagactctaagatacagataccctggatcaattccagcagtgaggatgagctgtccctgggaaggtggcaggagccagcagcaacggcaatgtagagagatggccagtttctgggcagccaggatgtagggcagcagctgtgatgccctacaaactcaagcagtgaggcccagtaccagtaccagtaccaatcatctggtgtcccagtgccagtaggaaggtcaagagcaatcagccctgcctgtaaacttgaggtgagcagcacctcaccctgaggctggagtcaagtcatcaccagccaatacccacatgagacagcagagaggcaatatcagattattccacgctcagccagaagcaagatcagaagatggaacctgacggt

SEQ ID NO: 156585 - DNA, 584 bp, Homo sapiens
ggataagacagattttgtgacatataccaatctagagctattttgttatatcttcctggagcaatggcagaagcccacagtttggtgtatctgaaatttccactgggaagacaataggataatggaagaaataaggcacaatctttggactgggaaggaagattttcctgtttctctcaggccagtagttcactgggtccagactctaagatacrgataccctggatcaattccagcagtgaggatgagctgtccctgggaaggtggcaggagccagcagcaacggcaatgtagagagatggccagtttctgggcagccaggatgtagggcagcagctgtgatgccctacaaactcaagcagtgaggcccagtaccagtaccagtaccaatcatctggtgtcccagtgccagtaggaaggtcaagagcaatcagccctgcctgtaaacttgaggtgagcagcacctcaccctgaggctggagtcaagtcatcaccagccaatacccacatgagacagcagagaggcaatatcagattattccacgctcagccagaagcaagatcagaagatggaacctgacggt

SEQ ID NO: 156586 - DNA, 584 bp, Homo sapiens
ggataagacagattttgtgacatataccaatctagagctattttgttatatcttcctggagcaatggcagaagcccacagtttggtgtatctgaaatttccactgggaagacaataggataatggaagaaataaggcacaatctttggactgggaaggaagattttcctgtttctctcaggccagtagttcactgggtccagactctaagatacagataccctggatcaattccagcagtgaggatgagctgtccctgggaaggtggcaggagccagcagcaacggcaatgtagagagatggccagtttctgggcagccwggatgtagggcagcagctgtgatgccctacaaactcaagcagtgaggcccagtaccagtaccagtaccaatcatctggtgtcccagtgccagtaggaaggtcaagagcaatcagccctgcctgtaaacttgaggtgagcagcacctcaccctgaggctggagtcaagtcatcaccagccaatacccacatgagacagcagagaggcaatatcagattattccacgctcagccagaagcaagatcagaagatggaacctgacggt

SEQ ID NO: 156587 - DNA, 584 bp, Homo sapiens
ggataagacagattttgtgacatataccaatctagagctattttgttatatcttcctggagcaatggcagaagcccacagtttggtgtatctgaaatttccactgggaagacaataggataatggaagaaataaggcacaatctttggactgggaaggaagattttcctgtttctctcaggccagtagttcactgggtccagactctaagatacagataccctggatcaattccagcagtgaggatgagctgtccctgggaaggtggcaggagccagcagcaacggcaatgtagagagatggccagtttctgggcagccaggatgtagggcagcagctgtgatgccctacaaactcaagcagtgaggcccagtaccagtaccagtaccaatcatctggtgtcccagtgccagtaggaaggtcaagagcaatcagccctgcctgtaaacttgaggtgagcagcrcctcaccctgaggctggagtcaagtcatcaccagccaatacccacatgagacagcagagaggcaatatcagattattccacgctcagccagaagcaagatcagaagatggaacctgacggt

SEQ ID NO: 156588 - DNA, 400 bp, Homo sapiens
cctagttggcctttgatagctatgggaagaagggatggggaataataaaagccatgcttctcagcagcccagtggtgatgtctgacccattaatgacaagaaaacaggacctccttctccctgttgtctcccttccaaagcctttgactcctttacccccataataatgacatgcaaatatgcctttaggttgttgtcataacagatctggccactgctccacctgacctcaactccattgttcaaatctgcttggcttgaccttagtgactcagtccaaattgttgagagagggactccaattrgctctgctttggacagaggttcatgagggattcaacccgatgtggacataaaagcagatcaccagggaagaacatgtcttcctaggtctatttat

SEQ ID NO: 156589 - DNA, 564 bp, Homo sapiens
tgtcttagaaagcgcttgtgtattttaaagaaacatttcatgcattttaaccagagatttcctctgtgtgtttatttccaatagtgtgagtgccaaagggtggtcagtttgctgcatctcatctgtggttgttggggtaagattaggggcccgcctgaggacactgaaagatgggagacacgagtaaattggaagtcagtggggttcatctattcctcattgttcagtggggggcaggatgttggaaattcttccgaagtcagggtgcwtgcagatggtgtattttatgcaagccatcattgtaatgcttcctgtttgaatactgctttgcagattagaattccttcatacacactctgccagtcactaggcagcaggaagtctgctggtcttgtctctttacatcctggggtgtgtgtagggtgaccctatgctcggatagggtgcacagcctgacaatgacaggagccacgcctttataaaacagctaccatgtccccagcatgtaatctttgatgggtgactcaacctccctcatattcctatgtaagggcttgtgaggat

SEQ ID NO: 156590 - DNA, 587 bp, Homo sapiens
acactatttaaaattatctttgaaacattttacaattctagctttttccctttggagtgtatcggttcctcaatttaatagaaattcgtaatattgttgctatatagtataccacattgaaaaatggaacgtttgatcacatttgatcatagtgcaaaatttgttttatatgattcaccgagggtaatgatgaaagcacttgtgacaaggatatttgaggtgagtctggctaaacacagaaggaaaacgcgtcatgaaaagatcgatccagttatcttattaccagacaagtaaggcccagaaaggcaaactgatttgtctaaagttctgcagttcagcgtgaagtgaagcaagaaagagaaagcgtggcttttgmctcttacttcagccttttccactaccctggtctctacttcacagaaggggctgacttccataaagtagagaccagggtagtggaaaagggtctctccaggcccatcttgcacatctataaatgatcttacgctgacccagtgtcttaacttcacacaccccctgaatcagtagttcaaggtacactgagagcccgcctacaaaattggtca

SEQ ID NO: 156591 - DNA, 633 bp, Homo sapiens
tatcttcctttcagatgcaattgaatcttcatcattaggtcatatctggcctggccaaataaagcattctatttagaaaatggaacactttgttcagccagcatctctccatttcacttaaaaaaaaatagacgcagtggacttgtgacttccaaattatttcatgcagttggtttgcccatgttctgatgcacaatagatgtgagtgagctttggaaatcctgagggcaaagragaatacacgtgatttggtagagtggcagaattttctccttatatgttccttacgtgtatgtgtgtatatatacatatgcatgtacacacacaaataacacacatatacaacacatatatatgctatatatagcatatataacacatattatgttgtatatgtatacacacatgtatgtagatataacatgacatgcatctataacatatataatatacatatgtgtatattaacatatataacatatatacatatataacatatctattatatgtatttaatttctttggtacattcatcatttgttaaacacacaaaaaatgagggaagtatagttctaaatatcattaaaggaaaataaactgtgaagctcagttaggcttcttcatgttatacct

SEQ ID NO: 156592 - DNA, 614 bp, Homo sapiens
cctacatttgttggctgaatactttgatcatatcttcatacaataacaatgttgtaatgttttctatagaaagataatttgatctttaccttagcatcattgattgagacttttacartcattggtagaaaagtttcagtatcacaacttgcattaatagtgtcattcaacattttaagactgttgtcagatttgggaaaatctatcaagtttccttcatacatgaatgtgagggcttggaagaattttccacagactagcttctggatttacacatttcaaaacctgtttctcctccactaccatgtatttttcagcgatgggtatcccagaacatgttcacatagcgctaagaccactaagcctgaacttttgcatcgtaacacttaagggtcagcatggtggtcaatggaaatattcccacaagtcattcctatcttgggaggtactagcagtaacttaaccatacaaagaagagactgtgaaatgtctttctctctgtctatttctccagatcccactacacccaggctacaaatatccccaatttcccatctcaacttctgtttagttggctcctcgaaattcccaagggcatcctagcactacccaac

SEQ ID NO: 156593 - DNA, 614 bp, Homo sapiens
cctacatttgttggctgaatactttgatcatatcttcatacaataacaatgttgtaatgttttctatagaaagataatttgatctttaccttagcatcattgattgagacttttacagtcattggtagaaaagtttcagtatcacaacttgcattaatagtgtcattcaacattttaagactgttgtcagatttgggaaaatctatcaagtttccttcatacatgaaygtgagggcttggaagaattttccacagactagcttctggatttacacatttcaaaacctgtttctcctccactaccatgtatttttcagcgatgggtatcccagaacatgttcacatagcgctaagaccactaagcctgaacttttgcatcgtaacacttaagggtcagcatggtggtcaatggaaatattcccacaagtcattcctatcttgggaggtactagcagtaacttaaccatacaaagaagagactgtgaaatgtctttctctctgtctatttctccagatcccactacacccaggctacaaatatccccaatttcccatctcaacttctgtttagttggctcctcgaaattcccaagggcatcctagcactacccaac

SEQ ID NO: 156594 - DNA, 442 bp, Homo sapiens
attcattcttgtatcatccactcaatctttattgaccaattactgtgttttgggcattgggctactaagatgaataaaaatcagtctctgtcttcaaggacagtttagtcaaggcatttaaacctgggcttcatgagggaacatcaggagggttcctaaaattataagcataactttgcatttatgttaatttttctggggagagaatctgtaacttttgttagaatcctagaatttttgttatctgcaaacagaatctaatgagagttcaagcasaaataaaattttaagaagagggctcaaactgataaaatacgcatcgttagcaccagaggccagcaaagtgggcacatgaatctctgtggagtaggagtcgtgccgatttaagaagctctctcatggagagtccagtgagcctcctggtgttgagcacgtcgttgag

SEQ ID NO: 156595 - DNA, 528 bp, Homo sapiens
tctttattgaccaattactgtgttttgggcattgggctactaagatgaataaaaatcagtctctgtcttcaaggacagtttagtcaaggcatttaaacctgggcttcatgagggaacatcaggagggttcctaaaattataagcataactttgcatttatgttaatttttctggggagagaatctgtaacttttgttagaatcctagaatttttgttatctgcaaacagaatctaatgagagttcaagcagaaataaaattttaagaagagggctcaaactgataaaatacgcatcgttagcaccagaggccagcaaagtgggcacatgaatctctgtggagtaggagtcgtgccgatttaagaagctctctcatggagagtccagtgagcctcctggtgttgagcacrtcgttgagaaccctggcgacctggctgagcaatcatcacagtctccctgctccttcttcctgaaaaagtgtttctccctcctctctgctttcccaaggccccattcatcctgcagggcc

SEQ ID NO: 156596 - DNA, 556 bp, Homo sapiens
ccagcagtgggattgcaacatcttttttctttctttctctctttttaaagaacaatatatttgtgcttgttctagttatttaaaaatggctatggttgaatcagacaagctgttaaaaggtggaaggaacttcaagctgagggyttggatctggtatagcacaaagttcattttcattatcatcatcaccacctctagcaactattgaggactcactctccactagatattaactgtaaactcatttgatcttcataatactataagctagagggaggtggctgacttttccacttgatcaacacaacattttgcttctagattctttctggtgtatgcatagtccaggcccagaatagaatttccaacttgcatcctggaaacctgctcagggctcaagctgggtataatctggtgttctggtttggctttatctttgggcctgatgagtattgagatctgcatttctttctttcatacattaaatatttctcaagcatctgctatgtgcccagcattttggtgaacaagacagatacgtttcttgctctcatgg

SEQ ID NO: 156597 - DNA, 592 bp, Homo sapiens
agaagcgaatcataaagattaaagcagaaataaccaaaatagagaatagaaaaacaatagaaaaataccaacaaaaccaagagttttttaaggaaagaagcaaaattgacaaaattttaactagattaagaaaaaaatagaaaacaaataaaatcagaaatgaaaagagaagatattaaaactgatgccgcagaaataaaaagattataaacaactactatgaacaataacaagtcaaaaaatagggtaacttaaagacaatttgtgaaaagacattctagaaatattaagtaatgaagcaatgatagttgcagtggttggtggggaagaattctaacagggtttcccaaagaatatacttgtgtggattagcatttggatgcctgtatctcagaacacatggatacacactccaacagtgcacaaccaggtagcacaattttgatctcttttatgtagttctctattctctttacctgagcctgcaaaagccaaaaataaaatcaaaacrataacaaaaaagtatatggaaaagaaagggagaaagtttagctggaacaataaagcagaagaaagtcttttccttcaatgc

SEQ ID NO: 156598 - DNA, 500 bp, Homo sapiens
tcctactcaacactactcttcttcctcaagcactgtcgatactgggatacatttttataagttattttatttgacttgtaccacccatgacagaacgtgagttgctttggggaaaagatgatttattacacatctttagagctccagtgtggagcacagcaattgggacctaagtagggcatagtgaattgttgttgaaggaatctgattcttataatcattttaayagcttaagaaatggaggcagagggcattccaagacggccaaatagaaacggttccattctgtagctcccagcgtgatcgacagagaagacaggtgatttctgcgtttccaactgaggtacctggttcatctcattgggactggttggacagtgggtgcagcccacagaaggtgagctgaagcagggcggggtgtcgcctcaccttggaagtgcaaggggtcggggatttccctttcctagccaagggaaacagtgacagactacctggaaaaa

SEQ ID NO: 156599 - DNA, 368 bp, Homo sapiens
actgagataatctaaatgtgcaaaaataggagattgtttaaataaattggtatgcaacagttaggatcacagaagagaacagatggcactctcaaatggggtaattgaggagtttaataaagagactactttttttaaaatgtggcaaagttaaaggaaaatagctaggatggtaaagtcccttggagttagcaacagtggggaaactggcatcctttgttatccaagttcaaagataataatcacagcttagatattttacttctcattgatgttcyatttaaactctgaaattatcttgactataaagttttaaccttttggggttcccaaaacaattttgcaggatttgagtctatggaagccct

SEQ ID NO: 156600 - DNA, 595 bp, Homo sapiens
gactatctgtgtttggatgtactgaacagtgattttcattttgtgtagggagatctgagatgaattagagaaacttaccttaaaaaamacaaaaggaaaatgagtatatttctgactgtagttcatttcttgataccctaagctgttcactcagagcattacacacacacgtgcatgcgtgcacacacacacacacggagagaaagatacagagagggagagaacaaataaaataattttcaggatagacaaagagtgaaatgggaaaagttcccttatcccccttgcagggcatgtgatgggagtgtggctcgcttcctgggtactcaaaacccctaggcaatcagacagaggggcaggttgtggggctctgacccctgaccccacggcagtgtctaggggtaaatgtttacagctcctgaggccccagtgggcttgtgttaccatgtgctcttttagtttagccatccgtagggggctaaacacagcacaattatatcccttgccttatcaaagggaaagggggctttcagtatcttggagtttcttgccttggtgtaccagaagaaccagataacacatgggcttggagaat

SEQ ID NO: 156601 - DNA, 595 bp, Homo sapiens
gtcagtgcattttttctcctgtaatagactgtatttctttttctttaattttatcctaatagtgctggctccttcacttccccggcttcctttcctccttaaagaaaggtaaaacaattttcttttttctttaaaggaactggcaaagcttaactagaacataccctcaaatattcctcatcttaagtaaatacaatatattgtagactggcctttgtgaattatatgaagtataagtacatgatttattagtcaatttttttttagcgatggaacattcattctataaagtttraatttggggactaaaaagcaacacttcaaaactatctgaagcagtggtagctttcttaaggaatgatgtacactttgagaactgttgtcttttttgtctgttctatgtatgaggtagagggcattgcatttctcatctttgttgggcaaaaggtgagaaattcctcagagcattaagagagcccttaggagaattattcataaagtttggagtttcccctggaaaaagaggcatatcactcactttacttcagaatggtggcctctgtgctgcatggaacctgagtgatgcagtatgaaa

SEQ ID NO: 156602 - DNA, 293 bp, Homo sapiens
atgtttcttgacttcctcacttccaacaaacttttaaaaaatctcctctatttaacattctgataattacatcctagacctgttcatatccagaaccataactatatcagtctgaccccttccatttgcccttgactctaattggtccactacaaactattttttacctaatgtagacctccaacctgtcaatccatcaaacttttccactgtccagyctccatatgctatcttcatttctctttgtacacacttaggctcacaacccattatttatccagttttttgcaaac

SEQ ID NO: 156603 - DNA, 472 bp, Homo sapiens
ctatttccagcatgctcaagaaaagaaattccaactaagaatttcacaacccaccaaaytaagctcataagtgacagagatattaaatccttctcagacaagcaaacaccaagggaatttgttaacactacatcagccttacaagaggtccttaagggaatgctaaagattaaaataaatattgatacctgttaccacaaaaggcatttaaacacataacccacagaaaatataaagaaattacacaatcaggtctacaaaacaatcagctaataacatgacaatagaataaaaatcttacagtttaataataaacctgagtatatatggcctaaatgcccccacatgaaatgcacagggtggcaatctgcataaaaagacaagaccacactttccgctgtcttcaagagatccatctcatgtgtgacaacacctacaggctcaaagtaaagggactgacaaagatctacaa

SEQ ID NO: 156604 - DNA, 472 bp, Homo sapiens
ctatttccagcatgctcaagaaaagaaattccaactaagaatttcacaacccaccaaattaagctcataagtgacagagatattaaatccttctcagacaagcaaacaccaagggaatttgttaacactacatcagccttacaagaggtccttaagggaatgctaaagattaaaataaatattgatacctgttaccacaaaaggcatttaaacacataacccacagaaaatataaagaaattacacaatcaggtctacaaaacaatcagctaataacatgacaatagaataaaaatcttacagtttaataataaacctgagtatatatggcctaaatgcccccacatgaaatgcacagggtggcaakctgcataaaaagacaagaccacactttccgctgtcttcaagagatccatctcatgtgtgacaacacctacaggctcaaagtaaagggactgacaaagatctacaa

SEQ ID NO: 156605 - DNA, 367 bp, Homo sapiens
tattatttctacttttcagataaagatatggtaagaagaggtttgtattagtccattcttacactgctataaagaactatctgagactgggtaacttatgaaaaaataggtagaatggactcacagttgtgcaggctcaacaagaagcatgactggcaggcctcaggatacttatgatcatggcagaaggtgaaggagaagcaaacacatcttaatatggcagagyaggagagagaaagagcaaagggggaagtgccacacacttttaaactatcagaaaactcactcactgtcatgagaacagcaaaggagaagtctcccccatgatccaatcacctcccaccaggccactcctctgacgtgtggg

SEQ ID NO: 156606 - DNA, 587 bp, Homo sapiens
cctggccaataagccaaatcatttaccactccacaagacgcagttacctctggaagctacttctrtgaatgcctactatcagcccttgtctaaagaatacagtcattctgagtttcttattgaggctggtgcccctttcaccagtgcattccttagtgatttggtacattgagtaactcctggtcatttctacagaatgtaattaattagctgatgaatcttacagttgttttaggtatatttactttagtatatttagtttcccttcaacttccatcagccatagctgagctggtatttttacttggcaaaatgtaagccatcactttttccaagcttccaccagccatactagcagagttaacaccatttcctaggacctgtgtcagcatgctaaaatccatatcatcttaaggttctctgctcaccctcctccaacctatcacccttaggattccatttcatgtacagattcaggctaggggtttctattgttacatattagcagaactgaccaccccttcttctctcaaagctgatctagtacttagaacaaggattgtcaaactcatttgaaataaaaagaa

SEQ ID NO: 156607 - DNA, 633 bp, Homo sapiens
tgattattgtttcagtcagctattgtcaggataatgctgcataatgaatcattttcaaactctggcatataatactaagtattttttcttgctcacacatatgtaggtcagctcatctagctgagttagctagtcatgaatacagtccataagctgttttcaggccttttatatgtgtctctcattcaatcatgcaaacatgttctgaggctttactttcattatgtctgctaacatcacattggctaagtcaagacaaatggccaaagctaaaaaagatatgaatatataatggtactacagcagaatacaaaattagagccaacaatgaaacttyaccattcttttctctattggtcacacattcacatctctgctacataaaaaaatattctctcattttaagatctctgaaagtgtcatccaatctttttctcaggttcaaagtccaggatcaaagcacactatataatattcaaagtacattgagtctggaggtagatcctcttgaacaagaaatcaaaaactaagacacatattcaacacataagggtgtaacagagacagaaaacaatatgataaactcttccattcaaaaaggggaagaagcacatagcaatctgtggttcatag

SEQ ID NO: 156608 - DNA, 481 bp, Homo sapiens
atttttaaaaaacttagtgtatagcattgcttattatatatttatagaatttataaaataagaatttcagggtcacaatcgtgagcaagtagagtaggcttctaccttgctggcttttaaaacgaaggwaagagaagaaaacaattgtcatgctatgggtttttagaagtgctgtaccaatgccaggaaaaccaaatgcaataagtgattgttgattgcatccaggatagaaagcaaacaaacaaaactataaagaatactctaggggtgattaagaaaatttgaatatgaactttacattagaaaatataattgtattaatattaaatttcttgagtggaaaatggtattatagtaaagtaaaataatattgttcttagataacagattcttaattattgggggatgcgattaaactgtcaggttgtctgtgatttacattcaaatgatcttacttataatttcttttgaaatagcaata

SEQ ID NO: 156609 - DNA, 598 bp, Homo sapiens
atcttgtcagacacggggctaggcattttatctatatcttatcaacaacccaacaactatcctattaagtaagaattactgtcccacatttgatagctgaggaagcagaaggttagagatgaagcagtatgtccaagtccaccctaaaagtgctggctagaattcaaaccctagtgtgacatcgacgctcttcccaactaaatttattgcctcctgacagtctaacatacttagactcccrttatgttcctgccttcctggctggtctggctttcaggtgacagacactaatcctgcatggcactcctcacttgctctttccatggttgcccataatctgtcactgacagcagcttaaagaagctcccagattctcagagataatgatactggaaatatgcgggactaactactccttatgtggacctactgtccttggaggacacaggaggttgggagaatcagtgctttagtacaggcttcccttctccagatctgtttacccacatatggttctattaatcttctccacataatcatatccaatatgtttttctgctctttcaataaaggagaattaatcgatagtaattataat

SEQ ID NO: 156610 - DNA, 598 bp, Homo sapiens
atcttgtcagacacggggctaggcattttatctatatcttatcaacaacccaacaactatcctattaagtaagaattactgtcccacatttgatagctgaggaagcagaaggttagagatgaagcagtatgtccaagtccaccctaaaagtgctggctagaattcaaaccctagtgtgacatcgacgctcttcccaactaaatttattgcctcctgacagtctaacatacttagactcccattatgttcctgccttcctggctggtctggctttcaggtgacagacactaatcctgcatggcactcctcacttgctctttccatggttgcccataatctgtcactgacagcagcttaaagaagctcccagattctcagagataatgatactggaaatatgmgggactaactactccttatgtggacctactgtccttggaggacacaggaggttgggagaatcagtgctttagtacaggcttcccttctccagatctgtttacccacatatggttctattaatcttctccacataatcatatccaatatgtttttctgctctttcaataaaggagaattaatcgatagtaattataat

SEQ ID NO: 156611 - DNA, 591 bp, Homo sapiens
aatcttctccacataatcatatccaatatgtttttctgctctttcaataaaggagaattaatcgatagtaattataattctctaattagtttcttaatgaaattttaatagaacagtacaaaaccgtagacatacttttcaatagttagaaaaaattttccatataaactcaaaatggcttgcttgtccttatatgttcctgcaggatatttttagtattaattgagtcatcaaatcaagtttattcacattttccactctgtttaaattccattaatgtcttacctccctttagcatatatttctctgccaacttctcatatctgatttgtttcaatcgcttgtctctgattatttaacaccacctatgtcactttgcagtacctagttggctttttaaaaatattatcaacccatccatgcatggccattgaattgattggttttcagtcaaattcttagagttagttatattagatatgcttggggaacatgctcaatccctggcgtttttttggaagtcagcyttactcatggcttctgctcatggcttctgctgaagtggagggtttgagcagccatgttttacca

SEQ ID NO: 156612 - DNA, 586 bp, Homo sapiens
cagacagaaaatcaacaaagaaacattgaacttaatctgcactataaaccaaatatatctaataaatatttacagaacattttatccaaatgctgcagaatacacattctgttcctcagtacatagataactctcagagatagaccataygttatgtaacaaaacaagtcttcaaacattttttaaaaactgaaataatatctagcatcttctctgattacaatggaataaaactagaaataaataaaaagcaattttggaaagcatacaaatacacggaaaatagtatgctcctgaatgccaatggatcaataaagcaattaagaaaatttaaaaattttttgaaacaaatgataatggaaatacaacataccaaacttatgggatacagcaaaagcagtactcagagggaagtttatagctataagtgcctacgtcaaaaaagaggaaaaacttcaaatgaacaatctaatgatgcattctaaagaattagaaaagcaagagcaaaccaaacccaaatttagtagaagaaaagaaataatgattggagtagatacaaacaaaattgaaattaaaaaaacacaaa

SEQ ID NO: 156613 - DNA, 670 bp, Homo sapiens
agtttcgtgtttatttcagcgtttatctggacttcatgatttcctatattttggggttcatgaaatttcacagcagttcattaacatcatatctaaattatattatggaatgtttayagcaaccaacaaccagaggggaaatgtcaaagatattatggtgataggtagatattatttatgataaatgaagagaagttttagaagagttggggttaatattataaactgtcagctaattattgactctattcatgttttataatttttgtttccccttatagactcatgacttcagagactaagatgattaataatcatgcttttcatattaataaaggcagacaaaataagtataataatcaaagtatgtaccaagttctataggagtaagcaataaaaagccatttgttctacctggaagaattgagcctattttatgaggaagccagtgtccatgagctaaaaatgacaaattgagtagtatttcaacaaaacacgagcattctcaaattaataaaggcagaagaggtcatgttatttttagaaaatcataaacaatctgcataggaattgtttagagggctgtaaatgtggatttgggatggaggtaatggaataagaaatggcatgaacgaatgaagaaaataactatggttgcagtgtaaagatt

SEQ ID NO: 156614 - DNA, 670 bp, Homo sapiens
agtttcgtgtttatttcagcgtttatctggacttcatgatttcctatattttggggttcatgaaatttcacagcagttcattaacatcatatctaaattatattatggaatgtttatagcaaccaacaaccagaggggaaatgtcaaagatattatggtgataggtagatattatttatgataaatgaagagaagttttagaagagttggggttaatattataaactgtcagctaattattgactctattcatgttttataatttttgtttccccttatagactcatgacttcagagactaagatgattaataatcatgcttttcatattaataaaggcagacaaaataagtataataatcaaagtatgtaccaagttctataggagtaagcaataaaaagccatttgttctacctggaagaattgagcctattttatgaggaagccagtgtccatgagctaaaaatgacaaattgagtagtatttcaacaaaacacgagcattctcaaattaataaaggcagaagaggtcatgttatttttagaaaatcataaacaatctgcataggaattgtttagagggctgtaaatgtggatttgggatggaggtaatggaataagaaatggcatgaaygaatgaagaaaataactatggttgcagtgtaaagatt

SEQ ID NO: 156615 - DNA, 545 bp, Homo sapiens
actgatggaaaagatatatgagaagcctcaagaagataatttagaacacaaagaagattttctaagtgttaaaattatgacattttaactttaaaagtaaaaaaacaaaatggcattcactgatgagaatcaaatttgtactctgggaagacaaaaagaaaagaaatagttcctaatatataaacacaaagatattttaattatgaaggaaaatgcaagacactggaarggcagatggaatagtgatatggactggaagcagggaaatattgggtacaagagggcggtcccctcaagcctggacccatggtccaaagtgagaacatgcattcctgttttcccacccaaatgtggccttttccaaaaccatcctggcccaccctgccccccatcctgtaaccataaaaaccccaggccccaccagtggagcagcacagtagcagagcagcagagaaggagaggaaagaagagaagcagcagccagatgttggagagaagcaatttgacttcagaaggatggtttgatggcaggaccttggagaaga

SEQ ID NO: 156616 - DNA, 648 bp, Homo sapiens
atgtgttgtatttttctacttttttacatactaggtaatttttgcctgaatcccaaacattgtgaattttttttgttgggtacttttgatatttttgttttttgttgttattgtttttgtttgtttgtttgtgtgtgtgtgtgtattttgagacagagtcttgctgtatcgcccaggctggagtgcagtggcgtgatcttggctcagtgcaagctccaccacccgggtccacttccctagtagctgggactacaggcgcccaccaccatgcccggctaatttcttattgtatttttagtagagacggggtttcaccgtgttagccaggaaggtctcaatctcctgacctcgtgaatctgccagcctcggcctcccaaagtgctgggattacaggygtgagccaccacgcccagctgatagttttgtttttatacaaatgttcttgaggattttttcctatgattcagttaaggtacttggaaacaatttgattcattcagatcttactttaagatttattaggtgaaatggagcagtatttagtgtagagttaattattccccaccactgaagcaaaattcatctgtatactctacctattgtcttctaaagttggaggttttcgactctggctggtggtaatacaaa

SEQ ID NO: 156617 - DNA, 393 bp, Homo sapiens
acctcttttataagagtgctaagtcatgaggatggcactcatgacctaatcatctcctaaggaccccacctcttaatactatcacattggcaagaaagtttcaacatgaatatgtgtgtatgggggagacacattcagaccacagcagcattataaataataaaatacttgggaattaaccaatgagacrtaagacttgtacagtgaaaactctttttaaaaattctgaaataaagaagacaaaaataaatggaaagacatcttttgttcatggactggaaggcttagtattgttaagatctcaatactacccaaagcaatctacatatttaattcaatcactatcaaaatcccaatgaccttttttacagaaataagaaaacccatcctaaa

SEQ ID NO: 156618 - DNA, 527 bp, Homo sapiens
cagcaaatttcttcagtgaattgcatgcattgctcaggccagccatgactgctgkactggctctctgtggccaagtagctctgaagattatgagctgtgtggctgactgagggaaccattccaatctgacagatctgtttgccttttgcttttagacctgatccttgtcttagtatgacttttaatgtcaaattccaaagatcaaaaaaaaaaattatcattagcttaaacttttcagacagtaacagcaattgtcttactgtattgagtcacttggcttactttctaagatgaagtcaagggtgcagaaagtaaaccaaccaacaggcctacatcgctctgagccttttcatactgagaatgacatatttaccttttcttattcagagttccgagttttcgggtttttttttccaagaagcaaatagatgagtagaccaagtgttgatggtaaagatgttgtttattgcttaaaactagtctgttttcttctaaaacagaagaagcattagaagatctctatcttt

SEQ ID NO: 156619 - DNA, 331 bp, Homo sapiens
catgctggtaaatacatggtcctttaattgataatgaaattagaccctagaagaccataagtaatatttgtcagttggggaccgtgtggaaccatgatctacaaataactttagtgatcagtatgtcaacaaaagatccatagggattgaaaaaaaaaaaaaaaacaagtatccataaaatatgaacgttgcctcttggtatatattgtagayttagaaaagatataaaagcatagattctaaagctatgttcatgattctttttgttttttcatggtatcgtcagccacactgcaatgttttgcaggaagtttatgtttccaatgtagtg

SEQ ID NO: 156620 - DNA, 272 bp, Homo sapiens
tgtttgaccaaattctggggagacagcactgataggaagaacttatgtggttacatgtctggcccacgtgtaccagaaacacataaacagaagattcgcccccacagcttctgtagttagaggtggcaatgagacgtaggcacagaggagacactaagaattgcactcctacaaactcattgatccatttgttgattcagctggaagtcaggtgcttacaggaagtggaggaacaagccarttacatcctatgtaaaaataggcatgataat

SEQ ID NO: 156621 - DNA, 514 bp, Homo sapiens
aaactctataccctttagccatcaccccccagtcctcccattcctaccagtcctgggcaaccactaatctactttctacctctatggatttgcctgatttggacatttcatacaaatggaatcatgtaatatgtagtcgtttaaaactggcttctttcccttarcatagggttttcaaggttttcccatattgtagcatgtgtctgcactttgctcctttttatggctgaataatattccattgtatggatataccacattttacttatacattcattagttcatagacatttgggttgtttccaccttttgctattatgaacgttacactatgaacatttgtgtgcaaatttttggttggacatatattttttattttcttgggtgtatatctgggaattgctggatcaaattgtaactctacattaaactttctaaagaactgttaggttgatttccaaaatggctgcacaaccagtgtatgagagttccaattcctctacatccttgctaa

SEQ ID NO: 156622 - DNA, 517 bp, Homo sapiens
gttttcccatattgtagcatgtgtctgcactttgctcctttttatggctgaataatattccattgtatggatataccacattttacttatacattcattagttcatagacatttgggttgtttccaccttttgctattatgaacgttacactatgaacatttgtgtgcaaatttttggttggacatatattttttattttcttgggtgtatatctgggaattgctggatcaaatygtaactctacattaaactttctaaagaactgttaggttgatttccaaaatggctgcacaaccagtgtatgagagttccaattcctctacatccttgctaatacttgttattatctgactttttaattatagccaccctactgggtgttaaggagtgtttcattgtagttttcatttgcattttcataataactaatgatgtcaagcattttttttcaaatgcccattgctcacctgcatatcttctttggagaaacgtctacatgaaccccttgcccatttt

SEQ ID NO: 156623 - DNA, 484 bp, Homo sapiens
tatgttgtctttgggtctaacttacaggaaaatgctgtgtgtattttcacaagcagccaattgtttcaccctaatttctgtacctgaatttgaaaaaaattcactagtttaagtaattktattccgatggtctttttactacagatgtcctgtgaagtgagtaggtctccttatacatgtgtagtttctctgtttttctattttctaaaaacaaacaaacaagcaaaacacagctcaaccctgttattggaaagtcagagggtcagacactcaatcttaaattaattaaaaaatatttggctggtaggaaaacagtgttcctgaacatggtcctttctgagaggtcctgtgaagccccacaagtgcctaagcagggtaagaataagatgagaatacaggggaaaggccgcactggctagctttcaactctttcccccttctgttcaagactagttattcatcgatgagtcttctaccagttgtt

SEQ ID NO: 156624 - DNA, 517 bp, Homo sapiens
tttgccaagcctggtggacagcaggaccaggaaaatgggttgggtgaaataagaagccctttaagccttctatcaaagctttcccttgcaccgtgcttcttcatggtttcagaaagaattagagaacaggagcttcctattaccttttattttgggacttgccaagaaaacctgcccactctgatttccatttttctctaaccagtggagccccaacgacattgctggtaagaccagttctcctctctcttgtcagctttgtgtggtggctctgaattcttattctggtttcactacagaacattaatgagttgatatgtgtctctcttctcagagcctacaggtttagcagcaggctgtgactggactgtttaatattctagtctctagyggatggggcagcagtaacagccaatgctgtgctctcatccatccacccatctttattcctcctgatctattaaagcttccttataaaattgctaagtatgtgctcacggctttctctgaggcaagt

SEQ ID NO: 156625 - DNA, 472 bp, Homo sapiens
actcacacatacacagtcaactaatctttgacaagaatgccaagaatacacaatggggaaagcacaatccttcaattagtattgggaaaactggatatccacatggaaaaataatttaactggactcttatcttacaccatacacaaaaatgaaatgggcaaaagactgtaagaccagaaagcataaacctcctagaataaaacataagaaaaaagctccttgacattggtcttagtaattattttttggatatgacacaaaaagcacaggcaacaaaagcaaaaattaaataagtggtactacatcaaactaaaaagcttctgcacaggaaaacaaacaacaaaatcaaaagaaaacctactaaatgagagacaaaatatataaaccatatatctgataaggagttratatccaaaatatgtaaggaacttacaactcaatagcaaaaaacacacataactcattaaataa

SEQ ID NO: 156626 - DNA, 516 bp, Homo sapiens
aactacatgcctgatatatactacatatatgtacacacatacataaacacacatgcatgtacatataaatatatatacgtgtatgtgtgtgtgatttggctgcatcaacatagctaagccgaatttcatgtccctataattccctctctgattcactagagacatttcacacaagatttggaaggcagaagtcgggcagcagctatgttacttttaactcttagaaggtcagaacagggcttaggacagtatatgcaacttgtacgttgtctcttattttctgccttagtggatcagcatagggctgacttctagcttgctcagcttccaaaccagatgtatgtttagcttcatagtgagggacacctgtattgtcaaagttacaggcttagagcrggcaagagaccatctcagcctccagtccagcctattgcatgtccgtggccatcttctcttactgaatggatgaactagggacttccagctcttgcaccaaatagaaacaagtcacacata

SEQ ID NO: 156627 - DNA, 584 bp, Homo sapiens
tgtttgcataataatttggaataatgattatcagtgtagagttttagctggatcattagaaaatgcacttatggcactgtgattttaagtgtttccttgttgtatccactgttcagttagctcctgctttctcttttctccctttaataatgaccgccaacaaggccttttaagctaggttatgtatagccacaggaatttaggagaggaggaaaagaaaagtggcaacttccaggggaactcaccctttgagccatagactgtggttcttagaagccagaccagtctcattctaaacaccttcagaatatttttagtttgaagaaattggaagggcctggaggcaacagacagccaatattcagtgwttatgtctcatccagctgtcttctgtcactcttcctgcacaaggtgacttttgacttgaccggtgtatctttgatacttactcatttacagaaatgtataatggatgtgtgtgtgtgtgtgtgtgtgtgtgtgtgtgtatgtgtgtatttgtatttttatagagctattgacttctgcaatttaacctctaagatgaattatccaatagaattctg

SEQ ID NO: 156628 - DNA, 535 bp, Homo sapiens
ttaccataagtgaaaagtaacagaaactgtaggtggggatagtctttctgggacattccagcatataaacaatccccaaatagcagaagctgttttggggcatctctccttctctctagctccatcctggttgagctggagctcgctgcagggagaacccacagagagagggcgagaatggtgtgccagtctggcttttccatttcctctctttgtttctgtgtttccactttgcagtttccttgattcagagaaagaagataaaaacacatacaaagagacggcaccagctcctttcccagttgtgaccagattgcacgatacccaagccatggctccaaagagtgcgtgtactgaagcctggccattcatgacagactcatttccacacctgagtccggttttgctctgtgagtgttgggctttctccaagggaatggttggagctgttgcgagcgaacttcctggctgccacagagttgwttggattccttggaaatgcacactcacaggctgctgctctttgaagctgtct

SEQ ID NO: 156629 - DNA, 472 bp, Homo sapiens
gagaataactcaaatatatgcacacaggggcaagtgcaaagatggccactgcatcactgtttataacagcaatgatttgtatgcaacctgcatgtacatccatgctgcattatgtagcacagatatatcatactctggaatactctgttgcagttaaaatgagcaaggtaratccagacttaactaacatggaaaaacttatatatactgagtgaaaatgcgagctgctgaaagataagaacgctatgataccatttatatatacaaacatggacacccacacaaaacaatagtttcttctctgtgggtgcatatatgtatgtaaatgcacaaagaaagtctgaaatgacacacaccaaactgagaaaagtggtttcatctgaggagaagtgacagtggttgggggtggagtctaaaggatactctcactattatctgtaatactttattttttttacaaagatattgaatt

SEQ ID NO: 156630 - DNA, 384 bp, Homo sapiens
gaagcccggaggttcctaataagaagctgaacaccggaagcctggaggttcagaatgagaagctgaacataagaaaccacaagaaaggccttaaaagtttttcctggggaacatcacacaccagggtctgttgtggggtgggaggagkggggagggatagcattaggagatatacctaatgtaaatgacgagttaatgggtgcagcacaccaacatggcacatacatacatatgtaacaaacctgcacattgtgcacatgtaccctagaacttaaagtataataataattaataataagtttttgcctaggaaaagacataagacacattcagcagcagtttcagtcaaaatgagccaagtcatggcacagtaacacgtagcac

SEQ ID NO: 156631 - DNA, 586 bp, Homo sapiens
cataatgccattctaataatgaaaaaatactagacaagctcacattgaggaacatgctacaaataattgaccagctacgttaagaacacaaaagaaaagagggttagtttgctgggactgtcaaaactaagtaccacagactggatggcttacacagaagaaatttattttctcacagttctggaggctggaagtccaagatctgggtactggcagggctggtttctggtgaagcctctcaacatggcttgcagacagctgccttcttgctgtgtcatcatctggcctttgttctgtgcctgtacattcctggcttctctttatgtgttcaaattccctctttttgtaagaatacsagtcttatcagattaagacccattccaacaacctcagctgtacctgtaacctcagctggtacttctgtaaagatcctattccaaataagatcacattctgaagtacttggggttagacttcaacagaggagttttgtgggtacacaacttgggccatcacaggtggtagcaactgaatgtggcatgggatcctggactgagtcctgaagcagaaaaaggaaaggacatca

SEQ ID NO: 156632 - DNA, 586 bp, Homo sapiens
cataatgccattctaataatgaaaaaatactagacaagctcacattgaggaacatgctacaaataattgaccagctacgttaagaacacaaaagaaaagagggttagtttgctgggactgtcaaaactaagtaccacagactggatggcttacacagaagaaatttattttctcacagttctggaggctggaagtccaagatctgggtactggcagggctggtttctggtgaagcctctcaacatggcttgcagacagctgccttcttgctgtgtcatcatctggcctttgttctgtgcctgtacattcctggcttctctttatgtgttcaaattccctctttttgtaagaatacgagtcttatcagattaagacccattccaacaacctcagctgkacctgtaacctcagctggtacttctgtaaagatcctattccaaataagatcacattctgaagtacttggggttagacttcaacagaggagttttgtgggtacacaacttgggccatcacaggtggtagcaactgaatgtggcatgggatcctggactgagtcctgaagcagaaaaaggaaaggacatca

SEQ ID NO: 156633 - DNA, 513 bp, Homo sapiens
agttgatgaatctctttgagactaacagtcacttactccttcacttgtataaggaaagattaaatgttatctatagtgcacataatagttaacaaaccaccctaaaatttggtgatttaaacaccatgatgtattagtttctgtaagtctaagcatctcctgggaatttttgatgtgctcactcttgcttggcagtcagctgcagactggttggattcttgttgatctagtatggcctcagctgggatgagctrtctcttttccacttggcatctgctcttctagcaagctagcctggcttgttctcaagaaagtggcagtattccaggagagaaaatagacacatgcatggtttcttgagtcctagactctgaagtagcgtactatcacttttacctaccaaagcaagtctcacagccagtccagggtcaggagagactccatatcttaaagggaagagctggaaagctccatgaagggcatggttactgaaatgagtggaaagaaaaaatg

SEQ ID NO: 156634 - DNA, 564 bp, Homo sapiens
tattttactggagaacccccaaaatgatgacctttcagacagattcatcagaattaccaaggaagaatcttccattatttcttgcaatctcaaaatttataagtaaatttgtactcattccctggttttactaatgtactgttcttaccttttcctcacttctcatacacagatttatttgctccttttgacacaaatccacaattgccgggctatacaacatagaagaaggaattggggtatcaaagttctctttgaacaaaattacagtatttgccagcttttctccattatcactccctcttctggaagtttccatactactgactcttaagcctgtgggaggtctgcagtaaaaagtaggtagtttcctagctttctaagtgcagccaccagattcagcttttccaggaccaartatgcaagcttcccctaatccttctgatctcaaactgtcaaagttatgttgctgttgtcttttcacttctttttgcttctgtaagtttatttcttttaaaacatttttcatggctgggcatggtagctcacacctgtaatcccact

SEQ ID NO: 156635 - DNA, 589 bp, Homo sapiens
gataaaattaaacagttatatcagatcayagttagagaagaataagaaataacattggtgaagggttatatgtgtcaggcactattgtaaacatgtagacaattaggttagataatacacataagatgtttacaatagcacctggcacatatttccaatttacagttaagaaaagagttacctatcagtttaaggggtagaaaaagtcacatcttagattcaaatggagtgagtttgatgccaaaacccttgctcttaactactatgctcaaaaggtaaaacacaacaaagaaaatatgagatagggagaagtaaatggacggtgcaatactaaaccacactaacacgtttaagtagattaaaaaaaatattgatggaaggaaattatcacagaaataaagaaaatttccctgaagtgtaaaagaaaatgtgttttcaggtttaaagggcatacgaagtgctaagaatatcataaaaaagaccctagacttaaaaaattcttattaacttgaaatttcaagaatcacaataaaatcctaaaaaaaattatataaagaaaaaacattgcacgtaaatgagttacctataa

SEQ ID NO: 156636 - DNA, 563 bp, Homo sapiens
gtgaaatttaattatgagtattgagcacagagctctgctttaaatattttataacaaagataatggtctactctgtacttcaaagcttttttgttttgtttagcttctaaaagttgtcaaaaatttaagagcctggaatttacatcatttgaatttgtatttgttattttaatgtgatttctttagtttagaagtccaatgaattcacattattctaattttatggcagacttagataagattaaaattaaataaactaacagaatcattatttaatatagaaagtacaatgggactacactgaatgtcttctatagaccctagattccggtacaatccgtactataagcataacttcaggtcagataaaaaataatttgttcattcctwtttcaaagatattcattactttagctaaactggacctgcattatctcagaagttagggtggtgatagagtgtagtactgaagggccaactctggaggtagaggggatggatggcttcaaagagttatctaccacttaccagctatgtgacttggaatattactcaattctctg

SEQ ID NO: 156637 - DNA, 568 bp, Homo sapiens
atatttatgtcatggaatactactcagttataaaaagaatgaaataatgtcttttgcagcaacatggaaccggaggtcattattttaagtaaagtaactcaggaatgaaaaaccaaataccatatgttctcacttgtaagtgagaatgctatgggcatgcaaaggtagacagagaggtataatgaacattggaaatttagaaagagggggtgagggatgaaaaactacctgttggaatacaatatatactacttgggtgatgggtacactaaaatcccagatttcactactatacaattcatccacatagcaaaaaaaaacttgtacttctaaagttattgaaaaaaagtcattttaaaaagccttcctcargatatttctctcagaattttttctctttctgaaaacagtttgcataccataaaagttatttgaaaatgattagaaacatgtggcataaaatagaggaattaataaatgaggatttccaatcaagtggcataagtcactagatagtaacagtcctgcattataaatttgtgggtcacaggtacttttgccttcatgg

SEQ ID NO: 156638 - DNA, 485 bp, Homo sapiens
ttacaaagaattctgaatccattcactgctcaatcatgtttcttgacttttgatgcagaaagcaatggaaaatgaataaaacactagtatacctaaagaaaatcccctcccttttctctgtacttgcattacaataaagtaagtgaaaatttccatcatcctaagttattcattcattctttccacacgtacttatagaacctctcccatgtgtcaggctactcaaaaagaatgatgaataaactgacatgaaccctgaccttatagagtttatggtagaatataaaccttggcggagacaatatcggaaatgaatrtctaattacaaaagacagaaacattaaaagacaatgtggcaaacagttttaaagtccaagttctttttgagggagtaatagttcagtgacacctggaggatgaagaaaagttaaccttgcaaagaaaagaggaaaggacatttcagggaggggatcaccacacacaca

SEQ ID NO: 156639 - DNA, 578 bp, Homo sapiens
tttgtgacctttcattttttgatatcagcattaacacaagggctgttttaaatggctttctaaaaaatttcaagtgcatgttttcctatcaagaactgtgttctcaaggttctgagtaaagaagtgtctagttaatggccgatgagaaagtcatcataggtgtgtgtagataatatttaaaagcagttgaatatgcaaggaagagagaacagtcagtagaaatgaaggtgcattcagggagttcttctttcctttgcttgagaccaattagagaaaattaaaatgctgttttcagaaatctaacagagagggagaggctgaaaatgcaagtaggaggagataactgaggtggtagaaatgttagtatctggatagccatacagggaaaggcctctgctagaagaagcctcacttactccaaggttgttagaaggaaaaagaaaagatgagcaaagatttaggtcagttgtatatttgatgacaatatcaattatgatttttaggaagcrtgcagtgcacatttaatatagaatgagaaagggtaggagttggggagaaagagaggtcaggtccttgaa

SEQ ID NO: 156640 - DNA, 503 bp, Homo sapiens
aaaaagagctggtaccattcctactgaaactaatccaaaaattgaggaggaagtactcctcactaactcatcctacgagtccagcataatcctgataccaaaacctggcagagacacaacaaaaacaaaaaacctcaggcctatacctttgactaatatagttgcaaaaatcctcaacaaaataccaacaaactgaatccagctgcacatcaaaaagctagtccactatattcaagtaggctttattcctgggaggcaaggttgctttaacatatgcaaatcaataaatgtgattcaacatataaatagaactaaaaccaaaaaccacatgattatctcaatagatgcagaaaagacttycaataaaattcaacattacttcatgttaaataccctcaacaaactaggcattgaaggaacacatgtcaaaatataataaaagagccatctatgaaaaacccacagtcaacatcatactgaataggcaaaaaacggaagaattc

SEQ ID NO: 156641 - DNA, 548 bp, Homo sapiens
gataggacagatagaaatgcagaagtgggatgcagtttgcaacagaggcctcagctgaccccacagggaactctgaagggctgggacttcagagatatccacaattgaggcaagagggctgagctcttgtaatcccacatagaccagttattagatgtgggctttcctgcaaaaagggagaataactttgggcaaagtagtacccttccacagagggcaaggtctgggggagacacagctgtaagtaattagcagcaaatactcctggctatggtatcatatgtgccttggtcctgaaaaagagcctggatggtataccagagaattcactagaatttacctttggaatgtacagatcctcttgtttcacataggacatctgagacaatctccaggactgcagttggtctcttttcctggaaatttataagaggaagattagtaggatgcaatacaacctctgcatctacagctgttgtgaaagtcayacctcatatccctctactacccaatctagattcctttcaccctcaccccagcctctcaac

SEQ ID NO: 156642 - DNA, 471 bp, Homo sapiens
gcatggcacgtgtatacatatgtaactaacctgcacaatgtgcacatgtaccctaaaacttaaagtataataaaaamcaaaaaaaaaaaaaaaaagaaaataccctaggtcagtggttgtcaaatttttaagcctatatcagaactacatatagggcttgttaaaacatagaatgcaaggttctactcttggaatttttgactcattatggggcagggccctaaaatcggcgtttctaacttgttccaggtgatgctgatgctactggggctaggaccacactttgaggatcactaccctaggaagcttttgttttcacagagtggtgtaccttccaggtacctaaagggtgagtcaagagaccagtcactggcctacagaaagaactgtgtgaaccagatacaagtacataaataataacatggtaagccatgtgctgaaaaaagatgatttgttcttccaacagttttc

SEQ ID NO: 156643 - DNA, 661 bp, Homo sapiens
ttagtctaattaaatgaggagctcaaagaacaagtatttctcrgggtctccatcaacgcatatggtgtaagaggccatgacttgtcacctcaattatcaggtccacctggcagctataaaaaatcagaattatggcttatctatgtttcttgggtttgaatagcatgggtcacagtgtctgatctcccctgggtatactaaaagtatgaggaccataccctatcctaatagctctgaattaatccccagtggtcagccatccctttctctattacattctcattgtgtggactcctgatcagcatcatcatcatcaacagggaacatgttttaaaaatgcaaattctcgggccttcctcaggtttattgaatcagaaactctggagggttggctcagcatcctgcagtttaacaagccagtcaggtgattctaatgcacattgaagtttgattctaacgcacattagatcaactctcttcattagtctacaacgcattctagctctaacattgtaaaattctacaatagtgtattccaagtaagtataagtagtttatagttctacttcagctaagttgaacttttgagagttattccatcatttcctgtgatttctcagctatagctacccctttcaagaagcgaagtctattatgctca

SEQ ID NO: 156644 - DNA, 661 bp, Homo sapiens
ttagtctaattaaatgaggagctcaaagaacaagtatttctcggggtctccatcaacgcatatggtgtaagaggccatgacttgtcacctcaattatcaggtccacctggcagctataaaaaatcagaattatggcttatctatgtttcttgggtttgaatagcatgggtcacagtgtctgatctcccctgggtatactaaaagtatgaggaccataccctatcctaatagctctgaattaatccccagtggtcagccatccctttctctattacattctcattgtgtggactcctgatcagcatcatcatcatcaacagggaacatgttttaaaaatgcaaattctcgggccttcctcaggtttattgaatcagaaactctggagggttggctcagcatcctgcagtttaacaagccagtcaggtgattctaatgcacattgaagtttgattctaacgcacattagatcaactctcttcatkagtctacaacgcattctagctctaacattgtaaaattctacaatagtgtattccaagtaagtataagtagtttatagttctacttcagctaagttgaacttttgagagttattccatcatttcctgtgatttctcagctatagctacccctttcaagaagcgaagtctattatgctca

SEQ ID NO: 156645 - DNA, 627 bp, Homo sapiens
attttcataaggaccatctcagcatttttttcatttacaagttgtacttttggtatcatatctaagatatctttrtctaacttaagctaacaaaggtttttccctatgtttccttacagaagttttacagttgttatagctttagttcttgtatttaggtctgtgatccatttcaatttaatttttgtgtatagtatgagagaagggtcaaggtcgtgtgtgtgtgtgtgtgtgtgtgtatacaatttgaacactaatttaaaaagctatactttcccattgaattactttggcacctttgtcaaaaatcagttaaccatatatgtgtgagtctatttctggactctgttccattgatgtatacatctatttttatgctgaaatcaactgacttgcttattgggcttcatactaacaaagcaacgttttccagattgagtgactttcctggccttgctcacacaagacagagaagcagctgcaagtaaaattggctggaataattgggagtcaccaggcagataccctgtgctttccacacagtatccagatgtagaagacacgctgccttttcctacaacttttcttctgttttgggggttctgatcttgtaagttttatatccta

SEQ ID NO: 156646 - DNA, 627 bp, Homo sapiens
attttcataaggaccatctcagcatttttttcatttacaagttgtacttttggtatcatatctaagatatctttgtctaacttaagstaacaaaggtttttccctatgtttccttacagaagttttacagttgttatagctttagttcttgtatttaggtctgtgatccatttcaatttaatttttgtgtatagtatgagagaagggtcaaggtcgtgtgtgtgtgtgtgtgtgtgtgtatacaatttgaacactaatttaaaaagctatactttcccattgaattactttggcacctttgtcaaaaatcagttaaccatatatgtgtgagtctatttctggactctgttccattgatgtatacatctatttttatgctgaaatcaactgacttgcttattgggcttcatactaacaaagcaacgttttccagattgagtgactttcctggccttgctcacacaagacagagaagcagctgcaagtaaaattggctggaataattgggagtcaccaggcagataccctgtgctttccacacagtatccagatgtagaagacacgctgccttttcctacaacttttcttctgttttgggggttctgatcttgtaagttttatatccta

SEQ ID NO: 156647 - DNA, 627 bp, Homo sapiens
attttcataaggaccatctcagcatttttttcatttacaagttgtacttttggtatcatatctaagatatctttgtctaacttaagctaacaaaggtttttccctatgtttccttacagaagttttacagttgttatagctttagttcttgtatttaggtctgtgatccatttcaatttaatttttgtgtatagtatgagagaagggtcaaggtcgtgtgtgtgtgtgtgtgtgtgtgtatacaatttgaacactaatttaaaaagctataytttcccattgaattactttggcacctttgtcaaaaatcagttaaccatatatgtgtgagtctatttctggactctgttccattgatgtatacatctatttttatgctgaaatcaactgacttgcttattgggcttcatactaacaaagcaacgttttccagattgagtgactttcctggccttgctcacacaagacagagaagcagctgcaagtaaaattggctggaataattgggagtcaccaggcagataccctgtgctttccacacagtatccagatgtagaagacacgctgccttttcctacaacttttcttctgttttgggggttctgatcttgtaagttttatatccta

SEQ ID NO: 156648 - DNA, 627 bp, Homo sapiens
attttcataaggaccatctcagcatttttttcatttacaagttgtacttttggtatcatatctaagatatctttgtctaacttaagctaacaaaggtttttccctatgtttccttacagaagttttacagttgttatagctttagttcttgtatttaggtctgtgatccatttcaatttaatttttgtgtatagtatgagagaagggtcaaggtcgtgtgtgtgtgtgtgtgtgtgtgtatacaatttgaacactaatttaaaaagctatactttcccattgaattactttggcacctttgtcaaaaatcagttaaccatatatgtgtgagtctatttctggactctgttcyattgatgtatacatctatttttatgctgaaatcaactgacttgcttattgggcttcatactaacaaagcaacgttttccagattgagtgactttcctggccttgctcacacaagacagagaagcagctgcaagtaaaattggctggaataattgggagtcaccaggcagataccctgtgctttccacacagtatccagatgtagaagacacgctgccttttcctacaacttttcttctgttttgggggttctgatcttgtaagttttatatccta

SEQ ID NO: 156649 - DNA, 602 bp, Homo sapiens
gtgtgtgtgtgtgtgtgtatacaatttgaacactaatttaaaaagctatactttcccattgaattactttggcacctttgtcaaaaatcagttaaccatatatgtgtgagtctatttctggactctgttccattgatgtatacatctatttttatgctgaaatcaactgacttgcttattgggcttcatactaacaaagcaacgttttccagattgagtgactttcctggccttgctcacacaagacagagaagcagctgcaagtaaaattggctggaataattgggagtcaccaggcagataccctgtgctttccacacagtatccagatgtagaagacacgctgccttttcctacaacttttcttctgttttgggggttctgatcttgtaagttttatatcctaagggaggacattgcaaaaggaatgttcattttccttcccttttgcttgagagaaagacgacttctttagcaccatatatatatatawaaacatatatatttatacgtgggagtgggggaaacatgatttcctttttaaaaaacagtcttaaaatcttggaaacaggtttgtatcaggtagatcttgctgttaatga

SEQ ID NO: 156650 - DNA, 677 bp, Homo sapiens
caagaaacaactggattccttagccttggctctattggtgggtgggctggacatgtttgacctaatgtgggctggctaattcttgtgggtggtccgtcccgtgcactgtaagatggtgagcagcctccctggcctccaaccacctgatgtcagtagctcccccacctcaccycacccgtgggattgacaacagagattcagagtcatgcctctggactcaacttcgtcccatggaaactggttgattggagtttattaacctctctgagactcaatgatctctgtagataacagcagtaattcctgccgcatgacattttggggagagtcactgagtgaagttaggaccaggcacctaaaccacagcctgtcatagagtaagcacttgctattgttgttacagtaaagatctggatactaggtcaggaataaacaaacaaacctaaaatactggccacaatggaaacaaggcctggtccggcaccaatttcaagtatttttgcatcttggaaattcagttcctcggcatgttcctccaagtattgacacaaagccatagcctaaaaaataattataacttttcatgtgggcattggaacattggaaaccagtagcaaccctttctggcacccaaatttaaatactaaaagacatgttattacatatgttcagtttat

SEQ ID NO: 156651 - DNA, 677 bp, Homo sapiens
caagaaacaactggattccttagccttggctctattggtgggtgggctggacatgtttgacctaatgtgggctggctaattcttgtgggtggtccgtcccgtgcactgtaagatggtgagcagcctccctggcctccaaccacctgatgtcagtagctcccccacctcaccccaccygtgggattgacaacagagattcagagtcatgcctctggactcaacttcgtcccatggaaactggttgattggagtttattaacctctctgagactcaatgatctctgtagataacagcagtaattcctgccgcatgacattttggggagagtcactgagtgaagttaggaccaggcacctaaaccacagcctgtcatagagtaagcacttgctattgttgttacagtaaagatctggatactaggtcaggaataaacaaacaaacctaaaatactggccacaatggaaacaaggcctggtccggcaccaatttcaagtatttttgcatcttggaaattcagttcctcggcatgttcctccaagtattgacacaaagccatagcctaaaaaataattataacttttcatgtgggcattggaacattggaaaccagtagcaaccctttctggcacccaaatttaaatactaaaagacatgttattacatatgttcagtttat

SEQ ID NO: 156652 - DNA, 677 bp, Homo sapiens
caagaaacaactggattccttagccttggctctattggtgggtgggctggacatgtttgacctaatgtgggctggctaattcttgtgggtggtccgtcccgtgcactgtaagatggtgagcagcctccctggcctccaaccacctgatgtcagtagctcccccacctcaccccacccgtgggattgacaacagagattcagagtcatgcctctggactcaacttcgtcccatggaaactggttgattggagtttattaacctctctgagactcaatgatctctgtagataacagcagtaattcctgccgcatgacattttggggagagtcactgagtgaagttaggrccaggcacctaaaccacagcctgtcatagagtaagcacttgctattgttgttacagtaaagatctggatactaggtcaggaataaacaaacaaacctaaaatactggccacaatggaaacaaggcctggtccggcaccaatttcaagtatttttgcatcttggaaattcagttcctcggcatgttcctccaagtattgacacaaagccatagcctaaaaaataattataacttttcatgtgggcattggaacattggaaaccagtagcaaccctttctggcacccaaatttaaatactaaaagacatgttattacatatgttcagtttat

SEQ ID NO: 156653 - DNA, 677 bp, Homo sapiens
caagaaacaactggattccttagccttggctctattggtgggtgggctggacatgtttgacctaatgtgggctggctaattcttgtgggtggtccgtcccgtgcactgtaagatggtgagcagcctccctggcctccaaccacctgatgtcagtagctcccccacctcaccccacccgtgggattgacaacagagattcagagtcatgcctctggactcaacttcgtcccatggaaactggttgattggagtttattaacctctctgagactcaatgatctctgtagataacagcagtaattcctgccgcatgacattttggggagagtcactgagtgaagttaggaccaggcacctaaaccacagcctgtcatagagtaagcacttgctattgttgttacagtaaagatctggatactaggtcaggaataaacaaacaaacctaaaatactggccacaatggaaacaaggcctggtccggcaccaatttcaagtatttttgcatcttggaaattcarttcctcggcatgttcctccaagtattgacacaaagccatagcctaaaaaataattataacttttcatgtgggcattggaacattggaaaccagtagcaaccctttctggcacccaaatttaaatactaaaagacatgttattacatatgttcagtttat

SEQ ID NO: 156654 - DNA, 164 bp, Homo sapiens
tttgttgtatattacaaaagtatcagtgtgcagcacactaaaaaaaaaatgtgaatgaagtgactcatttgtaaattagcatcatgggtgccttcagytcttcagagtgttgttttagcctgtgactttgatttagtatgttctaccactttgaaggagaattc

SEQ ID NO: 156655 - DNA, 313 bp, Homo sapiens
aagctttattttcctcatctgtaagaaactacctgcctcgaaggataatttcaataatatacgaaaagtccttaacacagcttggagcatagcaacaatttaaagtaaatgttagattgaatcatgatattgaacagctaggaaaacccttctctgaaattcagaagtaaaggcaattttgaatagaacacaaccaacctatttcatttagcttcaaaatatttttgtgatatatcacatacctttctcctgaagatgaattaayaactgaccaattctctggagctgaataggaataaaaaagtcacagtat

SEQ ID NO: 156656 - DNA, 461 bp, Homo sapiens
aaaattatattgaatcccaaatgtttaactatgaaggaaaagaaaccaccaatttcacagatacataaaatcagtrggcagtttactacaaaacataggaagaaacttgaatccaatttaaaaaccaaactgaaagcaatgtggcaaggtgaaaatgtggctgatacatttccaaatacaacttccttcactccagattcctctgacattaaaaggcaaagtggattccaaacagagatagacatgagaatatcagggttaagtcatacacaaccaacacaaatagagtcactagctgaagggatagcaaggtattctgatcccattgacaagagaagaacttccaacttggtaaagggagcaaaactacatgatagagaaagtggggaagagaagcaagaacatcttacagaaatggatccattctatgcagaaaacttcatggcaaacacatatcttag

SEQ ID NO: 156657 - DNA, 576 bp, Homo sapiens
aaaaattagttacagctaacttcttaataaataaatatgtctattataatacataataaatattaataaatgattatatayttttatattgtttcttgtcagacttttcctatataatttctccatgcaatttcaactagtaatttggaagatgaaaagaataaatattttatcatttctcagtcacttttagtcccttttactttgcttgcagaataagaggcagcaaagttttaaaggccatttcacatagatgcaaatagagcaaaaattgcagaatattgacacataaaaagcaaacagcaaacttcaaagacattttgatgacagaagcaagtaactctgtagtcaacataaattgatggtaaaagattaattgagatctttgatccttgatcatgaaaagacaccaaacaaaccctagaataaatatagcagaatagaaagcattcaagataccattctggagttcattcttttgcatatcgtaacctgttgggagatgctgaaatagaggcataaatcaaagtatcaagtagtcacatctgtaaagtttgtggtttgtgcggtgtacag

SEQ ID NO: 156658 - DNA, 603 bp, Homo sapiens
tgtaaagtttgtggtttgtgcggtgtacagtcttctgtaaccttaataaccaatgtccttaattttatgctagttatctttaacttggttgattttcctatgggcgtagaaaggcactttggtaaagaatcctgctgtcagactttatgttgcctccttgtgtcactctttgtcattacatcttcaatttatcaagaataatccaactttctgctgttactagcttatattttctaacattaaaattaggagaactactgccagagtctcctaagaactcacctcatgtcttccattctttttcaggatataagaaatgactattctgagtgtaatatgcttatcatagcaaatttgttgaaatgattaattaataattgggacctccccaatagcatatcagtgatgcattttaaacaagaagagaytcattgaatgcttgcttttcccagcaaattgatttgatatcaactgtgacagctagagaccaccttggccacagattcccaagagagttcctgtggtaggcaagtatctccaagacctgtggacttacaacttctggccatgtcgacgtctgattgattttttaaaaaaattatt

SEQ ID NO: 156659 - DNA, 437 bp, Homo sapiens
ggagtaaaaagttcaacatagaatgtcgatttgcwgtatttactgattacagcaggaaacataaatcctcttgcttattattaaaaaatacagccctgaatgtgtgtcctacattcctacaatgaataacagctgcattagcattccaaagaaaatcctggctattggatttctatagtgaaggattgtttcaatagacctcaatttgctttttaagactgtttgcaattttgttaaacttttatatcatcagcaccaaattatttttggcttacctggccaaagctgggaataaacctagattctattttgaatatacatactatgtagacatctaattatgtagccaatgcaaagatatggtatatgatttttcaacctattactagtcagatatgtcaagctcattcatataagaaaaggtatttcatttcaaa

SEQ ID NO: 156660 - DNA, 599 bp, Homo sapiens
aatttgctttttaagactgtttgcaattttgttaaacttttatatcatcagcaccaaattatttttggcttacctggccaaagctgggaataaacctagattctattttgaatatacatactatgtagacatctaattatgtagccaatgcaaagatatggtatatgatttttcaacctattactagtcagatatgtcaagctcattcatataagaaaaggtatttcatttcaaaacttaagrtcactatgataatactattacagtgtgcatataattcagataaaatatttttatatttatatatttacaaatatacttacaaaacaaatgaaaacttagaatgagctgcaggaatagctgtaataacatacatagtctgtgtattcactgaaagcattttgttcataaggttggaaacattgaaagaatcatggagtataaaaagagccttgcaggaaaaaattatttctcatttatgaaaaaaccagaaaaaaatgtgtggtatgaaatatgaaatatgaactttgttatatcacagaaaattatgaaattttccttggagtgacccctttttcatatggcttaatgtataagtg

SEQ ID NO: 156661 - DNA, 599 bp, Homo sapiens
aatttgctttttaagactgtttgcaattttgttaaacttttatatcatcagcaccaaattatttttggcttacctggccaaagctgggaataaacctagattctattttgaatatacatactatgtagacatctaattatgtagccaatgcaaagatatggtatatgatttttcaacctattactagtcagatatgtcaagctcattcatataagaaaaggtatttcatttcaaaacttaaggtcactatgataatactattacagtgtgcatataattcagataaaatatttttatatttatatatttacaaatatacttacaaaacaaatgaaaacttagamtgagctgcaggaatagctgtaataacatacatagtctgtgtattcactgaaagcattttgttcataaggttggaaacattgaaagaatcatggagtataaaaagagccttgcaggaaaaaattatttctcatttatgaaaaaaccagaaaaaaatgtgtggtatgaaatatgaaatatgaactttgttatatcacagaaaattatgaaattttccttggagtgacccctttttcatatggcttaatgtataagtg

SEQ ID NO: 156662 - DNA, 561 bp, Homo sapiens
aaatgagagtgaaccagaaaaacaattttggtaacatgacaaaacaaagttactgaacaccctcaagagatcatatcagctcaccagtaatgaatctaaactaagacaaaaatctctgaattgccagaaaaagaattcagagggtagattattaagctaatcaaggaggcatcagagaaaggtaaagtccaacttaaagaaataaaaaacaatacaggatatgaaaggaaaattcttcagtgaaatagacagtatgaataaaaaagaagacaacttttggaaatcaagaacacacttagagaaatgcagaaatgcaaaatgcactgcaaagtctcagcatagaattgaacaagcagaagaacctcagaggtcaaagcaaggcttttgaattaatcyatcaaagacaaagagaatttaaaaaaatgaacaaagcctccaagaagtttgggattatgttaaacattcaaacctaagaataacaggtgttcctgaggaagaaagaaatctaaaagtttggaaaacatatttgagagaataattgaggaaaacttccctggcctt

SEQ ID NO: 156663 - DNA, 561 bp, Homo sapiens
aaatgagagtgaaccagaaaaacaattttggtaacatgacaaaacaaagttactgaacaccctcaagagatcatatcagctcaccagtaatgaatctaaactaagacaaaaatctctgaattgccagaaaaagaattcagagggtagattattaagctaatcaaggaggcatcagagaaaggtaaagtccaacttaaagaaataaaaaacaatacaggatatgaaaggaaaattcttcagtgaaatagacagtatgaataaaaaagaagacaacttttggaaatcaagaacacacttagagaaatgcagaaatgcaaaatgcactgcaaagtctcagcatagaattgaacaagcagaagaacctcagaggtcaaagcaaggcttttgaattaatccatcaaagacaaagagaatttaaaaaaatgaamaaagcctccaagaagtttgggattatgttaaacattcaaacctaagaataacaggtgttcctgaggaagaaagaaatctaaaagtttggaaaacatatttgagagaataattgaggaaaacttccctggcctt

SEQ ID NO: 156664 - DNA, 588 bp, Homo sapiens
atttaagtctttaatccatctcaagatggattaattcatcttgagatggtccagtttcaatttttctatgtatggctagctaattttttcagtaccatttatttaatagggtatactttccctgttgtttatttttgttgactttgtcaaagatcagttggtggtaggtatgtgactttatttctgggttctctattatatttcattgatctacatgtctrtttttgtactagtatgctgatttggttactatagacttgtatataatttgaagaaaggcaatgtgttttcttgggattgcattgactaattgggctcttttttggttccacatgaattttagaatagctttttataattctttgataaatgacattggtaacttgataaggatttcattgaatctgtagattgctttgggtagtatgaacattgtaacaatattaattcatcttagccatcagcatggcatgttttcccatttatgtcgtgtacaatttctttcacaatgtttgtggttttccttgtagagacctttcacctccttggttaaagttattcctaggtattttgtgtttttgtggctac

SEQ ID NO: 156665 - DNA, 583 bp, Homo sapiens
tctggggtctggaggacgatggccttcttctcacagctccactaggtggtgccccagtaagaactctgtgtgggggctccaaccccacatttccctttctcactgccttagcagaggttctccatgagaaccccaccccacagaaaacttctgcctgggcatccagktatttccatacatcttctgaaatctaggtagaggttcccaagccccaattcttgaattctgtgcactcacagactcaacaccccatggaagctaccaaggctaggggcttgaattctctgaagccatggctggagctctaggttggtccctttcagccgaggctggagcatctgggacgcagggcactaaatccccaggctgcacacagcatggggaccctgggcctggcccacaaaatcattttctcctaggcctctgggcctgtgatgggaggggctgccatgaagacctctgacatgctctggagacattttccccattgtcctggggattaacattcagctcctcattacttgtgcaaatttctgcagctggcttgaatttctcctcagaaaatgggtttttcttttctatc

SEQ ID NO: 156666 - DNA, 583 bp, Homo sapiens
tctggggtctggaggacgatggccttcttctcacagctccactaggtggtgccccagtaagaactctgtgtgggggctccaaccccacatttccctttctcactgccttagcagaggttctccatgagaaccccaccccacagaaaacttctgcctgggcatccaggtatttccatacatcttctgaaatctaggtagaggttcccaagccccaattcttgaattctgtgcactcacagactcaacaccccatggaagctaccaaggctaggggcttgaattctctgaagccatggctggagctctaggttggtccctttcagccgaggctggagcatctgggacgcagggcactaaatccccaggctgcacacarcatggggaccctgggcctggcccacaaaatcattttctcctaggcctctgggcctgtgatgggaggggctgccatgaagacctctgacatgctctggagacattttccccattgtcctggggattaacattcagctcctcattacttgtgcaaatttctgcagctggcttgaatttctcctcagaaaatgggtttttcttttctatc

SEQ ID NO: 156667 - DNA, 396 bp, Homo sapiens
tttgttcttccccctttgtcctcaggccctgactctggttattcctttctctatactacccttttacsttatatatactatataacctcactggttatgccagcttacaattctatgtgccatggtgcttatttctgtgccagtaccagcaaagtggttagttagccaaagtaggcatcgaatagtagtttgtcaatgacgacccctccagaaccaacaatccactggtctcccatgtcccttcctcctttcatattctcacttcccaacatatccatcttagatttcaaggcccagctctgtaatcactctggtgtatccactttcagctctcctggtcttccgttgtttagttgtacctgtttggcaaactccagtcctgcttagatctaatat

SEQ ID NO: 156668 - DNA, 353 bp, Homo sapiens
ttcttccccctttgtcctcaggccctgactctggttattcctttctctatactacccttttacgttatatatactatataacctcactggttatgccagcttacaattctatgtgccatggtgcttatttctgtgccagtaccagcaaagtggttagttagccaaagtaggcatcgaatagtagtttgtcaatgacgacccctccagaaccaacaatccaytggtctcccatgtcccttcctcctttcatattctcacttcccaacatatccatcttagatttcaaggcccagctctgtaatcactctggtgtatccactttcagctctcctggtcttccgttgtttagttgt

SEQ ID NO: 156669 - DNA, 566 bp, Homo sapiens
ttttcccttctaatttgcctttagttttctggaatggggtgatcctaataataaaggataccatawgtttcatgctcaatagaatttaagaaattgtaacatgcactttaaatatactaaagataataataatagcaatatctagtacttatagctacttgttaggcactgttgtaagtgatttttatagtataattacttaaatcatgtcagctccatattgtagataaaaaaactaaagcacagagggcacggcatgagcccaagaccactcacccaatgggtgtgaagtcagatattaaacaggcttaagttctggctgtaaatccctttacaatgttggcttctctgttctatactacctccaaagctaccactggcctttgatatctttgtgcaaatcagaaaaagagttgcatcttcctcaattgaaaagaatactcaagaataacaaatattaaaaacataaagccattctgcaggaattaagttgaatcattaaacagaaaataatgtgtattaataggagttcttcagggagacaacttattgcaaatatatgatat

SEQ ID NO: 156670 - DNA, 544 bp, Homo sapiens
ctgagagacaaactactttactcagtcctaccaacttaaatgttttctttgtttttttttaaaaaaaatttcatttaacttttaagttcagagtacatgtgcagtttgttatataggtaaacttgtgtcataggggtttgttgtacagattatttcatcacccaggtattacgcctattgataagcctattaaacttgctagtacgcattaattttcttaatcctctttcttctcccagcttccagcctccaataggccccagtgtgcattgttcccctctatgtgtccctgtgttctcatcatttagctcccacttaataagtattaggttttctgttcctgtgttrgtttgctaaggataatagcctccagctccatccatgttcctgcaaaggacatgatctcattattttttgtctgcacagtattccatggtatataggtactacattttctttatcctgcctaccactgatggacatttaggttgattctatgtcttcgcttttcttaatagtgctacaatgaacatatgcgtgcatg

SEQ ID NO: 156671 - DNA, 565 bp, Homo sapiens
aggtgtgtggccttatttcagggttctctattctgttcccttggtctatgtgtctgtttttgtacccataccaagctgtttggttactgtagcactgtagtatagtttgaagtcaggtagcatgatgcttccagctttttttttttttttttttttgcttaggattgccttggctatttgggctctttttttggttccacgtgaattttaaaatagtttttttttctagttctatgaaraatctcaatggtagtttaatcggaatagcattgaatctataaattgctttgggcaatatggccattttagtgatactgattctttctatccatgtgcatggaatatgtttccatttatttgtgtcatctcgatttttttgagcaatgtttcatagttctccttgaagagatcttttacattgatagttagctattttactaagtattttattctttttgtggcaactgtgaatgggagatcattcctaatttggctcttgtcttgactcttgttaatgtataggagtgctagtgatttttgcaaattgattttttatcctgagaca

SEQ ID NO: 156672 - DNA, 495 bp, Homo sapiens
ctataaccttcagtataatgttgaatagaaggggtgagagcatcttgccctgtttctaaacttcagacaaattaatgtggtctttaaccattaagtacgatgtgagctgtaggtttttacatgccacatgatatgatgctgtttacatcagaatgaggacattctcttctgttactagtttgtaagaatgtttttcatgaatggttattacattttgacaaatgctttttcttcacctatggaaatgaatatgttatttttcttcttagtttgttagtgtggtggattacattaattgattttcaaatattaaactaattttgcattcctagcataaatcttaaaatgattatggtattttatctttcctatggatttgtggaataggtttgcttaattttgttttggaatattaatatstatggcatgtctgagggtaggtcctacaaaagctaaaagcacattgcctctgagtgtcctgcttctgtaattgct

SEQ ID NO: 156673 - DNA, 462 bp, Homo sapiens
gttacacatacaataaccacataacccagcaaaccagctaataggtactgacccaagggggaaaaatagttaattaaaaatactttcttsttttttaagacctcatagcctgccattcctttttaaaataaaagggtaagtagctttagatataaatactgaaataattaaaaatcaaattaatttatgtctggggtttgctttaaaataacccaggataagaaaattgatagaaaattgcccatggatttaatattgttttaactaagatgtacatgggagtttgttattctattctctcctgtctgtgttttttgaaaagaaaaaggagctcagggaacaaatttctaaattatctcctctttaacctaaaaaccaaaataatgccaacaaagctattcttgatctttgagcagcaaatgccaaggatgataaatattgaagaagtattactattagttt

SEQ ID NO: 156674 - DNA, 462 bp, Homo sapiens
gttacacatacaataaccacataacccagcaaaccagctaataggtactgacccaagggggaaaaatagttaattaaaaatactttcttcttttttaagacctcatagcctgccattccyttttaaaataaaagggtaagtagctttagatataaatactgaaataattaaaaatcaaattaatttatgtctggggtttgctttaaaataacccaggataagaaaattgatagaaaattgcccatggatttaatattgttttaactaagatgtacatgggagtttgttattctattctctcctgtctgtgttttttgaaaagaaaaaggagctcagggaacaaatttctaaattatctcctctttaacctaaaaaccaaaataatgccaacaaagctattcttgatctttgagcagcaaatgccaaggatgataaatattgaagaagtattactattagttt

SEQ ID NO: 156675 - DNA, 462 bp, Homo sapiens
gttacacatacaataaccacataacccagcaaaccagctaataggtactgacccaagggggaaaaatagttaattaaaaatactttcttcttttttaagacctcatagcctgccattcctttttaaaataaaagggtaagtagctttagatataaatactgaaataattaaamatcaaattaatttatgtctggggtttgctttaaaataacccaggataagaaaattgatagaaaattgcccatggatttaatattgttttaactaagatgtacatgggagtttgttattctattctctcctgtctgtgttttttgaaaagaaaaaggagctcagggaacaaatttctaaattatctcctctttaacctaaaaaccaaaataatgccaacaaagctattcttgatctttgagcagcaaatgccaaggatgataaatattgaagaagtattactattagttt

SEQ ID NO: 156676 - DNA, 584 bp, Homo sapiens
tctaaattatctcctctttaacctaaaaaccaaaataatgccaacaaagctattcttgatctttgagcagcaaatgccaaggatgataaatattgaagaagtattactattagtttgtttcagttgaatttccttccttctcaacctcttgaaatgagtgaatacattcagtagaactagctgaggcttaaaaatttcagaaattatatccattcaccttcactttttatctttactctaaaataataacagccacgatagcagaagaaatacttttgatgttaatgtgggcatgatcctcttgcagaataacaacaaattttctgtgtagagtatcatgtaaactggctctgactggcattagctatttcatcacagaawagaagaccagcatagcacattcaagattcaaattctggaaacattaggtcaaaaggtcccagcatacatgaccacaatcctaccaatatagacaggagcagctacaaacagaagctggtccagtgaggcttttttcgctcaacctgctgaattgcaaatcacctctgtcaagcacacacattccttaagttggtgccacattc

SEQ ID NO: 156677 - DNA, 584 bp, Homo sapiens
tctaaattatctcctctttaacctaaaaaccaaaataatgccaacaaagctattcttgatctttgagcagcaaatgccaaggatgataaatattgaagaagtattactattagtttgtttcagttgaatttccttccttctcaacctcttgaaatgagtgaatacattcagtagaactagctgaggcttaaaaatttcagaaattatatccattcaccttcactttttatctttactctaaaataataacagccacgatagcagaagaaatacttttgatgttaatgtgggcatgatcctcttgcagaataacaacaaattttctgtgtagagtatcatgtaaactggctctgactggcattagctatttcatcacagaaaagaagaccagcatagcacattcaagattcaaattytggaaacattaggtcaaaaggtcccagcatacatgaccacaatcctaccaatatagacaggagcagctacaaacagaagctggtccagtgaggcttttttcgctcaacctgctgaattgcaaatcacctctgtcaagcacacacattccttaagttggtgccacattc

SEQ ID NO: 156678 - DNA, 584 bp, Homo sapiens
tctaaattatctcctctttaacctaaaaaccaaaataatgccaacaaagctattcttgatctttgagcagcaaatgccaaggatgataaatattgaagaagtattactattagtttgtttcagttgaatttccttccttctcaacctcttgaaatgagtgaatacattcagtagaactagctgaggcttaaaaatttcagaaattatatccattcaccttcactttttatctttactctaaaataataacagccacgatagcagaagaaatacttttgatgttaatgtgggcatgatcctcttgcagaataacaacaaattttctgtgtagagtatcatgtaaactggctctgactggcattagctatttcatcacagaaaagaagaccagcatagcacattcaagattcaaattctggaaacattaggtcaaaaggtcccagcatacatgaccacaatmctaccaatatagacaggagcagctacaaacagaagctggtccagtgaggcttttttcgctcaacctgctgaattgcaaatcacctctgtcaagcacacacattccttaagttggtgccacattc

SEQ ID NO: 156679 - DNA, 608 bp, Homo sapiens
atcttgtccaagactatcaaggcagtacgtctatgagtctgcaagaaccacagcattaatgagattggggtgccctctaaagcagatacagcttatatcacaagacctaagtcctttcgaatatcgggaaagccttcccatgaaggacaagcaaaacaagtccagactgagaagacaacaataaataactaggtcttcaatgctcagacaccaaagaatatctttaagcatcaacaccatccaagaaactataatctctccaaatgaactaagtaagtcaccagggaccaatyctggagaaacggagatacatgacctttcagatagagaattcaaaatagctgtgttgaggacactcaaagaaattcaagataacacagagaaggaattcataattgtatcagataaatttaacaaagagattaaaataattaaaaagaaccaagcagaaattctggagctgaaaaatgcaattggcatacagaagaatgcatcacagtcttttaatagcagaaatggtcgagaggaagaaataattagtgagcttgaaaacaggctatttgaaaatacacagaggagacaaaacaaaagaataaaaaacaataaag

SEQ ID NO: 156680 - DNA, 624 bp, Homo sapiens
caactgtattgttattttcttcattttatatatgaaggaattaagacctggaataacaacaaaacttaaccagaatctcacagttagaagttggacccgcatctactttacgatttcaccatcctaagataactactggaaacatttcaataaattttcttcacttacatgtgttctttgcctatatgtgtatatgcaatatacttattttttattaagaaactttatataattttaaatttatttatggtttcatgtcattaawtagtatttaaatagaggttttagtagctgcataatactttacctcatgtttatgtcaaaatgtgtttgagccagttgcctcattgattttgccaacttcaatttttttttttaatagaaaaggtctcactctgtcgcacaggctggggtacagtggtgcaatcatggctcactgcagcctcgaactcctgggctcaagtcgtcattccatcttagcctcccaagtagcttgggactacaggcatgcaccaaaccaccacacatagctaattttttttcatttttagtagagacaaggtctcactatgttgcccaggccaattttattcacaaaactttgacaaacattcttaaacatgg

SEQ ID NO: 156681 - DNA, 585 bp, Homo sapiens
cattgatgggaatacttgtatgtgtttgtttggcaagtatgtttatcactcagtatygcattgcaatacaagaccacctaggtatcactgaagccacccttgtcatgtgcttcttggcctggcaggacacctgcagaagactgattgacagcaggttatcctgaagctctgctctgtaatgagaagtgagatagtcagaagccagatgtgaagaaaaaagtgctttcaagtttccttaaaaggcagcctcaaaaacacttaatatggataagtaactaagaaagaacagtagcaagtaacaatcaacctggaaaaaaggtgtcagggacagatgacttttcatgagcatcttcagagcatgaatctaaaagacagagatgcaaacagtgttaggttgttgaaaaatattctgaaaatgcttacagtccaaggaaaatgcttcgtaggtgatggaagacatcatcatcttttctactgaaaccatatacatatataggtgacatacttgaataggattcattgctagatattaagggtcttaataattgtgtttgggaagttgaagaaaagcaaattatgaaactg

SEQ ID NO: 156682 - DNA, 605 bp, Homo sapiens
tattaattcattattcattaaaattatttcctgacataaatcttataaattgtatattatagaaaaaatagtaaatatgtaatagaatattagaatcatatatatgagaataataatagacattattattattatacccatgagtctaagttgaaaactctgaattttctgatttaataagtctgtatttggccatatatttctttcccttctataacatcttttcaattctccaaacaactaggatctctgggtgttcttttgcctctttttctaaaaacaatcatttataggacatctcattctgactcatcaaataaagtcactgaaatatgacattcttacttagtgggtggaaacaaagggatttttaagagaagcaacattttttcagcatgttttatgagtgcaaatcatagcatagtaaaatgatgcaatcctccrtgttttgttttccacaataaactttctttctcctaatagttaagatcgtatatatttttcagatttacccatctcaagatcagtaatgcatgattttattacacccataattttaccctcatgtgctgacatatacaaatttattttggtggcatgttctt

SEQ ID NO: 156683 - DNA, 537 bp, Homo sapiens
tggaagacgtaaggaagtttcctctcctagagactttgaagagagcatggccctgccaacaccttaatttcacatgtccagcttccagaactgtggaacaatacatttctggctttaagccacccggtttgtagtcttttgttataacagccttaaaaaaaactaatacaggagtgtcttagatgagtttaagttaaaaggagaaatcaatgaccttccccaaactaccactgtgtgtccaccattggacaatggacaaaccaccactgtgttgtccatgtatggctatcgcattttacattgttccagatattcctcctggaaagaaggctcaagggagaagataagatgactacctccaggcacggttgctgtacctttagcaaaagctctgatgcargaagccccttaggctgttctcagcaaggagcagtttttccctggagctagatgtgtatcaatgcctgattccagcacataccctgaaggaaagatctctcttttacaaatggtaaggcctttccctagctgagaaag

SEQ ID NO: 156684 - DNA, 547 bp, Homo sapiens
atatttttttatcttttatgacaaatacaaaataaaaatggccccagctacatgggaaatcaaggcaggaggataacttaagcccaggaggttgaggctgcaatgagctctgctcataccactgcactccagcctggatgacagagtgagactctgtctaaaagaaaaaaaaaaaaaagaagttcaggatataaaaaacagaagacagaaataaacaacagaaaaagatggaaggtggkgtcagaacatggatttatagataattcataacacttatcagacagaccaaaggaaacatctttatttttaattcggtagacactcctacaacatttattcagttttgtatgcttaaatacaggattataaatgataccttcctttccaccaagtttgcttatagaaaatgcacctccctttgacacagagacaagcttcttaatcatcagataagttctagcatttggacatttatggaaccaaagaatcatattttaaagcttctgccaagtgcagaagtgctcaatgggcattttgtctcagtaag

SEQ ID NO: 156685 - DNA, 538 bp, Homo sapiens
acaaaataaaaatggccccagctacatgggaaatcaaggcaggaggataacttaagcccaggaggttgaggctgcaatgagctctgctcataccactgcactccagcctggatgacagagtgagactctgtctaaaagaaaaaaaaaaaaaagaagttcaggatataaaaaacagaagacagaaataaacaacagaaaaagatggaaggtggtgtcagaacatggatttatagataattcataacacttatcagacagaccaaaggaaacatctttatttttaattcggtagacactcctacaacatttattcagttttgtatgcttaaatacaggattataaatgataccttcctttccaccaagtttgcttatagaaaatgcacctccctttgacacagagacaagcttcttaatcatcagataagttctagcatttggacatttatggaaccaaagaatcatattttaaagcttctgccaagtgcagaagtgctcaatgggyattttgtctcagtaagaagcatagatttagccc

SEQ ID NO: 156686 - DNA, 480 bp, Homo sapiens
gactgcttagcaatatctaacacttcagattgtatttgtcaagtgaagattaagtagctcctaagccatttcagagcttgtctcccatttcaccatcagatctgctctccctctcagtttatagtagatactagttagttagtataatttttccttctaggtacctacatttttctatttggctttgcatatccaggtactattcataagttgctattagatggggtttagcyttagttctatggactcctaacagggacttaatttacagtctatgaatgggtatagaaatttttcaagagaagctggaaatttatattttgatgttattatctctcttgttttaaatatttgcaactaatcccaaatttgcaaatgctatgtgcttcacacagagtcattctgtggtctgaatattaatggatctgggggttgccagtttgccacttctgaaggcaaacagaaattcaggtgggattg

SEQ ID NO: 156687 - DNA, 560 bp, Homo sapiens
aactgggggggagttatgaatattcataaagcaagagcacacacatacacaatgcagcttcatgccttttcgtgggacccatgtccaaaaaatggtggcattagcataattctagggtggagttttcagccctcagatgtcaaaaagtgaagcagaggacataaaagccctgtctttgcatcctccctagattggccagaaccactccatggtcggtggtctcttaccaggaaggcatgctggtcagatgttgtacagaaaccacaaaagggaagagcagcagtcaggcctttggttgaaatcagcggtggagccagtctttccaaagggctggcttctctttagactttggggtagtaagcctaatggtggttagagagggtgagggtatagtgagatgtgyctatcatggccagaaactcagttttcaaggtttttctggagtccccttggccaggaggagcttctttccattggtttgggggtgtaggattgcatttttatttctcgttacttaaccccattgctttattatcttgcctccttagaagtttggaatt

SEQ ID NO: 156688 - DNA, 489 bp, Homo sapiens
atgcagttagtctatcaagtgttcattggctcacaaaatttcaaatacatctgtgttaatttttggtttcctgtaacttagccccagaatgttctcagctgaggttctgtgagttccaatgtgttgaatggatgcagccaggaacaatgcttacctagaaaaaacccccaactggctctcagagctgaagtatctattgcaatgcagargggaaaggcaactccttcaacattcatttcagataagtcgtttctcatcaatacaactcttgcacacagaattaacgtgcggaaatattgaaaaaatgcatttattatgtaataagggaatgtgatttctattacatacctcttttaatgatttcaaaggggtataggaattgtttaataatacatgtagttatggaatttggaaacatattcctaactataagacccaagagatagcaaaaaataaaaagcaatattgtttctgtaagttgtttgcatt

SEQ ID NO: 156689 - DNA, 447 bp, Homo sapiens
acaggtgtgagccactgcacctggcctctatctttctttaataaagacatggcactaattgaataaaatccagasgttgtcagactggaaaaaaagaactcactatttctgtccataagaaacctacttaaatataaagacatatttaaaagacagaaaaagatgtagcaggcaaggactattcatgaagaaataggagtggctatattagtatccagaaaatgtaggcccaggacaagcattattgccagacataaagtgggacattttgagtcaattcattaagaagcagtaacactcctaaataagtatgtgctaaataacagagcttcaaaatacatcaactgaaaatatagaaaatcaacaattataactggagatttcaacaatcctctttcagtaaatgatacaagtggccaaaaataccaggaagaatgtaaaagacct

SEQ ID NO: 156690 - DNA, 522 bp, Homo sapiens
ctgatgacttaagtattacagactgttttctgactacaatgaaattaaattggaaataaataataaaaagatatctgtaaaaatccccaaatatttggacattgagtaatacatttttaaataaccaataaatcagttaactaataataaggaaaatcagaatatattttgaagtgaatgagcataaagacacagcatgacaaaatttgggggatgcagctaaagcatccttaaaacaatttagaattttgaatgtgtatattagaaaataagaaagttctcaaatcagtgatgtacattgccatctaaagaagttagacaaagcagttgaaataaacataaaagtaataaagaaatcagtaaaatagaaaacagataaaccatagagaaaattaataaagctaaaatgtgtctcattccaaacatcaataaaattaaaaatacttttaactagaccagttaagcrcacacacacacacacacacacacacacacacacaaagcacaaattacaaatatcag

SEQ ID NO: 156691 - DNA, 540 bp, Homo sapiens
aagttaattcaaaggtccattacggatctgggagctagggttgtcttagctttgttttttcatcatgatgaaagttgaaattatgcttttgttaacatgagagtgataacagargacaccctcagtgtcccaagagaaatggtcattgttatctaatattcatggttgttacaatttaaactataatattccaataagatacattttaaacatgttggaaaaaaggtgagatcatctaaattttgactgtttgttttctccatttttcatagaatgatttgttaacatttctactaatatttacttaatggttggctttgattttcaataagcacatgttgttataattgcctgatcccatttatgtacaatcataacctcagaggttgaccacacacaggtagaagaggtgaaatgggagatgtactccatcctgccttctgagacacagttcctatcagcctggccccatgctgtaattcttccattaggttcacctaaaagacaaattgtcttcagaagaccacataaaaagcagaa

SEQ ID NO: 156692 - DNA, 484 bp, Homo sapiens
tgatgggaagactagatagccaagaaggaagttggaccccaccttaagccatgtgaaaaattaactcaaaatggatcaaagatctaaaagtaagagcccaaattataaaactcttacaagaaaayatacagacaaatcatgacctctgaattggtgatagattcttaactatgatactataaacataagcaacaaattaaaattggataaattgtactttatcaacattaaaaacatttgtgcttcaaagaaaactatcaaaaaagtgaaaagacaacccacggattgggagaaaatatttgcaaattgtatatatcataaaagacttgcatctagaatatataaagaaccattactactcaataatacaaggacgccccagttaaaaatcttaatgcatttttcaaaagaattaaatagacatttttcaaataagatacataaatgtataattagcacatgaaaagatgcccaacatcattag

SEQ ID NO: 156693 - DNA, 566 bp, Homo sapiens
ttatctgactcattgtgttataaattctgatatatatagtggtttagttttatgtttagtaaatatgtgaacttggataagtttcttctcttcccttcccttcccttttttgaaacagggtctcactttattgcccaagctggaatgcagtggtacaatcatagctcactgctgcctcgaactcctgggctcaagtgatcctcctaccttagcgtcctgagtrgctaggactgcaagtatgcactaccatgcctggctaattttttaaaaaatagtttttgtagagatgggggtctcactatgttgcccaggctggtcttgaactcctggcttcaagcaatcttcccactttggcctcccaaagtgctgggattatagacatgagccactgcacccagccagtaagtttcttttctggtttttgtttccacattaactagaggttaatgataataaatatctctcaatgttgttagggcattcagtggattagtgcatgtagtgtctggcacttagtaatgcttattttatttagggctatcgttctttttagaataatagaatct

SEQ ID NO: 156694 - DNA, 566 bp, Homo sapiens
ttatctgactcattgtgttataaattctgatatatatagtggtttagttttatgtttagtaaatatgtgaacttggataagtttcttctcttcccttcccttcccttttttgaaacagggtctcactttattgcccaagctggaatgcagtggtacaatcatagctcactgctgcctcgaactcctgggctcaagtgatcctcctaccttagcgtcctgagtagctaggactgcaagtatgcactaccatgcctggctaattttttaaaaaatagtttttgtagagatgggggtctcactatgttgcccaggctggtcttgaactcctggcttcaagcaatcttcccacyttggcctcccaaagtgctgggattatagacatgagccactgcacccagccagtaagtttcttttctggtttttgtttccacattaactagaggttaatgataataaatatctctcaatgttgttagggcattcagtggattagtgcatgtagtgtctggcacttagtaatgcttattttatttagggctatcgttctttttagaataatagaatct

SEQ ID NO: 156695 - DNA, 423 bp, Homo sapiens
cgactgtattatatgatatctggtgccttaaaagatactttaaacatggtttgaatgggcatttttttttwaatgaatttcctggtacacaggcatttggggaagtaaaaaagacttttttttagtaataaaatgactttcctttttatagaaaaggcaacaaaaacatagggttaaaaatcatttataatataattgttctctgtgagactttaccattctcattgacctttcagcctgaatgcaaaaaaaaaaaaaaaaaaaatagaagactttgtcacagttttagactgtagagctatttttagctgtaaaacgtcatgtcctaaacttaataaaaatcaaacacaaagagatgaaagtgggaaccttcttacagaaattcctttagggctatatcctgccttcattctacatgaagaa

SEQ ID NO: 156696 - DNA, 424 bp, Homo sapiens
gaattccatagtcatcattactataattttaaacgactgtattatatgatatctggtgccttaaaagatactttaaacatggtttgaatgggcatttttttttaaatgaatttcctggtacacaggcatttggggaagtaaaaaagacttttttttagtaataaaatgactttcctttttatagaaaaggcaacaaaaacatagggttaaaaatcatttataatataattgttctctgtgagactttaccattctcattgacctttcagcctgaatgcaaaaaaaaaaaaaaaaaaaatagaagactttgtcacagttttagactgtaragctatttttagctgtaaaacgtcatgtcctaaacttaataaaaatcaaacacaaagagatgaaagtgggaaccttcttacagaaattcctttag

SEQ ID NO: 156697 - DNA, 472 bp, Homo sapiens
tttatggagaagtcaaactgcatttcttaagctttgctgacaccatataacaaatgcttggccttgggcacattagctgctctgagtcacttttttcttttcttttcttttcttttctttttttctttctttttttttttttttttttwaaaaaaaaaaaaaaaaagaaaacaggaaaagagtgcccttctgtgaaagaagaatggaagaatgagcttcaagaaagagcagcataaagatgcaagggtttagttttgtagcataactagaagtcaggggctggtcagccttggcatcggttcagcactccagctaacagggccagctgccctgagagttttgtctcctttcctccactttaccagattatctgccacagctccaggtatcacatctttgttcaagcctggtgatggagtaaagaaatggtatcattaataactaattttgttttcaagaatgtatagactct

SEQ ID NO: 156698 - DNA, 458 bp, Homo sapiens
ggtttatggagaagtcaaactgcatttcttaagctttgctgacaccatataacaaatgcttggccttgggcacattagctgctctgagtcacttttttcttttcttttcttttcttttctttttttctttcttttttttttttttttttttaaaaaaaaaaaaaaaaagaaaacaggaaaagagtgcccttctgtgaaagaagaatggaagaatgagcttcaagaaagagcagcataaagatgcaagggtttagttttgtagcrtaactagaagtcaggggctggtcagccttggcatcggttcagcactccagctaacagggccagctgccctgagagttttgtctcctttcctccactttaccagattatctgccacagctccaggtatcacatctttgttcaagcctggtgatggagtaaagaaatggtatcattaataactaattttgttttca

SEQ ID NO: 156699 - DNA, 568 bp, Homo sapiens
taacaagtattattaaatctgcatcatctatacaaatgctttttgacttatgacggggtcatgtcccaataaatccaacctaacttgaaaatattctaagtttaaaatgcacttaatatacctcaactactgaatgtcatatctcagcccaacccaccttaggcatgctcagaacacttcaattgtcctatagttgagcaaaaatcatcaacgcaaagcctgttttataataaagtgtygaatacctcacgtactttattgaatactgtactgaaagtcaaatcagaatggttgtacggtgcattagtccattctcacacagatataaagaatacctgagactgggtaatttataaagaaaagaggtttaattggctcatggttctgcaggttgtacaaggagtatagtggcttctgcttccacggaggcctcagaaaacttacaatcatggcagaaggtgaatggaaagaggcacgtgttacatagtcagagcaggaggaagagagagaggtgggaggtactgtacacttttaaacaaccagagctcatgaaaactcactcactata

SEQ ID NO: 156700 - DNA, 647 bp, Homo sapiens
accactgtgcattcttgatctcatccttgtcatctaggtcttttggtttgcggcttcatggtaaatcaaaaggaaagtaactttagacaaatccaagttattatttctagcagtctttgaacctggataagcctgtgaagttggactagctcaaaaatttctccacatgtatgccatttgctcctcagaacaagtcaggcatgtgtagttagactcattgggtagctcaatagattgacaccgagttgttactgacttgcccaaggttacacagctaataagcaggagagccacatccaggattcagggcttctgccacataaattgatgttctctcaatgactccaggctgcctttcaaaaactggagaatatgattatttcaaatcatctaatgggtaaaataaatattaccacttaaaattgatcactaagctgctgttaatcaatggtccctatttttaacgagtctatactgctcaatgttgtgagttaggaaaaaaattgttattttagaaaaacaaaatatatacttgaactttctcaggtgttccagttttttaaagtttgaaacagaatcatatcttgccatttcatctcaactcttcatcaratgaacagatatctaagattaaacacttctaaagc

SEQ ID NO: 156701 - DNA, 558 bp, Homo sapiens
aaaccaagaaacaatcaaatgactgatttttttcctccactcactgtgactaagagggagtrtttcatcctcacaataagaggaaatctcatttctttggaaaagattttcagtgttatctctactccgttgcttaaggagaaattacaatggcaacttttgttttaaaaatcaggatgatttaatgttatgaagaattgtcccccccccctttttttttagatgtttgagtcaatgttaagggcagatttactttaaatagcaacgtgaccagcaaagcttgaaaagttctcagcaatgtgtccatagagtgtttataaaggctgttttcagtttcaccttcctgctccactgcagagtgacaatttgtgactaattgctttcactatctaaatgtactgacatggctttcctttttttttaaactcaaagaagtttgattacttttatctttctcaagactcaaaaagaagtatgttcaaatgttggatgcgtaacaagtaggaattgttcttgctgaattaatagattaaagaatctatgacatcataagcaatt

SEQ ID NO: 156702 - DNA, 294 bp, Homo sapiens
tgtgtattatattctatttccctctcctcctttacatcttttttctttgtttttttgtttgcttatttcatgagtattaccaaaaaaagaggaaaagttaggtgtgccttagaaccattgaagaaagaagagaggagaaccagaaagcagaacataatccttaaggaggatttcctaaattaccaaattgtcctacaaatttgttaaatcaagtttagcctaaagctgcctccttacrtgtttaagttcgacctaaagtttattctgtacatggtgaactataacaagtggaga

SEQ ID NO: 156703 - DNA, 577 bp, Homo sapiens
tttcttaatgtataaaataaaatgcatgatatcaactactatggtttgaatatattccctccaaaatccaggtgttgaaacttaatggtcaatgtcatatacatatttaaaggtgargcctttaagaggtgattaggccaagggggcttctcacttgtgaatgggattgaccctcattaaaaaggctggacagtgttgagatctgtcactctcctaccttctgcaatgtgaggtcacagtgttcctcttcggaggaagcatcaacaaggtgccttcttggcaataggaaccctatccctcaccaggcacagaacccactggtgcctaatcttggacttcccagtgtcctgaattgtcagaaataaaagtctgttctttataaattacccagtttcaggtattttgtgagagcagcacaaatggaccaaaacaaaaaaattggcatcagagaagtgaagtatgactgtaacaaatacctaaaaatttggatgcaaccttggaactggataacgcatagaggctggaagagccttgaagactagaaaaagcctgtgttgccatgaaggaagcattaaga

SEQ ID NO: 156704 - DNA, 577 bp, Homo sapiens
tttcttaatgtataaaataaaatgcatgatatcaactactatggtttgaatatattccctccaaaatccaggtgttgaaacttaatggtcaatgtcatatacatatttaaaggtgaagcctttaagaggtgattaggccaagggggcttctcacttgtgaatgggattgaccctcattaaaaaggctggacagtgttgagatctgtcactctcctaccttctgcaatgtgaggtcacagtgttcctcttcggaggaagcatcaacaaggtgccttcttggcaataggaaccctatccctcaccaggcacagaacccactggtgcctaatcttggacttcccagtgtcctgaaytgtcagaaataaaagtctgttctttataaattacccagtttcaggtattttgtgagagcagcacaaatggaccaaaacaaaaaaattggcatcagagaagtgaagtatgactgtaacaaatacctaaaaatttggatgcaaccttggaactggataacgcatagaggctggaagagccttgaagactagaaaaagcctgtgttgccatgaaggaagcattaaga

SEQ ID NO: 156705 - DNA, 565 bp, Homo sapiens
tgcctcttttccctaaaaaagctttattttgatgtatttcctcaggctacatttttaaagagggcatcagaggcagtcattatttctattcttgataaagaggctaattgtgaacttattttttttttctatcagtacctggtgacaggcatttgctgagacatagtgacaggtgtaagctgacctctacaaaattgtaacctagtttctgcccatatartaactgttacaggcatcaaataaaaatgtattctacaaaagcctaacttcagattatttcaactttaaaaaatatgtagttaataatgtacttaaattataaatatttatcatgactaattgcatgcaatacttaatctttaatttagaaagcagagcatattgttaaagagctattgtaacaagcagtggataagagaattaatatatctgtcccaactctgatcttgatttgttgtgtgactttgaatataacatgcttccttgtgtttatgcattctacagatatcttctcttctataaaattagattacctggatagatgaataattagatcctttttaat

SEQ ID NO: 156706 - DNA, 565 bp, Homo sapiens
tgcctcttttccctaaaaaagctttattttgatgtatttcctcaggctacatttttaaagagggcatcagaggcagtcattatttctattcttgataaagaggctaattgtgaacttattttttttttctatcagtacctggtgacaggcatttgctgagacatagtgacaggtgtaagctgacctctacaaaattgtaacctagtttctgcccatataataactgttacaggcatcwaataaaaatgtattctacaaaagcctaacttcagattatttcaactttaaaaaatatgtagttaataatgtacttaaattataaatatttatcatgactaattgcatgcaatacttaatctttaatttagaaagcagagcatattgttaaagagctattgtaacaagcagtggataagagaattaatatatctgtcccaactctgatcttgatttgttgtgtgactttgaatataacatgcttccttgtgtttatgcattctacagatatcttctcttctataaaattagattacctggatagatgaataattagatcctttttaat

SEQ ID NO: 156707 - DNA, 580 bp, Homo sapiens
aggcaagagttcatgtatggattttaattgctttattatttcccttccagactacaaacctattgagagcaaacttcatgatagaattgtcattttgtccttcaacaggtccccacacaaagttttcctcataataaacackctgcatatctgctaaatactacagaaactagaaagtaactatgatttgcattcaactatggtagctttgctagaaacacaaccttccaacagaaattgtatactcttcagaatagctctatatgtgtaagaagaaaattgctccataattagaaaaagtgttccctacttgctcttcaagaatatgatgaccaaaattgacattttcctaacctgtaactacattctagattgaggaaagtaaaataatagtatttgttataatccttcacacactgtgtggtttttaaaatcgtgtagaagacttattttgacttgtaaaatgagcaaaataaaaaataagttgaaaaaaatcagccaaacttcctgtgaggtagcaaatatcaaatcaaactggcaaatacaaaaatgtattggcaattttagaatttgaaaaaca

SEQ ID NO: 156708 - DNA, 547 bp, Homo sapiens
gtggttcggccaggcacggtggctcatctcagcactttaggggtgccgaggggggtggatcatttgaagtccggagttcgagaccagcctgaccaacatggtgaaaccgcatctctactaaaaatacaaaattagccaggcatggtggcacatgcctgtaatcccagctactcaggaggctgaggcaggagaatcacttaacccgggagayggaggatgccatgagccaagatcgcgccactgcattccagcctgggtgacaagcgtgaaactccttttccaaaaaaaaaaaaaaaaaaaaaaaaaaaaaaaaagaagaagaagaagggtagttcaatttccctaaaattttgtactgctttttgaggtagtggggtccattttcacttgaatgtatgccagggtatggattcgaaaaagacaattaggaaggcaagttactccccagatttttatttgatgttttattaaaatataactccataaaatatttggtttgaaactttatgaatatctaaaagataaaagctcatatttaaatttaaat

SEQ ID NO: 156709 - DNA, 586 bp, Homo sapiens
cattttggagaggcttattttaaaggcattttctgaaataacaggaaagcattatacccatctcttccaaaaaagaaaagttgtggaataattttctgatgtctggagtttgtggatttagaatatggaattatttttagaaatagtgtggataacagaggtgaaagtggccctaggccctctttggacgagcttttgttaaaagaagtaggaggaaaggttyctgcatttattcctttaatgcaattgagttgcaaactactcaaatttagtataaagattcacttgcatttgctgaccatgggaagtgatactgactgcctcccaacttccatatctagacttgagtgggtgaatactttcatctcgagtgctgtcaagtgtatttgcacccgtgaccatcttttaggatctgccatcaagtcaggaagttgccttcaatgccaatggtcgtatttcatcttgttgcttccccacagtaaattccaatccttcttttgcttggctgtgaccacctgttctctcacacctgtttcaatttacaaaccatactctggagtcacagctgagaaccactgtagacatg

SEQ ID NO: 156710 - DNA, 586 bp, Homo sapiens
cattttggagaggcttattttaaaggcattttctgaaataacaggaaagcattatacccatctcttccaaaaaagaaaagttgtggaataattttctgatgtctggagtttgtggatttagaatatggaattatttttagaaatagtgtggataacagaggtgaaagtggccctaggccctctttggacgagcttttgttaaaagaagtaggaggaaaggtttctgcatttattcctttaatgcaattgagttgcaaactactcaaatttagtataaagattcacttgcatttgctgaccatgggaagtgatactgactgcctcccaacttccatatctagacttgagtgggtgaatactttcatctcgagtgctgtcaagtgtatttgcacccgtgaccatcttttaggatctgccatcaagtcaggaagttgccttcaatgccaatggtcgtatttcatcttgttgcttccccacagtaaattccaatccttcytttgcttggctgtgaccacctgttctctcacacctgtttcaatttacaaaccatactctggagtcacagctgagaaccactgtagacatg

SEQ ID NO: 156711 - DNA, 586 bp, Homo sapiens
cattttggagaggcttattttaaaggcattttctgaaataacaggaaagcattatacccatctcttccaaaaaagaaaagttgtggaataattttctgatgtctggagtttgtggatttagaatatggaattatttttagaaatagtgtggataacagaggtgaaagtggccctaggccctctttggacgagcttttgttaaaagaagtaggaggaaaggtttctgcatttattcctttaatgcaattgagttgcaaactactcaaatttagtataaagattcacttgcatttgctgaccatgggaagtgatactgactgcctcccaacttccatatctagacttgagtgggtgaatactttcatctcgagtgctgtcaagtgtatttgcacccgtgaccatcttttaggatctgccatcaagtcaggaagttgccttcaatgccaatggtcgtatttcatcttgttgcttccccacagtaaattccaatccttcttttgctyggctgtgaccacctgttctctcacacctgtttcaatttacaaaccatactctggagtcacagctgagaaccactgtagacatg

SEQ ID NO: 156712 - DNA, 419 bp, Homo sapiens
gatacaagctaaagatttcaggtgatgctaaatatcatgaacaaaagtcatgctattgttttaatagattgctatcttcttgagagtaagaccaagctstgttttgttcatcaatgtgtctacattacttagcacttacaacatacaagtacacaataatattcaatagtacagtaggaaaattacagtaataatttattgtatatttcaaaatagctacaagaattgtaatgttctcccaaataaagaaaagatgaatgtttgaggttatggttatctcaattaccctgatttgaccactacacactgtatacatgtatcaatatataatatgtacccccaaaatatgcacaactatatcaataaaaatacaaaaattaaatgaacacattttaaaaatgattttttgaaatttcgat

SEQ ID NO: 156713 - DNA, 419 bp, Homo sapiens
gatacaagctaaagatttcaggtgatgctaaatatcatgaacaaaagtcatgctattgttttaatagattgctatcttcttgagagtaagaccaagctgtgttttgttcatcaatgtgtctacattacttagcacttacaacatacaagtacacaataatattcaatagtacagtaggaaaattacagtaataatttattgtatatttcaaaatagctacaagaattgtaatgttctcccaaataaagaaaagatgaatgtttgaggtkatggttatctcaattaccctgatttgaccactacacactgtatacatgtatcaatatataatatgtacccccaaaatatgcacaactatatcaataaaaatacaaaaattaaatgaacacattttaaaaatgattttttgaaatttcgat

SEQ ID NO: 156714 - DNA, 421 bp, Homo sapiens
tttatttagccctgtatttgcaatgacccatatgtctgacccatctcaggggctaataactaattagtaaaataattctagacatataaaaaaggcattgtgatattgttgcataaaagtgttagctacgatgctacttaagataggtttgctggctattaaatgcctagttggggtgatttctaactgcacattctaccaatattttcagataccaaggtcttgtcattaggtgacacaatgaaaagagactgagtttctgattcagctggacccacggtggagcttcacacctttcagaatcttgaccttgagcacattactaaacttgtgaacctcagatttcccatctgtaaatgagattaacrtacctacacccattaactgtgccagacatcttactgggtactagaaaaacatc

SEQ ID NO: 156715 - DNA, 598 bp, Homo sapiens
tattccttttagggttatgtacttgtgtgttagcctgtatatgtgcacatgtatatgtatgtgaatacattgcacatgaataatatctttattttagatctatcacttaaaaataatgatgtaaacacccaaactagcttgacaaatggacaagtattgatctcactgcaacttctctccatcrcttcattctgtagagcactcaagaacagaatagcagcaccttttgcatccagattttaaggaagaaagactgccactatagcatagctgatacttgtagcttccacttcggaagaaaaagaaaagaaaaagagagacagacatgtacagaaaaataagaggcagtcacatgttaggtcagagaaggaatcagggaagagaatggcaaaggaatgagaataaagtatcaaagggtaaagtaaacaacactgttgtcaaatcaggctcgctctctctctcactctctctctctctctctgtgtgtgtgtgtgtgtgtgtgtgtgtgtgtgtgtgtgtgtgaaatctggtgtgtttgtgcttcagtgttcccatttacctttctttccttatgttcccagcaagggaagttatgtgc

SEQ ID NO: 156716 - DNA, 434 bp, Homo sapiens
taggtgaccttgagtttgatggtgatgtttttgatacacaccaaaagcactatctgtgaaataaaaaattgatatyttggacctagttaaaattgaaatagtcttctctactaaagacaccggtaagaaaatgaaaacacaaggtaaagactggagaaaatatttgcaaaacacatacctgtctcataaaggacttatctcaagaaatataaccaggactcatcagattaaacaataagaaaacaaacagcccactttaaaatagataaaagttctaaacacttccccaaaggtctacagatggaaaataagaagagacaaaagggcaaatgctgcatgataccacctccatgataaatctcaaaaagtcaaacccacagaggaagagaatggaatggtaatggcagaggctggtcagagggaaaaaaaagaag

SEQ ID NO: 156717 - DNA, 434 bp, Homo sapiens
taggtgaccttgagtttgatggtgatgtttttgatacacaccaaaagcactatctgtgaaataaaaaattgatattttggacctagttaaaattgaaatagtcttctctactaaagacaccggtaagaaaatgaaaacacaaggtaaagrctggagaaaatatttgcaaaacacatacctgtctcataaaggacttatctcaagaaatataaccaggactcatcagattaaacaataagaaaacaaacagcccactttaaaatagataaaagttctaaacacttccccaaaggtctacagatggaaaataagaagagacaaaagggcaaatgctgcatgataccacctccatgataaatctcaaaaagtcaaacccacagaggaagagaatggaatggtaatggcagaggctggtcagagggaaaaaaaagaag

SEQ ID NO: 156718 - DNA, 434 bp, Homo sapiens
taggtgaccttgagtttgatggtgatgtttttgatacacaccaaaagcactatctgtgaaataaaaaattgatattttggacctagttaaaattgaaatagtcttctctactaaagacaccggtaagaaaatgaaaacacaaggtaaagactggagaaaatatttgcaaracacatacctgtctcataaaggacttatctcaagaaatataaccaggactcatcagattaaacaataagaaaacaaacagcccactttaaaatagataaaagttctaaacacttccccaaaggtctacagatggaaaataagaagagacaaaagggcaaatgctgcatgataccacctccatgataaatctcaaaaagtcaaacccacagaggaagagaatggaatggtaatggcagaggctggtcagagggaaaaaaaagaag

SEQ ID NO: 156719 - DNA, 559 bp, Homo sapiens
agtggtggtgtacactttaaacatttgattgctgtaattgctagcctgttctataactgccacgtattaagctaatcacttgaggaaaaagttatctttatgaattctcacaaatataaaaattgaaataatatwttctccatatttttttcaaattgataaaacaagatcaacccctagtcctttaagttgtactaatataaataataatagagtctaggagctaccgaaaggaaaaagtagaggacaataaaaatctttcacataaatgagaatgcaaaaccttaaaaactatgttcaaacaaagaaaatgacctctcattattgttgagttttatctgcttcttataacacaagaggaagcaggaactcatcttgagggttattggtgagatgtcccaatttcaggtcaaatatttatgggataactaggcaaaggaaaagaaggagaagccagacaccttgcattccaggagcttataatctagtagaggccaccaaatgccaacaatcatcaacagcaagtgtataaataaatacattataatcaaggtataag

SEQ ID NO: 156720 - DNA, 522 bp, Homo sapiens
tagagtgaacaggtaaaagctggaaccattacctttgagaactggaacaagagaaggatgcccactccctccacccctgttcaacatagtactgggagtcctagcaagagcaatcaggcgagagaaagaaataaaaatgtatccaaatagaaaaagaagaaatcaaactgtatgtctctactgaagatatgattctatacctaggaaaccctaaagacgctgccaaaaggctcctggtaccaataaacaacctcagtaaagtttcaggatacaaaatcaatatacaaaaatcagtagcaattctatacacaaataacattcaaggtgagaamcaaatcaagaacataatcccacttatgatagccacaaagaactccaaaacactgctgaaaaaaaatcattgatgatgcaaacaaatgaaaaaacattccatcccatggattggaagaatcagtattgttaataggtccacagtacccaaagcaatcaacagattcaatgttattcttatcaaactaccaa

SEQ ID NO: 156721 - DNA, 575 bp, Homo sapiens
aaaatcacatcagtgaatccatacaaacactgtaaaattgtaaaattactattgcaacctattgcttccaaattgtgacttttaccatctttgaaccccgaattcctactagatctcttgctttctgtgactaccttctttggtgatctattttgcttttcctctatttctcaatgactgtggcacaactccccagagtggtgactctaatcactttcctaattcagacagctctagatacagactagaaaaatagtgcacctttatttttggcctttgaccagcaccttaccatctaacgtagtctgccacaaytccactaccccgatggtgaagcttaacccaattttgatattgggatttgtgtgagagtagcttgaaattgacatcatagagaggtaatttttctcttattttctttaaacctaagtgaagtataatcttacattctcttaattttttttctgttgaaataactggcatggatctaaatgcaattgcatcttttgtctgtttttatttgaaaaaatttggaagtaccactttataaaacaagctgtgtagaacctatttcc

SEQ ID NO: 156722 - DNA, 575 bp, Homo sapiens
aaaatcacatcagtgaatccatacaaacactgtaaaattgtaaaattactattgcaacctattgcttccaaattgtgacttttaccatctttgaaccccgaattcctactagatctcttgctttctgtgactaccttctttggtgatctattttgcttttcctctatttctcaatgactgtggcacaactccccagagtggtgactctaatcactttcctaattcagacagctctagatacagactagaaaaatagtgcacctttatttttggcctttgaccagcaccttaccatctaacgtagtctgccacaactccactaccccratggtgaagcttaacccaattttgatattgggatttgtgtgagagtagcttgaaattgacatcatagagaggtaatttttctcttattttctttaaacctaagtgaagtataatcttacattctcttaattttttttctgttgaaataactggcatggatctaaatgcaattgcatcttttgtctgtttttatttgaaaaaatttggaagtaccactttataaaacaagctgtgtagaacctatttcc

SEQ ID NO: 156723 - DNA, 603 bp, Homo sapiens
tcacaaaaggtcgctggttattgacacttttctaaaggatataatatcaataagaataacttacaatggatgggtgcttattgctgggtactgtgctacaagttctacatcatttaattctcacatgagcctatcagacaggtaatagtttccccaatacacagatgaggcatggagaggctgcattttgcatcaagtcaaaccattctttaaaaggaataaagaatattttaatctaagtttgaaacaaagccaaagttatcatgtaaaagcatgaatgtcccattcaattgcatggacccatgaaaataagtcgtgattccaacaaaactcaacacacatgtataagtccaagtatcagctgggccttcagaatgccccagcatccaatacttacttatccttcagtagtttgctctttcattcttagagaggaaaaatagacattttgtactcttttctcaaacaagcaacatcaccctcctctgttcctgactttccattaagcaaacacaaggctgcttccatgtattctaacatactctgccttctracttttgaattgatgaattgtccctattattagctaaggtcaaagcctca

SEQ ID NO: 156724 - DNA, 274 bp, Homo sapiens
tgccatagaaatgtatagagaagaggcattcacttctcttgttgaaagtgttcttctggtacagtacaaatrttaatttggagctactgtatcatgttattaaaagttctagtgtgataatacaatctctcctttctgcctcaagtggctaagtgtatttgttctaagatttgtgtttgtttaattttaaaatttcattcgctatgctagtcactctggaatgcttgatttcccaatcagcctagtccctagacctccctgaccccagctctgc

SEQ ID NO: 156725 - DNA, 583 bp, Homo sapiens
tcataaaacatcttctagtacccacaactggrtataaccacttattgacaactgccatgggaatttttggtagatcttataattttatattttaactaattagaaagttatctgatatatcccacatgagaagtcctttaaatatcaaaacatatctcattccttatttgattgtattttaacacctatctcattattctttatatatgtatgtatctattatttgtatactatagaatagtagtaatattaacaatgcaaagaacaagtatactagcaaacaaatattgaatgatttccctgtgtagacatatgctaagggcttgatacatgatatcttgtgggatcgtcataacgctatgtgttaggcactaatgtaatcttcatttgcatatgagaaaactgggacctagagagattatataagttgccaagagttctagaactactacactctaaaggtattttagcactcagatctaccttaattcaattgagtatttgcccctctgtaagtatacagacaaatataggtcttacacatggtggatggttaacaaaaatcatttacatgaaactatta

SEQ ID NO: 156726 - DNA, 416 bp, Homo sapiens
gcctttctggcttttatttcacatattcaagtgttaagatccacctattgtgcyttaaaatacagcctgctttggagagcactcctataagcagagtttgggggaggtatacctttgcctgaagaaacagacattgtattcattaggatatagaattgccaccagaaacggagatccaaaataaacttcacttaaccaaggtagaagtttgttttatattcatatataaaagttgagctagcgtgacagttctgctccagggaatcatcagaggcacagattccttctataattttgctgtgccatttctaaggagctgcatctatctgcagaactcaacatagcttactgtgatttataaggtgagggagcagagctactttccctttagggcacattgtggaatgttcacatgc

SEQ ID NO: 156727 - DNA, 416 bp, Homo sapiens
gcctttctggcttttatttcacatattcaagtgttaagatccacctattgtgctttaaaatacagcctgctttggaragcactcctataagcagagtttgggggaggtatacctttgcctgaagaaacagacattgtattcattaggatatagaattgccaccagaaacggagatccaaaataaacttcacttaaccaaggtagaagtttgttttatattcatatataaaagttgagctagcgtgacagttctgctccagggaatcatcagaggcacagattccttctataattttgctgtgccatttctaaggagctgcatctatctgcagaactcaacatagcttactgtgatttataaggtgagggagcagagctactttccctttagggcacattgtggaatgttcacatgc

SEQ ID NO: 156728 - DNA, 583 bp, Homo sapiens
cagttctgctccagggaatcatcagaggcacagattccttctataattttgctgtgccatttctaaggagctgcatctatctgcagaactcaacatagcttactgtgatttataaggtgagggagcagagctactttccctttagggcacattgtggaatgttcacatgcctctttccttaaaccctattgctctgaatttagtcatatagccacactttggtacggtgatgctaagaaatgtagtctttatgttaggtggccatatgatcagctaaactttctaatagtataaaaaagaagagagggcatatacaaattgggagataaacagtagtttctctcatagacctgataaacatattatgtttgcttttagttgcggaagaaacttgctaaaatattctgccacttattttgccattaatatatagagatagtgacaaacttaagatgaaakgcaacatagaacatgaagtcaattggaaatacatattatttattcctaagtgcatcttagacatctgtaagttggatttgtaattgatgtctgatgttagatcacaaagaaatgaaggtatgtt

SEQ ID NO: 156729 - DNA, 509 bp, Homo sapiens
agtttatttgtacatatcatccactgaaaacatactgaggtaccttctgcactcaaatacacaaatacaccagcaggstcttgaaatgtgcttatgggattactgttgctcttttgtacctcatcgtcacctcaagactttatcatgagaaactattgtttctttagcctgagctctaaagagagcatgcatggaacaaacctgaacccaactcttagcaagaagccaagccctggttaagtgcccctatcttgaagcaaatttgcttcctgtgcacagccaagaagcatctatgagtaaacaggaatagatggctgttgctttaaagcactgtgtttttagtgatttataacccgacattagctgaccttcgaacacgaacacacacatgcgcgtgcgcgcgcacacacacacacactctcaccaggcactgtcctggcaagtcttaacagtatataagctttgaataatcagggagaaaagctgcaaggaattgcagccaggaattc

SEQ ID NO: 156730 - DNA, 598 bp, Homo sapiens
caatcaaattcatcttacagctctgtttcctctgattacacctaatcctcagatctaataataatcccttggagttttcaagctcttgctcrtagaatgcagcagttttaagtctcagaaacttgcatcactaattccagtggagaagtgagacttatcccagcatttccagcaaaatatcctaagagtcaatctgattagataaacctgagtcacatgcccaggactctgtacctcaaactgtggccaaggagtaatattgctaactgagtcaatcctgaagctagatcctgaagcctcacatgtaattaactgtattcaaatcatttgggcagaaaacaggaggcatctattacaatgtacctgtcacttagactctccataatacgaagagaaaaatagtccatcaaaatttatgatggccttctgccaagtacgggctgtaagaggaaaaaggaatcgactaagatcactactggtttgcacagggttgagcatttcctagtttgaacaagatttacagcagtttgcaaacatttttatgtaattgaagaccactcggtagacttttccgggagtccagactgttgcattgaac

SEQ ID NO: 156731 - DNA, 598 bp, Homo sapiens
caatcaaattcatcttacagctctgtttcctctgattacacctaatcctcagatctaataataatcccttggagttttcaagctcttgctcgtagaatgcagcagttttaagtctcagaaacttgmatcactaattccagtggagaagtgagacttatcccagcatttccagcaaaatatcctaagagtcaatctgattagataaacctgagtcacatgcccaggactctgtacctcaaactgtggccaaggagtaatattgctaactgagtcaatcctgaagctagatcctgaagcctcacatgtaattaactgtattcaaatcatttgggcagaaaacaggaggcatctattacaatgtacctgtcacttagactctccataatacgaagagaaaaatagtccatcaaaatttatgatggccttctgccaagtacgggctgtaagaggaaaaaggaatcgactaagatcactactggtttgcacagggttgagcatttcctagtttgaacaagatttacagcagtttgcaaacatttttatgtaattgaagaccactcggtagacttttccgggagtccagactgttgcattgaac

SEQ ID NO: 156732 - DNA, 405 bp, Homo sapiens
tattcaatagtcttataaggttaataatatcaagggatgtgtcctagaaatattatccatcctaccagggttgaaagtatacttgacacataataagtttgtactgaatctacttctcttttcgatgagcttagaatgtacaaatatttctaatgatgaaacagtwtgaaggcacatgttctgtaggggaataaaagtttcagctgtgtacatttcttataaaaatagtattattgtactataagcactttaataactgcttttcacctctcatttaatcatgtctgttaacaaccttctattaccatcagatgacaaatatttatcagttgtccccaaacagataaaccttaggaaatatattgttgtagccgacactaatactttgttaatgataattcaaat

SEQ ID NO: 156733 - DNA, 485 bp, Homo sapiens
gtgcctaaaggtcatgaactctagttgtccatagagagaactttcttagcattacaacttctaaagattttcttttctttcctgtcttattttttcactcctctccaatatttctcaggatcatctccctcaccaaaaaaaaaaaaatacacttgcactcagattcttattcaggaactcttctggatgtaacacagcttatttccgtgaacaaatgttatgttaccataaaactttttgagtgctctgagaaataacttaatgtgkgtgagcacatgtgtatataatgcacactgtattaaatgatatctagacatatatatcctgtacattatatttaatatggcatatatattaaagataattgacatgttaaaacatataattatacaatcatataattaaaataaatatattgcaaaatatattctaaaatgtattttaatatattaatgtcagtagaaaatatttctacttaaaaattt

SEQ ID NO: 156734 - DNA, 603 bp, Homo sapiens
tttttccaatttgaactgaattataatttttcctggctacagttctcaaaaataatgttttcaaatttttttcttctttcttttcttttttccaccattttttttctaatttgaaatcacttaaaactaagttgtgctttcttaaagccctacaaactgaagctagacaacttaagcttcagaagaaaataacagcaacctatttacacacataagctactttcttacctgcctatggatgtatggacttaagagtaatatagtctatatcaattttccagaattattttttttgtttgttgtttttctccattccctgcccccattttctcttcgtaggacatgagagttcacaacctgttaaaaatgagctttcctaataatgtgggacctacccatctaggaataaaccatcctaaccatgagagatcagacaaaacctgatatcagacttattttcttctaaaatgcattctgcaaaagggggaaaatgtgaaaagcaaataaatcttggagcctcaaaatcactaaagtaaaggaaagagtcaagctgagaactgcttaggacaaacctgyctcccattctattcaaagtcatccctc

SEQ ID NO: 156735 - DNA, 633 bp, Homo sapiens
aatatatgtaaatcagtaagttaatagcaggtgtcactgaaatccattgaccacattggtgagatgcaatagggtcaccatttttctraaaattgataaataaaccaaagaaagactaaacatgtattctgcctttagtaccttaacataggctagccaaaattttcattagggaaagttcttatttgtagacaaaattcagctaacaaatgaaggcatttataaaattagattataatcttgaaacttttaattaaatggtaaatctaagcaaactataaaaattaagtgaagatcaagtagaaattttgtaatgagtgggtatgaatgacagcatctgaagacatctgatatggtttggctgtgtccccacccaaatctcatcttgaattgtaactcccataattcccacatgctgtgggagaagactggtgggaggtaattgaattatgggggcaggtctttcctgtgctgttctcatgatagtgaataagtctcacgagatatgatggttttaaaaatgggagtggccctgcacaagctctcttctcatttgccaccatgtgagatgtgcctttcgctttctgccatgattgtgaggtctcctcagccacgtaaaactgtaagtccaat

SEQ ID NO: 156736 - DNA, 633 bp, Homo sapiens
aatatatgtaaatcagtaagttaatagcaggtgtcactgaaatccattgaccacattggtgagatgcaatagggtcaccatttttctaaaaattgataaataaaccaaagaaagactaaacatgtattctgcctttagtaccttaacataggctagccaaaattttcattagggaaagttcttatttgtagacaaaattcagctaacaaatgaaggcatttataaaattagattataatcttgaaacttttaattaaatggtaaatctaagcaaactataaaaattaagtgaagatcaagtagaaattttgtaatgagtgggtatgaatgacagcayctgaagacatctgatatggtttggctgtgtccccacccaaatctcatcttgaattgtaactcccataattcccacatgctgtgggagaagactggtgggaggtaattgaattatgggggcaggtctttcctgtgctgttctcatgatagtgaataagtctcacgagatatgatggttttaaaaatgggagtggccctgcacaagctctcttctcatttgccaccatgtgagatgtgcctttcgctttctgccatgattgtgaggtctcctcagccacgtaaaactgtaagtccaat

SEQ ID NO: 156737 - DNA, 633 bp, Homo sapiens
aatatatgtaaatcagtaagttaatagcaggtgtcactgaaatccattgaccacattggtgagatgcaatagggtcaccatttttctaaaaattgataaataaaccaaagaaagactaaacatgtattctgcctttagtaccttaacataggctagccaaaattttcattagggaaagttcttatttgtagacaaaattcagctaacaaatgaaggcatttataaaattagattataatcttgaaacttttaattaaatggtaaatctaagcaaactataaaaattaagtgaagatcaagtagaaattttgtaatgagtgggtatgaatgacagcatctgaagacatctgatatggtttggctgtgtccccacccaaatctcatcttgaattgtaactcccataattcccacatgctgtgggagaagactggtgggaggtaattgaattatgggggcaggtctttcctgtgctgttctcatgatagtgaataagtctcacgagatatgatgrttttaaaaatgggagtggccctgcacaagctctcttctcatttgccaccatgtgagatgtgcctttcgctttctgccatgattgtgaggtctcctcagccacgtaaaactgtaagtccaat

SEQ ID NO: 156738 - DNA, 451 bp, Homo sapiens
cagaaagagagaccgagtcacgtctcagaacaggagtgaaggcttattaaaaagttttagaacggaaaggaaacaaagggaagtacaacctggaagagggccaagcgggagacttgagaagccaagtacacagcttgacctcttgacttggggtttaatacwttggcatacttctgggatcttgccttctcctcactcctaagatcttactgggaagctgctggtcagtttcaggtgttttccattagaagattgcctttccctgccaccggctgtgaccaattactactttagagaaacagttaacaaccacttgaccatcacctgaggggctcccagcacatttggtgtgtggaggaggggagccctctcctgccctgctcatacttgactagctatccactgcaacaatatttcttgaatatcttttagtactaagtaatgagaattc

SEQ ID NO: 156739 - DNA, 631 bp, Homo sapiens
tggtgtgtggaggaggggagccctctcctgccctgctcatacttgactagctatccactgcaacaatatttcttgaatatcttttagtactaagtaatgagaattctgatgtttcaggagtgattgttacacaaartgatataaataaaaaggaaattaagcatctaatattaatatgtgtttgaaatacatctggtaaaaaatatttcttaaaaaatgaagagaactataattgacatttaatgtttagtttctgaaatttcagtatgaatagagaatgctgtcattcttacaacatgaatccagtgatacaggccttcaaaatagagaaaataaactatttttaagagtaattgtaggtaaatgataaatgcatattgctactgcaaattgtaatggcatgagtggtgtcaaaggtgtgcttttctattgaacttttttgaatataaaagtaatttaaacttgaatagacgaactcataaaggttatctgcttcagcttctgaactttatctgaaaagccacactactcactgtcagtcataacaatgcactatgatcaatgtcagtgctgtgatattttctttcatattttggtcttccaaggagacatggttttttatgaatttaaa

SEQ ID NO: 156740 - DNA, 505 bp, Homo sapiens
ccaaccaccattatttcattcaatagagtagaacactgaaactggctagagtctccaattctgcccaaattggagtgaaggaagtgaaggagattaaggtctgtaaaactctcccttcagcctgctcaatgctatgagaaaatacttggatctttgtcaatcctagattttcaccctacctccagtctttcccagcaaatygactatgcccgagtctcttttttttttcctgtttgcaaattacattgtaatttatagagcaacttatttggaagattgttgtcattctcattccatcatcttcattcagtttctcaaatagaactcttccatctgccacatcagattcttgccggggcatggaggagtgttgtttgtttaaaatgcagattcctgggcccatcaagtttactaatatcaacttggagggttggggtttgtctgcactttaataaattggtaaaatacacataacatacagtttaccatcttgaccattttaagt

SEQ ID NO: 156741 - DNA, 401 bp, Homo sapiens
gggtcagaatctgtttaaagagagtttatttaagggcaaagtttgagaataacagccctggaaacatagattcaaaagaatggaagtcagtattccaaagtattaaagtttgggatcatttatataggcaaagtttagagaggcttaayggaatttcaatggctttgtatataaggcttaatgcatagtcccaacaatctaattagtcaatggtctttttctctggggaaaggtatatttaacattccacaaaatatatttaatcttccactgaagacccatggggtattttgtaccatctagtttgagttaggtacagaacaatgaaggaggcagttcatctataacaaaaatctgatttgaaggggagaagatctgatctcttgtctctcctagtcata

SEQ ID NO: 156742 - DNA, 401 bp, Homo sapiens
gggtcagaatctgtttaaagagagtttatttaagggcaaagtttgagaataacagccctggaaacatagattcaaaagaatggaagtcagtattccaaagtattaaagtttgggatcatttatataggcaaagtttagagaggcttaatggaatttcaayggctttgtatataaggcttaatgcatagtcccaacaatctaattagtcaatggtctttttctctggggaaaggtatatttaacattccacaaaatatatttaatcttccactgaagacccatggggtattttgtaccatctagtttgagttaggtacagaacaatgaaggaggcagttcatctataacaaaaatctgatttgaaggggagaagatctgatctcttgtctctcctagtcata

SEQ ID NO: 156743 - DNA, 533 bp, Homo sapiens
tggactcatccctatgcaggctccctccactccataaaagggaaaccctttctctctctcccttttcctttcctaacttgggactcttggtggacagcatctaagcatggagacaactgcaggtctctggctggggccactctccagtgagargcgcctgaccaccactgccctgcctggttccaccaaggaactttgtcttttccttttttttcttttttcagtctccttttccttttttttttttttttttttcagtcctgtggccactctctgattttacctgaaggccaaggaatgaacaaggatagctgccctgcccaaaaaagagaaggactcttttctatcctttctggttatagtcccttatcactatgtgtgacacagttgggagcagcagttcatccaaggtaaattcacatacctttcaggtgatttcaaccctctctttcttatgctaaaattctcctgtggagcccaagtgtgcccatgatgccagaagataatgtctcttaagtgttttgacctccctt

SEQ ID NO: 156744 - DNA, 533 bp, Homo sapiens
tggactcatccctatgcaggctccctccactccataaaagggaaaccctttctctctctcccttttcctttcctaacttgggactcttggtggacagcatctaagcatggagacaactgcaggtctctggctggggccactctccagtgagaagckcctgaccaccactgccctgcctggttccaccaaggaactttgtcttttccttttttttcttttttcagtctccttttccttttttttttttttttttttcagtcctgtggccactctctgattttacctgaaggccaaggaatgaacaaggatagctgccctgcccaaaaaagagaaggactcttttctatcctttctggttatagtcccttatcactatgtgtgacacagttgggagcagcagttcatccaaggtaaattcacatacctttcaggtgatttcaaccctctctttcttatgctaaaattctcctgtggagcccaagtgtgcccatgatgccagaagataatgtctcttaagtgttttgacctccctt

SEQ ID NO: 156745 - DNA, 566 bp, Homo sapiens
aataattaaccattcttttagtttgttaaacttaacctgatggctttgcatgactaccaaaagctggggatataccaggcctgtaatgttaggggactggcctagtgtcccagcctacttccagggacaaactcattggtctatgggatggagatatgtagcccaatggtcagtaaaaaataattttgttggatcaagtcccaggttctctaagttgtttattttagccaccaaccatagtcaaaaactacaaaaggaaaaatgctctactacctcagcttgtatccagagcaattctctttctgcctttgcggtaactatgccagttccattactttcattggagaactccaagagagtcaatgtaactggatatttgttgctgggttacatttcctagttaatacctctgcaggaattcaattactaaacagaaatcttgagcaggaagacaaytttctactttatcaggtccctggaccaacacagcccctgttttctgtcgacaaaactaaaacttctagtttctactctggccgccctcatgcaggttacctgtgttcacc

SEQ ID NO: 156746 - DNA, 596 bp, Homo sapiens
aattctttatccagtgaaactattctccaaaaatgaaaaataaattaagatgttttgagaaaaagaaaaaaactgaaagaattgcttctggactggccagagaagaaatactaaagggagtaatttaatcaaaatgaaagaaaaacggacatcaattagaattctcaaaaaaaaataagcaacactagtaaagataattatataggtagatacaaaatcccttataaatgcatactagtttgcaactcattgcttctcccatctgactaaagtgacaaatgcataaagcaataattktaaaactgggttgatgaccttataatttaccagcatgtaatttgaataataaaagcacgaaggaaaaagtgagagggagcgaagctgtacaggaacaaagactttatactatttaaattacactggtgctaattcaaagtggattgtttgaaattaaggttaattgtaatgcctagatcgattaataagaaaataactcagtaataaataaaacaacagggaaattgaaggatacactaaaaaatcctattttcagagggaaaagcagtaatggaggaaaaggggatcaaaaatatgac

SEQ ID NO: 156747 - DNA, 596 bp, Homo sapiens
aattctttatccagtgaaactattctccaaaaatgaaaaataaattaagatgttttgagaaaaagaaaaaaactgaaagaattgcttctggactggccagagaagaaatactaaagggagtaatttaatcaaaatgaaagaaaaacggacatcaattagaattctcaaaaaaaaataagcaacactagtaaagataattatataggtagatacaaaatcccttataaatgcatactagtttgcaactcattgcttctcccatctgactaaagtgacaaatgcataaagcaataattttaaaactgggttgatgaccttataatttaccagcatgtaatttgaataataaaagcacgaaggaaaaagtgagagggagcgaagctgtacaggaacaaagactttatactatttaaattacactggtgctaattcaaagtggattgtttgaaattaaggttaattgtaatgcctagatcgattaataagaaaataactcagtaataaataaaacracagggaaattgaaggatacactaaaaaatcctattttcagagggaaaagcagtaatggaggaaaaggggatcaaaaatatgac

SEQ ID NO: 156748 - DNA, 496 bp, Homo sapiens
agaattaattttaagcagagataattttactgmaaagctgataaaagttctggctcagggcttctcacttccagggacactgtgagagtgctctgctgctgggaatgacatttgaagctaggaaggaaagccaggttgcagtccagagacatttcaatgccagcctttcttgtgttatcaaaaatgtccttaggtgatatgaaagggaaaaaggctgtaatttcacagctcttgtaatttgatgttatttatttttccctactaatatatattcactttatcacttaactttgtatttatttatgtctttttttaattaaagaggacttctgaaattatataagcttcaggctccacaggctatatatctgtgcttgctttaagtaagcagttaataagttgaacacaaagtaatagagcaatgaagaatcagtgtggctatttcagtgaatcttgttttggccttcccaatttttgagaccactaaagaccatca

SEQ ID NO: 156749 - DNA, 496 bp, Homo sapiens
agaattaattttaagcagagataattttactgaaaagctgataaaagttctggctcagggcttctcacttccagggacactgtgagagtgctctgctgctgggaatgacatttgaagctaggaaggaaagccaggttgcagtccagagacatttcaatgccagcctttcttgtgttatcaaaaatgtccttaggtgatatgaaagggaaaaaggctgtaatttcacagctcttgtaatttgatgttatttatttttccctactaatatatattcactttatcacttaactttgtatttatttatgtctttttttaattaaagaggacttctgaaattatataagcttcaggctccayaggctatatatctgtgcttgctttaagtaagcagttaataagttgaacacaaagtaatagagcaatgaagaatcagtgtggctatttcagtgaatcttgttttggccttcccaatttttgagaccactaaagaccatca

SEQ ID NO: 156750 - DNA, 496 bp, Homo sapiens
ttttttagtaactcaaagaattaattttaagcagagataattttactgaaaagctgataaaagttctggctcagggcttctcacttccagggacactgtgagagtgctctgctgctgggaatgacatttgaagctaggaaggaaagccaggttgcagtccagagacatttcaatgccagcctttcttgtgttatcaaaaatgtccttaggtgatatgaaagggaaaaaggctgtaatttcacagctcttgtaatttgatgttatttatttttccctactaatatatattcactttatcacttaactttgtatttatttatgtctttttttaattaaagaggacttctgaaattatataagcttcaggctccacaggctatatatctgtgcttgctttaagtaagcagttaataagttgaacacaaagtaatagagcaatgaagaatcagtgtggctatttcagtgaaycttgttttggccttcccaatttttgaga

SEQ ID NO: 156751 - DNA, 603 bp, Homo sapiens
ggctattctggtttttgcctttcaatataaactttagagtaatttttaaatatctacaaagtaactttcygggattttgattggtattgcattgatttgatctattgtattgaatcaagctgggaagaaatggcatcttgtcaatatcaagtctttctatccatgaacatttgtttaggtatctatgcatttgtttagatattctttgatttctttcatcacggcttggcagttttttaatgtagatcttgtacatatattgataaaattatacctaagcatttttctctttttggtgttaatataagtggtgttatgttttaatttcaaattccaattgctcattgctggtatatagaaaagaaacagacttttgtgtattaaccttgaatcctgcaactttgctatatttacttatttttaaaggaaattttgtagtttatattttatttgcatgtaattctttggaggtttctacataaataatcaggccacttgtagacaaagacaggtttttttaaaaaaccttctttcccaatctgtgtgcctgctcccctcctctcatctgccttttattgtcttattgtattagtaggatttcca

SEQ ID NO: 156752 - DNA, 518 bp, Homo sapiens
ggtacacattctaaaatcaaccacacaattgtccataaaacaattatcagcaaattttaaaaaaccaaaattatgccaacgacactctcagattatagcacattaaaaacagaaatcaacattaaaaggttactcaaaacagtataattacatagaaattatataatctgctcctgaatgatttctgggtatgcaatgaaattaaagcaaaagtcaagaaattatttgaaactaatgagaacacagatacaacataccacaatttctgtgayacagctaaatcagtgttagaaggactatttatagcagtacatgcccatattaaaaagttagagctcaaattaacaacctaatatcataccttgaagaactagaataacaagagcaaaccaactccaaagctagcagaagacaagaaataaccaaaatcagatctgaaacaaatgaaactgaaatgaaaaaaatataccgaagataaactaatctagatattggctccttgaaataataaataagat

SEQ ID NO: 156753 - DNA, 550 bp, Homo sapiens
agacaagttgttgtgattgtaaaccaaagaatcaatataagtggaaataaacccatacagaatctgacgaagaataatgatggtcagtagtatatctaggtctacatctaacttgctgcatttttttctgctatttcttctcaaacttatttattaacattgtgctaataaagcgttgttaaaacattgtgttaactcagaaaaaaatgtagctttctttcctctttgctkactctatccaaagacatgtagaattaaatgcataaatacttgtcatctattgcttgtaaacacaacacaaagtttgacacagagtctccctggagtaagatcaaggtgtcagctggggcttgtgtgacttgctggtagcactggggagaatccatttccttctatttttcagcttctagaggacatccacattccttggcttgtggtaccttctacatcttcaaatccagcaatggagagttgggtctttttcacatcacaactatagctgacccttttctactacccctacccctttttcttccattttaagaaatca

SEQ ID NO: 156754 - DNA, 550 bp, Homo sapiens
agacaagttgttgtgattgtaaaccaaagaatcaatataagtggaaataaacccatacagaatctgacgaagaataatgatggtcagtagtatatctaggtctacatctaacttgctgcatttttttctgctatttcttctcaaacttatttattaacattgtgctaataaagcgttgttaaaacattgtgttaactcagaaaaaaatgtagctttctttcctctttgcttrctctatccaaagacatgtagaattaaatgcataaatacttgtcatctattgcttgtaaacacaacacaaagtttgacacagagtctccctggagtaagatcaaggtgtcagctggggcttgtgtgacttgctggtagcactggggagaatccatttccttctatttttcagcttctagaggacatccacattccttggcttgtggtaccttctacatcttcaaatccagcaatggagagttgggtctttttcacatcacaactatagctgacccttttctactacccctacccctttttcttccattttaagaaatca

SEQ ID NO: 156755 - DNA, 501 bp, Homo sapiens
ataaacttattctctttgaaacattgtctgcagaaatatttagaagtctaagacatagttaggttcctcccagaaatatatatgtttctgtaaaatattttcatatactatgtttataggtttttgcattaaattcttaatgtggccttttcaggccactcaggaaatatgaattaaaacaaatatcttcttaagctatatttttaaaaattacatttttgtttctattatttattttatattttttcaacaatgccatgcattttaatagtactttaaagttgtctcagattttctagttttttagaaatttaagaaggtattttatattatttatctaacctatccaataattgaaattttagcaaacctaatatgtaaatatgtttctcccttatgcaggtgtaaaactttgttgacttatttattttaaattttggagtgtgcrcctctatttaagtgaaattattctgagatactttttttttttttttttttgag

SEQ ID NO: 156756 - DNA, 660 bp, Homo sapiens
tgtacacaatatttcactaaaaatatataaaagagctctaattaattggcttaagaaaaatgaaagcatttaaatcaaatactttatcagaaaaaaagactagtcaaatgctttttaaagtttaagtgactctagtaaaatctttaataataagctaactttaaaattattggtaaaacaatattagaaatgtcttaagaattggcagcatacatttttgtttgcatttattgatgaagcaatttaatacctacccctgccaaatactacaagatgtcaaaataggtgttataaaactataaacccagccccaagcaaagatcaaagaatgatctttgcttgtgtaatttttaataaataagacattgatattggcttaatgaaaatagctaaatcttgaattatttagtaaaataaccataacttctwatcttgtggctttaggcaatctagtccccaggcaggaatagggtttgtttcgggaaaggactgttatcttgtttgtttcaaagctaaacttaaactaagttcctcagaaaagttagtttgacctatgcccaggaataaacaaagacagcttggaggttagaagtaaggtggagtcagttaggtcagatatgtttcactgtctcagttataattttgcaatcgcagtttcat

SEQ ID NO: 156757 - DNA, 601 bp, Homo sapiens
tacattctaggtgggaagaatcttttggccgatgatgtttcaaaagatcagagacacaatatgtcctggctggtatcttatataaccctccttacagggactattggtccacacatgtcctgtttgcctgcagatttgtaggtcactatcattatcaaatattatacaaggcttaaggattccatgcgtgggcacatatagaaagaaccatgagttatttattacctgatgataatgctggcaagaggtggcatccctacccagggatagtcattccaacarggaatcccggctgagatgtttggttagatcattaacattttttcatagttcttctaatgttttgggttacatgtgttctttcttactctccagacccctgtgctcttagcaattatgaatgtgatgttgtaatatttgaggtctcccagatatggtcccttccctctgattttaaaacacagggggttattctgttaactttacccagtgtaagggtgtgagtcttgagtttcttttataaagtcataaaaagggcaagctatcttactgtacttggatatccacaatatataaaatcctttaatgaacaagaatcctc

SEQ ID NO: 156758 - DNA, 596 bp, Homo sapiens
caggggctttctgactaataaacttgtctttgaaaattagctgttcctcaaccaaatcagaataaagagaggtgtgtttaactgaagcttctctcatccyctctaaaaaggctgaggcattttcttctagtttctgatctatcatggaaagcttgaagtaattaacaggtttgtctctggtccttttctataagctgtctagtatgcacatctaaaaatggtttctttccactcatgagaaatggtttctcatccctgtgggatcacaggggtttcaattaaggttttccagggacactacctctctttctattgggtatgtggtttctggttctttctcaccttcctcttttctcaactagtgatagcagacatattgttggtctccaaatccttctgctgcctgcagggctgcctatctctcagcagcagttagtgttagatttaggagcaacataacatctctctacgtaactcaggttttggaaaacctctatatattgattggtgttataagacaacttgcgtaagtctcgttttatttttctaaggtcctgcaatgaaaagggaacttggaccctggtggtaccatgtcc

SEQ ID NO: 156759 - DNA, 491 bp, Homo sapiens
gacaaagttactcttcaaaaacacaggagtgtttaaacaataaaacagacattgattgaaggaggctaagtaaacatgacaactcaatatatggtagtagcctggtcgatatcctggaacagaaaaaaataaatatagttgtggaaaagctgatattatccaagtagagtcaatagtttgatagtatttcactgatatgaaattcttattttgacaaatttcccatggctatttaagacattaataaatatttagaaaactcagatgaaaaacttagaaaacattttgaaaataaagaaccctaatgggctgttgcagactggagttagtccaggggcctttaggtacactgaatgtagccttgccagaacccttcagttgtgccagtacctccttccaaccccacatgacagctagatcatccatgaaagraaattggattggaacagagcaaacattcccaacacctgagggcaatgggggattgacaa

SEQ ID NO: 156760 - DNA, 586 bp, Homo sapiens
agtgtgttgttttctgaatttgccaactctagaccttcatagtctccagaaagactttttgtccatatgggaattgtcctgagctcatccctgcagagttatgcacctcctaggctttagttcactgtggcagtatttgtgtttccttatccttatatatgcaattccatctgttggctctcctaaatgaactttctgagttcttgtcaatacacttracccttacctgagcagtgatagatgtcaatataaatgtcagtatagttggatattaagtaagcccccaaaaaattgtgtaaccccgatcaacaaaagtaacaaagatatcgatttcttatttacaagaaaaaaatgaaaacaagaaatagaaaaatagaaatgttttatttttgtttgcttttatttttccatttttagttttcaagggaagggatagagagtggaaggaaatagaagatgaaaaaaaagagaatgctctggggtcagaataagtagaatacgaaatatccaggatttggagaagaaaaaaaaaagagagaaatagacatggcaggtgattactgactcaaaaatgaacttttgtgta

SEQ ID NO: 156761 - DNA, 471 bp, Homo sapiens
aattgccacattgtcttacaaagcagttgaactaatttacactccaaccaaaagtgtgaaattgtgctttttctccacaacctagccagcrtctattgttttttgactttttaataatcatcattctgcctggcatgatattgtatctcatcgtggttttgatttgcatttctctaattatcagtgatgctgagattttttttcatatgtttgttagccaaatgcatgtcttcttttgagaagtgtctgttcatgttctttgcccactttataatggagttagttgttttctttttcttgtaactttatttaagtttcttgtagactctggatattagacctttgtcagatgtatagattgaaaaatcctttaaaaaaccaaatatactctttgtctggattacataataatacatgtttaactttctttctcctctacttttattttttatctgattttctaaatactaa

SEQ ID NO: 156762 - DNA, 471 bp, Homo sapiens
aattgccacattgtcttacaaagcagttgaactaatttacactccaaccaaaagtgtgaaattgtgctttttctccacaacctagccagcatctattgttttttgactttttaataatsatcattctgcctggcatgatattgtatctcatcgtggttttgatttgcatttctctaattatcagtgatgctgagattttttttcatatgtttgttagccaaatgcatgtcttcttttgagaagtgtctgttcatgttctttgcccactttataatggagttagttgttttctttttcttgtaactttatttaagtttcttgtagactctggatattagacctttgtcagatgtatagattgaaaaatcctttaaaaaaccaaatatactctttgtctggattacataataatacatgtttaactttctttctcctctacttttattttttatctgattttctaaatactaa

SEQ ID NO: 156763 - DNA, 383 bp, Homo sapiens
agaattcctattggccacccactgctctttgcctcacatttcttacttttctgaatgtgtgtacattgtgtttatccgctcctatttcagcattttacacgttgtgtgtggagggcaaatcacatttgtatttagctcatagaccaccagatgaagagaagcatcatgtgcaatcttatataaatcattggatcctgaatttcaatcctgattgtcattaaatgtcttttggatatcctagtatctctgttacattatttcccacacaaaggtatataaattaatgcatccaagagggcagactgtggttaattgccctgttgatttcagcatatcacmcttccctttatccacaccccatgtcatgttattggctgttcttt

SEQ ID NO: 156764 - DNA, 596 bp, Homo sapiens
attaaaaaccctgcaatggcctctaagtaaaatgaagagttgcatacctctcacattaaatcaaaagctaaaagcgattttgcttaaagagaaagccatctagaaagtcgagataggttaaaaaaataggcctcttatgccaaataattagccaagttaggaatgtaaagagaaagttcttgaaggaaattaaaagtgctactccagtgaacacacaaacgataagaaactgaaactgccttactgctgatacatagaaagttttagtagtctggatagaaaatcaaaccagccacaacattcccttaagtcaaagactaatccagattaaagcccttagtsgcttcaattttacaacagctgagagaggtgaggaagctgtagaagaaaagtctgaagctagcagaggttatgacatttaagtaaggaagttgtctctataacataaaagtgcaaggttaagcagcaggtactgatgtggaagctgcagcaagttatcaagaagacctagctaagatcattgttaaaggtggctacactaattgacagattttccatgtacatgaatcagccttctattggaagaaaatgccatc

SEQ ID NO: 156765 - DNA, 387 bp, Homo sapiens
attaaatttatagaaaatacaatttgcctaaaaataagaaaataaaatcatgcagaagataaatggayactttttaaatacagagttcatatgctacatttttgcactgttattatcccttaaatttataatagtgatttttgtaatgattaaatttataatagtgatttttgaaatattaagagagaaacagcaatcaatgtgtatatcaaaaaagtggaaagatttcaaataaacataaagatgcatctgaagaaactacaaaggcaagaacaaaccaaaccaaaaattaagagtaggaaaagaataaaatcggagcagtactacacaaaataagtattaaaaatacaaaaaaaaaatcaacaaaatgaaaaaagtgcataatgg

SEQ ID NO: 156766 - DNA, 497 bp, Homo sapiens
caaagaaaacctcagctaggtactatgcaagaaaaccaaccccagtccacatagtcatcagaatcaccaaggccaatgcaaaaggaaaaatcttaaagcaatatagagaaatgggctaagtcgctttggaacctggtcagactagcagcagacctctcagcagaaacctttcaagacataaatgattaggggcatatattaagtgtccttaaggaaaaaaaatccartcaagaattttatatcttgccaaactaagcttcataagtgaagaagaaataaaattcttctcagacaaagaaacatttaaggaatttttttcaactagactagccttacaagaagtccttaagggagagccaaacatggattccaagaaacattacctactaccacaaaaagacagttaagtacatagcccacaggcactatgaaacaactacacagtcaagtcaacatgataaccagctaacagcatgataatagaatcaaaatcacat

SEQ ID NO: 156767 - DNA, 648 bp, Homo sapiens
gaattctggaaaagtacatagtagtgtggctgctctaatccttagtttaatatgaaggatgtttcttgacatatattagaacttatgggacagggaggctggtacacataattttagctactgtggaacaataaaatccacatttccttagatgttctgtacagctttatactgtcagtatgctgtttttcttcctttttatttgagcctcaccaccagtctgaagtccatgttttgcatggctgttgtttgtcatccttaaagcatattttcttgttgtcaggccttgtatcccagctacctccttctcctttwgtttctttagctgtcttttaggggaggtgtttgctgtgccattgaaaaggtggagataaaacactcatcacttattacaaggtgataatgaaagaaaatggatttaaaagatagcagctgagactaacattaaatgtagtggtacaagaatcagttggttaaggattaggagattcagtcaaaaaggtatttggtgagaactaaagacaagcttgggtctggagatggagttacagtgcataagcatagtccctgttccccacaactcacaatagagtgtagtaattctcaaacctcattctgtaccaatcacccagaggcctttaaaaatac

SEQ ID NO: 156768 - DNA, 568 bp, Homo sapiens
agagcaatgcaacaaaactgagataagatacagatagacatctatatggaaatttgctctatgataaagatgatatctcaaagtatgcagaaatgtggaattatttaataggtgacatttggtctattatctatccacttggaaaaaaattaagtcatgttccagctacggattgagttgtgtttatccaaaatgcctatgtcaaagccctaagcctcattatgatggtatttagagatggggcctttgggaggtggttaggtttagatgagatcatgaggktgagcctctcataagattagtacccctattaaaaacttttcttgtctgtcactctctctctctctttctctctttgccttgtgaggacataatgagaaggtggctgtcttcaagccaggaagagagctcaaaccagaaaccagaccctgccaaaaccttggtcttggactttctagccaccagaactgtaggatatcaagttttgctgtttatgtcactcagtttttgttatggtggctcaagcacattaagacaaacattgtacacaaaattaaagcagattcat

SEQ ID NO: 156769 - DNA, 609 bp, Homo sapiens
cttaacctttctgtgctgtagatttcccatgtgcacggagaggtgaggatactgggtctgtctaatcacagagttcctgtgagcatctcatacattttagatacgtttaaaaattttctaaaaagctgtgaggaatactgaatgtgaggtagtagtattttcatatgtttgtcttaaaacctgacagctaagaagtttgttcatcttgtgtagacaaggaaactattacattacacaggtattttccttttcaatttaaactggccgaattgtcaattatctcagctgaagctgaacacaggtatgtgtacagaatcaatgttctttcattccaatgtcttctgtcattgatcatatgatttcataagcttagcagtaataggaaatattttaacagcaacattctgatattggtaggagttgaattctttggttatatcacatttcactctgaaattttttatgtcttttactctcgtgatktttttccatagacccttattttctgaataaaaggtacttacaaactaattttccatcttctacctaaattctggttctcttttaattcaattcctgcatactgaacctgaatctatggtttacatt

SEQ ID NO: 156770 - DNA, 381 bp, Homo sapiens
gctaaataagtgaaatgtgccattgtattcacaaagacaatgtggtgatccagaaaaactgtgttccctttttagccaatctctatttacatctttacactgtgtgctaatacacacacacacacaaacacacacacatttttttttctaaataagaacattggtgagaaaactctaaaaatcaaatctaggatgattttttgttttgtatattgcaagatatatgacgttgggcaagtgatgtaacctctgtgagatttatttgcataatggaatgatgaaacacaatgtatgcctgcactattgcaayacaattaacaattaaacaactcaaaagaataaaatattgatgagattatgcacagtgtgagagataattca

SEQ ID NO: 156771 - DNA, 607 bp, Homo sapiens
ggctgtatacctagagagagacatgcacaataattccagctgtgaagcaacagagagaatggaaagctttttagagagcccaaatttataaataaaagaaacaacaatacttactaataagaataatgcaaaatttatttttaattatacaaatattcattttaattacatgtaaattaattgtatacatatttcatggtttttatatttaattatatgtacctgtttggtgctgataccccaaagttataataaaaataataatgatacaatagaagcagagaattacattttacttacatgtgaaactagttcttgagtctgagcgctgggctccatttgtttgtttgattgcttatacaaacaaacagatgttcattagctgctaaagagtacagattcatgggaaatattctttgttatccaaaatgtaatttcyagtagcacacttctagcttactggttagcaaattattaaaaattaataaaagctaaacccaatattttccttatggcacccaagaaagtcgttacataaaaataaaaatcacggcactttttacctaagcccaaacttaataattcaagagataggcagtgaaggatt

SEQ ID NO: 156772 - DNA, 589 bp, Homo sapiens
agctaacctatgtgaaagagaatgagtgcacctagctttctgaaggtaacgtttttagtcaaaacacacattaatgtatggaattcatacctaagtgatgatttctcattaacttctgaggacacttagaaaaaagcaaaaggatactctccctaaatagcctatctcaatsagtaatactaccttcccacttcccacccagcctaagtcagcaacctgaacaccatctactcatctagtttcctctccagacttagccaaaaatgatttgataaacttgccctgatgattctacttaccaaacaccttttacataagttattttgttttctttcaatagcaacaaacttattacttaaagattacaacagtgtgatacatttttatttaataggtatttattatatgtctactaacatgccagccactgatatagtgctgtacatacagaagaggaaaaaatactacaaagttctgcggtgttatggaacttttaaatagtttcttcagccttgtgtcttccaatatagcccccatactgcagtcaaagtggtcaatgcccgaattagagcaatgtagtaggttaccc

SEQ ID NO: 156773 - DNA, 589 bp, Homo sapiens
agctaacctatgtgaaagagaatgagtgcacctagctttctgaaggtaacgtttttagtcaaaacacacattaatgtatggaattcatacctaagtgatgatttctcattaacttctgaggacacttagaaaaaagcaaaaggatactctccctaaatagcctatctcaatgagtaatactaccttcccacttcccacccagcctaagtcagcaacctgaacaccatctactcatctagtttcctctccagacttagccaaaaatgatttgataaacttgccctgatgattctacttaccaaacaccttttacataagttattttgttttctttcaatagcaacaaacttattacttaaagattacaacagtgtgatacatttttatttaataggtatttattatatgyctactaacatgccagccactgatatagtgctgtacatacagaagaggaaaaaatactacaaagttctgcggtgttatggaacttttaaatagtttcttcagccttgtgtcttccaatatagcccccatactgcagtcaaagtggtcaatgcccgaattagagcaatgtagtaggttaccc

SEQ ID NO: 156774 - DNA, 589 bp, Homo sapiens
agctaacctatgtgaaagagaatgagtgcacctagctttctgaaggtaacgtttttagtcaaaacacacattaatgtatggaattcatacctaagtgatgatttctcattaacttctgaggacacttagaaaaaagcaaaaggatactctccctaaatagcctatctcaatgagtaatactaccttcccacttcccacccagcctaagtcagcaacctgaacaccatctactcatctagtttcctctccagacttagccaaaaatgatttgataaacttgccctgatgattctacttaccaaacaccttttacataagttattttgttttctttcaatagcaacaaacttattacttaaagattacaacagtgtgatacatttttatttaataggtatttattatatgtctactaacatgccagccactgatatagtgctgtacatacagaagagraaaaaatactacaaagttctgcggtgttatggaacttttaaatagtttcttcagccttgtgtcttccaatatagcccccatactgcagtcaaagtggtcaatgcccgaattagagcaatgtagtaggttaccc

SEQ ID NO: 156775 - DNA, 526 bp, Homo sapiens
caattgcacagcagccctccatcttggtcttgcattttaatgttattctgtttttattattttttaattctacattctctgaactatttttcctacaattgcaaagattacagtgtccagtgaatggatactatcccacattatttgtggagcamaatattgctttctatacttctcatttagggagatcagaagctacaaaataatttgacaaggagtaaatgccagatgtgatctttcctaatcgattaatagacacacacctgcttctcttaagccacaagaagtattaatgtagacttaccagatgcttatagtggatgaaggttagtgaagcagcaaagcaaaaggttccataagctgattcctccctaggtaacagctaaagatatttttgcctcaggactttcataggaagaaaaaatgccatgaaggaaaaagaatttgagaaattagaagaaaaaaaatataaaaaaaagaaaaaaggtaggaacctgtttgtgatgaacatgagctgtatatagag

SEQ ID NO: 156776 - DNA, 658 bp, Homo sapiens
tggatgaaggttagtgaagcagcaaagcaaaaggttccatmagctgattcctccctaggtaacagctaaagatatttttgcctcaggactttcataggaagaaaaaatgccatgaaggaaaaagaatttgagaaattagaagaaaaaaaatataaaaaaaagaaaaaaggtaggaacctgtttgtgatgaacatgagctgtatatagagagttattctttttttaaaataataatattttcctctctaaatagaaaagatctttccataattcctaggcattaatggtatagtccagaatatgtctactcctatgactttccttgtgatcttggcaattaggattgttccaacacagtcttttgtgcatatggcttttccacacttaaaatatggcaggtcacgtctgtaatgcctggctctttccaccttgtaagtctgaattacagtataagtttaagtctagggccaagttgagaagctacgacaagcagtctatgttgttccaggaaaataagtaattaaaaaatattgttctcttatgagaatatagttctgtctttaacatctttcattatattactatgattctcaataaagaggctgatgtcttgaaaatcactgctctctaaaacgaaggagcctcagagcagtcactg

SEQ ID NO: 156777 - DNA, 658 bp, Homo sapiens
tggatgaaggttagtgaagcagcaaagcaaaaggttccataagctgattcctccctaggtaacagctaaagatatttttgcctcaggactttcataggaagaaaaaatgccatgaaggaaaaagaatttgagaaattagaagaaaaaaaatataaaaaaaagaaaaaaggtaggaacctgtttgtgatgaacatgagctgtatatagagagttattctttttttaaaataataatattttcctctctaaatagaaaagatctttccataattcctaggcattaatggtatagtccagaatatgtctactcctatgactttccttgtgatcttggcaattaggattgttccaacacagtcttttgtgcatayggcttttccacacttaaaatatggcaggtcacgtctgtaatgcctggctctttccaccttgtaagtctgaattacagtataagtttaagtctagggccaagttgagaagctacgacaagcagtctatgttgttccaggaaaataagtaattaaaaaatattgttctcttatgagaatatagttctgtctttaacatctttcattatattactatgattctcaataaagaggctgatgtcttgaaaatcactgctctctaaaacgaaggagcctcagagcagtcactg

SEQ ID NO: 156778 - DNA, 553 bp, Homo sapiens
actgtttatttggtaacagttaatacaagtgagtttgaaatatgttttctgtataagtacggtgaagatatttacccagcattgtcaatagaaaaattcatatgacttaatattttgcgattcagtgccctacttacataatttctacataatatatattttaaatgtatatttttaagataagaatggcctacaaattttacatttagaaacatatttacactgtcttttgctattcagttcctgtctgttccctaastttttatcaggtaattatataggagaaaatattattttccagttgaattctttaatgaatacactacacatggcatattacctacctgtatcagttctttttcacactgctataaagaacttccatgaggctgggtaatttataaaggaaaaagatttaattgactcacagttctgcatgactggggggacctcaggaaacttacaattatgatgaaaggggaagcaggcgccttcttcacaaagcagcaggagagagagacagcaagagtggaactaccaaacacttaaaaac

SEQ ID NO: 156779 - DNA, 605 bp, Homo sapiens
gatattggtttgcttttaaatgaaacattgtactttagggaaattttttatttttatgacattttaaaaacagcaggcatatagagtatgcataaattccagtcttgtttatgttgattatctcagtgaaatccaatatcacaatcacatctcaaaaaatgaaattcaagaaagcattattattgktcaaacaggtagctcagtgggatcaaaataaatgtaaaagtgtacaactattgttttccaataatagcaagaaagtaacaaatatctttggcagagggacagattgatattctttataaatgcttttaattaaaaataataaaaagtcttgcatattgcctttaaaatgatgtagcacattttgaaagtcacagcagtagctcgaaccaacttaaaaaaagagcagtatcgttcatcagctttcacataggaggagcatgtgggcagtttgagataattttagccgttctgagcactgttacttctttttagaaggagccaatttaatgctttacaacttaaaaaatcatttaagtgggtgttctatttatatgcacagatatagctactgtcactggggtgtaaaaaaactagtttta

SEQ ID NO: 156780 - DNA, 605 bp, Homo sapiens
gatattggtttgcttttaaatgaaacattgtactttagggaaattttttatttttatgacattttaaaaacagcaggcatatagagtatgcataaattccagtcttgtttatgttgattatctcagtgaaatccaatatcacaatcacatctcaaaaaatgaaattcaagaaagcattattattggtcaaacaggtagctcagtgggatcaaaataaatgtaaaagtgtacaactattgttttccaataatagcaagaaagtaacaaatatctttggcagagggacagattgatattctttataaatgcttttaattaaaaataataaaaagtcttgcatattgcctttaaaatgatgtagcacattttgaaagtcacagcagtagctcgaaccaacttaaaaaaagagcagtatcgttcatcagctttcacataggaggagcatgtgggcagtttgagataattttagccgttctgagcactgtwacttctttttagaaggagccaatttaatgctttacaacttaaaaaatcatttaagtgggtgttctatttatatgcacagatatagctactgtcactggggtgtaaaaaaactagtttta

SEQ ID NO: 156781 - DNA, 654 bp, Homo sapiens
tttatctatttaattgtaaatatcaatggaaaaaacatttcgaatttgatttgaatgatattttgaaacagctaaatgactcattgtctatttgaaagaatacataggaaataatagaaaataaatatttggcaatgaaaagtaatctgacaatccttgacccagaatgaagacatcaatgggtaagataataatgaccagaaacagtcaagctccaattaagtattccaaatgatttgtgaaggagagaatgtgcatgaaatattgtacggtagttcactaccaattgggcataaagcaaaacaggcaatagtggagattatattgtcacttcagaacatacaccaaataaagtattaaaaaaacaaaaggttaatagatraattacatgtacctttcatctcggtaatacaatgaaagaaaacccagataaaagtgagtatttgttgcactctaggtaaagaattcttaaactcaaacggtattgaaaaaattgtaaagaaatattatttcactataatattttaggtataaatattatttgactataaaaattttaactttttttgttaaagttaaacagctcatgtttgctacaaaacaattaaagagaaaagtttacaattgtaatatgaatggcagtaatatggatgt

SEQ ID NO: 156782 - DNA, 654 bp, Homo sapiens
tttatctatttaattgtaaatatcaatggaaaaaacatttcgaatttgatttgaatgatattttgaaacagctaaatgactcattgtctatttgaaagaatacataggaaataatagaaaataaatatttggcaatgaaaagtaatctgacaatccttgacccagaatgaagacatcaatgggtaagataataatgaccagaaacagtcaagctccaattaagtattccaaatgatttgtgaaggagagaatgtgcatgaaatattgtacggtagttcactaccaattgggcataaagcaaaacaggcaatagtggagattatattgtcacttcagaacatacaccaaataaagtattaaaaaaacaaaaggttaatagatgaattacatgtacctttcatctsggtaatacaatgaaagaaaacccagataaaagtgagtatttgttgcactctaggtaaagaattcttaaactcaaacggtattgaaaaaattgtaaagaaatattatttcactataatattttaggtataaatattatttgactataaaaattttaactttttttgttaaagttaaacagctcatgtttgctacaaaacaattaaagagaaaagtttacaattgtaatatgaatggcagtaatatggatgt

SEQ ID NO: 156783 - DNA, 578 bp, Homo sapiens
cttctttaccccaaatcctctattgatttgattcatagtaatagtcaaagtctttgcaaagttctgcaagcccaacatgatttagacattcttcctctcttaatttttatcttcctacaccctgaccttcttcctcttcctgttccttgaccatgccagcgcatatcccctgtcagaaattttattctatctgttctctctgctgagatgttcttctctcatataactcattggttaactcccttacctccttcaaatctttatgtacatctcaccttctcaaggagtctgatacatatcatcctgttatatgcaaactcttctctactcaggactcctaacctgtatttacttgatctacrttttcttcatttcacagttaaacataatcaacttataatattggcacaaatgaaaagatgaaatggcacattttttatgtaatcctacagtaaactttggatttaattgcattattttaaaatcagattgcaattgttaatggtcttttttcttattaacaataaatttgttcagaataattttgtgcatcacacctaataatgagaagcatacct

SEQ ID NO: 156784 - DNA, 435 bp, Homo sapiens
agaatgtgcaggagttgcatyttcttcccgctaattgggcatctagacgccaaggcgtattcgctacctagagatacagcacacagataaacttgataggctctttgtgggaaagtgtttcatgaggggggattttatagcagaattttgaacaacacaagataaaaactttccaggcttctggctcctgatggaggaccaaggatgcctgtgaacttatcccttttcccagccatgaggagaggcagcagcaacagcagacgtgaaactctgaggactccccaaaaatggtgagacccaggttaaaggagaagagaaaaaggcagtgccagacagcagagtgaagtgtagggtggagatttgctctgccaggtactcaggactgctctggagcaaatcatcggaatgcagagaaggcatttgtgacaagcagac

SEQ ID NO: 156785 - DNA, 435 bp, Homo sapiens
agaatgtgcaggagttgcatcttcttcccgctaattgggcatctagacgccaaggcgtattcgctacctagagatacagcacacagataaacttgataggctctttgtgggaaagtgtttcatgaggggggattttatagcagaattttgaacaacacaagataaaaactttccaggcttctggctcctgatggaggaccaaggatgcctgtgaacttatcccttttcccagccatgaggagaggcagcagcaacagcagacgtgaaactctgaggactccccaaaaatggtgagacccaggttaaaggagaagagaaaaaggcagtgccagacagcagagtgaagtgtagggtggagatttgctctgccaggtactcaggactgctctggagcaaatcatyggaatgcagagaaggcatttgtgacaagcagac

SEQ ID NO: 156786 - DNA, 419 bp, Homo sapiens
attttttgttgcttttatgattaggatgtttttgttgcttagcaagttaatactggtgtattggaaggcaattgagttttttttgttactattgtttgtttttgatatggagtctctgtcgcctaggcggtagtgcagtggcgcgatctcagctcactgcaagctctgcctcccgggttcacaccattctcctgcctcagcgagtagctgggactacaggcgcctggctaatttttgtatttttagtagagatggggtttcaccaggtttggccaggatggtctccatytcttgatccacccgcctcggcctcccaaagtgctcggattacaggcgtgagccactgcacctggcccaggcagttgatttttttcagtcccttcagcctcttgcctgaacttgtttttcttttgtaagag

SEQ ID NO: 156787 - DNA, 334 bp, Homo sapiens
ctcatgacaataactgtatatatatcatttattaatctaggctctgtgcctttaaaaaaatctctgccatttccccagagtgtaccataggacttgacatgtagtaggctctcagtaagtgtttactaaatgatttaattaattcacaccacaactctaggatgctatctgcccccattttacaaggagaaaattgargcttacgcaacttgctccaagtcacaaggttacttagtggaaaactggggatttgaacccaaggacacatgacgccaaagtctgttttctttccattactccatgccaactccaacagcaaccaggaaaggtgggt

SEQ ID NO: 156788 - DNA, 577 bp, Homo sapiens
gatttgctggtgagctccaggcctctgccaaggctgtggaaaggaccatcttgggattcccctcctcagtacagagcattttaccaacacccaccatgtaggacaggagaccaggaaaggaggccccgggacacctgcctkccctgggggattgttagaagctttactggaattacattgaaaactttttagctcactgaaggaaaattgtactaaatactactaaatactaaataataccaaaatactacagtaaaagtaacactagtatactattaatagtattagtaatactatatctgttatatagtaacagtaacactaaaatactgaagtactaaattgtactatagttgaaggaaaatagtactaaacagaaaaattggtaccaaattttgtggtgataacactatttttaaagtcttatatagaattaagattttttccattcctagatactttccgccccacacacaataatttcctatagttcatatgcctattcaattggaattttgaaaatgaagatatttttaactgataatatcataaggacataactgggattttatagctt

SEQ ID NO: 156789 - DNA, 430 bp, Homo sapiens
actgcttttgctatattccattggttttggtagttgggtttccatttatgtttgtctcaaggtatttttaaatttttccctttttgtttcttgtatgactcaaatggtcactcaagaatgtgttgttgaattttcacatttttgaatttttttgcttcagggaaacagaaaaacacaagaagttttcagtaactgataaacacaataattttttagtaattgacattaaagaaatggagatctatgaagtacctgacaaagactttcaaaataattattttaagtaaacagtcmgctgcaagagaacacaaatagacaactcaataataccaggaaaaacaatacataaaaaaattagaagttatacaaagagatataaatgattaaaaaggactaaacagaagaagctgaataatgcaacgaatgagat

SEQ ID NO: 156790 - DNA, 597 bp, Homo sapiens
atctctgtattaggatctaaatagtaacacagaaatctcatcaaacagttcacagtgaggttacctaaagatgagcaccagcaggaaagtaataccattcctaggctggtgagccacagggagcaggtgttcctggagcccagggacaaagtcacctgatagaagtgtgaacctcagaagaactttctggagtgagctggagtcatagaagagatttagccatgatggggaagatactcatgacacagagaggagagaaatactctggattctcctttttctccaccccccagtcttgtrccagtttctctgttgttcaaatccagtaagaagcctaatgacctggcagactggtaaacaaagatttcaagggtcagtcctccctcgctctttgttacagagtatgtcagacaaaggataacagagagatctgagggccaacaggctcaggaacagcacaagctggtctacaatatagggcttgctctctggggccacaggctgttcttattcaacagctttctagctgccagagtttccccatttgcaaagccattttaaaatgcactgctcaggagcacccttttcatatgatgg

SEQ ID NO: 156791 - DNA, 499 bp, Homo sapiens
attgacaaattttacattcattttttcatactaagtcttcaaaatgcagtgcatattttwtactcacagcatacacttcaagagctcagtggctacatgtggctaggggataccatgttagacagcaagggtataaactaacgaacagtcaaatttttcatacatgaaggttattatattttgtgactattgtaacaaaatagggtaatgatatgtctgggagaaatctttagaatacctgctttaataagttagcttatcaattctttactgtatgagaataattaaacatccagaaagaatttgaaagcatttgttcccttgaggggcaacaacacccagaggtttcttttgcagctattaccctgcttagtaaacttcctttttcagtggtaatactaagatcagctcttatcaaaacttatctgtgaactatgaaatttcaaattggtggtagtattaataaggaacctggcccacatctcacattaaaaacata

SEQ ID NO: 156792 - DNA, 499 bp, Homo sapiens
attgacaaattttacattcattttttcatactaagtcttcaaaatgcagtgcatattttatactcacagcatacayttcaagagctcagtggctacatgtggctaggggataccatgttagacagcaagggtataaactaacgaacagtcaaatttttcatacatgaaggttattatattttgtgactattgtaacaaaatagggtaatgatatgtctgggagaaatctttagaatacctgctttaataagttagcttatcaattctttactgtatgagaataattaaacatccagaaagaatttgaaagcatttgttcccttgaggggcaacaacacccagaggtttcttttgcagctattaccctgcttagtaaacttcctttttcagtggtaatactaagatcagctcttatcaaaacttatctgtgaactatgaaatttcaaattggtggtagtattaataaggaacctggcccacatctcacattaaaaacata

SEQ ID NO: 156793 - DNA, 620 bp, Homo sapiens
acaggttgtacttgaagcccctggaatagacattctctagcytgaccacaaaagtcaaacgctgttggattgggtacctgcatgcaaacatgtgtctttagaatatcagaaataataattaagaaaagatagatgtgtggaatgagctccttcattatttgattctgagattcagagaggtatttgaggaaagcacataatggtgctatcatcaccactacctgagcaggtagcaccctagagccctcactatgcaacaggtgctgtgatgatgtccagcaacaacccttgaagtagctgctcttattctctctttacaaataagaggttaagtaacttccccaggtcatccagcaaggcagtgatggagcctgaattcaaacccaggcttgactccagagcccgtgctagacaaaactgtaccaccctccccatctcataagggttgtgccaagtgggctgatgtaaatgtgacctaaaattagattaaagcaaaatggaatgaggccttttgaacgtaaagggcaaattctgatcttgttttcagtccaaaaacaactcatttattcaatgtcttttggaatagatgttccacaaaaatgcattttctagctaactga

SEQ ID NO: 156794 - DNA, 305 bp, Homo sapiens
tcagaaacttctaggaattctacttcctctgttttctcaagctgggataatatctccctgcaaattcttcaaagcccagttggaatgtttctttcctctaagaaactttctgaccatttaagtctgaattgattattctttctgcagtggtgtctgttgaaccaaactgaatcttgctaaaatagaccccaaagggtccattgagattatgtggtccrgtttcctcattctacagttcaagaaatgaagtgacttgtccaataaacgcagcagggtgaacttctctcatagagcagacactgggt

SEQ ID NO: 156795 - DNA, 602 bp, Homo sapiens
gcagagacatgaagtaagaagtgaaagattaagaaaaattattgagttttgttatctacctacatgtaaaatgaagtatgtttatgctttaaaaacaaaatagtgaaggcacattctaaagagttgatttagggaaggtaaaagcaaaggtaagtagtacctaagaaaagataatggatttggaatgagaactagattagatcactggcctagtcacttayaatatggtgaatttaggcaagctgcccaacttcactgaaactttattcctcccatttataaaatagagacaatcctgcttactctatctacagggtttctgtaagagtgggccagctgctatatggtacatttccccatcttgctcaattcatccttgatgaatagcattacctccatatgaggcagagctgacttctctgtctgaacctttatgtgccccacaactattctggagtggtctgaagagatggtttactttctccagcaggtacaaacaaaccaaaagtgaaatcagtaatgatatgcagaaaaagtaactgttttgagaaagtttaaagcaatgtggatcaataacttacacataattcaaaactaaccac

SEQ ID NO: 156796 - DNA, 675 bp, Homo sapiens
ttgtgttaacttgggaaagttacttaactgctgtgagcattggttttctcatctagaacatgtagttaatattacctgccttgcatgatggttttgaaaatcaaaaatcatgacatacactgtgtgtggtatatggaaatcttttgatatatgaaagctgcttatgtagktggtgtagccttttacttctccattaaattgcagtcagtctgggctgcagatgttcctttattgtgaggtggtactaacagggtccagcttgcctgggaagattgctttgaggagaaaagcagtatttctaggacagggtctacatgaggaaataaagctggcctcatctgtccttattgagggaacaaaaaaaaattttttaattgaggtaaaatttacctggaagacattgcacaaatcttaagttatagctcagtaaatttttatgtatgtatgtacctgtgtagtcaccacccagatcaagatctagaaggatttcagtaccctggaaagatccctgatgcctcttttcagtcaatgtcctccacctcacctagaggaaactattattctggcttttataatcatagtttcactttgtctgttcctaattacataagtagcattatacagtatgcaatcttttgtgtttggtttcatttgctcaatgtaacgtttctgaaa

SEQ ID NO: 156797 - DNA, 544 bp, Homo sapiens
  misc_feature (1)...(544): n = A,T,C or G
atagtaattccacactctactttccacctactmgtcattctagtagtagtaatatatatgcatatgtatgatactaaatatatatgtgtatgaatgatacctactctgtgccaggacatccatttcattcccactagctgatgatggtgattctagttactgtcatgttgccttatatgcctctgttgttgtcgtcatcgtcgacatcatcatcatcatcattatctaacctatctattcagctgcttggatgaacacttctttttttcagcctgtgttttgctctcaactctgggtcccacttccttgttcagttttacctagaggtctcaatctcagtgggagcgtgagctcccaggatactatgaagttattatagaattactctctattagttactcccttaaccaataagggagtaattntataataattatctgtgtatagagataagccaaagacattagaattttcttgtgactgtggtgggtttaaaatttattcaaaggaactcaggaatctttcatcttcctcataataaagc

SEQ ID NO: 156798 - DNA, 516 bp, Homo sapiens
tattacatgttgtgatgtagtacacctggaagttcctaccactagaccataatttcctgcagaacaataagattactctgtctttatctccagtgattgtgagtacactaacatggccccctgaatytgtaatcatggatcaagagtttctgtattcccaaccatgggggcggagcaagatggcagaatagaagtctccacacatcgtcccttttgcaaggacaccaatttaacaactacatctacaaaaaaattaaaagcaccttcataaggacgaaaaccaggtgaacactcataggacctagttttaacttcatatcatttacagaggcactgaaaaggatgccttgaatcatggatgccaccccaccctcatccgcctgcagcagcaacatggtgtggagagtgttttggtgctctggggagagggagatcacagcatttgtgagacactgaacttactgctaccctgttataatagaaaataaaatcagaccaaactcagctaacacctgc

SEQ ID NO: 156799 - DNA, 516 bp, Homo sapiens
tattacatgttgtgatgtagtacacctggaagttcctaccactagaccataatttcctgcagaacaataagattactctgtctttatctccagtgattgtgagtacactaacatggccccctgaatctgtaatcatggatcaagagtttctgtattcccaaccatgggggcggagcaagatggcagaatagaagtctccacacatcgtcccttttgcaaggacaccaatttaacaactacatctacaaaaaaattaaaagcaccttcataagracgaaaaccaggtgaacactcataggacctagttttaacttcatatcatttacagaggcactgaaaaggatgccttgaatcatggatgccaccccaccctcatccgcctgcagcagcaacatggtgtggagagtgttttggtgctctggggagagggagatcacagcatttgtgagacactgaacttactgctaccctgttataatagaaaataaaatcagaccaaactcagctaacacctgc

SEQ ID NO: 156800 - DNA, 516 bp, Homo sapiens
tattacatgttgtgatgtagtacacctggaagttcctaccactagaccataatttcctgcagaacaataagattactctgtctttatctccagtgattgtgagtacactaacatggccccctgaatctgtaatcatggatcaagagtttctgtattcccaaccatgggggcggagcaagatggcagaatagaagtctccacacatcgtcccttttgcaaggacaccaatttaacaactacatctacaaaaaaattaaaagcaccttcataaggacgaaaaccagrtgaacactcataggacctagttttaacttcatatcatttacagaggcactgaaaaggatgccttgaatcatggatgccaccccaccctcatccgcctgcagcagcaacatggtgtggagagtgttttggtgctctggggagagggagatcacagcatttgtgagacactgaacttactgctaccctgttataatagaaaataaaatcagaccaaactcagctaacacctgc

SEQ ID NO: 156801 - DNA, 537 bp, Homo sapiens
tgcttgttctttgatgcacttttgaaacgtgatacatttatccctagagaggaaaaatttgaatccctcctgccactgtcacttaggtcaaaattaaattaattatctttaccaaatacagactgttatttgcatgttacttttttagtgaataatatcaccaagtagcatcaacataaaaacctgaagtcctcctagattcttctctctctctctctctcagctttttctcacctaattgatgaatgaatcttgaacattctacttcttgttccttccaaaaataaagtgatgagaagacgcaaagatagctacatgtagagattgggatgcctacaaaaggggacactggcatctatctctctttctccagccagacatgttctgaattgttgaataatgatttccattgctgccatgcaatttgcatgaagccttatgacaaagttcttgggaaaaataatgatgtgtgttccttcaagcttgtaggcaaacatgaayaatgaaacacttactttctcatggtcttcagaattc

SEQ ID NO: 156802 - DNA, 617 bp, Homo sapiens
aacatttaagcaaaaagttgactgagttaaacccacatacacacgcacacacacacacacacacacacacacacacwctctctctctctctctctctctttcagaaaatagaagccagaggaacatttcccaattctattggtgaggtgaccactacttggattctgaagtcagacagtgacctcacagggaagaaaaacaatatggcacaatgtaattgtgtgataatttttaacatgttagcaatatctgttcttttacagagataagaaaaactctcacttggttgtatttatagacacagtaaaactaatttttttagagcttgttctatactaagcactgtgctaagccctgggaaatcaaaagcaagtgtcagtcccttttttaattgctcactatcttgaataaaaggacagaaatgtaaatgagtagctgttcttatgttctaaaagctctatgatgctgtgaaatgcaatggtacacacaaaaaaaaattcatcacactcaatggtattaagaattacttcataaagaaatgcttgaacagccttgaaaaatcttagaagatgctaagttttatgaacaggaatttggactttatccttaatgtcagt

SEQ ID NO: 156803 - DNA, 617 bp, Homo sapiens
aacatttaagcaaaaagttgactgagttaaacccacatacacacgcacacacacacacacacacacacacacacactctctctctctctctctctctctttcagaaaatagaagccagaggaacatttcccaattctattggtgaggtgaccactacttggattctgaagtcagacagtgacctcacarggaagaaaaacaatatggcacaatgtaattgtgtgataatttttaacatgttagcaatatctgttcttttacagagataagaaaaactctcacttggttgtatttatagacacagtaaaactaatttttttagagcttgttctatactaagcactgtgctaagccctgggaaatcaaaagcaagtgtcagtcccttttttaattgctcactatcttgaataaaaggacagaaatgtaaatgagtagctgttcttatgttctaaaagctctatgatgctgtgaaatgcaatggtacacacaaaaaaaaattcatcacactcaatggtattaagaattacttcataaagaaatgcttgaacagccttgaaaaatcttagaagatgctaagttttatgaacaggaatttggactttatccttaatgtcagt

SEQ ID NO: 156804 - DNA, 617 bp, Homo sapiens
aacatttaagcaaaaagttgactgagttaaacccacatacacacgcacacacacacacacacacacacacacacactctctctctctctctctctctctttcagaaaatagaagccagaggaacatttcccaattctattggtgaggtgaccactacttggattctgaagtcagacagtgacctcacagggaagaaaaacaatatggcacaatgtaattgtgtgataatttttaacatgttagcaatatctgttcttttacagagataagaaaaactctcacttggttgtatttatagayacagtaaaactaatttttttagagcttgttctatactaagcactgtgctaagccctgggaaatcaaaagcaagtgtcagtcccttttttaattgctcactatcttgaataaaaggacagaaatgtaaatgagtagctgttcttatgttctaaaagctctatgatgctgtgaaatgcaatggtacacacaaaaaaaaattcatcacactcaatggtattaagaattacttcataaagaaatgcttgaacagccttgaaaaatcttagaagatgctaagttttatgaacaggaatttggactttatccttaatgtcagt

SEQ ID NO: 156805 - DNA, 621 bp, Homo sapiens
tttggtcttaatctgggccttgatcttcttggcacgtgcactttctaaaggcccataatcctctttacagttatgtttcctgcagatatctttctatgttactaatgaaattactccttcatcaattttatacagtcatgaataagaaatgttgaacaaaaatacttcatgtggctacgtaagctgagagatatttgacagtaacacataagaattatcaggaagtggtaygcaggcgcctgggaaaaggactttcacgatcatgtcaggttggaaagtgtctttctatcaaaggaacaaccaatgttattcaatgcagagggatttcacagagatacaagcattcagaacaaagaaagagagcaagctatgataaaccctccaagaggaaagtcctctagagggacagatagcagccattttcaaacaagccttttcaagtcccagaactaaattgaaatttccagtaggaattaatcagaggagaaagctattcacagtgttgatgaagctttcctattatcaacatgaactttgaacaggactaacaaagaactgaaatgtctgcaattataatgagaaagggaaacattcaaacacagacatcttgggatttagaac

SEQ ID NO: 156806 - DNA, 581 bp, Homo sapiens
cttaagatgttacatagactgtcactatcacctcaacatatctacacagggcatgaacttcctgggcaaacttgagttgtgttacctggtctctctgagaagccagaagctctgatcatcttatccactagaatctggggagggaagtggctgaggctcctaacaggtgagttcaatggaggccataataaatcctgaccctcattcttagtggaggctgaactggacagaggtgttagagagtgttcagcatgaacatcagaatcacccagagggtttgttaagtcataaattgctggatcccacttcagagtttttgattcatcaagtctaggatggagcctgaaaacatgcatttacaataatttctcaggtaacgctgatgctacttacccagatacygtacttgaagaatcactgtgttaggagtgaggtgatagcagcttaggccctggggttaagtgggactgagtaaatgtggggagacacaggaaccaggtccaatgcagatgtgttccattcattcatagacatccttaagttgattttacatcaacttggttatccaaagttatgctata

SEQ ID NO: 156807 - DNA, 575 bp, Homo sapiens
cagtgtagacagtgtggaaaattgcaatggatgagaaacaagaatatataataacaattacacatgaagatacgaacaggcacctcacctgaaaggaatcacaaaaggcaaataaacacaggaagtgaagatcagcataaatatatgcacactaaaggcaagtcaggtaatgaacaagatttcaamtcaacaaagttgaaaaagactcacaatatcaagtgctgggaaagaaataggaagatatttttaattctcacaggtagtattgatgataatgtaaatggatttaaccatgtgagagaacaattcagcaatatcaaatataattgaatgtgtacacacttagtttatattctcctgattataatttagagaactctaacacatattaccaggaaacatacaaaaggatgtaaattccagcattgtgggcaacgttaatattttagaacaacttgaaagtaaagcatatgggagatgatagtattttgcttctaataacagggaagtttaaatattcagaagggctttatgctgaaataaagaagatcacagattataacaaacatatgagg

SEQ ID NO: 156808 - DNA, 575 bp, Homo sapiens
cagtgtagacagtgtggaaaattgcaatggatgagaaacaagaatatataataacaattacacatgaagatacgaacaggcacctcacctgaaaggaatcacaaaaggcaaataaacacaggaagtgaagatcagcataaatatatgcacactaaaggcaagtcaggtaatgaacaagatttcaaatcaacaaagttgaaaaagactcacaatatcaagtgctgggaaagaaataggaagatatttttaattctcacaggtagtattgatgataatgtaaatggatttaaccatgtgagagaacaattcagcaatatcaaatataattgaatgtgtacacacttagtttatattctcctgattataatttagagaactctaacacatattaccaggaaacatacaaaaggatgtaaattccagcattgtgggcaacgttaatattttagaacaacttgaawgtaaagcatatgggagatgatagtattttgcttctaataacagggaagtttaaatattcagaagggctttatgctgaaataaagaagatcacagattataacaaacatatgagg

SEQ ID NO: 156809 - DNA, 575 bp, Homo sapiens
cagtgtagacagtgtggaaaattgcaatggatgagaaacaagaatatataataacaattacacatgaagatacgaacaggcacctcacctgaaaggaatcacaaaaggcaaataaacacaggaagtgaagatcagcataaatatatgcacactaaaggcaagtcaggtaatgaacaagatttcaaatcaacaaagttgaaaaagactcacaatatcaagtgctgggaaagaaataggaagatatttttaattctcacaggtagtattgatgataatgtaaatggatttaaccatgtgagagaacaattcagcaatatcaaatataattgaatgtgtacacacttagtttatattctcctgattataatttagagaactctaacacatattaccaggaaacatacaaaaggatgtaaattccagcattgtgggcaacgttaatattttagaacaacttgaaagtaaagcatatgggagaygatagtattttgcttctaataacagggaagtttaaatattcagaagggctttatgctgaaataaagaagatcacagattataacaaacatatgagg

SEQ ID NO: 156810 - DNA, 600 bp, Homo sapiens
tatacatatatcagggagagctggttcataatagttaatctgtccataagatgttggattatccctgggtggttaggcagaaggaaagaattactaggaagtatcatatgtaccttcatctgaacaagaaacgtcattacctttgatcctgcctcattggggaaagaaaaaaatggactgctgaaaaacttggtataattggggcaggatcagagctccacagctcagagtcattattcataaggagaaatgaataatttctatctccctctccttctctctctttctctctctatccatctcattctgagccaatcactgttctaagtgctttgaaatatttactcataggtgaaagaagtgaattcacaatgggaataaacactgttttgttttacattttagccttaaaaatgccaacagtaacacaataaatttaaaaatcagggagacatggggtctaggtagagagtctctaaccattcttgaaataattggcagaacctactttctgctatgagcataatatattgtctctggcaaastactagacagcttctgggaacagctgataaggagtaaggggaatgaataaaaccc

SEQ ID NO: 156811 - DNA, 600 bp, Homo sapiens
aatggttatctagaaatatatttggaattattacatatttagtatgtgggggttatcttcatgccatttattcctaatttctaatatttttttcattcattgtataatattccttgcagcatgatcagaagagatggcctggaaaaaaaaacacttttttatgtgcaaaatttatttgtggccaagtacakgattaattttcgtatatatttcatggctagtaaagtatatttttggaacacataaaaagtctcctcttattaattgtactattttttgtgtagttacttaatattgtatacaagttatacatgcacaattcaaaaagaggtgtactgaagtaactgttgtatttgtacttttatcaagttctcacaattctaacagtttcactttacgtctactaaaagctgttgggttgttcggtgcatactagttcctggctggtatatgtctttcataactctgcttttcatcattatccttccatgacctatttagtgcttttaacctagaattctgtgttgtctgatactacctttgcctttcatgctttctttcttctttgcattttcttagcattgctctttattggtttaa

SEQ ID NO: 156812 - DNA, 600 bp, Homo sapiens
aatggttatctagaaatatatttggaattattacatatttagtatgtgggggttatcttcatgccatttattcctaatttctaatatttttttcattcattgtataatattccttgcagcatgatcagaagagatggcctggaaaaaaaaacacttttttatgtgcaaaatttatttgtggccaagtacatgattaattttcgtatatatttcatggctagtaaagtatatttttggaasacataaaaagtctcctcttattaattgtactattttttgtgtagttacttaatattgtatacaagttatacatgcacaattcaaaaagaggtgtactgaagtaactgttgtatttgtacttttatcaagttctcacaattctaacagtttcactttacgtctactaaaagctgttgggttgttcggtgcatactagttcctggctggtatatgtctttcataactctgcttttcatcattatccttccatgacctatttagtgcttttaacctagaattctgtgttgtctgatactacctttgcctttcatgctttctttcttctttgcattttcttagcattgctctttattggtttaa

SEQ ID NO: 156813 - DNA, 459 bp, Homo sapiens
atacatccactcaaaattaagaaatagaatgtaacatatccacacaatgaaatatttttaggcaataagaatggagtagcaatatatgctacaacatgaatgcgccttgaaaatatcatggtatgtgagagaagccagttataaaagaccacatattgtatgattccatttctatgaaatgtttataataggcaaatctgtagaattagaaagtagattcatggttatttggggccagaagtggggtggtgttggggaaaattagaaatgactgctaacaggcacagcatttctctctgagggagcaaaagtgctctaaaagtataatgtggggttgtacaactgtgtgagtgtargaaaaagtactcaattgtattctttaaatggattaattataatttatatcaattacttcttaaatagatctattatgaaaaataatagaacattccgctggaa

SEQ ID NO: 156814 - DNA, 495 bp, Homo sapiens
  misc_feature (1)...(495): n = A,T,C or G
accctgcccaaattcttgatttrtggctcatgggcataataaaatgggctttgttttaagccactggatttaggatagtttgtaacacaacaatagagacctggaagcttcatttacatgatttaccaaagtgacataactagttataacaacaggcaacatttattaatattgtcaaatgtatgctatgcaccatgtatcattatttaatttcttcctcacattgaaaatagtactaatgaaatgcagatgatacaatttttcagccttatgaaggtgtgaaattgatatgcatttggcagaacccatacttagaatttttcaatttcgatcttttcctggactagcattatgaggtacagnactctctctctctctctttctctctctctctctcaaaatgctggacagtgacagcaagccattctgcctttcgctttcaatacagtgatatgcccagtgagggcccggaagctccacacccatttccccata

SEQ ID NO: 156815 - DNA, 495 bp, Homo sapiens
  misc_feature (1)...(495): n = A,T,C or G
accctgcccaaattcttgatttatggctcatgggcataataaaatgggctttgttttaagccactggatttaggatagtttgtaacacaacaatagagacctggaagcttcatttacatgatttaccaaagtgacataactagttataacaacaggcaacatttattaatattgtcaaatgtatgctatgcaccatgtatcattatttaatttcttcctcacattgaaaatagtactaatgaaatgcagatgatacaatttttcagccttatgaaggtgtgaaattgatatgcatttggcagaacccatacttagaatttttcaatttcgatcttttcctggactagcattatgaggtacagnactctctctctctctctttctctctctcyctctcaaaatgctggacagtgacagcaagccattctgcctttcgctttcaatacagtgatatgcccagtgagggcccggaagctccacacccatttccccata

SEQ ID NO: 156816 - DNA, 570 bp, Homo sapiens
ctgaagcaattgcctcagctgtaaccttggccccttttagccacagctggagctggagcagctggaatgcagggcactaagttctgaagcygcacggatccactgggccctgggcccggcctgtgaagccatttttccctcctaggcctctgggtctgtcatgggaggggctgctctgaaggtctctgacatgccctggggacattttccccattgtctttgctaataacattcagctcctccttacttgagcaaatttctgcagtcagcttggctcaaattccttcccaggaaatgggtttttcttttctaccacatggtcaaaaatgcaattttccaacctttatactctgcttcccttttaaacttaagtctaatttccaccccttctctttgtgatcataaataacgaaaaggcttcagattaattcacgttctctcttaaacactgttgcttagaaatttcttccaacagaataccgtaaatcatctctttcaagtttaaagttccacagatgtctagggcaggggcaaaatcccgccagtttctttggtaaagcatagcatgag

SEQ ID NO: 156817 - DNA, 472 bp, Homo sapiens
gaggaggttagattcatgatcaagcttttaggaacttctrtaacatatgagataaacatctcctgtgccactcaatatgtcgcacctcttatcatatgcatttgtgcagttttactatttattcaaaattcaaaaacagaagtgcttgtacccgttttatcttcatatttgctgcagctttcattttggtatcttatacagttgctcatgaatatttgtacaatgaatgagtggcactttctgatgtcaaattctttgccagaattctgaagagtagcatagataaatcaatgtggatagcagcacgggtctatacattctactttaaggttataacaaatgatgggtaatgatcagttgcttcgagaaacatatattttatctagaacaggccagggcaactcacctaggctttctattcttgtatgggctgttttagatgtactttctcacttacatccttttaatacct

SEQ ID NO: 156818 - DNA, 472 bp, Homo sapiens
gaggaggttagattcatgatcaagcttttaggaacttctataacatatgagataaacatctcctgtgccactcaatatgtcgcacctcttatcatatgcatttgtgcagttttactatttattcaaaattcaawaacagaagtgcttgtacccgttttatcttcatatttgctgcagctttcattttggtatcttatacagttgctcatgaatatttgtacaatgaatgagtggcactttctgatgtcaaattctttgccagaattctgaagagtagcatagataaatcaatgtggatagcagcacgggtctatacattctactttaaggttataacaaatgatgggtaatgatcagttgcttcgagaaacatatattttatctagaacaggccagggcaactcacctaggctttctattcttgtatgggctgttttagatgtactttctcacttacatccttttaatacct

SEQ ID NO: 156819 - DNA, 472 bp, Homo sapiens
gaggaggttagattcatgatcaagcttttaggaacttctataacatatgagataaacatctcctgtgccactcaatatgtcgcacctcttatcatatgcatttgtgcagttttactatttattcaaaattcaaaaacagaagtgcttgtacccgttttatcttcatatttgctgcagctttcattttggtatcttatacagttgctcatgaatatttgtacaatgaatgagtggcactttctgatgtcaaattctttgccagaattctgaagagtagcatagataaawcaatgtggatagcagcacgggtctatacattctactttaaggttataacaaatgatgggtaatgatcagttgcttcgagaaacatatattttatctagaacaggccagggcaactcacctaggctttctattcttgtatgggctgttttagatgtactttctcacttacatccttttaatacct

SEQ ID NO: 156820 - DNA, 472 bp, Homo sapiens
gaggaggttagattcatgatcaagcttttaggaacttctataacatatgagataaacatctcctgtgccactcaatatgtcgcacctcttatcatatgcatttgtgcagttttactatttattcaaaattcaaaaacagaagtgcttgtacccgttttatcttcatatttgctgcagctttcattttggtatcttatacagttgctcatgaatatttgtacaatgaatgagtggcactttctgatgtcaaattctttgccagaattctgaagagtagcatagataaatcaatgtggatagcagcacgggtctatacattctactttaaggttataacaaatgatgggtaatgatcagttgcttcragaaacatatattttatctagaacaggccagggcaactcacctaggctttctattcttgtatgggctgttttagatgtactttctcacttacatccttttaatacct

SEQ ID NO: 156821 - DNA, 469 bp, Homo sapiens
ataatcctgagatctttgaagttttggaaagggtgagtatattttgcatrtaagaaaaataaaaatactttgtgaccaaaggttagaatgtgtttgagttagaaatgtcattattgcattgtcattttcatcatttagatatggtgcttattcgttcacacttttgagtctggtatgcctgaaccctgcctttgactaatcaaatatttcaattccaggtctagcctataataggataaaacatttcaactttcttgtgaaccttgagcctctgtggaaaatatgtggctactgtattggtctattttctattgctgtaacagaatactacaaggtgggcaatttatagagaaaataagtttatttagttcacagttctggagtctggggaatccaagagcatggcactggagccttcctgctgcattatgacatggcaggagatattacattgcaagacaaagcaagt

SEQ ID NO: 156822 - DNA, 469 bp, Homo sapiens
ataatcctgagatctttgaagttttggaaagggtgagtatattttgcatataagaaaaataaaaatactttgtgaccaaaggttagaatgtgtttgagttagaaatgtcattattgcattgtcattttcatcatttagatatkgtgcttattcgttcacacttttgagtctggtatgcctgaaccctgcctttgactaatcaaatatttcaattccaggtctagcctataataggataaaacatttcaactttcttgtgaaccttgagcctctgtggaaaatatgtggctactgtattggtctattttctattgctgtaacagaatactacaaggtgggcaatttatagagaaaataagtttatttagttcacagttctggagtctggggaatccaagagcatggcactggagccttcctgctgcattatgacatggcaggagatattacattgcaagacaaagcaagt

SEQ ID NO: 156823 - DNA, 631 bp, Homo sapiens
ctagtgtggtgggacctatactgccttataaaatttaatggtttcataacatgtataagagtttttgccactcctttttttcaaaaggtgaagcttaattcctctccatttgcatgcaggttaaatttactgcctagcacctaatgaatagaatatggcataagtaaagctgtatgacttttaaggtcacttcacagtatgtatagcttccacttgactaattctctttgacgcactgctgatatgtcatgagaacattcaakcagctcatagagagacctacactgaaaggaaatgacgtctcccatcaacaaccagcactgacttgtcagccatgtgagtgagccgccttggcagaagatcctctcctctcagtcaagctttcagatggctaaagctctgttctaaatcttgacagcaacctcatgacagactttaagtcagaaccactgaactaatctcctcctgaattaccctcccatggaaatggtagagatcataattatatttttagttcaaaatggtgactataattaataacaatatattatattcttgaacatcactgagaatagattttacgtgttctcaccacaaaaataatgtgaggtaatgcatatgttatttaaca

SEQ ID NO: 156824 - DNA, 563 bp, Homo sapiens
ctaattctctttgacgcactgctgatatgtcatgagaacattcaatcagctcatagagagacctacactgaaaggaaatgacgtctcccatcaacaaccagcactgacttgtcagccatgtgagtgagccgccttggcagaagatcctctcctctcagtcaagctttcagatggctaaagctctgttctaaatcttgacagcaacctcatgacagactttaagtcagaaccactgaactaatctcctcctgaattaccctcccatggaaatggtagagatcataattatatttttagttcaaaatggtgactataattaataacaatatattatattcttgaacatcactgagaatagattttacgtgttctcaccacaaaaataatgtgaggtaatgcatatgttatttaacacaattgagcaattccacaatatatacataaattaaaacatgttgcacatgataaatatataaaatggtatgaataataatattttagtctcattttatcagtggtakgttggttagtgtttaatagccaactctttggggaaataataa

SEQ ID NO: 156825 - DNA, 572 bp, Homo sapiens
tttgaaaaatgtaaccagaaatgtatgtggtaaacattaatttgtaaaaggtatatttagaattaatatgtactatcttaatgctatataaatgtattttcttaacatttatttgattgtttgttgtttcctctccttggaagatgggtctcctgcaactgatattaaccactccaaaaagaacagggtgttaagattatttatgtaataggtaaaacaatttcaacttaagcatttttagaatctggaaaataatttaaatctcttttaatttgatttattgtgctgtttttcttttgcagtttgcactgtaaatttagtgggataaggagacttaaaaccttcttctcctgggaagatcggtctattgcgggtcaagtgaagtttctttattttttttcttttggagacagtctcactctgtcacccaggatggagtgcagtggcatcatctcggctcaatgcaamctccgcctcccggattcaagtgattctcatgactctgtctcccaagtagctggaattacagacctgtgccaacaagctcagctaatttttaatttttttttttt

SEQ ID NO: 156826 - DNA, 465 bp, Homo sapiens
ccagtttaactctgccatattgcctcttagtgtatggcatggcttggatttgtgccccggaccaaatctcatgtcaaattgaaggaggttcctggtagggggtgattggatcattggggcaaatttcatccttgctgttttaatgacagtgagtgagttctcagaagatctgatcatttaaaacagtgtggcacatcacccttccttctctctctcacctgctctaccatggtaagatgtrtttgcttccccttcgccttctgccatgattgtaagtttcctgaggcttcccagtcatgcttccttttgtgcttgaagaactgtgagtcaattaaacttcttttgtttataaattacccaatatcaggtagttctttatagcagtctgagaacaggctaacacagaaaattaaaattaaaatacagtttaaaggcctcagaaaaagatagaaagatgtgggaaag

SEQ ID NO: 156827 - DNA, 453 bp, Homo sapiens
ctctgccatattgcctcttagtgtatggcatggcttggatttgtgccccggaccaaatctcatgtcaaattgaaggaggttcctggtagggggtgattggatcattggggcaaatttcatccttgctgttttaatgacagtgagtgagttctcagaagatctgatcatttaaaacagtgtggcacatcacccttccttctctctctcacctgctctaccatggtaagatgtgtttgcttccccttcgccttcygccatgattgtaagtttcctgaggcttcccagtcatgcttccttttgtgcttgaagaactgtgagtcaattaaacttcttttgtttataaattacccaatatcaggtagttctttatagcagtctgagaacaggctaacacagaaaattaaaattaaaatacagtttaaaggcctcagaaaaagatagaaagatgtggga

SEQ ID NO: 156828 - DNA, 453 bp, Homo sapiens
ctctgccatattgcctcttagtgtatggcatggcttggatttgtgccccggaccaaatctcatgtcaaattgaaggaggttcctggtagggggtgattggatcattggggcaaatttcatccttgctgttttaatgacagtgagtgagttctcagaagatctgatcatttaaaacagtgtggcacatcacccttccttctctctctcacctgctctaccatggtaagatgtgtttgcttccccttcgccttctsccatgattgtaagtttcctgaggcttcccagtcatgcttccttttgtgcttgaagaactgtgagtcaattaaacttcttttgtttataaattacccaatatcaggtagttctttatagcagtctgagaacaggctaacacagaaaattaaaattaaaatacagtttaaaggcctcagaaaaagatagaaagatgtggga

SEQ ID NO: 156829 - DNA, 361 bp, Homo sapiens
gagtgccctgctgggttttgagcttgcatgtgtcctgtagccctttaattttggccaatttcttccatttggaagggggagcatttactaaatgcctatatcctcattgtaatttggaagtaactaatttgttttttattttacaggctcataggcagaagggacttacttgtctcagatgagactttgaactgtggayttttgagttattactgtaatgagttaagactagggtactattgagaaggaataattgtattttgcaatgtgagaagaacatgaaatttgggaggggcttggggtataagaatatggttaagatttatgtccatgtgcaaatctcatgttaaattggaggagg

SEQ ID NO: 156830 - DNA, 590 bp, Homo sapiens
tatattcactataatgggaatgctattatcccccatttggaaataaagaaagtgaacatttgtgtgktttataaaaattgccaaagtcattattactcataaatggcaaaaaatggaattttaacatgtctatctggcatcatgatttattacttttcctgatacaatgttgtctacaaccacaagaattactaagggaatagaagagatttagctctaacctctctaaccccaaaccatgtattcttttcattataatgtagctaccatatgtacactgagtctatgatttgaacaagtaacaataatttatatttaaacatatatttatcttttatcttaatttgaaaattaactccaaattattagaaaatgtaacagtcataaaggattaaagccctagggatgacaaatacagtacaatgaagtaattaaaataacataaaataaatgtactaactaaatatatctttcataaagttggcgattctaatactgtactactagagacggatgaaataaggacgttatttctgtcgatgtgttcatgaaataaatattttatcaaataaactaaaactaaaggatgt

SEQ ID NO: 156831 - DNA, 590 bp, Homo sapiens
tatattcactataatgggaatgctattatcccccatttggaaataaagaaagtgaacatttgtgtgttttataaaaattrccaaagtcattattactcataaatggcaaaaaatggaattttaacatgtctatctggcatcatgatttattacttttcctgatacaatgttgtctacaaccacaagaattactaagggaatagaagagatttagctctaacctctctaaccccaaaccatgtattcttttcattataatgtagctaccatatgtacactgagtctatgatttgaacaagtaacaataatttatatttaaacatatatttatcttttatcttaatttgaaaattaactccaaattattagaaaatgtaacagtcataaaggattaaagccctagggatgacaaatacagtacaatgaagtaattaaaataacataaaataaatgtactaactaaatatatctttcataaagttggcgattctaatactgtactactagagacggatgaaataaggacgttatttctgtcgatgtgttcatgaaataaatattttatcaaataaactaaaactaaaggatgt

SEQ ID NO: 156832 - DNA, 590 bp, Homo sapiens
tatattcactataatgggaatgctattatcccccatttggaaataaagaaagtgaacatttgtgtgttttataaaaattgccaaagtcattattactcataaatggcaaaaaatggaattttaacatgtctatctggcatcatgatttattacttttcctgatacaatgttgtctacarccacaagaattactaagggaatagaagagatttagctctaacctctctaaccccaaaccatgtattcttttcattataatgtagctaccatatgtacactgagtctatgatttgaacaagtaacaataatttatatttaaacatatatttatcttttatcttaatttgaaaattaactccaaattattagaaaatgtaacagtcataaaggattaaagccctagggatgacaaatacagtacaatgaagtaattaaaataacataaaataaatgtactaactaaatatatctttcataaagttggcgattctaatactgtactactagagacggatgaaataaggacgttatttctgtcgatgtgttcatgaaataaatattttatcaaataaactaaaactaaaggatgt

SEQ ID NO: 156833 - DNA, 590 bp, Homo sapiens
tatattcactataatgggaatgctattatcccccatttggaaataaagaaagtgaacatttgtgtgttttataaaaattgccaaagtcattattactcataaatggcaaaaaatggaattttaacatgtctatctggcatcatgatttattacttttcctgatacaatgttgtctacaaccacaagaattactaagggaatagaagagatttagctctaacctctctaaccccaaaccatgtattctttycattataatgtagctaccatatgtacactgagtctatgatttgaacaagtaacaataatttatatttaaacatatatttatcttttatcttaatttgaaaattaactccaaattattagaaaatgtaacagtcataaaggattaaagccctagggatgacaaatacagtacaatgaagtaattaaaataacataaaataaatgtactaactaaatatatctttcataaagttggcgattctaatactgtactactagagacggatgaaataaggacgttatttctgtcgatgtgttcatgaaataaatattttatcaaataaactaaaactaaaggatgt

SEQ ID NO: 156834 - DNA, 522 bp, Homo sapiens
gacatttttaaagagtaaaggaaatatctgataccaaaatatgtcatgtcaaattacattcataattgattggaagatgtttttatttatgcaaattagatatgtctttcatttcaagaccttcraatcaccattgtgagtactgccattcagaaagaaagaggctaatgatgacagtgaccactccagacagcctgacgctgccatcccgcaggctgtagcagggaggtacagctggggctgcatgttgtgtgcagctggcagaagcaagggagaagtgggagccccgccctttcttagttcgggcaggaactccccaattgttgctgcagcaacacggctgcacacctgggcctcccactccatggagaaggcaggaaccaccctcattccctgaacagctgcagctgcccaaactgaaactgaggctacagactcaggcatcactgcatacttgggggcccgggaatgcccccctgccccttgcaggcttggaagtgcctgcccccactgcctggcttc

SEQ ID NO: 156835 - DNA, 382 bp, Homo sapiens
taggataaagttaaagatttaaccaagttgtgggagttatgtgaagatgaatttgtgaaagaaactctgtgtgttatgtaatcatattggctaaagttaaaggggtattatttattcataaaytgaacatcaaaataaaagtacaacatagttttcttagagcattgttctgctctttaagagaaaattgtaaagggttgtaaaaggtatatgagaatctcaccttatggtcaaactgattaagatggaataggtttgtctatgagattttattaagaactggatttgacatcaatattacacaaatgcaaagataaaaatcaggccttctttgggctgtatttgcataaatgtgttatcagcatgtgttccaaaattaggc

SEQ ID NO: 156836 - DNA, 416 bp, Homo sapiens
tttcctggcaatgctatctttaatccatgatgtgggttaagaggagtgaaccaatgttctgtttctgcctgattaggaggcaatgtacataccattaaaatagatgaagatggccttcatctttcatcttacatctatcaaggtataagattatccatgtatatgggttatatcaaggtataagattatctatgtttaaggctggctgcaaaatccttcaaaaataaacrtatatgccatgagtgcacacaacagacccccttttcacttctattgtttatagaggcataatccagggaaaaaatattcaaagataacagtctcgtaatagtagagaagtcttgatccatgatcttggaaaaagctgttcacatcaaggatgccgtcttctgctggagagaaacttccctggttag

SEQ ID NO: 156837 - DNA, 493 bp, Homo sapiens
  misc_feature (1)...(493): n = A,T,C or G
aattagacctaataaacatctacagaatactccacccaacaatcatagaatatacattcttctcatcctcataatggaacatagtctaagattgaccacatgctcaaccgtaaagccaatctcaataaattaaaaaaakcaaaatcataccaagcacaatgtggaccacagtgcaataaaaatagaaagtgatgccaggaagatctattaaaaaaaaaaggaaattagacaacttgctcctgaataacttgggtaaaaaacaaaattcagggagaaatgaaaaaaacaatagaaattaataaaaatagagacacatctttccaagtctctggtatgtgggtaaagcagtgttaagtggaaagctgataatgctaaatacctttatcaagaagttacaaagatctcagattaacaatttaacatcataccaggaggaactggataaaaaaacaagcaaaataaccacaaagttagcgcanaaaanaaaaaaaaa

SEQ ID NO: 156838 - DNA, 493 bp, Homo sapiens
  misc_feature (1)...(493): n = A,T,C or G
aattagacctaataaacatctacagaatactccacccaacaatcatagaatatacattcttctcatcctcataatggaacatagtctaagattgaccacatgctcaaccgtaaagccaatctcaataaattaaaaaaatcaaaatcataccaagcacaatgtggaccacagtgcaataaaaatagaaagtgatgccaggaagatctattaaaaaaaaaaggaaattagacaacttgctcctgaataacttgggtaaaaaacaaaattcagggagaaatgaaaaaaacaatagaaattaataaaaatagagacacatctttccaagtctctggtatgygggtaaagcagtgttaagtggaaagctgataatgctaaatacctttatcaagaagttacaaagatctcagattaacaatttaacatcataccaggaggaactggataaaaaaacaagcaaaataaccacaaagttagcgcanaaaanaaaaaaaaa

SEQ ID NO: 156839 - DNA, 538 bp, Homo sapiens
  misc_feature (1)...(538): n = A,T,C or G
gaattccagtaagtatggaatacttggtattttacattgaaattatataatgatattaattatggtaattatgcagtgatattaaattatgtttgaaatcagtaacatggcttcatttttaaaatctggganaaccttgctttcccatgtatggtgccatataatggcgcattgygctaaatatgaatctcataaccacgtatctactaaactactatgcagcaggagcagtgcgtaggcccagggatatagtgatgaatggaaatcagtagaaacatactccttgccatcatggaccttatggtttagtgggaaaggtagatactctgaaaacacttgaataatgcagctttaagtgctaggaagaaaggtgcaaggggatatgagagttgtaatttagaggggagatgtgatctagtttgagggaagaaggagggattcacgaggaagtaatggttgagctgagatccaagggatacatacaaatgtgaggtatatgacagttggaggggaagagagttccaggcaaaggcctttg

SEQ ID NO: 156840 - DNA, 485 bp, Homo sapiens
gactgacccctcctcttcctcttcttcctcagtctactcaatgtgaagatgataaggatgaagacctttatgattakccacttccatttaatgaatagtaaatctattttctcttctttataactttcttattaacattttcttttctctagcttaattattgtaagaatacagtgtatagtacctataacatacaaaatacatgttaattgactgtgttatcagtaagacttccagtcaacagcaggctattggtagttaaatttggggagagtcaaaagttatatgcagattttctactggagggaggtgcccctagttcaagggtcaacagtaaatattaaatattcaacagctgatataacactgatatctctttaattttcatatgctagaaacattgacatgcagatgacacgtgtctcttttgacctgtcattgctcctagacatgtttattgtgctcacttgagagacaaggagcca

SEQ ID NO: 156841 - DNA, 605 bp, Homo sapiens
cattttaggattctcgtaactagcatatttgactctcacccttatactccttctaatgaataccccccaaaacttatattttaaaaatctacatctaaaaatgtctaacagagatctttcaaaacatataaaattttcaaaaccttagggattgtaagtcattgattcttagtttaattggaagtattttttccccagtagtatgtaaaatgataatgcttcttcaaatgaacactattttagattaaatattagatttctttcattgtaartgaaaacataagagactccaacttgcttaaacactaaagggaatcaattattttacttaatcataaagtcaagtttttcagcttgaatcaggtaagtcttgagccagggattaataatgtcattaagaaactgggtttgtgtttccactctatcttcccctttataagcttcatcttcaggttatcttcttttataatgtcaacatcactccagcagttgctggggctacaggcttctttttccacattcatcaggataaagtgggaactttctcccagagatccagaaaaagttaacatataactctttttggaccagcttaagttgcctga

SEQ ID NO: 156842 - DNA, 526 bp, Homo sapiens
aaatataaaatgcaatatctttgaaaatttataaatctgtgtacttttgatatatatatatttctgatgtatattatattacagtaaaaagtttttaaaatagtatgtgtaataaatggagtggagggaaaagtaatagatacagaaatgacatgaaatacagacaatacaactctgtttacattctggaaactttcccaggagaaatgatatatgaattggggttttaagagaaagaatataaaagggtagtggtccaggtggttgggatgtaaagacatgtacagaggccatattctaggaaaagaaaacatcattacaaagtagatgtgagctcactgcttgactccagctgtgggaatcaaatatagagactagagcagaaggcaatactcgagmtaggtcacacatgagggaagaggcagtcttcagttcattgagctcatgaatccagataatctagacatgaggcttagggatggacttatgtcaagttctgtctgccagttagagtacagcttattat

SEQ ID NO: 156843 - DNA, 660 bp, Homo sapiens
ctcttctttcatattcctcctttctgagcacatgaacccacaataccgctggagaacactctgtgcgtggagtgaagaacatccccattttcccttccattctttcagttattctgcattactatttttctctttccctcaatgtttctatctcatttcaaaagaggaaacatgaagtcagaggtttgattcagaggtagaaatatttttatttgggtttccccaaagcagacattgggtcaatgatatagtacaaatagtttatttgggagatgattccagaaagcacctgtaggaaaatggggaagtgagtcaaggaggagaaggaagcaaataaagggtgtgttattgtgcagatamccatcagtgggcaactgaggcttagggacacagtgtaaaatgtgcctcagagttagcccaacatgcataactactaaccccagcaaagtaccaggagcattttatgcaccaattcctgtcaatcattggttgaaggctgttgaggaggtgggctactacctgatatctctagcctgtggaatgaatggctccagataaagagctgcaagcgtttgtagctggaagttattgggttggtgtgcttatgaataagtgccggagggatactgacagagcatcatcaatatcagctatacttaa

SEQ ID NO: 156844 - DNA, 403 bp, Homo sapiens
gaattctttagttgccaattagttgaaagagtaaaactactgtctaaagacgaggttggtagaaaggaatgcttargtgaagattagaggatggtggaggtcaaggttcttgttatatacataaagcctcatgggtagcaggcctcagagagaatgatggtaaatgtctctttttagaacttaaagtcatcagactctcaattaatctctcctagatgcaggaaaggcctagaaagggaaggcccagttgcattaacagagattctctacaaatgcaaatttcccccacaaaagatggctttgcagggccatttcaataggttagcactgtggcagccatctgaaaatacgtcaaagaaatatactgtggggctgtttcctgtctgtgctgctgggtgggaac

SEQ ID NO: 156845 - DNA, 415 bp, Homo sapiens
aagagtaaaactactgtctaaagacgaggttggtagaaaggaatgcttaggtgaagattagaggatggtggaggtcaaggttcttgttatatacataaagcctcatgggtagcaggcctcagagagaatgatggtaaatgtctctttttagaacttaaagkcatcagactctcaattaatctctcctagatgcaggaaaggcctagaaagggaaggcccagttgcattaacagagattctctacaaatgcaaatttcccccacaaaagatggctttgcagggccatttcaataggttagcactgtggcagccatctgaaaatacgtcaaagaaatatactgtggggctgtttcctgtctgtgctgctgggtgggaacccatgtggcggtccacacagggcagtgacacagaattc

SEQ ID NO: 156846 - DNA, 474 bp, Homo sapiens
agaatctaccccttccagccacctgaaacaacttaccaactagaaaaaataaatgaaatgataactttcaagacactggatatcaggcagtgaaagacggtggtccctccctgagaggagaaaaacaaagtgagccctatcatggccacttccaggtgaccaggtgaccatgcccagagagggaacctaagttgagccaagtggtcaccctggattgcagaagcagagctagaagccaaggaagccaatgcagttaacagaacagagtaccagagaggagggaggtgyacagagaaagaacacaggtactccccctagagtcttcagtagagaacatatctacatgagactacatgatctacatgagacatttcccaagagctgaacaagaataattcctgccatgctagccagaatggaaaaccctacaattcacgggacttgaggtactgtactcaaaaggcttttccctca

SEQ ID NO: 156847 - DNA, 604 bp, Homo sapiens
caatttgtatgatataatttaaaaacaagcaaaaaatagaatcaaatgtacagaaaactcaacctcacatatatttgttcagatatatagataaaggcacagaaaacagtctggaaggagaaataacaaattgttgatatgttacctctggagagaggaaaatgtctgcattcatgaaggagagcttacstactgcttttttttttaaatgtagtcaagtattttacaatgggaagctatatgaacaccacttgggtatttttaaaaactacaatgcaggaagactcagagggagcacgtgatttaaccctagtctcttcagttcgtatactgcttaggaggtttatcctcattcccatttaacataatttggtcactttgtttactcactggctcttaaacttgtgggtaaaaagggaagttatgactcaatgtcacttaactgtgtcatttctgtattttattgttgatgagtatactgtagagaattcatgattcttatttctccatgagtcaaagatgtgagagatgcaatttaacaaatatatgaaaggtcaagttttaaaactgtccgatcactgtcagctaagcccacttgtagcaa

SEQ ID NO: 156848 - DNA, 389 bp, Homo sapiens
tgtttatcagggctttggacttacagtgaaatataccactgacttacctggttctccatcctgcagatggcagactgtgggacttgtcgccctccataatcgagataacaaattcctataataataggatatatttgtatcatataaatgtttatatatttataagatagtgtgtgtgtgtgtgtgtgtgtgtgtrtatatatatatatatatatatatatatatatatgttctgtttctctgaagaactctgactaatacaaaagatattaaaggtttcataggcttcttgtttcccaactctggtcctaaaataggattaagctgcatttgttctttctaacgacagcttgatctgataatagataagatgttaatgaccctattga

SEQ ID NO: 156849 - DNA, 393 bp, Homo sapiens
taattgagttggtacaaactactataatgttaaaagaaacagaaaaagctaatttaagaaacgaccatttcctttatgccttgtgagcagcaggttaaagctcaacggatyttttttaacataatggggtactggggaaccttgttattaatgcctcactgaaaaacatttatccaaggtgtaaacaatcgacaaaacttgaaatgtctacctgccaaacatcagggcttcaaggtctttaagcactttctgtgcagcagggggttgtatttattatttgaaaggatgacctgttaatgggatccagtggtattggaatctgacatataacctagagataaaattggatgaattggataattttttgaaatgaataccagggtaggaaaaaag

SEQ ID NO: 156850 - DNA, 559 bp, Homo sapiens
gtgatagtaaaatatagttaacagacatttctgaagacaggacttgggaaggaggaatatttacctattaaattttttttaccatgtacacatggtatttttaaaataattaaaccttaaaaatgaaaacagtgacaacttaaaaaactaaaaaaatattttttctagtacaaaggtatatctgaatcctacttcaaaccacctcaccctcaagatcttcaaaggagcaatcaaakattggtcaacagaagtaaagcaggctgaccttgataagcggaggctttaacgttaatccccaatatagaaatccagtgagctacaccctgggaggctggactctaagactatctacaactctggtgtggttgtgtgccagcagggaacagcagagtgactattcacattagtaaagacaaggaatcaacctaaatgaccatcaatggcagaattgataaagaaaatatggtatatggacaccacaggatactacgcagccataaaaagaatgagatcatgtcctttgcagaagcatggatggagttggaggccattatcctaa

SEQ ID NO: 156851 - DNA, 491 bp, Homo sapiens
gaattctgccattatgtataagaccaaaatgattccttggctttcaaaaacttgtttatcattcattcattcattcattcattcattcattcatcaaatattcattgagcctactatgtgccaggcactgttytaagctctggggatgtaacagtaaataaaatagaaaaaaagtctttcctcataaagattctgctttaattaataaggctcaagtcctggtaaatagtattttataatgtggccaggtgattctattgtatagctagggttgagaacagttgctttagaatcacacactccttattgtcttttttaaaaatcatgtacctctagtgacaactttttaaaaatcagaatataagtgagttaactttcaatttgtcactatttttttaacttataagattttaggatacaatgaatatgcaatttaaaatgctatgttataataatttactctgcttagctggacccagaacccattccaa

SEQ ID NO: 156852 - DNA, 377 bp, Homo sapiens
caggcacacatcgccacgcctggctaatttttctattttttagtagagacagggtttcaccatgttggccacggtagtctcaaactcctgacctcaggtgatccactgcctctgcctcccaaagttttgagattacagacatgagccacagcacccggtctgggtcactattttgcttaagaagttccttaagtttcccycagacatctttgtgttctgttttcttgatcaagactgctaatggttctttgctgcttttaatttcctgggagtgtgaaaataattaaaattggggttggatagtattttaaaggtccttataaaaaagacgaaaggcaatttgaaatcgctagcctaaaataaatagactaaagctt

SEQ ID NO: 156853 - DNA, 353 bp, Homo sapiens
cttagtttcctggagagctccttcctgaaggctctgttgttagggtacaatctggacttggtttcgctcttagtttgctgaataacagccatgctggtacttttctttgcccctttcctggataggaccctgctttcatttgtctatgtgtttctctttcttgatttacttgtttatctcactgaatcacattctccagttgtttcccaagaaacagtccaaggaaagtatttttgggtgtgagggtagtattctctctattctatcaccacacttgatttggttggatatagaattctatgtaawaaaatttgtttcccttacaattttgaagaaactcttccataatttaa

SEQ ID NO: 156854 - DNA, 599 bp, Homo sapiens
ttggtaaggacatgaagaaactggaatgcccattatgttttttgaaatgtaaaatggtacagctgcttttaaaaatactttagaagttcctcaaaatgttaaatataaatttacccaacaattccaataatgagtatatayctgagagaagtgaaaacatatgtccacaaaaaaacttgtacataatattcatatcagcattactcataaaagtaaaggtggaaacaactcgaatgcccatcaactgatgggtgaacaaaatgtggtatatatccatacaatggaatattatttgtcaataaaaagtactgaagttaggagatatactacaacatggataaaccatgaaaactttaatgctaaatgaaaaaagtcagtgacaaatcaccatatatggtatgattccatttgtatgaaatgtcaaggataggcaaaactttagggaaagacaacagattagtgattgcctagagctgggagtagggtcagaggagaatggggagtgatcactaatggatacagagtttttgtgacgggtaatacaagccaaaatgatgaattttaatagtttttttttttcttttttcacccaggctgga

SEQ ID NO: 156855 - DNA, 574 bp, Homo sapiens
attctatgccccaccaagtaagttatcattcatcttccaggttagaagaaagacaattgtggatattcaaagatgagagataaaaccacccctataccctgtccgaggaaactactcaagaagtatttgaaccaaacaacatatgaatcagaatagaaatctcaagacacatgaagataaatagaaaagagtgcaataagccttgcaatatatacgttaaaactaaatggataagaattgtgmctgggtattcataacataacagctaagtaagaattcttaaaatagaagagacatatggtaagggaaaaagctaataaatctaaaaccaaaagtattgaactacgtcagcaaaactgaggagttagaagacggtggagaaatgtaaaagcatcctagaggtctaatttggggggaagaatggaatagggaattaaacattcttaagctttcatctagaagaagagaataaagcatacttgtagggtgcttatttagttcatacttttcagatgactgtggagaaatacatgttagataatgaatatcagaatacaaagcaaagaatttgcct

SEQ ID NO: 156856 - DNA, 574 bp, Homo sapiens
attctatgccccaccaagtaagttatcattcatcttccaggttagaagaaagacaattgtggatattcaaagatgagagataaaaccacccctataccctgtccgaggaaactactcaagaagtatttgaaccaaacaacatatgaatcagaatagaaatctcaagacacatgaagataaatagaaaagagtgcaataagccttgcaatatatacgttaaaactaaatggataagaattgtgactgggtattcataacataacagctaagtaagaattcttaaaatagaagagacatatggtaagggaaaaagctaataaatctaaaaccaaaagtattgaactacgtcagcaaaactgaggagttagaagacggtggagaaatgtaaaagcatcctagaggtctaatttggggggaagaatggaatagggaattaaacattcttaagctttcatctagaagaagagaataaagcatacttgtagggtgcttatttagttcrtacttttcagatgactgtggagaaatacatgttagataatgaatatcagaatacaaagcaaagaatttgcct

SEQ ID NO: 156857 - DNA, 536 bp, Homo sapiens
atcctgtccaggccactgcttcccaaggaagtgcgactaagcccatcagtgtatcaggtaatccatttagataatacctagcctgatatgttctaagcactatgcctttttttttttttttttaattsagacagagtctcactctgttgcccagactggaatgcagtggtgtgatcttggctcactgcaacctccatcctgggttcaagcgattctcctgcctcagcctcccaagtagctgggattatagacatgcaccaccatgcctggctaatttttgtatttttagtagagagtattttgtattttagtttcgccatgttggccaggctggtctggaactcctggcctcatgtgatccacccgcctcagcctcgcaaagtgctgggattacatatgtgagccactgtgcctgtcctaagcactgtgctttttaatccccaacttgtgaaatggaaaacatttccctccatttaacaaccatgggaaactcagaattaggtgtttaaccagcatcatatggctagtgggataaa

SEQ ID NO: 156858 - DNA, 536 bp, Homo sapiens
atcctgtccaggccactgcttcccaaggaagtgcgactaagcccatcagtgtatcaggtaatccatttagataatacctagcctgatatgttctaagcactatgcctttttttttttttttttaattgagacagagtctcactctgttgcccagactggaatgcagtggtgtgatcttggctcactgcaacctccatcctgggttcaagcgattctcctgcmtcagcctcccaagtagctgggattatagacatgcaccaccatgcctggctaatttttgtatttttagtagagagtattttgtattttagtttcgccatgttggccaggctggtctggaactcctggcctcatgtgatccacccgcctcagcctcgcaaagtgctgggattacatatgtgagccactgtgcctgtcctaagcactgtgctttttaatccccaacttgtgaaatggaaaacatttccctccatttaacaaccatgggaaactcagaattaggtgtttaaccagcatcatatggctagtgggataaa

SEQ ID NO: 156859 - DNA, 536 bp, Homo sapiens
atcctgtccaggccactgcttcccaaggaagtgcgactaagcccatcagtgtatcaggtaatccatttagataatacctagcctgatatgttctaagcactatgcctttttttttttttttttaattgagacagagtctcactctgttgcccagactggaatgcagtggtgtgatcttggctcactgcaacctccatcctgggttcaagcgattctcctgcctcagcctcccaagtagctgggattatagacatgcaccaccatgcytggctaatttttgtatttttagtagagagtattttgtattttagtttcgccatgttggccaggctggtctggaactcctggcctcatgtgatccacccgcctcagcctcgcaaagtgctgggattacatatgtgagccactgtgcctgtcctaagcactgtgctttttaatccccaacttgtgaaatggaaaacatttccctccatttaacaaccatgggaaactcagaattaggtgtttaaccagcatcatatggctagtgggataaa

SEQ ID NO: 156860 - DNA, 535 bp, Homo sapiens
gatcctgtccaggccactgcttcccaaggaagtgcgactaagcccatcagtgtatcaggtaatccatttagataatacctagcctgatatgttctaagcactatgcctttttttttttttttttaattgagacagagtctcactctgttgcccagactggaatgcagtggtgtgatcttggctcactgcaacctccatcctgggttcaagcgattctcctgcctcagcctcccaagtagctgggattatagacatgcaccaccatgcctggctaatttttgtatttttagtagagagtattttgtattttagtttcgccatgttggccaggctggtctggaactcctggcctcatgtgatccacccgcctcagcctcgcaaagtgmtgggattacatatgtgagccactgtgcctgtcctaagcactgtgctttttaatccccaacttgtgaaatggaaaacatttccctccatttaacaaccatgggaaactcagaattaggtgtttaaccagcatcatatggctagtgggata

SEQ ID NO: 156861 - DNA, 536 bp, Homo sapiens
atcctgtccaggccactgcttcccaaggaagtgcgactaagcccatcagtgtatcaggtaatccatttagataatacctagcctgatatgttctaagcactatgcctttttttttttttttttaattgagacagagtctcactctgttgcccagactggaatgcagtggtgtgatcttggctcactgcaacctccatcctgggttcaagcgattctcctgcctcagcctcccaagtagctgggattatagacatgcaccaccatgcctggctaatttttgtatttttagtagagagtattttgtattttagtttcgccatgttggccaggctggtctggaactcctggcctcatgtgatccacccgcctcagcctcgcaaagtgctgggattacatatgtgagccactgtgcctgtcctaagcactgtgctttttaatccccaacttgtgaaatggaaaacatttccctccatttaacaacyatgggaaactcagaattaggtgtttaaccagcatcatatggctagtgggataaa

SEQ ID NO: 156862 - DNA, 514 bp, Homo sapiens
tacttctgaataaaatgcttaagttgctattttctgggtttttccactttagacatcagtttcagagtttacactatggaagatgctactgtagctctgttacacccaccctccttcccctcaccccccaaacacttcccttcccctcaccctgtcaacagtgttgctatcatttttggctaaacaccaaactatacacagcaacacataactgaatcagagtatgtcatgatcttatttcctttcttcaattttctrtttttttctgaagttattaattgcctatctttttcttttccttggttttctatgtatctatcaccaattcttcccctaaaaatctcacaaaactaaattcttctcaccatggtgaaaatcccaactatattttcctagagacatacctcctagtgccttctttgttcctgctcctatttagactggctgctctctaggtctcctgcatagttgctttcgtagagctttccttcctgtgggaattgttttcaccatc

SEQ ID NO: 156863 - DNA, 471 bp, Homo sapiens
gaaagtagataaatcatccagctcytaggtcagacagctcagagacaaatgaacacagcaggtcgttgccactataatgatgcagtggctgttctgtttgccagttactggacaaacaatagatttccttccttctcttaactttaattccatttctcataagcctgaaattgcagttgctttttccaacttcttttccccccaccctgccctagttcatgtcagtgttaccttaactaacatttttatggcttgaaaatcaattcagcaccagatataaagacattctctgtctcaagcctttgttctcagcactagcctcacaccctccattggcccagtgctgtagcttcgaacctgcttcagggtctctagtctctgattcctttttttgtttgaacttttgttagatctgcattgatgtttatgagatagactttctcttgctctcctttcattgatttattttca

SEQ ID NO: 156864 - DNA, 510 bp, Homo sapiens
cctctttcccttcttcctgtggcaggtgcctgtgggctacaggcctgggccttaatgggtcaagtcctgcttgtggctcctgtsaaccttcaagcacaacttctctctctcctggaactgagcagctttgtgtactttgaagcccctaaatgcagtttggggggctcttgatcagggagttaagaggttcaagttaatcctggctccccatcagtggaaaatgaggaatagcgcaaggacctttttctcaatgtgccttagtttcaccatctgtaaacagagggctggggcagacaaatcccatatcccctgtcccccacagcaaaatcttacatccagatgaagtgtgtcctgtcctctgagcatctttttgctgcatctttgcaaggaagattgtaaatgtcggtgtgaacgtagaaagaagtgtctgaaacagcagaactgactgggacagggagaggctggcaagaagcaatgtaagtagaatcagagacaacgacctcagaattc

SEQ ID NO: 156865 - DNA, 510 bp, Homo sapiens
cctctttcccttcttcctgtggcaggtgcctgtgggctacaggcctgggccttaatgggtcaagtcctgcttgtggctcctgtcaaccttcaagcacaacttctctctctcctggaactgagcagctttgtgtactttgaagcccctaaatgcagtttggggggctcttgatcagggagttaagaggttcaagttaatcctggctccccatcagtggaaaatgaggaatagcgcaaggacctttttctcaatgtgccttagtttcaccatctgtaaacagagggctggggcagacaaatcccatatcccctgtcccccacagcaaaatcttacatccagatgaagtgtgtcctgtcctctgagcatctttttgctgcatctttgcaaggaagattgtaaatgtcggtgtgaacgtagaaagaagtgtctgaaacagcagaactgactgggacagggagaggctggcaagaagsaatgtaagtagaatcagagacaacgacctcagaattc

SEQ ID NO: 156866 - DNA, 509 bp, Homo sapiens
gtgatctctttttctgaggagctcaagcctgagaatctgcctgaaacagaaatcactgacctctcctccaggcactgacctccgagtctgtagagttcccagggctggagttagcaaactgtgctcccaggaatcctgcaatgcttccagggagggctgggcagggcaggggtgctgtrtttgtacaaaaagtaatgacttttgatgacagagactggaatcctaggagaggtctccactggccaggagccagatccagcctcttgtaacccaaggaactcattgctctcttagggctagttggagctcatggatctgaaggtcaaggtatcttttgttcattatgataaaaacgtatttatgatgtcagggaaaaattatgacaccccaaatcccactatctactcatgtcaaatttacatttctccatcatctctggccctctttatcttcacatccacattttttacagctataagaaggttctatgtaaattgtatatccttttt

SEQ ID NO: 156867 - DNA, 578 bp, Homo sapiens
aatcactcaaatctaattttactcacttcttcattcccaagatatttttctgcatcctttggttgtgtgtgtttcaaatcatttcccactgtttatttttaatttctactttattttaattatttaataggtggcatctgtgctgtgcctgtcattcattgagaacagtttgttttctgcttatggaatcacaaaaatatttaatctgaagcttcagtggtgcagccgtccttgaggctgcagaccataggatccttccttctctgtctggatgcactggagggccagcattctcggaggtggccagggtcctctgagaagccagcgcccaagtggtacctgagtccagtgaacggcaagtaagaagctttccttccttcagttcctgyttttgaacaaatgtatgctttcttaaatgtccccaggtaacacactgtggatggcctgcacaatgacaggtgttagggatcagtgctcatactgttgatgctttcccaagccagatcacctctacttttggggctgagtccattggataggtgagtcaaaatgtggatcagtagggttgtatctactca

SEQ ID NO: 156868 - DNA, 314 bp, Homo sapiens
caggaatttgtataaggcgaagtggacacaattaaccattattgtgctcatggtgtctggtcttgactagaaaggctcatgtggcaaaatccagccagggaggctcagcggggttgtatgtttgggtctctggttctggctgctctctgggctccctggtcctcctcctcatggcctcttcatgaggtcagcctgggcttcctcattgcatggtggtctgagcagtttcattcatttctacatkgtatctggcttctcccagcagaagtagaggctgctggtctttttaaagcctagaccaataactgcagagt

SEQ ID NO: 156869 - DNA, 402 bp, Homo sapiens
atatgtatgtttttgcacacagtaaaaaacttaggagayacacaaagaaccgagaaagttttaccatggtccaagaaaagagccatgaaatcagatccagagaaggtccagttgttggatttatcatacagggagtttgggggaaaaaatgtatgataaatacattaaaggatccaaaaaattgtggacaatatgtgaaaagatggggaatttgtctagggagagggaaactataaaagagaacaaaatagaaatgctaaaaacaaataaaagaactacaatctcagaaatagatagttcatttgacagggttacaaactagatatagtacaaaagagatttgcaactagaaacaggaattatccaaattaaaataggtagagagaagactgcagagaaaaa

SEQ ID NO: 156870 - DNA, 507 bp, Homo sapiens
ttttatactatttgattatcttccatcattcagatcctaaagttgcatttcattccaatagcattgctttcctgaagcttctagaccaatgatggcttcagcgatactctgcattctttttaaagttggcagaaaattccctttatgaagtttcctaatttattaaccatttscctcttttaccttcctgtccttcccatgtctaggcatgattcttcctcatcatttggtgcatgtgccctgtatctcatatcaatccatgtttcaatctcactttttaatatcagagctgatatcacaatcaactttaagtttttatgtctaagtttgttaaaatttgatcctgagagtattttcttccaaaatattattgttctatttctgttcctatttgttgttccataggtttaggcaatgtggacaccttggaagaattactctctgttgaaggtgtgcatgctcccaatggttagaacaaaatgttatccttgtaatgtggtagtaaaa

SEQ ID NO: 156871 - DNA, 507 bp, Homo sapiens
ttttatactatttgattatcttccatcattcagatcctaaagttgcatttcattccaatagcattgctttcctgaagcttctagaccaatgatggcttcagcgatactctgcattctttttaaagttggcagaaaattccctttatgaagtttcctaatttattaaccatttgcctcttttaccttcctgtccttcccatgtctaggcatgattcttcctcatcatttggtgcatgtgccctgtatctcatatcaatccatgtttcaatctcactttttaatatcagagctgatatcacaatcaactttmagtttttatgtctaagtttgttaaaatttgatcctgagagtattttcttccaaaatattattgttctatttctgttcctatttgttgttccataggtttaggcaatgtggacaccttggaagaattactctctgttgaaggtgtgcatgctcccaatggttagaacaaaatgttatccttgtaatgtggtagtaaaa

SEQ ID NO: 156872 - DNA, 507 bp, Homo sapiens
ttttatactatttgattatcttccatcattcagatcctaaagttgcatttcattccaatagcattgctttcctgaagcttctagaccaatgatggcttcagcgatactctgcattctttttaaagttggcagaaaattccctttatgaagtttcctaatttattaaccatttgcctcttttaccttcctgtccttcccatgtctaggcatgattcttcctcatcatttggtgcatgtgccctgtatctcatatcaatccatgtttcaatctcactttttaatatcagagctgatatcacaatcaactttaagtttttatgtctaagtttgttaaaatttgatcctgagagtattttcttccaaaatattattgttctatttctgttcctatttgttgttccataggtttaggcaatgtggacaccttggaagaattactctctgttgaaggtgtgcatgctcccaatggttaraacaaaatgttatccttgtaatgtggtagtaaaa

SEQ ID NO: 156873 - DNA, 528 bp, Homo sapiens
ttacattctccccctatcttgggcagcctaccaggattaggaatatgtaaacccaatctcctattccttggggtttccttgcagcataacctcatggtggcatagcttacacttcacttcagagtttctctgtgggatgaggctaaaaactaccttctgtgggactttgcttggcttccttcctttccttgtttcctccactcttttactggttccctctaaaagtactcccttaataaawcattgcatataaatccttgcttaggttctacttctagaaaacccaacttaaggcaccctataccatacctgttgccctcttgttatggagttggactagtccagaatctcctggatttcccaagtaggcaggtgtagtcacaaatcaaggttatttccaccttcctgcaggggcttggtatgccagaaaataaaagagtagtttctaattcatatcttgcattactctatctcagcaggagatgcaacaagccttgtgaggctgtgctaatctccatgcagactgct

SEQ ID NO: 156874 - DNA, 561 bp, Homo sapiens
gaattccctaagtctgtggtcactgcagccatttcagcactagagggtgtcctaagcccaggtacactgtgtgactcgcagactccaggatactcagccctgatggactttgggaagatacagaaaaattgcctgggttcccaggcaatttgtcttgtattggcctgatataatgggctttggtattctccatggtgctctgttttcctgtggtggggttggcaccaagttgcaagacaatgccccctgtaattgtccctgtatttcccctaagtaaaaatgagtctctctctactatactgcctgaagttgggggagsggtaatgtaggcactcctgtggctgctgtagctgaagctcagagtgagtcacatcccaagcccacagcctccaagactagcacagcaccagtgctcacccaaggactgcacttgcaacaacctggttgccactgaaatttattcagggtccgaggccactttagttagctgatggtgaagcaggccaagacttagatttctcttgacaaggcagtgtatttccgtctggttcatgactggtc

SEQ ID NO: 156875 - DNA, 561 bp, Homo sapiens
gaattccctaagtctgtggtcactgcagccatttcagcactagagggtgtcctaagcccaggtacactgtgtgactcgcagactccaggatactcagccctgatggactttgggaagatacagaaaaattgcctgggttcccaggcaatttgtcttgtattggcctgatataatgggctttggtattctccatggtgctctgttttcctgtggtggggttggcaccaagttgcaagacaatgccccctgtaattgtccctgtatttcccctaagtaaaaatgagtctctctctactatactgcctgaagttgggggaggrgtaatgtaggcactcctgtggctgctgtagctgaagctcagagtgagtcacatcccaagcccacagcctccaagactagcacagcaccagtgctcacccaaggactgcacttgcaacaacctggttgccactgaaatttattcagggtccgaggccactttagttagctgatggtgaagcaggccaagacttagatttctcttgacaaggcagtgtatttccgtctggttcatgactggtc

SEQ ID NO: 156876 - DNA, 561 bp, Homo sapiens
gaattccctaagtctgtggtcactgcagccatttcagcactagagggtgtcctaagcccaggtacactgtgtgactcgcagactccaggatactcagccctgatggactttgggaagatacagaaaaattgcctgggttcccaggcaatttgtcttgtattggcctgatataatgggctttggtattctccatggtgctctgttttcctgtggtggggttggcaccaagttgcaagacaatgccccctgtaattgtccctgtatttcccctaagtaaaaatgagtctctctctactatactgcctgaagttgggggaggggtaatgtaggcactcctgtggctgctgtagctgaagctcagagtragtcacatcccaagcccacagcctccaagactagcacagcaccagtgctcacccaaggactgcacttgcaacaacctggttgccactgaaatttattcagggtccgaggccactttagttagctgatggtgaagcaggccaagacttagatttctcttgacaaggcagtgtatttccgtctggttcatgactggtc

SEQ ID NO: 156877 - DNA, 607 bp, Homo sapiens
caggcttcctgggaaggactttgtcaataccccttcaccttcagatgttggtaatgttggctttgttcccatttagtttcccttyacagatgtctagccattgcatggtatcagaataaggtcccggggcagttgaaggtatctggctaaggctacaccttggcattacccaagagctcctggactagctccaatcccggacagcccattcaggtgctggaccaagatttccagtctttcttgtcacattttctttcttttgagactcttttggctgctatcccttctttatacacaatattacaggtgtttttgcaacccaaagagataattttatggggtggaatgaatacttggcttagtcaccaggaaagtaaaccagaacaatgtttctgtctatccttagaaacaggggtatgtaatggctaagagagttttctttcccctgtcaaaaaaaaacctgttagcacagggaaagaggctttttccccccagacaccttccctcctttgcatttaatttgttgttgtttttttttccccaccatgtcagatgtcaacataatcctgcgaatacagggagcttttagttgtaaggggttattgtt

SEQ ID NO: 156878 - DNA, 607 bp, Homo sapiens
caggcttcctgggaaggactttgtcaataccccttcaccttcagatgttggtaatgttggctttgttcccatttagtttccctttacagatgtctagccattgcatggtatcagaataaggtccyggggcagttgaaggtatctggctaaggctacaccttggcattacccaagagctcctggactagctccaatcccggacagcccattcaggtgctggaccaagatttccagtctttcttgtcacattttctttcttttgagactcttttggctgctatcccttctttatacacaatattacaggtgtttttgcaacccaaagagataattttatggggtggaatgaatacttggcttagtcaccaggaaagtaaaccagaacaatgtttctgtctatccttagaaacaggggtatgtaatggctaagagagttttctttcccctgtcaaaaaaaaacctgttagcacagggaaagaggctttttccccccagacaccttccctcctttgcatttaatttgttgttgtttttttttccccaccatgtcagatgtcaacataatcctgcgaatacagggagcttttagttgtaaggggttattgtt

SEQ ID NO: 156879 - DNA, 607 bp, Homo sapiens
caggcttcctgggaaggactttgtcaataccccttcaccttcagatgttggtaatgttggctttgttcccatttagtttccctttacagatgtctagccattgcatggtatcagaataaggtcccggggcagttgaaggtatctggctaaggctacaccttggcattacccaagagctcctggactagctccaatcccggacagcccattcaggtgctggaccaagatttccagtctttcttgtcacattttctttcttttgagactcttttggctgctatcccttctttatacacaatattacaggtgtttttgcaacccaaagagataattttatggggtggaatgaatacttggcttagtcaccaggaaagtaaaccagaacaatgtttctgtctatccttagaaacaggggtatgtaatggctaagagagttttctttcccctgtcaaaaaaaaacctgttagcacagggaaagwggctttttccccccagacaccttccctcctttgcatttaatttgttgttgtttttttttccccaccatgtcagatgtcaacataatcctgcgaatacagggagcttttagttgtaaggggttattgtt

SEQ ID NO: 156880 - DNA, 563 bp, Homo sapiens
ggaactctgctgacattgtaggatggatccagccctcctagtggtcgtctcaggagggtctgcaaaggactatcctaagggactaggrcattaaacctcagaggtacctccagcaggggagtaagctccctctgatcctgctcctcctgatccatcctgtgctctctacccaggttctctctctcaagcttatcccatcctagaaattctcattttaggaaggttccagcctcactcatgcccctacaaaagatgccttgtgaatatgacctcattaaggtacaagtcccccttttgctacaggacttaagacaaattaagggggattttgtaagttttcagataactctgacaggtatatagaggtcttccagaatttaacccaagtatttgaacccctttgcaaagatattatggtacttttaaatcaaaccctgactatggctgagaagcaggcagccctgaaagtggcagagaagttttgggatgagctttgtatcacatatagtgccaaggaagggtgacagcattatccaattggaaaaacagcagtaccattggag

SEQ ID NO: 156881 - DNA, 563 bp, Homo sapiens
ggaactctgctgacattgtaggatggatccagccctcctagtggtcgtctcaggagggtctgcaaaggactatcctaagggactaggacattaaacctcagaggtacctccagcaggggagtaagctccctctgatcctgctcctcctgrtccatcctgtgctctctacccaggttctctctctcaagcttatcccatcctagaaattctcattttaggaaggttccagcctcactcatgcccctacaaaagatgccttgtgaatatgacctcattaaggtacaagtcccccttttgctacaggacttaagacaaattaagggggattttgtaagttttcagataactctgacaggtatatagaggtcttccagaatttaacccaagtatttgaacccctttgcaaagatattatggtacttttaaatcaaaccctgactatggctgagaagcaggcagccctgaaagtggcagagaagttttgggatgagctttgtatcacatatagtgccaaggaagggtgacagcattatccaattggaaaaacagcagtaccattggag

SEQ ID NO: 156882 - DNA, 563 bp, Homo sapiens
ggaactctgctgacattgtaggatggatccagccctcctagtggtcgtctcaggagggtctgcaaaggactatcctaagggactaggacattaaacctcagaggtacctccagcaggggagtaagctccctctgatcctgctcctcctgatccatcctgtgctctctacccaggttctctctctcaagcttatcccatcctagaaattctcattttaggaaggtyccagcctcactcatgcccctacaaaagatgccttgtgaatatgacctcattaaggtacaagtcccccttttgctacaggacttaagacaaattaagggggattttgtaagttttcagataactctgacaggtatatagaggtcttccagaatttaacccaagtatttgaacccctttgcaaagatattatggtacttttaaatcaaaccctgactatggctgagaagcaggcagccctgaaagtggcagagaagttttgggatgagctttgtatcacatatagtgccaaggaagggtgacagcattatccaattggaaaaacagcagtaccattggag

SEQ ID NO: 156883 - DNA, 577 bp, Homo sapiens
acaactctctccttagacacagtgctcagctagctgagctaattgtcctcacaagggtgcttgaattaaaacaaagggagagaagttaacatttattctaagtgtgctttcctagtcctccatgcccatgccactatctagaaagagagagacttcctcacagctaatgtgtctcccattaaacactatcatgaaattaacagactattatcctcatctttccttccagaggaagtggcagtaatacattgtaaaggccaccaaaagtggatggatgaaataaccaagggaaataaattggaagaccaagcagctaaattggcagcaagaaagccccagatttttgatccacttgaggcccctctggtctgggggatgctccataagagaaataaaacctcaatattctcctgcagaaatataatgggccacttctcagggatacaccttcagcccttaggatggcctyaattggaggatggcaaacttcatctaccagcttccagccaatggaaagttcttaaaattcttcatcaagcctcccacctaggaaaagataaaacctatcaattggctc

SEQ ID NO: 156884 - DNA, 413 bp, Homo sapiens
aacatgttcttaaatatttctttgtgtggcatacctacatatatatgtctatatgtgtatgtttgtgtgtgtgtatatgtatatrtgtgtgtgtgtgtgtgtgtgtgtgtgtgtatatatatatatatatatatgcctatagtcaccaagagggcactctataagcatgctttcttggctgagatttattgaactctaatttgccagcattcccttatgtcaaactatgacaatatgaagtgaagaaactttgtctatatgcccttcctatgccagttttgctcagttccaaacagcagtttgcacctggtagaccttcaagatatataatgtgcatgactgaatcagcaaattccacttggctcgtaccttatttggccatcttcaaaaaaaaatcttctaaaataaacgtc

SEQ ID NO: 156885 - DNA, 379 bp, Homo sapiens
caggcatccaagttccaggtatacttagcattacctaaactcagttataacaagtgagtagcaaatttctagtaaatttctaaagcctatgcaatggttttccctttctagaattctcataaacatgttcttaaatatttctttgtgtggcatacctacatatatatgtctatatgtgtatgtttgtgtgtgtgtatatgtatatatgtgtgtgtgtgtgtgtgtgtgtgtgtrtatatatatatatatatatatgcctatagtcaccaagagggcactctataagcatgctttcttggctgagatttattgaactctaatttgccagcattcccttatgtcaaactatgacaatatgaagtgaagaaactttgtctat

SEQ ID NO: 156886 - DNA, 504 bp, Homo sapiens
aatgcggtaggagagcagggtgataataaggagtaggtcagcaaaaaaacatgtgagcaaaagaatctgtgtcataattaagttcaaggggaggtactaagcctggatgtgcacrtaggccagatttatgtttctctccgcccaaacatctcagtggagtgaagaataacaaggcagcattgctgccaacatgtctcgtctcccaccatacggtggtttttctcctatctcagaattgaacaaatatacaatcgggttttataccaagacattcagttcccaggggcaggcaggagacagtggccttcctgtatctcaactgcaagaggctttcctcttttactaatccacctcagcacagaccctttacgggtgtctgtaaagtcaggtctctctcatcccacgaggccatatttcagactatcacatggggagaaaccttggacaatacccagcttttcagggcagaggtccctgtggcttttcacagtgcattgtgcccct

SEQ ID NO: 156887 - DNA, 430 bp, Homo sapiens
aaatcacaaggccagcctagattttaaatctgggaagtagatttaaactctagagaggatgagctgcaaagcatttgtggccttttatcatttatcacaatttccgcacttgccagagaatgaagttagatgccaagtaattttcccagttactgcattgggttcctgggccacttctggactaatgcccttctgcacccttgcacacatttgaaaagcagagagtaggctaaattacagattccagttgcccattcccctccagctggctggaagcctattgatatggcacaaactacacaagcacatgcaatactcctaaatctactgattttgtctgttggttggttaatttggaaaatatttatgttttatttcaaaataaattacttgtaaacrttgtataagaaaacacttgccagagcctggc

SEQ ID NO: 156888 - DNA, 549 bp, Homo sapiens
gtttttcgagaagcagattctgaaccaagaatttaggagcaagtgctttattaagaaaatgtcttaaatcaacaaggcagcaggggagtcagaataggctaggagaagaagccaaacaaaaaggcgatttcaggcagagtcccatgctcagtccaattctgcagggagcgcacaagtataaatacacctcagaatttgccttgcatggaggcaaaagagcttggtatttccacaccagtcatccatagtctatccaagttgcctattgtttgtgaagaggggtatataaaattcttagagatttctggttctttgtacagtaaggtgactctagtgtctaagggaaccctctgaaggctgcaggtactagctgttagcaacgaagtgtgcaagagctggggatgcatacacagagaggacaggattctgatggaacctagatggggmaccaaccacacactcacattcagcaggttttagctttcatgcatttgacagatatttattgagggtctagaattgtgctgtctaacatggtagtcactagcc

SEQ ID NO: 156889 - DNA, 398 bp, Homo sapiens
aattacatttaattgtcatagctccttagattcctcttggctgtgacagtttatccgattttccttacatttgatgacrttggcagttttgaggaacactggtcaggtattttgtattatttccctcatttgagatttatctgatgttcttctcatgattgctctggaactatggctttttttgaagaaagattctcatccagtcatatcaagggtacatataagcaacatgacttatccctgttgatgttaaccttgatcacttggtatttgttaggtttctccactgtaaaattactccttttcgcctttctatactgtactccttggaaaaagattattacgtgcagcctgtatttaaggtgtggggagttaagccctacatccttgagagcaga

SEQ ID NO: 156890 - DNA, 398 bp, Homo sapiens
aattacatttaattgtcatagctccttagattcctcttggctgtgacagtttatccgattttccttacatttgatgacgttggcagttttgaggaacactggtcaggtattttgtattatttccctcatttgagatttatctgatgttcttctcatgattgctctggaactatggctttttttgaagaaagattctcakccagtcatatcaagggtacatataagcaacatgacttatccctgttgatgttaaccttgatcacttggtatttgttaggtttctccactgtaaaattactccttttcgcctttctatactgtactccttggaaaaagattattacgtgcagcctgtatttaaggtgtggggagttaagccctacatccttgagagcaga

SEQ ID NO: 156891 - DNA, 398 bp, Homo sapiens
aattacatttaattgtcatagctccttagattcctcttggctgtgacagtttatccgattttccttacatttgatgacgttggcagttttgaggaacactggtcaggtattttgtattatttccctcatttgagatttatctgatgttcttctcatgattgctctggaactatggctttttttgaagaaagattctcatccagtcatatcaagggtacatayaagcaacatgacttatccctgttgatgttaaccttgatcacttggtatttgttaggtttctccactgtaaaattactccttttcgcctttctatactgtactccttggaaaaagattattacgtgcagcctgtatttaaggtgtggggagttaagccctacatccttgagagcaga

SEQ ID NO: 156892 - DNA, 485 bp, Homo sapiens
catgggctgcctccagcaatattctcatgaagatttttaagaggaattcaataaaatcaagttaaggtttcttcattctcttctggaaagaagagaaattaaactctaccctctatagcaatgcagaaacatagatagatagatagatagatagatagatagatasatacatacatacatacatacatacatacatacatacatacatgattgatagatagatagatagatagatagatagatagatagatagatacatttcatacactaggaaaagactctgttgctttaattcgcatgcccatttatgtcagagattcagatgacctaagcttaggggaacttgaagaatatattatcattgggagtcaggttattattctcacaagaatgattcatcccttcaacttgcaaactgctcttaaatcaacttgcaaactgctctctcagctatggggctgagagaaaactatattcctttgtaa

SEQ ID NO: 156893 - DNA, 579 bp, Homo sapiens
cttgtgaaccagaaatcccaaaaggatctgattttttgaaacatgaaagcttctaaggaatagaagttccggtcgtaagttttatctacattcttcaggcattcatttgcaacagactcttgcttctaatttgctgcatgatggatagtgacacctgcatataaagcagctcagagaccatgagagaagagggagcatccattacctccagtttgtgcatattactgtcattgcccttctgcatttgagcatgagctgcaatcatagcttgtcaaaaagtatgaaatatcctctatttcctttagtaccactggtttcttgtgactcactttgtcattttgctaagttggtgacatctgtgtctgtgctgccataaaatatgtagtkgtaatattgctgctttttggactgagtatatttgtgtaaaatgatttgcaaatgtttcgtgtgtgtaagtgtttacatttgtatgcattcagtcaatacatgagatcagctgtaaagacagagaaccccagaatttgaaaataagtgccaaactaaaatgtcaatatgcagtgggtcaaagcagaaatatga

SEQ ID NO: 156894 - DNA, 615 bp, Homo sapiens
ttaagatctcttttcttttctaatataaacattcagtgctataaatttccctttgagtactgctttagttgcatgctgcacattttgaagtgttatgtcttcattttcagggtatataaaatgctttttaatattccttttgattttcttaaactcatagttgatttagaaatatgttatttagtttccaaatatttaggaatttcccagagaggcagctgttatttatttctaattaattctatcgtagttttgtatgcttttaattttttttaaattcattgagtgttgttccatggctcaaaatttggctatgtgcccttgaagtctttgtgttctgtttttggatagactcttgtattaatgtaaatgaggtccagttggttgaccatgttcttcaagtctttaacagtcatgtgattttctgtctacttttcccaaaaaatttgaaaaagggagttaaaacatctttaataatatctgtaaatctayaagtttctcctttcacttctattattttttgcttaatacatctgaagttttttcttaggtacacaaaagtttaagattattatattctcttcattaactgatcttttatcattatgaaatgac

SEQ ID NO: 156895 - DNA, 569 bp, Homo sapiens
ttccaacccctttatgagtaaagaaatagattattggtcttacattccacmaaggaacaacgtggcccttgattgggctctttagaggcagatcctgagacagattcagacacaaatgatttattgagggaaagttctcaaatctgtaagaaagggaaggaagaagaataacgcagtggggacaggggtgtcagtggaggtggagtgtgggggaaggagctgagtacggttatggtctcagaacagtctaaatctaacctgttctgcaggggaattatataaattacactgcagaggtatccctacaagagcaagagggttggtcttttgcacaaccatattagccagtcaatggttatggtggctccagaagagatgcataatctcctgttcagtggtccctgtctacagagaagagatagctacactaagagaagctgggggaatggaagtagaaaagggaagctgactgggcaccaacagtgtctactatagccatcctggcaacttgatcattccttggctttctatccataaaacagcaaacattactgactcaacaaaaatac

SEQ ID NO: 156896 - DNA, 610 bp, Homo sapiens
tttttttttttggaagagattaacatttaaatcagtggatattgagtagagtggattaccctccatcctgtgagtrgacctcattccatcagttgaaggtcttaatagaacaaaatactaacctcttctcagcaagaagaaattctgccagcagaccacctttggactcaaactataacccttcctgggtctccagcttgccagcctattctacaaatgttggacttacaaagccttcacaactgtgtgagccaattcactaaattcaaccaagctcgctcgctctctacacacacacacacacacacacacaaacacacacctgatggtttggttctctggaaaatcctgattaatacaactacaaatgttcaataaatatccagtcttttttcatccccaaaataaattatttttaaccatcaaatatttcactctaaaagaatctttctgttttctaaattttaaaaattacttcaaaaataattgtttattcaattctcaattccttcccaagtatttattgattccttcctcatttaattatttattagcagatggaataaaagagaaaccctatgtagagcaaatagagaactacatccgaatt

SEQ ID NO: 156897 - DNA, 610 bp, Homo sapiens
tttttttttttggaagagattaacatttaaatcagtggatattgagtagagtggattaccctccatcctgtgagtagacctcattccatcagttgaaggtcttaatagaacaaaatactaacctcttctcagcaagaagaaattctgccagcagaccacctttgsactcaaactataacccttcctgggtctccagcttgccagcctattctacaaatgttggacttacaaagccttcacaactgtgtgagccaattcactaaattcaaccaagctcgctcgctctctacacacacacacacacacacacacaaacacacacctgatggtttggttctctggaaaatcctgattaatacaactacaaatgttcaataaatatccagtcttttttcatccccaaaataaattatttttaaccatcaaatatttcactctaaaagaatctttctgttttctaaattttaaaaattacttcaaaaataattgtttattcaattctcaattccttcccaagtatttattgattccttcctcatttaattatttattagcagatggaataaaagagaaaccctatgtagagcaaatagagaactacatccgaatt

SEQ ID NO: 156898 - DNA, 610 bp, Homo sapiens
tttttttttttggaagagattaacatttaaatcagtggatattgagtagagtggattaccctccatcctgtgagtagacctcattccatcagttgaaggtcttaatagaacaaaatactaacctcttctcagcaagaagaaattctgccagcagaccacctttggactcaaactataacccttcctgggtctccagcttgccagcctattctacaaatgttggacttacaaagccttcacaactgtgtgagccaattcactaaattcaaccaagctcgctckctctctacacacacacacacacacacacacaaacacacacctgatggtttggttctctggaaaatcctgattaatacaactacaaatgttcaataaatatccagtcttttttcatccccaaaataaattatttttaaccatcaaatatttcactctaaaagaatctttctgttttctaaattttaaaaattacttcaaaaataattgtttattcaattctcaattccttcccaagtatttattgattccttcctcatttaattatttattagcagatggaataaaagagaaaccctatgtagagcaaatagagaactacatccgaatt

SEQ ID NO: 156899 - DNA, 610 bp, Homo sapiens
tttttttttttggaagagattaacatttaaatcagtggatattgagtagagtggattaccctccatcctgtgagtagacctcattccatcagttgaaggtcttaatagaacaaaatactaacctcttctcagcaagaagaaattctgccagcagaccacctttggactcaaactataacccttcctgggtctccagcttgccagcctattctacaaatgttggacttacaaagccttcacaactgtgtgagccaattcactaaattcaaccaagctcgctcgctctctacacacacacacacacacacacacaaacacacacctgatggtttggttctctggaaaatcctgattaatacaactacaaatgttcaataaatatccagtcttttttcatccccaaaataaattatttttaaccatcaaatatttcactctaaaagaatctttctgttttctaaattttaaaaattacttcaaaaataattgtttattcaattctcaattccttcccaagtatttattgattccttcctcatttaattatttaytagcagatggaataaaagagaaaccctatgtagagcaaatagagaactacatccgaatt

SEQ ID NO: 156900 - DNA, 510 bp, Homo sapiens
gctgcaggccaaaaggcataactgaaaagaaaataaactaagcagtacataaaatgctggtttgtcagtcatgttagattatcatgatatagtaatctaataatctaattgtttatatttagcattatagagagataayggtattccacttttagcagtgtgccagagaacattcccttactgactgtctcaataaatatgaataaaataatacataaaatatgaaatacatactttaaactacattgatgagtttacaggaagtaaaggctacttagaagccaaatctaagtaaaaacagaaactctttaggcaccccacatgtggctatattttgagttgagagagaggcatgggtggcccaaaggtgagtgagttggaggtgaatgggccatttcatgatgtagcttactcgtgttctctgtgccttcttgatcctgaatgtatcttttccgttttacagtgggttgtggccaagcttacccaaatttatgatttggtggtagatct

SEQ ID NO: 156901 - DNA, 574 bp, Homo sapiens
agttatacattttttaaaaattctcttagtatataataaataatttggctggcttttgtcttcagttattggtaatctctgagttcttggaatttcctgggtgataggagtgtcgttattatttatgttggacctctcagaccacaaatgatagcttatgcttatgaggtgacccatggtgagccctagatggtttaygttaatgagacgacttaggataaagtctagccacgccagaaagacaaaccatgtgattagaagtttaggttatgtaatatcagcccaatctccaggcaagttagcaggctgaacctgagtcatatgggcaattattctattatgtctaggtaaggaaactctaataaaagttatagaccaaaattcacatgaccttcctggttgacagtcctctttgtttataatgatacttcaatgctggaagggcaaacatgtccccaaggactatagtagtttcacttttgaaacgcttccagatttctccttatctatctttattcggactagttctaacttgattcttttttctataataaaactgtaattaaaagtatgg

SEQ ID NO: 156902 - DNA, 574 bp, Homo sapiens
agttatacattttttaaaaattctcttagtatataataaataatttggctggcttttgtcttcagttattggtaatctctgagttcttggaatttcctgggtgataggagtgtcgttattatttatgttggacctctcagaccacaaatgatagcttatgcttatgaggtgacccatggtgagccctagatggtttatgttaatgagaygacttaggataaagtctagccacgccagaaagacaaaccatgtgattagaagtttaggttatgtaatatcagcccaatctccaggcaagttagcaggctgaacctgagtcatatgggcaattattctattatgtctaggtaaggaaactctaataaaagttatagaccaaaattcacatgaccttcctggttgacagtcctctttgtttataatgatacttcaatgctggaagggcaaacatgtccccaaggactatagtagtttcacttttgaaacgcttccagatttctccttatctatctttattcggactagttctaacttgattcttttttctataataaaactgtaattaaaagtatgg

SEQ ID NO: 156903 - DNA, 574 bp, Homo sapiens
agttatacattttttaaaaattctcttagtatataataaataatttggctggcttttgtcttcagttattggtaatctctgagttcttggaatttcctgggtgataggagtgtcgttattatttatgttggacctctcagaccacaaatgatagcttatgcttatgaggtgacccatggtgagccctagatggtttatgttaatgagacgacttaggataaagtctagccacgccagaaagacaaaccatgtgattagaagtttaggttatgtaatatcagcccaatctccaggcaagttagcaggctgaacctgagtcatatgggcaattattctattatgtctaggtaaggaaactstaataaaagttatagaccaaaattcacatgaccttcctggttgacagtcctctttgtttataatgatacttcaatgctggaagggcaaacatgtccccaaggactatagtagtttcacttttgaaacgcttccagatttctccttatctatctttattcggactagttctaacttgattcttttttctataataaaactgtaattaaaagtatgg

SEQ ID NO: 156904 - DNA, 574 bp, Homo sapiens
agttatacattttttaaaaattctcttagtatataataaataatttggctggcttttgtcttcagttattggtaatctctgagttcttggaatttcctgggtgataggagtgtcgttattatttatgttggacctctcagaccacaaatgatagcttatgcttatgaggtgacccatggtgagccctagatggtttatgttaatgagacgacttaggataaagtctagccacgccagaaagacaaaccatgtgattagaagtttaggttatgtaatatcagcccaatctccaggcaagttagcaggctgaacctgagtcatatgggcaattattctattatgtctaggtaaggaaactctaataaaagttatagaccaaaattcacatgaccttcctggttgacagtcctctttgtttataatgatacttcaatgctggaagggcaaacatgtccccaaggactatagtagtttcacttttgaaacgcttccagatttctccttatctatctttattyggactagttctaacttgattcttttttctataataaaactgtaattaaaagtatgg

SEQ ID NO: 156905 - DNA, 573 bp, Homo sapiens
agatagataacatacaggctaacttgagatatgaacctagaatcaaaatttaaaaatgtcagcaaataaagtctagcaatgtataaaataaatcaagtattttttaggtaaaaatcctctagaaaacatcaattatccyatgacccaacaattccacttctagatatatatgctagatatatatgctaggaactatttttcctgggtgccatgaagcatgtaaaggatgtcaaagcaacattgcttgtcacagcaaaaaaaaaaaaaaaaagagaaaaaaagtaaattactcagatccgccaatcaaatccatcaataataggaaagataataataaaaaagatacattacatgtgctgtgttcttaaaatggaataatatctacccaatgaaaagaaatattgtatttattttatcaatatgtgaacaaagaagtctctctggggcataaaatcaagtcaaggaaaaaattacagaaagataaatacagtacatttcattatataaagttcaaaacattcagaactaaacagaataattttagagatacaaacatctagtaaatcaagaaag

SEQ ID NO: 156906 - DNA, 573 bp, Homo sapiens
agatagataacatacaggctaacttgagatatgaacctagaatcaaaatttaaaaatgtcagcaaataaagtctagcaatgtataaaataaatcaagtattttttaggtaaaaatcctctagaaaacatcaattatcctatgacccaacaattccacttctagatatatatgctagatatatatgctaggarctatttttcctgggtgccatgaagcatgtaaaggatgtcaaagcaacattgcttgtcacagcaaaaaaaaaaaaaaaaagagaaaaaaagtaaattactcagatccgccaatcaaatccatcaataataggaaagataataataaaaaagatacattacatgtgctgtgttcttaaaatggaataatatctacccaatgaaaagaaatattgtatttattttatcaatatgtgaacaaagaagtctctctggggcataaaatcaagtcaaggaaaaaattacagaaagataaatacagtacatttcattatataaagttcaaaacattcagaactaaacagaataattttagagatacaaacatctagtaaatcaagaaag

SEQ ID NO: 156907 - DNA, 322 bp, Homo sapiens
acaattagatggaatctctaaattaacttggaaaggatyatctttccgtttatcaagtattttaaatacttcaataaaagtttggaatgtactttgttcatttattaattcagtgtgccttcttactatctggtgctatgataggcaccttggatgtaatgacaaactgacaaatctctgcacttcaagccccttgtagtagatgccttataaaccagatgataaaaacaaaaaaattatttttcactaatatcaaatgataaatcactccatatactgaagacataaactgggtgacaatgaagttcaaatacttcatttg

SEQ ID NO: 156908 - DNA, 595 bp, Homo sapiens
atggagtgtattgcgtggaagtgtgaggaaaagagtgttactataaataaaacaasctttcacttataagttgaaattttatcaaaaatcttgaggaaatgagagatgcagacaagagatgtttgggttccaggcagagaaaatggaagatgcaagtaaaaatctttgaggcaaggacatgtagggaatggtgctgatgctgaatagttggggtagaaagtggtacaagatgagaaaattagcagtaattggatttcaccaaataactatacatttatcatctaatagaacatttgatataatgaaaagcagcatttttaatatatggattaggacaaaaaacgtaaatcagtagtcttgtgggcaaacttggatttataattaccctatattctatggaattggctcaaattgagatgaaacaaacacttatttcagatttgttgtaatctaattcctgatttaatgagattaaatgttgttttaagagtagactgaagaagagaaaaatagaagctggtttatgaattaaaaggctactgctattattttgcaaaaaaaaagggtggcttgatctagagggatgataaagggg

SEQ ID NO: 156909 - DNA, 442 bp, Homo sapiens
gctaggacttctcgtactgtgccaaatagaatggtgagaatgtgtacctttgtcttgttctggatcttagaagaaaagctttcaactttttactgatgagtataatgttagctgtggttttgccatacttggtctttatggtattgaggtacattcattctatacatcatttgttgagagtttttatcatgaaaaaatactgaattttgtcaaatgctttttctgcatctattgagacgattacatgtttttttttgyccttcattcttttaattatgtgtaccatatttatagatttgcatatgctgaacaattcttatatccctgggatacatttcagttgatcatggtgaatgatccttttaaatgtactgttaaatttgttttctttttttgctgaggatttttgcatttatgttcgtgagggatattgacttgtaat

SEQ ID NO: 156910 - DNA, 598 bp, Homo sapiens
tgatggtgtgtgtgtgtgtgtgtgtgtgtgtgtgtgtgtgtgtggaggtgggtggggcaccaagaaaaagaaacaaatagaacaatattcagttctcatacaggactggaaatattttatgttctcaactagccaaagtaaaaaaaaaaaatcccataatacatggaatagagtggagtagtcctaagggcattgcagcaataatggggaaaattatctctgccttaatggtgaccctggtcctgcctaamaaaacttcaaagcaagcatcaaaagtctccaactattttcaggaaacttaactgaatctcacaatgaggctctagaattaaaggaatacaaaaaatcattatcaagaccaaatccatgatgttggatatccaaccaaaaattatcaggcatgcaaagaagctgaaaaacatgattcataatgaggaaaaaaattagtcaaaataaacaggtctataaatgacacagattatagaattagtagtcactgatataaaaagttattataactatattacatgtgttcatggagttagaagaaagcatgagtatgttaaggaaagacagaaaacatacaaaaaatacacac

SEQ ID NO: 156911 - DNA, 598 bp, Homo sapiens
tgatggtgtgtgtgtgtgtgtgtgtgtgtgtgtgtgtgtgtgtggaggtgggtggggcaccaagaaaaagaaacaaatagaacaatattcagttctcatacaggactggaaatattttatgttctcaactagccaaagtaaaaaaaaaaaatcccataatacatggaatagagtggagtagtcctaagggcattgcagcaataatggggaaaattatctctgccttaatggtgaccctggtcctgcctaaaaaaacttcaaagcaagcatcaaaagtctccaactattttcaggaaacttaactgaatctcacaatgaggctctagaattaaaggaatacaaaaaatcattatcaagaccaaatccatgatgttggatatccaaccaaaaattatcaggcatgcaaagaagctgaaaaacatgattcataatgaggaaaaaaattagtcaaaataaacaggtctataaatgacacagattatagaattagtagtcactgatatwaaaagttattataactatattacatgtgttcatggagttagaagaaagcatgagtatgttaaggaaagacagaaaacatacaaaaaatacacac

SEQ ID NO: 156912 - DNA, 431 bp, Homo sapiens
tttttcttttaatcagtaaactggtttcataggaggaactctcatcttttggatcctatcatcagtatcctgccgcttcttccaccttattctcatagtcattggtttcacttatattgtttagagcccagcctgcctccttttacccaaataccccactgaaatttgtattagtaggactttgtttataattaactttttttctgggttattaattttttggtcccttttctttggcaattcatgagaaagcaactcccataaagggctgcataagaattctttagtaccttagctttgagcttttatttgatattgttaagattgtaaatgcatatggttgttagtgccaattagttgaaaatagcyttaaagacttcctactgtttccaatcttttactctgaccaaggtatatgggggatagagata

SEQ ID NO: 156913 - DNA, 516 bp, Homo sapiens
gcacaactgtctccgttttgcaggttttctgcatgtttccatttcgctccctttgctctcctttagtttcagaaataatgagaaaaaattctttcccatgtacttattatcatagctagaggaaagagaaaagctcattaaaataatgaagtgatttcagcacgattaattatgtccaaagccattgatgttcacaggtactgaaaacactcaactaccctaagctctggttgtaagataaaatcagttgcccactttttagcagcygtggataagtggaaaggaataaccttttggcatggccaaccttagatgaatgatctgtttcatcatttactgcagctggatcaatttggtcaaccaggagtagacagatttcacctgagccttttgacagacattcatttggcacagagaaatcattgagtttgcaatgcctgttgtcaatgaaatgaatttaaatatgcgaaaaggaaaaatcttgcactaggaaaacatggtggagagggaaaaaag

SEQ ID NO: 156914 - DNA, 518 bp, Homo sapiens
cccatgtatgagttagtgatcttttgaaaatgctgcctaagagaagcaccaaaaagaaagtcagaagggtccattagcatctttctagcatctgaaacaggacacccacaaaagtatttcagaatcttttaaaatgcaggctttgcaaaaggttccacctataataatgcctacagrgactgcaaaaccatcatgctatcctacatattcatggaatgaataaaagcaactgggtggatttgattgagcaaagactggagttgtaagcagtatctggcacatagtaagttctcaataactggaagctaaggtgatggtaacaaagataacagatatagcagaagggaaagcacatcttaagaggaaaacaaaaaagaaattcagttagatattgtttgtcaatgacaatgtagataataaaaaaattgttcatcctaccataaaaaaaaagtatgacttcaaaagtgatagaataaatttgcctttgcaaaaaagcagtagtgttgctcagatttgat

SEQ ID NO: 156915 - DNA, 603 bp, Homo sapiens
ctacaaaactagagagctgtagacgttctgaaaattggttaaagccatagtgagaccattcctaaaaggcatttcggaatcgttcagtgatttttaaagttaatttaaatcttttgctgaggtggaggtgatgcaaatcacttcccagttaaacttttaattatttccaacccaccccatccgttaactccaatcattactaaacaatagaaattagaattaatttctattaatcctgcactctgaagtgtcacccagaggccattgtgctcaccatctttttaacccctcgttttctgggttgtacacattttcctggtttagtggagayaagtaagttggaattattggggaagatttatcagaatgcgctccagagaaacagacttgttgacttggatttaaatgcaagtagcaagaaataacagaaatgtccttcaattgtccaggacagcatgatgaattatgatgacagagcccacatggaatggttcttctccttctctaatccgtcttctggaacattgtattttagatgaacttgcagccctaggcatgtatcatattaatgcttttgtattaccaatgattgtgttggccaga

SEQ ID NO: 156916 - DNA, 461 bp, Homo sapiens
aatatctgaaagctgggcatggtgcctgtgctggtaatcccagttactcaggagctgaggcaggagaatggctagaggccaggagttcaagacaagtataagcaacatagcaagaccctastctctgaaaaaaaaattttttttaattaaaaattagccaggtgtggtggcacgtgcctttgatccaagctacttgggtgacttaggtgggatgattgcttgagctcaggaattcaagggcacagtgagccatgatcacaccattatactccagcctgcatgacacagtgagatctcatctcaaaaaaataaaaattaattaattttaaaaaaccaaacaaaactgagagtcatgaaattgcatgccggtactttaaaccattttgacacaaactgcaaagtatcaaagccccctcaaaaataggaaaataaaacaagtaagagttacacaaaaattataa

SEQ ID NO: 156917 - DNA, 461 bp, Homo sapiens
aatatctgaaagctgggcatggtgcctgtgctggtaatcccagttactcaggagctgaggcaggagaatggctagaggccaggagttcaagacaagtataagcaacatagcaagaccctagtctctgaaaaaaaaattttttttaattaaaaattagccaggtgtggtggcacgtgcctttgatccaagctacttgggtgacttaggtgggatgattgcttgagctcaggaattcaagggcacagtgagccrtgatcacaccattatactccagcctgcatgacacagtgagatctcatctcaaaaaaataaaaattaattaattttaaaaaaccaaacaaaactgagagtcatgaaattgcatgccggtactttaaaccattttgacacaaactgcaaagtatcaaagccccctcaaaaataggaaaataaaacaagtaagagttacacaaaaattataa

SEQ ID NO: 156918 - DNA, 617 bp, Homo sapiens
aggaaagccacaggttacaacagatttgtgaactcagccaagcacggtggtggcaggggctagctgctacaaagaatacatgttttagacaaatactcttgtgtatgggcaaaaaaactcgaggactgtatttgtgactaatggtataacaggttattttagtttctgttctgtggaaagtgtaaagcatttcaacaaagggctttaatatagatttatttttgcacccatgctgttgattgctaaatgtaatagtctgatcatgatgctgaataaacaacctttttttctttaatatgctgtttaaagttagtctactctgaagccatcttggtaaatttcccccaacagtgtgaagttagaattccttcagggtgatgccaggttatatttggaatttatatacaacctgcttggrtggagaagccattgtcttgagaaaccttggtgtcgttgaactgacagttactgttgcgacctgaagttcaccattaaaagggattacccaagcaaaatcatggaattattggttataaaaataattgttggcacatcctatgcaatatatctaaattgattaatggtaccagataaaattatagatgggaatgaagctt

SEQ ID NO: 156919 - DNA, 617 bp, Homo sapiens
aggaaagccacaggttacaacagatttgtgaactcagccaagcacggtggtggcaggggctagctgctacaaagaatacatgttttagacaaatactcttgtgtatgggcaaaaaaactcgaggactgtatttgtgactaatggtataacaggttattttagtttctgttctgtggaaagtgtaaagcatttcaacaaagggctttaatatagatttatttttgcacccatgctgttgattgctaaatgtaatagtctgatcatgatgctgaataaacaacctttttttctttaatatgctgtttaaagttagtctactctgaagccatcttggtaaatttcccccaacagtgtgaagttagaattccttcagggtgatgccaggttatatttggaatttatatacaacctgcttggatggagaagccattgtcttgagaaaccttggtgtcgttgaactgayagttactgttgcgacctgaagttcaccattaaaagggattacccaagcaaaatcatggaattattggttataaaaataattgttggcacatcctatgcaatatatctaaattgattaatggtaccagataaaattatagatgggaatgaagctt

SEQ ID NO: 156920 - DNA, 544 bp, Homo sapiens
cacggccaaccctgtttcatctctatctccacccactctaatcaacccagaggttgcatgtgggtgtagaaaaagaggggagaaagggtgactccaagacttttagtggaatccaagggaagatgtcatctcatttcatccttttaatttttactcatttaatyttcacaccaaaattataaggtaggtattatttttcccattttacagaaattgaaatttagatggccagcaaataggaagcagtctaatattttgaaaataactttaatgaggcataagtggcatgtgataaactgcacatatttaaagtgtacaattggataagttttgacatatgtatacacatccgtgaaaccaccaccaccacaatcaagacagggagcacatctgtcacccacgaactattcctcatccccttttaaaatctctcctccatctcttcccacacaccccagcccaatcactgatctgctttctgtcactataattcatttgcatttcctaaagttttatgtaagaggaatcatacagtatgtacttt

SEQ ID NO: 156921 - DNA, 430 bp, Homo sapiens
ctttattttgtgtatgtatctagatatttatttctagttgtgtgtataataactgatttttagaattgaaattgtatttttatacctacattaagaacatttcctcattgtcacatacacatgtgaaatatccatcatttagatgaaccataattttctgtgtcctatttttgattatttaaggttatctcctagtttttgcttctgtacataatggagcaatgaaaagagccttgtatgtaaaaatgtatgtgaaaakttctagttattttattatggacagtgcctaaaactggatttttttgggtgaaagctcctgatagttttaaggatttttgaaacatatttcattgtcttaccagcttgcccagtgctgtgtgtatcaggcgttttactctacaaatgatgttcccttcatcacccctgcctt

SEQ ID NO: 156922 - DNA, 359 bp, Homo sapiens
cagtttatctaatatgtattatctttatcgaaagacaattgagaaaaggtctcttattctccmaataaaaataaatcaagcgctttgggagggcgggttttttttttttttttttttttttttttttaacacaactgcccaatagccagtacaacatgaaagattaggggaagcattaatgatgtatgtgtgaaaagcttgttaaaaatctaagagtgaagtttgtgttaaaagttgtttgaaattggaatttactgggaggccaaagactgaaagaagtagaagattcttctctcaggacatgaggagtaagttgtatgatgatggtctgtgttttgtttgcatgaatgagaatttat

SEQ ID NO: 156923 - DNA, 359 bp, Homo sapiens
cagtttatctaatatgtattatctttatcgaaagacaattgagaaaaggtctcttattctcccaataaaaataaatcaagcgctttgggagggcgggttttttttttttttttttttttttttttttaacacaactgcccaatagccagtacaacatgaaagattaggggaagcattaatgatgtatgtgtgaaaagcttgttaaaaatctaagagtgaagtttgwgttaaaagttgtttgaaattggaatttactgggaggccaaagactgaaagaagtagaagattcttctctcaggacatgaggagtaagttgtatgatgatggtctgtgttttgtttgcatgaatgagaatttat

SEQ ID NO: 156924 - DNA, 442 bp, Homo sapiens
aatggatcactccatttgtcttttttcttattttttatagaatcttgtatttgcaaacaaatctcaagtacacagcttgatgaggttttagacaaatatatgtccatgtaaccaccaccctgataaaaatatagaacattttcattaatacagmaaatttccctatgctcttttgtagtcagtaccttgcccagaggtattctgtcaccacagattagttttacttgttcttaaacttcatatatatggcatcgtacaacatatacctcatgtctttcattcagcataatgtttttcttttattaaattgacatataattcacataccataacattcgcctttttaaaatagacagttcagtaggttttagtgtgttcaccaagttgtgcaaccttttgtgcctaatttcatttgctgagcacaatgtattcaagtctcata

SEQ ID NO: 156925 - DNA, 442 bp, Homo sapiens
aatggatcactccatttgtcttttttcttattttttatagaatcttgtatttgcaaacaaatctcaagtacacagcttgatgaggttttagacaaatatatgtccatgtaaccaccaccctgataaaaatatagaacattttcattaatacagcaaatttccctatgctcttttgtagtcagyaccttgcccagaggtattctgtcaccacagattagttttacttgttcttaaacttcatatatatggcatcgtacaacatatacctcatgtctttcattcagcataatgtttttcttttattaaattgacatataattcacataccataacattcgcctttttaaaatagacagttcagtaggttttagtgtgttcaccaagttgtgcaaccttttgtgcctaatttcatttgctgagcacaatgtattcaagtctcata

SEQ ID NO: 156926 - DNA, 616 bp, Homo sapiens
tttctcttactatatatctaggagtgaaattgctgggttataagtaggtatatgtttaaccttagtagaaactgccaaacaattttccctaatgattaatgatgttgagtgcatttttacatgtttaaagggcattttgataacttcttttatcaaatgataaaagtcattgcccatttttattcgatcttttgatttttgatttgtaggagttctttattctgaataccagatctttgtcagataaatgcattgtgaacattttatctcagtctgtggcargcctttttatgtttttaatggtatgttttttgagctgaagtttttttttaatttgataaagtccattttttctttattgttaatgctgtttgtgtcctgtttaagaaatattttcctacattcaggtcatgaaaatattcttttccatgtcattctaaatgctttatgcactttgctttcatatttagattcatgatccatttctaattaatttttgtatgtggtacttcataagatttactttttccattgaaatattcagtaatctcaacaccatttattgaaatggttctattttcctattgaaatgcattacagtttttgtcaaaaaaat

SEQ ID NO: 156927 - DNA, 532 bp, Homo sapiens
caaacctagtagaatttacctttggcaaagtttaggtatataaacctatcagtatccaggtaggggaagtctaatccttataagccagtgtgcaaaaatcaagtttaacccttgagatggaacatgaactctttccaattctacaggccagatggccctaaagatgcccaactcacattcatagtcactgtctgtacctataacctctgtttcataaatgacattgtattagtctattctcatggtgctaataaagacatacccaagactgggtaatttttaaaggaaagaggtttgattgactcacaggtccacatggatggggaggcctcacaatcatggctgaaggtgaaagacgagcaaagtcatgtcctccatggtggcaggcaagaggcctgtgcaggggaactgcccttttataaaaccataagttaytgtgagacttattcactatcataacaacagcatggaaaaacctgcccccatgattcaatcacctccatggggattattggagctacaatttaagatg

SEQ ID NO: 156928 - DNA, 547 bp, Homo sapiens
tgctgttccatagttctaataggccttctttactctttgttattcttctctatcatgagaaggcttcacagaaatactgggctttgtgaaaaactggaccaaggatttggggtcttcgcacggattgtgccccctgcagcactgtggcaccagccagcctcttcaacatggcatcccwgctgatcaaagtgcagagtagtggccaagatctgcatgccagacaatatgattagtgccctgctctttgttttcaactcacctcttgtggctcagccctcttggcattcccagtttccacagaatggtacaggagtgggcttctcatgaaggttcttagaccaatgtggaaatcaagcatctacctccaattttctcctctcatctcagaaactgtggatctagggaagttctctgtgagtggcattatgccagcttagggtgggggccgtgcagtctgaaatgactctttcttttatgaatcatggcttctcttgattctgtgggtccagtgagtttctccgttttccctctgagctctagtgaattc

SEQ ID NO: 156929 - DNA, 480 bp, Homo sapiens
ttctatatgcaaactggagataatttctgcaagaaggtggtgatgaggattaaattattcttctctactttttctccactacttcacytcaccaaagccctgccctgtaactattgtctccaaagtatcctactggctattgtccaggtacttataacagtgaataacaattatttgtttgcctttgcgattgtgagctccttacagtcagtgttgtgtcttctttgtcttcagttttcaggccaggcaagggtctgatacattctacatccgcaatacatgtctgataaatgaaggaataagtaaatgaatgaatgggaatggccaacattaacataataaatgaggactcccttctgttttcttcaaaccaattaaagccaaatcctaatatattgaattgcttccaactatttcttacagttctggtttacttaatttaataaattcgcctaccagccacagatatttactgaattc

SEQ ID NO: 156930 - DNA, 480 bp, Homo sapiens
ttctatatgcaaactggagataatttctgcaagaaggtggtgatgaggattaaattattcttctctactttttctccactacttcacttcaccaaagccctgccctgtaactattgtctccaaagtatcctactggctattgtccaggtacttataacagtgaataacaattatttgtttgcctttgcgattgtgagctccttacagtcagtgttgtgtcttctttgtcttcagttttcaggccaggcaagggtctgatacattctacatccgcaatacatgtctgataaatgaaggaataagtaaatgaatgaatgggaatggccaacattarcataataaatgaggactcccttctgttttcttcaaaccaattaaagccaaatcctaatatattgaattgcttccaactatttcttacagttctggtttacttaatttaataaattcgcctaccagccacagatatttactgaattc

SEQ ID NO: 156931 - DNA, 351 bp, Homo sapiens
tttcagagtctgccccatcatagcaacttmacatgcctggtgaaagatggaagcttaaaacaaccattggaaagattttatttagtactttctcctccaatgagggccaactggaaatttaagaattccgattctccataagagaaccagcatcagccttaggcttttaggaactttttgaggcactccataattccttttccccaatatctgtcttccccattcagctaccagtgaaatcaaattctatcatgttttctttgttcattaattcactcctttgttttctcacttaagaaatatttgagtgtctatgtcaatattgggctaagcattgtaggtggtaaaagg

SEQ ID NO: 156932 - DNA, 537 bp, Homo sapiens
tgtttgtcaggaaatgagaaagaaatcaattataaaggctttytaaaaaacctgtgataatactttccaaaaataaaggggacccatggtttaacaaaagatttacaaaaacattttttttattttttgctgctgctgcaggaatgagagtccacttggtagatgttgacatttctgggagattataaaaagttacaggatagaaaataagaaacgtatgtttaaattgggattactgagaaaatatgacttctatgatagcttcatgtatcataaagatacatagcaagatacagggtctggacttgattctgttggtcactgggagacattggaggtttgtaagtggcaaagtggcctgatctgatgtgatctaggaaggtgactggaggcacagaggaaatggatatcagaggaggagcctgttgtttggaggttactttaggcacagaggcaagagatgatcagatctgaatcaagacactgggaaaactttcatttacatttttgtgagagaatgtgtattcttctcacatg

SEQ ID NO: 156933 - DNA, 423 bp, Homo sapiens
cagtgtctgcattgatatatattttcttgtttatccaatgagattggaccagatcataagaaatcttggaggaaatcctgataaaaaataatactattgataataactaacttattataatccttgctccatgctggacacaattcttaagcttcatatatattaaaccctttaatcctcrgagttctatgaggtaggtactgttttcctgttttacaaatgagaaaactggcattcagtttcttaagaatgctaaacaataggcctttattcataggcaattagagatgcaaaattatccttaaaaaggaaggtgacatgactctgtttaacttctacagaaatataaattccaggagtatggaggatagattgaaggaattttattggtgcatggaaacccattagtaggctgttaaggat

SEQ ID NO: 156934 - DNA, 646 bp, Homo sapiens
caccctaccacttttctaaggtctttgtccctacttccaccctccagacacctgcccgaatggcaggagtgataacatcaagcctacagcagtaggtggattgctatgatgagaacaacagggcattcatttaagagggactccaagccattttgttccacaaatacatttgcaatattcacaaaatcagcttggtgcagtggctcacacctgtaatcccagcactttaggaggctgaggcaggtgtatcacttgaggtcaggagttcgacascagcctgaccaacatggtgaaaccccgtctctactaaaaacacaaaattagctgggcatgctggtgcatgcctgtaatcccagctactcggaggctgaggcaggagaatcgcttgaacctgggaggcagaggttgcagtgaaccattgcactccagcctggccaacaagagtgaaactctgtctcaaaaaaacaaaaaaaattcacaaaatcacatacacacaaccactgataaagcttcatttattggacaagtcaaaactatctttcacattttttaaaaaggaagactattttgtcaggagaattatctgtcatgtagaagctgaaagaaattttagacttgaaaataacaattttgggggccaggcatg

SEQ ID NO: 156935 - DNA, 646 bp, Homo sapiens
caccctaccacttttctaaggtctttgtccctacttccaccctccagacacctgcccgaatggcaggagtgataacatcaagcctacagcagtaggtggattgctatgatgagaacaacagggcattcatttaagagggactccaagccattttgttccacaaatacatttgcaatattcacaaaatcagcttggtgcagtggctcacacctgtaatcccagcactttaggaggctgaggcaggtgtatcacttgaggtcaggagttcgacaccagcctgaccaacatggtgaaaccccgtctctactaaaaacacaaaattagctgggcatgctggtgcatgcctgtaatcccagctactcrgaggctgaggcaggagaatcgcttgaacctgggaggcagaggttgcagtgaaccattgcactccagcctggccaacaagagtgaaactctgtctcaaaaaaacaaaaaaaattcacaaaatcacatacacacaaccactgataaagcttcatttattggacaagtcaaaactatctttcacattttttaaaaaggaagactattttgtcaggagaattatctgtcatgtagaagctgaaagaaattttagacttgaaaataacaattttgggggccaggcatg

SEQ ID NO: 156936 - DNA, 646 bp, Homo sapiens
caccctaccacttttctaaggtctttgtccctacttccaccctccagacacctgcccgaatggcaggagtgataacatcaagcctacagcagtaggtggattgctatgatgagaacaacagggcattcatttaagagggactccaagccattttgttccacaaatacatttgcaatattcacaaaatcagcttggtgcagtggctcacacctgtaatcccagcactttaggaggctgaggcaggtgtatcacttgaggtcaggagttcgacaccagcctgaccaacatggtgaaaccccgtctctactaaaaacacaaaattagctgggcatgctggtgcatgcctgtaatcccagctactcggaggctgaggcaggagaatcgcttgaaccygggaggcagaggttgcagtgaaccattgcactccagcctggccaacaagagtgaaactctgtctcaaaaaaacaaaaaaaattcacaaaatcacatacacacaaccactgataaagcttcatttattggacaagtcaaaactatctttcacattttttaaaaaggaagactattttgtcaggagaattatctgtcatgtagaagctgaaagaaattttagacttgaaaataacaattttgggggccaggcatg

SEQ ID NO: 156937 - DNA, 646 bp, Homo sapiens
caccctaccacttttctaaggtctttgtccctacttccaccctccagacacctgcccgaatggcaggagtgataacatcaagcctacagcagtaggtggattgctatgatgagaacaacagggcattcatttaagagggactccaagccattttgttccacaaatacatttgcaatattcacaaaatcagcttggtgcagtggctcacacctgtaatcccagcactttaggaggctgaggcaggtgtatcacttgaggtcaggagttcgacaccagcctgaccaacatggtgaaaccccgtctctactaaaaacacaaaattagctgggcatgctggtgcatgcctgtaatcccagctactcggaggctgaggcaggagaatcgcttgaacctgggaggcagaggttgcagtgaaccattgcactccagcctggccaacaagagtgaaactctgtctcaaaaaaacaaaaaaaawtcacaaaatcacatacacacaaccactgataaagcttcatttattggacaagtcaaaactatctttcacattttttaaaaaggaagactattttgtcaggagaattatctgtcatgtagaagctgaaagaaattttagacttgaaaataacaattttgggggccaggcatg

SEQ ID NO: 156938 - DNA, 431 bp, Homo sapiens
tgcccataaaaatattgttgctaggagaatcaaaagctaacacatgtagcacattaagaaaaacaagacttgctgacttaaatttctgactaaatttggtcagtttactgaaccatataaggaaagaagcagaacggctcaaawacactttcaaaatcttatctgacatggtttaccttcaagtttttcttgaatgtaaatgcagaacaattaccaataataaatggctgtgtgaagacagttttgtcatttaattccacgtacaggcagctttgtcaacttgagttgtaaactgattcaagtacataaaactttagtttttattgttccacacatgttcataaggaaaaaattgagaagcctgctaacaaagagttaacaaggtgtttatacaatgctcaaagcagacagagtccatgacttaaagacag

SEQ ID NO: 156939 - DNA, 488 bp, Homo sapiens
tgtaaactctggaagtgaccttattttctgcctttttaaactgggaaaacaaaaaatctggttttctatwaaaaaaaaaaatctggatttgttagaaacaataatgagaaacttagagaacttcttgagttgcatatagtacctgattctaattcattccagaagccccagttctatgagatactataatcttataaattatttaggccggttccaatgggcttttcttacttacaaccaagactcctaactaatatatgcacaaaatccttctaccattttcctactagaggttggtctaacactgtaggtaagtatgcggctttgaaaattgattcctttttgtttttcaaggggctcataagaaaataattgagttgatggagttctgggaatcttagggcattttaagactccaattactatactgtgaagtacgtgtgcttgcttatgtgtgagaatgtatgcatgtttatgtataaatttgt

SEQ ID NO: 156940 - DNA, 383 bp, Homo sapiens
gccagtgccctagagattatcctacatttcaggtttgtttgattaagtatgtgtggtatcatttaatatgttcttctatctcccatgtttctagtaaagtgatatttgatctaaaacacctggttaaactcaggctaaaatttaggtaatgcttaggcacataatggaggttgctctactattaatgctgctatgcttgatcatggaattgaatctttggccagtatatattgttgattgcagggaatgagtgtttacattgttatagttttagcactagtacatacagagtaccaatagggtactcataaataccggcttaatgaatggtgaataaatgaatgatttaamctgatgttaagtgatagctaacaaaactgaga

SEQ ID NO: 156941 - DNA, 544 bp, Homo sapiens
agtgattctgatgatgatgcaagtttgagaaacaccagggaatgggaaggccataataaccagaggagaaacaagagtatgaacagctccttctttgaggcaggtctccaggcccagaaagtagcaccttcctttacaaataaggcaggtggggttctacttgagggtaggagtgaaacaggaggcacctgcttcttagtcttagagccctcaggtctactagaaaacaggcattcaagactctaccagaatttacctctgtgatcacttctctttcaagtcatgctttgctccagtcctggcaggcttcctgctgactctggaacacaccatggccttccctcattctaagttttcctttcctctccacccatttaagtaccagcttgttattctcaccatctgatatggggctatggataaaaaccttgattcatatattcattcatcattcaattcatttcayagcacttctcaaccctggctaggcattaccaccaatatcccactgcaaaccatctgggaacgggcctcaggttatttg

SEQ ID NO: 156942 - DNA, 630 bp, Homo sapiens
gggtctgctctaggtcagcaaaggctcaggcctgggcctccctcatggtcctcctgccccccgctctcctctagttcttctagatccagctgatgagaaacttttggaagaggagattcaggcccccaccagctccaagaggtgagtgggtagcaaatgggtactggagactggctcaggtgggccctacaagcaggagggcagtggggtcctgagatacctgatttcccaccccagatcccagcagcacgcgaaggtggtgccatggatgcgaaagacagagtacatctccactgagttcaaccgttatggcatctccaatgagaagcctgaggtcaagtaagttactaacaggaagagagggaaggtggagatattaggtgtgtccagtggcccctaaggacctttttcttcattcctaggattggggtttctgtgaagcagcagtttaccgaggaagaaatatacaaagacagggatagccagatcacagccattgagaagacttttgaggatgcccagaaatcagtaattgagggactgggatggggagaggcaagggtgcggctgcagagctcctcctcaccttgtttttgtyccaccagatctcacagcattacagcaaacccc

SEQ ID NO: 156943 - DNA, 437 bp, Homo sapiens
ggaagccaacctgcaagttattaatataaagcccttaccactctttccgtctaaatctgtgccttattttcagaaccttgtcactttttattccagccccttyttctgggttttgtatctgtgaatttgcattccaggcaaatgttccatttatggtaaaaaaaaaaaaaaaaaaaaaaaaaaaaaaaaaaaaaaaaagcgcagacagcatgagttagcactaccatcccttcttcatgacacagagatggcagttctgtattgggcttctctctttggctttgtccaagactccttctctcactgctgccaccaatggttatctatactttccttaatgaattagggctcttgggacctcaagagagatgaaatcgcaatgctgcgtatttagcaggagcactagtaagagttgtggtgtcaggagctgcccaata

SEQ ID NO: 156944 - DNA, 437 bp, Homo sapiens
ggaagccaacctgcaagttattaatataaagcccttaccactctttccgtctaaatctgtgccttattttcagaaccttgtcactttttattccagccccttcttytgggttttgtatctgtgaatttgcattccaggcaaatgttccatttatggtaaaaaaaaaaaaaaaaaaaaaaaaaaaaaaaaaaaaaaaaagcgcagacagcatgagttagcactaccatcccttcttcatgacacagagatggcagttctgtattgggcttctctctttggctttgtccaagactccttctctcactgctgccaccaatggttatctatactttccttaatgaattagggctcttgggacctcaagagagatgaaatcgcaatgctgcgtatttagcaggagcactagtaagagttgtggtgtcaggagctgcccaata

SEQ ID NO: 156945 - DNA, 394 bp, Homo sapiens
ttcacctctaaccactcccccaaccctctctgctcagccacactggtctccctgttacccatgaygtgcttcaagtaggacctttgtctcaggatctctgctttttacatctcttgtcctagaatattctttcccagatgttcacatggtccaaaacctgaccttgcgcccaggtgattcctcagatacccattccccaagatgctttccctaacctctctacagaaaagagcacctttttctctgcaacctcaccagcatctgttgtttcttgcctttttaataatcaccattctcactggcatgagatggtatctcattctggtttctatttgcatttctctgatgatcagtgggaaggtgaattagttcaaccattgtggaacacagtgtg

SEQ ID NO: 156946 - DNA, 394 bp, Homo sapiens
ttcacctctaaccactcccccaaccctctctgctcagccacactggtctccctgttacccatgatgtgcttcaagtaggacctttgtctcaggatctctgctttttacatctcttgtcctagaatattctttcccagatgttcacrtggtccaaaacctgaccttgcgcccaggtgattcctcagatacccattccccaagatgctttccctaacctctctacagaaaagagcacctttttctctgcaacctcaccagcatctgttgtttcttgcctttttaataatcaccattctcactggcatgagatggtatctcattctggtttctatttgcatttctctgatgatcagtgggaaggtgaattagttcaaccattgtggaacacagtgtg

SEQ ID NO: 156947 - DNA, 437 bp, Homo sapiens
ggaagccaacctgcaagttattaatataaagcccttaccactctttccgtctaaatctgtgccttattttcagaaccttgtcactttttattccagccccttcttctgggttttgtatctgtgaatttgcattccaggcaaatgttccatttatggtaaaaaaaaaaaaaaaaaaaaaaaaaaaaaaaaaaaaaaaaagcgcagacagcatgagttagcactaccatcccttcttcatgacacagagatggcagttctgtattgggcttctctctttggctttgtccaagactccttctctcactgctgccaccaatggttatctatactttccttaatgaattagggctcttgggacctcaagagagatgaaatcscaatgctgcgtatttagcaggagcactagtaagagttgtggtgtcaggagctgcccaata

SEQ ID NO: 156948 - DNA, 412 bp, Homo sapiens
caagcacattgtttgctaatgtcgtatgaaacatgagatgaaaacatgtctgtgtgtctgttggagcatcttcaaagttgattccaggccctctccatttgcagaaggggaatgggtcatccgacgggttgaaaaatgttcattattaaattccctgtgtgtctaatcatttggcaggaagttctctcttatgtgcttcatgcaatcttttccactggaccaagaaagagcagcacaggtttttttccccctttyctgctgagtgagctcctgctagtgattaatgaaggcatctaaatagcctttggtttaaatgatgttatcactgtctccatttaactccacatgtctttacctcaaacaggaataagactgcttctgtcttttcccattgttgcctggccatgaggaa

SEQ ID NO: 156949 - DNA, 589 bp, Homo sapiens
agatctgtcaagatcatcactcatgcacttctcttgttctctgctcatagattctatggaarttgaggcatgcatgaagctgcccacttgggttaagcacatcattcattttcttaaaaatctttaagataataatcctgataggcttaataataacaataacagtaacaataacgtcacctaacatttattaagcacttatgatataacaggcacgatattaaacattttacagaaatccttgtgatgttgatactattagtatctaatttttcaatcaaggacactaaggtttgaagaagttgggtagctgttgtgtattgtgtcaaaaaatgtgagaggcttttaaagaaagtgttatttaattcttgtgatctctcaatagcagtaagagacccaagaattatgagaagctgacaggtcccatggagtccaggcctctgcagatttttcaccaacgaaagttgtgtgcagatgaagcaaactgggcattgtaactatgagaaagaagaggaagctctttgtcagaaaagagaacaaagtagagaacagagagaaacatgccgtgagataggggtgaggggtgaac

SEQ ID NO: 156950 - DNA, 589 bp, Homo sapiens
agatctgtcaagatcatcactcatgcacttctcttgttctctgctcatagattctatggaaattgaggcatgcatgaagctgcccacttgggttaagcacatcattcattttcttaaaaatctttaagataataatcctgataggcttaataataacaataacagtaacaataacrtcacctaacatttattaagcacttatgatataacaggcacgatattaaacattttacagaaatccttgtgatgttgatactattagtatctaatttttcaatcaaggacactaaggtttgaagaagttgggtagctgttgtgtattgtgtcaaaaaatgtgagaggcttttaaagaaagtgttatttaattcttgtgatctctcaatagcagtaagagacccaagaattatgagaagctgacaggtcccatggagtccaggcctctgcagatttttcaccaacgaaagttgtgtgcagatgaagcaaactgggcattgtaactatgagaaagaagaggaagctctttgtcagaaaagagaacaaagtagagaacagagagaaacatgccgtgagataggggtgaggggtgaac

SEQ ID NO: 156951 - DNA, 589 bp, Homo sapiens
agatctgtcaagatcatcactcatgcacttctcttgttctctgctcatagattctatggaaattgaggcatgcatgaagctgcccacttgggttaagcacatcattcattttcttaaaaatctttaagataataatcctgataggcttaataataacaataacagtaacaataacgtcacctaacatttattaagcacttatgatataacaggcacratattaaacattttacagaaatccttgtgatgttgatactattagtatctaatttttcaatcaaggacactaaggtttgaagaagttgggtagctgttgtgtattgtgtcaaaaaatgtgagaggcttttaaagaaagtgttatttaattcttgtgatctctcaatagcagtaagagacccaagaattatgagaagctgacaggtcccatggagtccaggcctctgcagatttttcaccaacgaaagttgtgtgcagatgaagcaaactgggcattgtaactatgagaaagaagaggaagctctttgtcagaaaagagaacaaagtagagaacagagagaaacatgccgtgagataggggtgaggggtgaac

SEQ ID NO: 156952 - DNA, 453 bp, Homo sapiens
gaattcaagacctgagaccttgcagctcaggacctcaaggcatcaaaaataatgacatagtatctccaggaggtatcaggagcaatgtaggaggactgcacagctctgtgctcagtgtacccagttttgtgctttggagaaaggacaagaagaactggtctctttccaaaacaagcctatctccaaagggagcacagcataatggtacagacataaccttgctatatgcttggcagtacatacatttgtcttggagagaggagtagtagttggaaaacttaagataaaagatctggggktgtcgatggcttctgatgtgttgatgtcaaggcaagtgttttctgcgccatgacttcatgttagtcctatactggaggacgcttttttttggtgagggtgtagggcaccaggagagcctcctgggcattatgaatgtgcagtaacagacccgag

SEQ ID NO: 156953 - DNA, 573 bp, Homo sapiens
cctgtttcattccttagtcccttgcccctctcctatccaaattcattttcttagtattacttaatagcctcacttgttagggctttttcctctttcccaagtgaattttagaatcgtagtaagtgctatttcaaaagractttatacatgctaaacatacacatacatacatacatacatatctaggatgttggttctatttcctgaagatggattttgattgatatcacaatatatctgtatgcctcaatttatccaaaacttcttttatatgtttttatatattgccagattgtatggaggttttgtttttaatttttggagaaaactctatattgttttccataatggatctgccaatttacatttccaccagctgtgggcaagggttgcttctggcagtttgtcagtgatgttttgcttttcaaatattataatagtgtcatctctgcttgattttttttctctatgtgtattcactttttctttgatattatattagttagaacttgggacataaggtagatagcagaggtcatgtatgtcttggtcctatttctgatccccaaaata

SEQ ID NO: 156954 - DNA, 601 bp, Homo sapiens
aacatcatagtgcgatgcattatgtatttgtgtttgtggtgatgctggtataaacaaacttgtgatgccagtcatataaaagcccagcccacacmattatgtatagcacatggtatttgataataataaatgactatgttactggtttatgtatttaccatactttttactgttattttagcatgtactccttctccttacataaaaaataataactgtaaaacagcctcaggccgatccttcggaggtattccagatgaaggcattgttatcttaggagatgacagctccatgcatgttattgcttctgaagaacttccagtgggacaagatgtggaggtggaagacagggatattgattattctgaccctgtgtaggcctaggctaatgtgtgtttgtttttaacaaagtttaaaaagttaaaactggaaaaatagcttgtagaataaggttataaagaaagaaaatatttttgtacaaccatgcgatgtatgttttaagctgttttacacaagagtcaaaaagttaaaaagttaaaatataaatttataagctttgttataaagtaaaaatattacagtcagctaaagttgttattga

SEQ ID NO: 156955 - DNA, 601 bp, Homo sapiens
aacatcatagtgcgatgcattatgtatttgtgtttgtggtgatgctggtataaacaaacttgtgatgccagtcatataaaagcccagcccacaccattatgtatagcacatggtayttgataataataaatgactatgttactggtttatgtatttaccatactttttactgttattttagcatgtactccttctccttacataaaaaataataactgtaaaacagcctcaggccgatccttcggaggtattccagatgaaggcattgttatcttaggagatgacagctccatgcatgttattgcttctgaagaacttccagtgggacaagatgtggaggtggaagacagggatattgattattctgaccctgtgtaggcctaggctaatgtgtgtttgtttttaacaaagtttaaaaagttaaaactggaaaaatagcttgtagaataaggttataaagaaagaaaatatttttgtacaaccatgcgatgtatgttttaagctgttttacacaagagtcaaaaagttaaaaagttaaaatataaatttataagctttgttataaagtaaaaatattacagtcagctaaagttgttattga

SEQ ID NO: 156956 - DNA, 601 bp, Homo sapiens
aacatcatagtgcgatgcattatgtatttgtgtttgtggtgatgctggtataaacaaacttgtgatgccagtcatataaaagcccagcccacaccattatgtatagcacatggtatttgataataataaatgactatgttactggtttatgtatttrccatactttttactgttattttagcatgtactccttctccttacataaaaaataataactgtaaaacagcctcaggccgatccttcggaggtattccagatgaaggcattgttatcttaggagatgacagctccatgcatgttattgcttctgaagaacttccagtgggacaagatgtggaggtggaagacagggatattgattattctgaccctgtgtaggcctaggctaatgtgtgtttgtttttaacaaagtttaaaaagttaaaactggaaaaatagcttgtagaataaggttataaagaaagaaaatatttttgtacaaccatgcgatgtatgttttaagctgttttacacaagagtcaaaaagttaaaaagttaaaatataaatttataagctttgttataaagtaaaaatattacagtcagctaaagttgttattga

SEQ ID NO: 156957 - DNA, 585 bp, Homo sapiens
tggacctctcctccaatctacttctgctttgtcgctgcgttttatttcctttttgactgtgtttgaattttttttttttttttacttctttgatcacttggatatttttctgccacaccctgtgttctgtaaactctcagagggcagcaacctcatctgcctcttcaactactgttttcctggaacctagcatagtgcctgaaacagtaagtaaatatttgtygaatcaatgaattagtggagatgcattcgatcataagtcacatttttactgtgccaagtgttaaggacaccaagtttctgaaacacattcctagttcacaagggcctaacagtctatctgggcaatgacacacaacctaagttacactgggttgatttgtattagtatttaagtgctatatgaatattacattgaataaacactccaatcattgattcattcagccaacatctgttgacatctacagtgtgccaggcattttgtttgatgctgttatgcaaagatgagtaagtcatagtttctgcctttggagaggtgagagtctagggggagagagtggcatgtaatgaaatgatttctct

SEQ ID NO: 156958 - DNA, 604 bp, Homo sapiens
gagaatgaaaatatacataatgaatagattaactgcttagcaattgggttacattgccacgctaacgcagtggggcccaactaatctcttaggaggcaagtttcttaaatacagtgttagaccaactggaaaattaactagggtgttgtctggaaagatctcattttcatcctaaaacttgccaagtagaaatgaaagaggtggccaacaactcatttttcaaagcgtgtcagctgttgctgtactttttcatgtaaattatctttcccagggaatgaagaattgaaagggtttcttaggcattaaaaacaaaacagaacaaaacaaaaaatgctgagacattaaacaagacagtggttagctcaaatgacaacttctctaaataacctaccttaatccttctggccaaaataattctctcatttagttttcttaacagttagttttctctctctccaatctaattcaaactgatttagttaaaaacaaaagtsgggggtagaggtattgccacatacaactgaaaatcttaggagtgatggttcaggcacagttggagtcaggggatcaaaagatatcagcattatttattcagttttatgtg

SEQ ID NO: 156959 - DNA, 565 bp, Homo sapiens
tcccataattcctatgtgttgtgggagggacccagtgggacataattgaatcatgcgggcagtttcccccatactgttcttgtggtagtgaatgagtctcaccagatctgatgtctttaaaaggggtttcccctttcacttggctctcattctcttttgcccgccaccatgtaaagacgtgccttttgtcttccaccctaattgtgaggcttccccagcctcatggaactgtgagtccattaaacccccttttctttataaattacccagtattaggcaagtctttatcagcagtgcagcagtgtgaaaatggattaatacatgccctgaaccccaataaaggctttggcacactggctccttcctccctctctgctccccacctgctggttaagtgttcatacytaactggtatctaatttaaatttctccatcactataaacatttttttaattttccaaacagcaagctggagctctgggagtggacaccgatctcctgtgagcaacactgctttggtcccaccaatttgagtcaacagctgaatctgtgtgtggccaaagc

SEQ ID NO: 156960 - DNA, 534 bp, Homo sapiens
agatctgccatctctacaaaatataacctactccaatttkttttctagaaactagtaaattgaagtacagacatgcttcagatgaaatccttctttctatagctattatttgagattttacaatcaagacaccaaattacttaaatttatatttgatgggccaacataaagataactaaaatgaatttaggcttgggactttgctttgatttgggatgcaggaaaaatatctaggcatgataaaaactaaattacccatttctttcctcaatgcataagaggaggctaaatacttgatgaaactgtatcaatgcctttagggtacgatattatcatttcttaaattgctactttggcaaatgtgaagaccagaattattaaattatactctgctatctggaacagaactcctacctatacagcaaattttgtactaatgtaacagtgaaacataatctcaagcttcttgaaacaaagaaaaatcaatatcctcctaaaacatgcgatataaagtttaaatttttcacaatggat

SEQ ID NO: 156961 - DNA, 534 bp, Homo sapiens
agatctgccatctctacaaaatataacctactccaattttttttctagaaactagtaaattgaagtacagacatgcttcagatgaaatccttctttctatagctattatttgagattttacaatcaagacaccaaattacttaaatttatatttgatgggccaacataaagataactaaaatgaatttaggcttgggactttgcwttgatttgggatgcaggaaaaatatctaggcatgataaaaactaaattacccatttctttcctcaatgcataagaggaggctaaatacttgatgaaactgtatcaatgcctttagggtacgatattatcatttcttaaattgctactttggcaaatgtgaagaccagaattattaaattatactctgctatctggaacagaactcctacctatacagcaaattttgtactaatgtaacagtgaaacataatctcaagcttcttgaaacaaagaaaaatcaatatcctcctaaaacatgcgatataaagtttaaatttttcacaatggat

SEQ ID NO: 156962 - DNA, 375 bp, Homo sapiens
tatgtgttttctaaagtgttgcaatactaaatgtataccaccaagtggtagaaattctgtcaaatacataaccaaatcaacacagaaagagagagagagacataaacctgatcaagctctggatctatgtattaatttacaggaaatgcagaaaataaagaaaatgtcaatcaaaagtaaaattcagttcccaataataagctgttttgacaaatggcaagaagtaaaagaacggagggaaacatatttagattacaaaaaaattgagaaacatatcaaataaakgtgggatgtgcaatgtatttagatcctgatgtgaaaaaaaaaattttataaagacatttatgagagaagggagagactagctattccatg

SEQ ID NO: 156963 - DNA, 589 bp, Homo sapiens
attatacaacatgttgtcagctttcacagttctactcaaatacttctgctgaaaaccagggtttccactctcatgtcargtcttacagatgctcttggattaatgtgcttcccatgtatctaattaaggggcacacatattgcagaagctatgctatatgggaaggttcatctaactcccaagggactttagtcccttcctggatgaaacctaggcatgttgtggggatggaatgattgcatctcactggtaccatgccccttcacctccttaagcacacagagaagacataagggaattaatctcacttcagaatttgaaaggacatttcagaaccatcagtttttatcaaagtttatttttacaaaagtcataatcgcaagttctagttagagcagtcaggcaagagaaagaaacaaaaggcatctaaataggaaacaaagtcaaactatctctgtttgaagatgctgtgaattcattcctataagacccatagtctcagcccaaaagctcccagaacaatttcagcaaagtttctggatacaaaatcaatatatgaaaattagtagcatttctatataccaatagc

SEQ ID NO: 156964 - DNA, 589 bp, Homo sapiens
attatacaacatgttgtcagctttcacagttctactcaaatacttctgctgaaaaccagggtttccactctcatgtcaagtcttacagatgctcttggattaatgtgcttcccatgtatctaattaaggggcacacatattgcagaagctatgctatatgggaaggttcatctaactcccaagggactttagtcccttcctggatgaaacctaggcatgttgtggggatggaatgattgcatctcactgstaccatgccccttcacctccttaagcacacagagaagacataagggaattaatctcacttcagaatttgaaaggacatttcagaaccatcagtttttatcaaagtttatttttacaaaagtcataatcgcaagttctagttagagcagtcaggcaagagaaagaaacaaaaggcatctaaataggaaacaaagtcaaactatctctgtttgaagatgctgtgaattcattcctataagacccatagtctcagcccaaaagctcccagaacaatttcagcaaagtttctggatacaaaatcaatatatgaaaattagtagcatttctatataccaatagc

SEQ ID NO: 156965 - DNA, 464 bp, Homo sapiens
cttctctgatgttagatgttatctatatttttcattttatgtctgtgtagtagaatttcattgtggtttaatttggatttctctggtgaattacaacaatgaacatttttcttgtatgcctactggcccattgtatgaaatctaacagctctccttgccaaacatcttagaagctgaacatcccaggtgacctcaattttccactggaagaacacagaagttcagaaggccacaggaatatggccaaaatctacttatttattcaaaaaagattctataggctgcaaccattaaattatactttatmagatcacaactacttccaagtagtttttcatttttaattttatatttacttatttatttgagataaggtctctctatagtatccatgctggccttgaatttctgggctcaaagtaatcctgtctcagcctctgagtagctggaactacaggcatgca

SEQ ID NO: 156966 - DNA, 469 bp, Homo sapiens
taatatgttcagtatcttcataaaagaaatatggtaggtgttagagattgtctatcaagaaaaccaagaccaatagggtgtattgcaaacattttttattgattatatatagagtgtctttggcttaatcttgtttgcattattattattwtttttttttatgtaggactcaaaagagttcagaactttctatgatctccaactgggccaacaagatgcttcctgttggaagagatggacaagatcttaaagggacagtatctggaacacacagttgttatttccctatgctaaattccagggagcacacatcttggtattgtgctcctgctgccaaccatggctgaacacttaccgtaggattggtagattccaaggcattatatttttaaactcctttttataaaagccaggcctcaaaggatcagtcatccaccagaatttcttttctctgttccctgaactccaa

SEQ ID NO: 156967 - DNA, 469 bp, Homo sapiens
taatatgttcagtatcttcataaaagaaatatggtaggtgttagagattgtctatcaagaaaaccaagaccaatagggtgtattgcaaacattttttattgattatatatagagtgtctttggcttaatcttgtttgcattattattattttttttttttatgtaggactcaaaagagttcagaactttctatgatctccmactgggccaacaagatgcttcctgttggaagagatggacaagatcttaaagggacagtatctggaacacacagttgttatttccctatgctaaattccagggagcacacatcttggtattgtgctcctgctgccaaccatggctgaacacttaccgtaggattggtagattccaaggcattatatttttaaactcctttttataaaagccaggcctcaaaggatcagtcatccaccagaatttcttttctctgttccctgaactccaa

SEQ ID NO: 156968 - DNA, 374 bp, Homo sapiens
agatcttgaagatttcctcccctttattaatggcttttcttgatgatatcattgtcaggaaagtacatcccttgtagtcttcccagatttgctcrtttccctcaaatttaaatgatgcataccttaaaacagcacatttattatttaagtgctattagccctggcctttgatccacatgatggaatacagcaggagtgtacacttctaccagctcggagatgcctgcttaccagtctgcattaaagtccggcctagcaaaatagagtgcacattgccagcaaaacttatttccacattcttgtaggttccgtttgttacaagcaaccaggaagcctggtttcaaggattaattagggacataggggagaggaaa

SEQ ID NO: 156969 - DNA, 463 bp, Homo sapiens
gcaggttgctcagcaggacaactgcttcatgatgtgggatatctggattcggaagtaggctgcagcctgggcttgagtctgtaccaagtatttctcatcctccttgtatccccagtgcacgtctgtcacatggtgaatgtcaggagagtagacttcagccaaactatgcctctgccctagtcatgcttgataaaggttcactgaccaaaagaagtcatgtggctcaactcatgtcagcaggaagtgaagtacatctgcccaaggggctgagggatgtgagtgaagatttgacaaacaacaatccaatccatcatagttggatttcaagtgttcatgagctagataaacaaatttaatcagtatcrtccaatatcacatgaagttccctccaggcctctgggcaaccaaaccattaggaatggagatgactggataaggtcaggttcaatgctccttcaagatc

SEQ ID NO: 156970 - DNA, 591 bp, Homo sapiens
agcaaaatgaaatatattctaagatcagagtcagttcaagaagcagtatttaaaatccatattttatctcatcctttgactctytgaagaactttaaagtttatctcaacttctataagatgtggtatgtaaataaatacacatttactgtatttgtttatatatgtgcccttacacattcatttatgtcttaatatgttaaaggcaccttaagttacagcttctgtcagctactttttaattgctggggaaaaattcagtatttaagtacttcaacttttcagcttgactcttacatgtgaacagagtttgtgaacatgaattattaatccatgccattaacttccatgcagtggcatcagcgattctcttggtttgctccaaaagataagcaatataaatgttttctatggtttctgtaaaagcaaaaattaagacagcagaaaggccctctgggaaaacaagggctactgccacaacaattggaagaatcacaaattcctgaacttccttaagtaccttctgatattttgggaggatttgatgtttatcttgactttgagtgtgaatttaaatcttttgtgtttaaat

SEQ ID NO: 156971 - DNA, 591 bp, Homo sapiens
agcaaaatgaaatatattctaagatcagagtcagttcaagaagcagtatttaaaatccatattttatctcatcctttgactctttgaagaactttaaagtttatctcaacttctataagatgtggtatgtaaataaatacayatttactgtatttgtttatatatgtgcccttacacattcatttatgtcttaatatgttaaaggcaccttaagttacagcttctgtcagctactttttaattgctggggaaaaattcagtatttaagtacttcaacttttcagcttgactcttacatgtgaacagagtttgtgaacatgaattattaatccatgccattaacttccatgcagtggcatcagcgattctcttggtttgctccaaaagataagcaatataaatgttttctatggtttctgtaaaagcaaaaattaagacagcagaaaggccctctgggaaaacaagggctactgccacaacaattggaagaatcacaaattcctgaacttccttaagtaccttctgatattttgggaggatttgatgtttatcttgactttgagtgtgaatttaaatcttttgtgtttaaat

SEQ ID NO: 156972 - DNA, 348 bp, Homo sapiens
cacccacatttgctatagagggtctttcacaatagggctcagagctgacctatacataccattgcctcctttatatcttatagcctctcataccacttgcttttccacaaatccgggggcactttataactcgctctctaaggacatgcctcctggcattgtctcccttcaaaaaatatacctcacattgacttgccatgtacctccctaggtccaccagagttaaattactggtaccttaatgggacatggttacctacrtatcagtttttcctcctatctgcagctacactgaggtaggtacctttcttcaggttatgtcagtttatttggaagcaatcaagtggc

SEQ ID NO: 156973 - DNA, 348 bp, Homo sapiens
cacccacatttgctatagagggtctttcacaatagggctcagagctgacctatacataccattgcctcctttatatcttatagcctctcataccacttgcttttccacaaatccgggggcactttataactcgctctctaaggacatgcctcctggcattgtctcccttcaaaaaatatacctcacattgacttgccatgtacctccctaggtccaccagagttaaattactggtaccttaatgggacatggttacctacatatcagtttttcctcctatctgcagctacactgaggtaggtacctttcttcaggttatgtsagtttatttggaagcaatcaagtggc

SEQ ID NO: 156974 - DNA, 525 bp, Homo sapiens
aagctggggctgtgatttccaaccggtgttgatttctattggtatgagaaaaacttaagtggaaaaaaataaaaggaaaattaaggattaaatgcacatttattgggcagcttttagatgctgggcactgtgccaggaaatatcatacactttttctcatttaactcataacaatcacgatgtgttggaactgttgtccttaactttcacagatacagaaactgaggctgagataaaacaactcatcacatctgacaagagtaaagccaggttttgccccaggtccatatgactcaagagcattctgcaagtaagatccgataggaaagagaaggcccttccaaggtggttccttcatccaactccttgatgttggggagcatcattctatcaacacattcatttgtcaaaaagcttagagccagggagataaatccactggtcagggaaggttacctactgatggtgtarctgtccacttaactctgtatttctatttccctgaccctgtgctgccacaatggg

SEQ ID NO: 156975 - DNA, 605 bp, Homo sapiens
atagatataaggggaacattccataagaggaacaccaaaatagtaacctagaaaaggaatgccaagggctttgctataaagcttgaaaggcctggaagctttgagaagccatgcagcgtgccctgggaggacagaagtgagctgaggcttaccaaaagcactaaaagacaaaagaaaaaggctcagggaccacagaaaacatgcttggagctccgttcactcaacagagattttctttgcatctacctgggtcaggcattgycttagggaaatgatgaaagaatggtcactgcttgggataggtgatgtaatgggattagtgacaaccagaacagaattgctgagctgtccttttgagctcatcttgctccattaagtgaaaatagtctcaaggtgaaaacgtcagaagaaatgattcaaagtggaactaagacctagcactgggggcaacagagtaaaatacccttgtggctgtaaaagaattttttttggaagccttcctggtcatcttccaacagtgtagatacctggattgtggaaactgtcagggctctgagagcaatcatggtaaagagaagtgcctaaagggaggaaacaggccgatg

SEQ ID NO: 156976 - DNA, 480 bp, Homo sapiens
aagaaaaatgtctgtacttgtttggtacagatccaactgttcttttatttttcccagatattttcaaactgcagtttgttgaatccctggatgcagaacccataactacaaagggctgactgtacatattttgagttcagtcacatcaaacgttcatttaacatattcaaatttgataaaacacactgggggcagaaaagtgacaggagaataatcaaaaccattctgttggtggtttccttcatctaagaactgttctgggacgagtatgagctgggagaatctgccctttgtgtttgctcagctggacccagtcctttgtgactgtcgctgtgcgagtgagcatctcactaggctgaagggatcctgaagttatgcacttgtttgtgtccctaaatgctggctacttcacctagtgttcagcagaagtaaccatrgtttgttcccacattggaggtggttaagttggcttctagtgtg

SEQ ID NO: 156977 - DNA, 429 bp, Homo sapiens
aaagataactataatagcaataaaaacaataatagtacttatcattgattatcagttctgtgtcccacactgttctaagcatcttacatgtatttactcaattcatcctcacatcaaccaatgaactagtattagtaataacaatactattattatttccaattttcagatgaggaaactgagctagatagcytaagtaaggtcatgtaactgtaaacaattaaaacccaggcaatttgtctgcagcaatcctgctcttcaattcaatgccacactgcctcaacaacagcagtgatatacagttgtgatacttaatcagatgttgatcaagttcacatgagcacagtatagatgtcaaagttttctcttgcatttaactgttgcttcactcctcattcctatttacacaattgtttctcattacaataa

SEQ ID NO: 156978 - DNA, 454 bp, Homo sapiens
cccttcttttcactcaataataataaagataactataatagcaataaaaacaataatagtacttatcattgattatcagttctgtgtcccacactgttctaagcatcttacatgtatttactcaattcatcctcacatcaaccaatgaactagtattagtaataacaatactattattatttccaattttcagatgaggaaactgagctagatagcctaagtaaggtcatgtaactgtaaacaattaaaacccaggcaatttgtctgcagcaatcctgctcttcaattcaatgccacactgcctcarcaacagcagtgatatacagttgtgatacttaatcagatgttgatcaagttcacatgagcacagtatagatgtcaaagttttctcttgcatttaactgttgcttcactcctcattcctatttacacaattgtttctcattacaataat

SEQ ID NO: 156979 - DNA, 504 bp, Homo sapiens
gaatgaactggatcatcctgtcttccagtaccacctctttctgggacttcatacagagggaggacaaaacacgcatgaagccaggagtggggtcattatccctggaagacgtgggagccccctccccctccaatgggtcatgcaggtcacagaygtgcaatggccagaggatgtacccattcagcccagccatgactattacagggaaactcaatggcacgtgccctgctgcctgcctgagtaaacaattgacagacaatggacacaggtattattatcacaaaacaggctggccttttgcatggattgaagtaggcaaagttgtgagcagaggccataataataaaggcactggagccacagatctgaagtttgaaccatggttctgcaacttgtcacctttggacagaccacttcacttctctgaacctcaactcctcctctgtaaaatgaggtaatagtcaccatccagggctgttgtaaagatcagaaataaacacagag

SEQ ID NO: 156980 - DNA, 605 bp, Homo sapiens
aataaggtgaaactgcgtctctactaaaaatacgaaaaaaattagccggcgcggtggcaggcacttgtagtcccagccggtggcaggcacttgtagtcccagctactcgggaggctgaggcaggagaatggtgtgaacccaggaggcggagcctgcagtgagccgagatcgcgccactgcactccagcctgggcaacagagcaagactccatctcaaataataataataataataataatwattattattattattattattacattctgtgctaacataagactcaacagcctttgagtcaacttttcagtcaactttgttgtcctcaaaaaagcatcttaatgaaaacacagaagaatatacttaggaccttggattaggcagagttcttacatatgccatcaaaaacatgattcatttagcacaggacagcaaaagcatgattcatttaggatatgttacttagcttgatttaggcattccacaacgtatacacatatcaaaacacaatattgcacacaatgaacatatacaattgttgtcaactaaaaaattcatttttaaaacagcatgatccatttaaaaactgatcaattagacagac

SEQ ID NO: 156981 - DNA, 449 bp, Homo sapiens
tgcccagcctttttagcacagggaccggtttcgaggaagacaatttttccacaggccaggggttggggttggaggtgggatggtttcaagatgattcaagcacattacatttattgtgcactttatttccattattattacattgtaacatacaatgatataattatacaactcaccataatctaggattagtgggagccctgatggtccctctagcttcctgcaactagatggtcccatctgggggtgatgggagacagtgacagatratcattagattctcataaggagcgtgcaacctggatcgctcacatgcgcagttcacaatagggtttgtgctcctatgagaatctgatgctgctgctgatctgacaggaggcggagctcaggtggtaatgccggcttgtctctcactcacctcctgctgtgtggcctggttcctaacaggc

SEQ ID NO: 156982 - DNA, 567 bp, Homo sapiens
ttttttgtttttatgtatttgtcaaagttatacgtgcacgcagtttaaagaatcagtacattctatgcactttaagaacagcagtcccccatctccaccccaccatttcctcaattcttcctcctcagaggctacctcttttaccaattttatgtgattatttggtgcttagtagtatgtctctaacaagcttctattgtttttttttttatttttctctttatcaactataaatgatgtagttctttcctycactcccgcctcttcacttccatcaccccaatatagcacacggtaccatgacttggttagactacgtttggtgttgacattattatgactttgcaaaaacaactcgcagtcccagctgatatatggaaactctgattattccacatttcccgcacatttcctctttctctcacacttgctctcagaatttttttttctgatttagtttgttttctatgagcttagcgttaaatgaacctcacacttgttactagttgtataaaatctcttgtccaaacgttcagatatattagatgtattaattgtgtattcctt

SEQ ID NO: 156983 - DNA, 567 bp, Homo sapiens
ttttttgtttttatgtatttgtcaaagttatacgtgcacgcagtttaaagaatcagtacattctatgcactttaagaacagcagtcccccatctccaccccaccatttcctcaattcttcctcctcagaggctacctcttttaccaattttatgtgattatttggtgcttagtagtatgtctctaacaagcttctattgtttttttttttatttttctctttatcaactataaatgatgtagttctttcctccactcccgcctcttcacttccatcaccccaatatagcacacggtaccatgacttggttagactacgtttggtgttgacattattatgactttgcaaaaacaactcgcagtcccagctgatatatggaaactctgattattccacatttcccgcacatttcctctttctctcacacttgctctcagaatttttttttctgatttagtttgttttctatgagcttarcgttaaatgaacctcacacttgttactagttgtataaaatctcttgtccaaacgttcagatatattagatgtattaattgtgtattcctt

SEQ ID NO: 156984 - DNA, 517 bp, Homo sapiens
taatagaattccagtaaaaattacaataggatcatttcatagctcttgagaaaatgaccttaaagctcatatacaagagtgtawgtgcctaagcatccaaacaaaatttagaggaaaaaaacaaattgaggtaatctgaatgatcagatatttaaataactttaaaactacattaattacaaaaacacagatttggcacaatgtttagagaaatacatcagccaaaaatgataaaaggtctatacacagatcagcatataaaagtgatttataaacaagagtgttggtactacacagtctcagagcaagagtgaaggatttagtaaatggtgttggggcaactggtgaacaatttgggaaaaacaaaactgataataacagcttacattactttggtttcacaaggagccagaactatatcattaaatacagaaaagaaccccccaactttttttttttaaacaaaacacatccctgaggcacaaaagggaattaatttgcccagagtcacacagcc

SEQ ID NO: 156985 - DNA, 380 bp, Homo sapiens
tttcataatttttctttgtgatgcaggatggaccccagagctatggtatggcaaacagggttgctgggctctcttagggaaagagaacccagaaacctgacatactggcaaaaacgataagaatttcttacaagtcagacttctggtctctctctctgtgcaaactggttgaatgaatggtaaaaatcactgtttatcccctgtaaacttttgattaatggaaaaaatgatttctgaggctagtcaagctgtagccaatctggtgtggtttgtgtgtctttctgcayggttctatcataaggaagaataccgtaggataaaacatgggcttagaacctcataaacccgctgttcaagccagtctggcaaactggtcagta

SEQ ID NO: 156986 - DNA, 340 bp, Homo sapiens
aaggatgagatgatctggttcatgtctatgtagatcactcagtctgctttgatgagcatcagttacrgtggtgctaaaagtagaagcaggcaccctaccagaagtatactgctttaatctagtggagatggtggtaacttggattatcgtggtgctggtggggataatgacaagtggtcactaccagaccattcgaggtatgatttggatttagaacccacagaactttctgatggattcacagctcagtggagcaccttccccacaacagtagaggtctatctagccgtaattatcagcagcaacactacttttctggcgtggctttgccaatgatttc

SEQ ID NO: 156987 - DNA, 513 bp, Homo sapiens
aagtatcaactgtccttcctattcttttataggcatctaaatattatgctgcagcagtgtcatcttgcttaatactttagcattcaagtcactgagttttgatagctagctgaagaaaatatcctgggtaggtatcagagccaacggtatgttctactgaagtcatcatatatcctatatctcttacatagtgagaggttaggaacaaataattaacttcacctcttccctggtgccattaacctgtagcctggtctgtcattatgtagaactaggtttccrttgaaagagaatgattgaaaggaatcctaatacctaagagattggaagagatcagaagtggaaaattcaaacacttggtagcctaaatcaggtaaaatgggagctgtggaggatgggggaaaacatgttctatctacaggaagaagttgctgcccggccccagcacaggtgttatccatgaggggatgtgggtccattattatcagatctcctgatcttcctgaaaacaag

SEQ ID NO: 156988 - DNA, 577 bp, Homo sapiens
tccttccacaactaagaatgatataaccttttgagcatgaaaagaaaaatgatagctaaaattagcatcttaaaaagtaaactacataataactgaagatgagatttccttaaaactgtagaacaatgagatactatgatagctgtcacaagagaggaaattgcatgagtgtatttgaaaggatttgggggtgtttttcccccattgagatttgcttttctacataccacagtgtgactgaaaagctaaaatatttccccagggcctgtatgatctgtgcctcactacgctgcctctgacatttggagagtgtcatttagccccgaattaaaacctgcttatacagagatctggaggatgtctcaggcgccaagtagtcatcgctgtctcatttgcctatcacctttcagtttacaactcccctttacayacatgccctcgtttgttctctaaaaacagccctgtttgatgggacctatatattattatgaaatttccctcagatgaattcaaaaataaccctctcaaactgcctgcaaagaaataatcaccttttgtttgccatttaacggttcag

SEQ ID NO: 156989 - DNA, 584 bp, Homo sapiens
ttccccttctcttgcgttccaatagtacaccacacacgtcactagtaccgccctcttatagttagttttcttccccaatatgcatctgtctaccctctttaaagataaggaccatgtcttaaacaagacattctttttagratctagcacagtacaatgccaatagtaggtactcaaaagatacctactttgacggatgggtggatgagtaaacgaatgaatatacaaactactctgttttccttcacagccctacaaggcctcacagctagagaggtgacatttcagagaaggagaaacaaaaagccccttctgcttttgacaagggactaaattcagcccaaagcatctttttttctctctctatttactccggacaatctgtcccttatcagatgagctcaaggctggttggaaatatgcatattttatttgaaaatatctgcttcctccagttttgttttgccacatacacatttgtctgctttgctgtatgttgtgtatcagataggactcagacaaactgctttggcttcctaaactgttttgttttctccattcatttatcattgatctcatttcct

SEQ ID NO: 156990 - DNA, 633 bp, Homo sapiens
cttatcacaaggaaggaatacaatgaagttctgtgtccaggccatgccacagggcaaagccaaaaatccaatccaggccattatgaggcaccttttcaattttgcctcattgcctcttctccacagattccagccataagtrgcatactaagagattctcaacagcaacaacaacgacaaacaaacaaacacacaaaaaacataaagaaggaattcattactaccttgaatatgaagaacacgataagtattttccgtgtgatgatctaaattttcatcccccagagaagagtatccttggaaacaggtctggcaggtaaacagggtggggcaaggtcagcattccaacacttccctctgagcttttgcctttccctggagttcttttattttgattcctgtagccgccaccaagcctagtccccgtctccctgggttggggagttgggttggggaggatgagagagaaacgctatccctcttttcttctcagctcaaggtaaacataatctttctccttgttttcctttgcacaactgagacaggctgatacattcaaaatgaaatttactaaatgctgagaaaaacctaaatggaagtaaagaaaattacaacagcacaaaatagatggct

SEQ ID NO: 156991 - DNA, 405 bp, Homo sapiens
caacccttggccattgaaggttacaatataatactsaggcacgtgtggaatctttgcacaacagtggaagggctattatggcaaaagtgaggacaacataccaggttggagccttatttccgcaactttagagctgtgctactcttctgagcctagattctctcatttataaactgaaggtaatgtttcctacctcagactgttactgtgaagattaatctaaatgaagaagagactttttaaactataaagtgctatagaaatattattattatagaaatagccaaaaataaatggggatgcttcatatagtttcatttatctttccaatcataaagtcttactctgccccactgatacatatttcttacttggatattcagttttgaaagaatcataataaac

SEQ ID NO: 156992 - DNA, 405 bp, Homo sapiens
caacccttggccattgaaggttacaatataatactgaggcacgtgtggaatctttgcacaacagtggaagggctattatggcaaaagtgaggacaacataccaggttggagccttatttccgcaactttagagctgtgctactcttctgagcctagattctctcatttataaactgamggtaatgtttcctacctcagactgttactgtgaagattaatctaaatgaagaagagactttttaaactataaagtgctatagaaatattattattatagaaatagccaaaaataaatggggatgcttcatatagtttcatttatctttccaatcataaagtcttactctgccccactgatacatatttcttacttggatattcagttttgaaagaatcataataaac

SEQ ID NO: 156993 - DNA, 395 bp, Homo sapiens
aatcacagagcttctctgctgaacccttttgtgatcaagttaccaggccagaaaacagaacttactgaattaatcaagtatctgaactgggtagtctaatcaaattatctatttaatattaaggcttccgtagtaaaaaaaaattgccttttctcttattatagggatattttacttattataaagaccatggtattactaatatttacttggcgggtaaagagatggtcacacaaacaacagaatttctgagaaggctagaaaggtaaycatctttgtggtggtatttgcaagcaaagctcttatggataagataatctttggggggaatgcaggcagttattgaagcaataagggcttgaatgttcgacttggtttttatcctaactctggaa

SEQ ID NO: 156994 - DNA, 531 bp, Homo sapiens
tcagacacttgggtctctcttgtcatgtccagactgcagtcactttgcaatgaacacataaagtaagaaaatcagctctaaatcagatgtgatttttaaagtccaagcaaatttgtctttacctgaaaatgaagggaatatatcrtatctcattgtggttagtcctctgctctcataaagaaaaaaaaaaatcatcttttttacaatcttcacaggatttcagggttggaaggagtcaagaaaccttttgcccagtgagataactattttctacacccgaaagaagcccacacaggcaataacaatacaactaatatatttatttgttcccaatgtgaaagcaagacacagggaaccctatagcaagagaagagggaaagagagagagtatgaaagccaaattagtgtcatggaagcaatgacatcttgctacacaatggaaagtcctgaacctgcttattaaaatctcgttgctcacaatagaacacagactataaaaacgccacggggaaccattaattaaatattaaa

SEQ ID NO: 156995 - DNA, 630 bp, Homo sapiens
aagaaattgttcaatgggtaaatgatggcagagtctagacctatctttctatacaataacccatgttaaataaatccaaacttttaatttattagcttgaaagttaaataaacttttgaccaaagtagtattagatcttgcaatgagatcttaagtgatttactttaatctgttctaccttcaatttagtaggtaatcttttaggtctctcttcgctctgaatgtttgcttttacttcttgttttccaatattggatgatttatttaattaatttctaggcaactacataaaaaagtctgcttatactcagacaaaaagttttcttattgtttttaatgtttactttaagataataatgtagcattggaagggaaacctgtattatagagtcagagcaagtcaaatccttgttgttccacaaacaagacatataacctcgggcaagtttctttttctcccttggcttcagtattctcaggtgtcaaatggagatattaatcccagttaacctcccgtattgtttttgaggatcaaaagaaatgatataatagaaattacacagtgaatttataaastactacattaaatgaaggtgcttattatttactgagccctgggcctgtcagacc

SEQ ID NO: 156996 - DNA, 553 bp, Homo sapiens
gacctcaataaatagacaaataaatgaatcgccaggaaaaggaattcaaaataatcctcttaaggaacaagaaacaaacaaccaaaaacatacggacagacgattcaacaaaatcaggaaaccaactcatggtatgaatgagaaattgcacagagatagtagacatacataaagcagcaaacagaaatcccgcagtattctgaataagttgattaataaaagagacagcctcaacaacagacttgatcwagcagaagaatctctgaatttgaagataggtaatttgaaattacaaagtcagagaaaaaaaaaaagaactaagaatgaaaaggagtgaggaaagcttacaagacttatggacactattaagtgaacaaatatttgtatcatggaagttccagaaagaaaagagaagggaaagtgtatggaaaacctatctaataaaataaagctgaaagcttcccaagtctggggagagatatgcatatttaaatctgggaagcaaaaaagtacccaaatagattaaacccaaaagtttctctgtgaagcacag

SEQ ID NO: 156997 - DNA, 553 bp, Homo sapiens
gacctcaataaatagacaaataaatgaatcgccaggaaaaggaattcaaaataatcctcttaaggaacaagaaacaaacaaccaaaaacatacggacagacgattcaacaaaatcaggaaaccaactcatggtatgaatgagaaattgcacagagatagtagacatacataaagcagcaaacagaaatcccgcagtattctgaataagttgattaataaaagagacagcctcaacaacagacttgatctagcagaagaatctctgaatttgaagataggtaatttgaaattacaaagtcagagaaaaaaaaaaagaactamgaatgaaaaggagtgaggaaagcttacaagacttatggacactattaagtgaacaaatatttgtatcatggaagttccagaaagaaaagagaagggaaagtgtatggaaaacctatctaataaaataaagctgaaagcttcccaagtctggggagagatatgcatatttaaatctgggaagcaaaaaagtacccaaatagattaaacccaaaagtttctctgtgaagcacag

SEQ ID NO: 156998 - DNA, 411 bp, Homo sapiens
ataccttgattcaagtcaatattccacttttatgagatatgacaagtgagtttgggctttgctccatacaattcataagtcacatacgtaatgagcatttatttgarctacgttgagcctgtcctgtgtgtggtgtgcttttatgttgtttccccacaatgggccaaggccagaaaccatttcttttcattcatacaaggtcaagttcaaccacaaaacccacactcattatggtagcaggaatggtgctttaaataaaaatgtgaaagagtgaagaattgatcaacgaagactgcaggccatccaggaaggcaagggtgaaggatttattcttcagcaacaaatcacatgcttctaagtgttcagtattttaactggtctcaaaagaatctcatggtgtttcaaaaggac

SEQ ID NO: 156999 - DNA, 521 bp, Homo sapiens
aagaactagggagacagctgtgatttgccacagtacaggcccacggcattctgcttgtttgttaattggtagatgatggaacagttcagtgagtcattgccacactacagacctacaagctctcaacactcacaactgtgatacagctagaaaatgttcttagcagtatgctgtgacttattctaaattcgtcatcagcattcaacttaggttttagcacacatatatgtgcaagtaaattttatatatatatatatatatatatatatataaatcatatattaactaactaaacaaaaaaatacaggttcttgtactttaatcttccttttgtaatatacctagaaggcmatgattttaacattctggaaggaaactgtcattgcttttttcctcttcattttttgtaaattaaaagcaccaggactcatttgggcaagacactgattaaaccctaagcctaaatctatgttgagtttttaatcatttcatgctatggaataaatgtaacaagcactggt

SEQ ID NO: 157000 - DNA, 611 bp, Homo sapiens
gatttgtggaaaaacttaaaatatattatggagaatttctaaatgcccctgcacacagtatcgtttatgattaacatagtatatgaatatggtgcacttgttaaaattactatamattgttggtacattagtataaagtagagtgcatacttattcagatttcagattttaacttaatgttcttgtcccagtccacgatgccttccaggataacacatagtatttattcatcttgtctgtaacggtgtcacagacattctttggttttgatgaccttaacatttgaggaatactgaccaggaattttgcttttattgttttattagaatttgttagatgtttttcttatgaatagataaacatattcttatgaaatgataaacattttctattcttatgaatagaaaaacataagatgtttttcttatgaatagattgagattatagatttttcttatgaatagattgagattataaatttcagagagcaagatcacagaggtaaattaccattttcatcccatcatctcaagcagacataccctgaacatgccccatcattgttgaggctcatgatgcatctctactgtcttatttcattgttcaaatgt

SEQ ID NO: 157001 - DNA, 611 bp, Homo sapiens
gatttgtggaaaaacttaaaatatattatggagaatttctaaatgcccctgcacacagtatcgtttatgattaacatagtatatgaatatggtgcacttgttaaaattactataaattgttggtacattagtataaagtagagtgcatacttattcagatttcagatwttaacttaatgttcttgtcccagtccacgatgccttccaggataacacatagtatttattcatcttgtctgtaacggtgtcacagacattctttggttttgatgaccttaacatttgaggaatactgaccaggaattttgcttttattgttttattagaatttgttagatgtttttcttatgaatagataaacatattcttatgaaatgataaacattttctattcttatgaatagaaaaacataagatgtttttcttatgaatagattgagattatagatttttcttatgaatagattgagattataaatttcagagagcaagatcacagaggtaaattaccattttcatcccatcatctcaagcagacataccctgaacatgccccatcattgttgaggctcatgatgcatctctactgtcttatttcattgttcaaatgt

SEQ ID NO: 157002 - DNA, 611 bp, Homo sapiens
gatttgtggaaaaacttaaaatatattatggagaatttctaaatgcccctgcacacagtatcgtttatgattaacatagtatatgaatatggtgcacttgttaaaattactataaattgttggtacattagtataaagtagagtgcatacttattcagatttcagattttaacttaatgttcttgtcccagtccacgatgccttccaggataacacatagtatttattcatcttgtctgtaacggtgycacagacattctttggttttgatgaccttaacatttgaggaatactgaccaggaattttgcttttattgttttattagaatttgttagatgtttttcttatgaatagataaacatattcttatgaaatgataaacattttctattcttatgaatagaaaaacataagatgtttttcttatgaatagattgagattatagatttttcttatgaatagattgagattataaatttcagagagcaagatcacagaggtaaattaccattttcatcccatcatctcaagcagacataccctgaacatgccccatcattgttgaggctcatgatgcatctctactgtcttatttcattgttcaaatgt

SEQ ID NO: 157003 - DNA, 541 bp, Homo sapiens
ttataagtttattagtattgaaaattaatgaaacaaatgggctgacaaacaaatgaaacaaatgggctgayaccaaaagaagttgatttttaagccgatgattcaacttagtgtagacatattaattaataaaagtaaaacttcatcatgatatgactacatatttaaatattactcatttatgaatggttaatatactggtacacaccataatttgtttcatattgatgatgtaaaatctcatgtaggaaaagtgtaataaaaccaccttggcctatgatgaaagaagtattaatgaaggggagtcatttttttcaatcactgggaagacagcccaaagggataaagcactatatatatattatatgtcagaatcaatcttaaaaactctatttcctgacctttgcaataaaacccagtcacctatttgtactcttacttagcaccttcataatatgtgctgtcatgtaatgttcttaccttaagtctgtatactgaaaataggccaatagcagatttaatagaaaaaagtcgagtgggt

SEQ ID NO: 157004 - DNA, 582 bp, Homo sapiens
gtattttttactagaatgtgtcttcttggtgttggtcatttggatttggtttttccaggtttgatgtattattcaaatacaaattttaagttttgtttacattttaatttgtggaaagttctgtggatgtttggtttgtttgtgcttatgtgtgtgtgtgtgtgtgtgtgtgtctgtatgtcttccattccattattttcccattattttggtttttactttgtttttgtwttttttccaatgtggaatttcactatatatgtgttagatcactttgtctgttactttttttaataatacctttttatttagtttatctaaaaaattgatgtaagtaaaacatataaaccaaaaattactcataataaagtttaaggttcaatgaattggatgttgaataagtaatatctggattaagaaatctaaatttcagagtctcagtaacccagtagctccaatttacatttatccaatcaccaacattgccaaaagttatacagcatcctgtgttttatttatttaaaaaaaaaaaaactgtttcaatagctttgggggtacaaagggttttcggttacatggata

SEQ ID NO: 157005 - DNA, 272 bp, Homo sapiens
agtaatggggtaacttcagggtaaatccagcatgaacaagaatatcaaagcagaaaacatgagctagcagaatacaatcagcctatttcttccaaagcaagagctataatatatgatgacagcagaaaaagatgcaggccagattttaggttttgaatgccaggttaagaattttatttttgtcctatagagtgayagacgctattaaaagtgtttcagtggggccacacagagatgaaacaggctatccaatgaaaatgtgtatgtgaaaa

SEQ ID NO: 157006 - DNA, 460 bp, Homo sapiens
aatagaaaggtgtcagtaatcaatgttcctgagaatttacagctgttgaacttactagacaaagactccaaatcaattattgtaagtatatttgaagaactaaaataaaccatttttaaagaattaaatgacagtatgatgatgataaattatgaaatatagaatgtcaataaagagatagacatcatataaaaaagaagttgaaattctggaattcaaaaatatgatattgaaataacattttttgctatagggttatagtatatatgagctgctagaatagagaatcagtgaacctaaagttaaatcagtaaagatcactcagttgaaagcacacaatgtaaaaagaaaaataaagcgccccayagtccattagaacaccatcaagcataatgacatgagtgtaatgtgagtctgagatgcagaggcaggagagagtgatgaaggaagaaaatggaaa

SEQ ID NO: 157007 - DNA, 603 bp, Homo sapiens
gagagtgttcagaataccaacttggaaatgatgaggttgagatggcactggaacaaaccccaccctatacattcctctctcttccttgagttccgagtgcacagtttgtattccacatcttcagacttaatcctagctcacagtgttagtttgtctaattattacacatttctttggagcttctaaaatagatgtcttcttctatttttgtacccctttcttcacagagcctaagccaatgttgggctcaaaataggtgtttaataaatgataactgaacacattagagctgaaaaacaaaaaggacttattttcactggagccaactaacatttcaaagacaaatgtttaaaatttgctttcagcaaaatattaagaaattygccaggtgtggtagcttgcctgtaatcccagcaactcaagagactgaggcaggaggactgcttgagcccatgagtttgaggacagcctgcacaacatagcaagacattgattttgtttgtttgttttaaaaaagaaagaaatccattgaaccgactaatacattagtggatgtatgtttgcatcatatatatatatatatatatatatatatatatatat

SEQ ID NO: 157008 - DNA, 565 bp, Homo sapiens
ctgttctacctcagatcatcaggcattagattctcataaggagcatgcaaccgagatcccttccatgcacagttcacaataggattcacgcttctgtgaaaacctaatgtgccgctgatccgacaggaggcagagctcaggcagtaatactcactggcccaacactcacctcctgctgtgtggcccagttgctaacaagtcacgggcccatacaagttcacagcccagacattgargacccccggtctatgggttacctagaaccatcacctaaacagattttctatagcaaataccaatttaaaagttcaacttgtaatacacacacacacatacagaaacataaactgaggatgaattttgaaataccttaaaactaagaatgctaattacataattgcgggtataaaccaaaatgaatgtttctgatggccacttgttataggattaaagtctgcaaacaatgatttgaaatattataaaaactaggaagcatatgttctctaggcaggtatatgcattccccagctatgtggcactcgtaatatatgatattgaaacttac

SEQ ID NO: 157009 - DNA, 361 bp, Homo sapiens
cacaaagccctcaaggttattctaaacccagttgatggagtaatccttttaaaataggagacaaagttgtgccaacstcccaacctggaaacaggaaatggggtgggtggtgctgctggcatttttgggcagagaccagggatacttctcaatatcctacgatacccctctcctgcatcctaaaatttgagaaccttgcagtgacatgcaaagatgggtccccgccatcacttctgtggccccacctcctactactctccctccctccctccctcatccatggccactctgggtgcctagggcattccaggaatgctcctccttcagggtcctaatacctgctgctcactctcactgcaaa

SEQ ID NO: 157010 - DNA, 361 bp, Homo sapiens
cacaaagccctcaaggttattctaaacccagttgatggagtaatccttttaaaataggagacaaagttgtgccaacctcccaacctggaaacaggaaatggggtgggtggtgctgctggcatttttgggcagagaccagggatacttctcaatatcstacgatacccctctcctgcatcctaaaatttgagaaccttgcagtgacatgcaaagatgggtccccgccatcacttctgtggccccacctcctactactctccctccctccctccctcatccatggccactctgggtgcctagggcattccaggaatgctcctccttcagggtcctaatacctgctgctcactctcactgcaaa

SEQ ID NO: 157011 - DNA, 447 bp, Homo sapiens
gtttattaagcacttactaggcactggagatttagggatgagtatgacacagttttatctttctagaagctctcaaagtactggactcaggggaagttaagatgggacacaaggccaacagttcctatgaatggagtgacttagaatcacagcagaggcagatgccaacttattgaagagaataaggaggctttttaatgcaggacagaagatggagtggcaggaaaagtggtcttgaggtgtagcaggaattatccagcagagaatagcattccaagcagatggaacagcatgttcaaggctaggaaggcaataaaggataagaygtgtttgagaaatagcaagaattttagtatggcaggagcagacagtctttgagggagagtggtgagagatgattctaaaatagtaggtagaagccagcttgtgaaatccttgtgtgttgtg

SEQ ID NO: 157012 - DNA, 310 bp, Homo sapiens
cctacttccttcactctttccctgatattgaatccctaggcactctccaataaactccctgcctgcaaatatccatctcagagtctatttctagggaactcaggatacaacagttatattcattttttgtgtttatattttaacagaagacactaacacttaaagctctaagcatttgactgtataaagatattaagaatccctgggtcatctttgtctgtaaagttcatttacctcaccagcagcatggacaccttgtttccttgcaacccagccctccttgcatgtgmtaaataccaaaagcagccag

SEQ ID NO: 157013 - DNA, 570 bp, Homo sapiens
ctacatatttgctactttgtatctcctcttttttcctccccactgccaccccctaccctggtaaccactgttttactctctctatatatatatttgcccttttaaacaaaagattccacatataagtgagagcatgaaacatttttctttctgtttctggcttatttcacttaacataatgtcctctaggtccatcaggaaacctattttaattataaatgcaacttccaagaacgtctaaaataattatattccattttccccaagcctacgctctcacaagtttctaaatatattgcagccacaaaaagccacttcacagaaaaggtttaaaaacattattttacctgggggctccaaacagtgacatcattgtcatactgatttcgaaactaaaagtaaaagaaaaaaatacctgttaatagaagaacatttcaaatcccaactcttaacattcattaagaaatatgcttgtrtttccattcaatgttaaggcactctgttcatgcagtcttactggaagattactactgtactcagatgtaagccaattctacatttaccataaac

SEQ ID NO: 157014 - DNA, 557 bp, Homo sapiens
actgtgggacttgaatgtgcgtagattttggtatcctgcaggaggtcctggaacgtatcccccatggacacaaagggataattattgagataattatgaattcacatgcagttgtaagaaatagtccaaggagattccttatatactttgccaagttccccacaatggttaccaatttktaaaactgtggtataatatcacaaccaagatagtgacatttatgccatatacctatcttattctaatttttttcagttttgcttatacttgtttgtctatgagtgtgtgtgaatgtatgtgcatgttgaatctgtaattttaaaaataacttcttgttctcaggaagtcaaggtgggtcattaggttgttactagtatccaaaaagatgtttacttgctgtttaaagtgaacattgaaatgcataattaaaggcaatacaagatcttagtgatattaatagactgtttagtttgatttgcatttccatgatgagaagttaaattaaaatctcctggattaaagtcgtctgaagaatttacctctatctccttttaaga

SEQ ID NO: 157015 - DNA, 577 bp, Homo sapiens
tatcagtatatttcctttcatctccaactatacaatctcatcatgttacaatacatgaccatatcttggtttgttatagatatcaagctaacacaggatctagcacgtctacaaacaaacaagtatatgtgattgttaaatatcagcaatgacttgtgataagttctaagtgaattatcttcttctaaattaacgacagcagcctatgaaaagcaggcagttttaacagactacgtgttgactaaataaataaataaatgatgttgattgactaaatttagtgccataaatatcaatgagttctattgatgttctttaaaaattatttcttcctatcttgtcatcggacaggatcaatagttgatttttatcttgtttcttctttggagtttttcctcctggagaaaaacacaccttctctgacctgtactcttcatggacggacctttctgtggccctccagctggtagactgacttttagctgctgcacatyccactgctgtttcctgtgcttgctagccaagtcctcttacttccaagatgatacccccactaactggagctcccaaaacataa

SEQ ID NO: 157016 - DNA, 512 bp, Homo sapiens
taatttaatgtgttcttcaattttcagtgtatttttcaagtggtaaagaaagagtatgagaagaaagggtgaatgaaagtgttgtcactgaatttaaatttttgattgggaacatgaaattgttatgaacattgcatctttattgctcagatatagataaatttaaattttaccatggacacaatttaaccactaccgaaatattttagctgattgtagtttatatacttyagttttggttttcaggataagcaataatgaaaacatgaacaataatgtctggtatttaaactattaaaaggaggtgactctaaatagagaaataaagaagagatagaattgaactcaggttggcagtgtttctttttgaaaaaaaactcaagattgaatctatgtatttaaagatagctactaacttgaaaagaagctaaagcgagattaaggcaacaatttcatatgttacctgtcatgacatatagcatttagaaaatgttattactaggccaggcgcg

SEQ ID NO: 157017 - DNA, 512 bp, Homo sapiens
taatttaatgtgttcttcaattttcagtgtatttttcaagtggtaaagaaagagtatgagaagaaagggtgaatgaaagtgttgtcactgaatttaaatttttgattgggaacatgaaattgttatgaacattgcatctttattgctcagatatagataaatttaaattttaccatggacacaatttaaccactaccgaaatattttagctgattgtagtttatatacttcagttttggttttcaggataagcaataatgaaaacatgaacaataatgtctggtatttaaactattaaaaggaggtgacwctaaatagagaaataaagaagagatagaattgaactcaggttggcagtgtttctttttgaaaaaaaactcaagattgaatctatgtatttaaagatagctactaacttgaaaagaagctaaagcgagattaaggcaacaatttcatatgttacctgtcatgacatatagcatttagaaaatgttattactaggccaggcgcg

SEQ ID NO: 157018 - DNA, 606 bp, Homo sapiens
catcaagctaattaatatatctatcacctcacatatttatctttttgtgtgtttgtggtgagaatacttaagatctactcttggctggatgcaatggttcacgcctgtaatcccagcactttgggagaccacggtaggaggatcacttcagggcaggagtttgagaccagcctggggaacatagtgagaccctatccacacacacaccacacacacacacaccacacacacacacacacacacacacacacacacacccctagttgggtgtgggggcatgtggctgtaatctcagctacttaggaggctgagcctggaggatcacatgagcgctgaggatcacatgagcccaggaggtccagattgcagtgaaccatgttcatgccactgcattctagcctgggtgacagarggagactctgtctcaaagaaacaaaagatccattctcttagcaaacgacgaatacccttgatcattgtgtgcctctcttttagagctggccaatgtttactctattaccatagcatggataatattttcctctgaaaattttgtgactaagttgattttatctgttaattcagtcagaggcactttgaaaatgg

SEQ ID NO: 157019 - DNA, 585 bp, Homo sapiens
taaatatttggttggagtatgaaagaatttttcaaatgtctaataatatatctagacttggctctgcattagaaagtctgtgaacttttctrtctcccttgctctctctttctacagggtcactacatattttaattgtctgtgtgcctgtaacatttcagcatgtgaaccaacatataataaaaaatgcagatgttcccaaagctgaaataaagaagataattttggttttactagggaaatagtggaaagaaaaaatgatcattttcctggcttctaattcgtgggggaaacttggattatcatttacttgacaaagttgacttcaatcactatctcaaaataactgcccttttgtgatctttacaacactcaggattgcctttgtccatagtaggtgatcagtaagtgtcttgttgattggtttatttgattaaaacagatttaaatgatttcagtagtcacaatgatatatgtaataataattaacagcaggcaaaataggtgattgtgtgatttaattggagattttaagccagttgttcaatacgtcagcatagccaaatgatgactgaggcttgtaat

SEQ ID NO: 157020 - DNA, 605 bp, Homo sapiens
tggaaaccaactgacctctgtgttatggtctacagtttcgattctctggaaaataatcctttgctttgatttttctgggcttcttttgagcatttcaaagaaattgtaaagtcagtctcaggcctagaaggactgtgaggttcttggaaaattatagtgtctaaattcatctgattattatagcctcccagcttgcttcagatgctcagccctggagggagagtttaactctgtctkctttctgattagagtcattcataagcatgttacatgggatgctagagatttatgttcatggacttcagtattcccaaatgaccactctatgacattacttttaaccctttgtgactgtttttaaaattaggaatttgatcttacttttcatacaatcattatttttatattgccaggctgtgtacacagttttatgaatactttaattagagatgggaacttgtctgcataggcaataggccttgacagagatctttgagttccagagggttatagaatatttcaaagttttaatgagccctggtttaaacaaagatgcagtttgaaatcacattatagtttaaacaaaaattctatgtaataataga

SEQ ID NO: 157021 - DNA, 531 bp, Homo sapiens
taaaattgtgttcacgttttagaaccattgctctggcagaaccagaatgaatggatgaagatgaggggattggaagcaaggggagaaatttagagtttcagtgccagattgacatcttcaaacaatagtagtgggaatagagggaagggcaagcacccaagagatattaggtaaagcaaatcaacgagcagacctcagtgagtgatgggacatgagaatcactgggacagtgggagtcaggaaaactccttgggttctcttttggacaattgggtagatgagggtgccatttactcaaaaggtcaatatagatattttgtttttggttttgagttggagaagataaaggatttattttttatatcctaaatctgagctctctatgaagtaccttgatgaagatatccaatagtaccatgaaaaggttggcattaaacagtcattgaaaatkagatatgcattccccaagggagaatctagagaagaagagggaatacatatacataaaaacacagctaccattcacacaac

SEQ ID NO: 157022 - DNA, 575 bp, Homo sapiens
gttgctgcccaggtgcttaggtactgtttctgctctatatacgtaatactaatatcatgatgggttgttgtaaaagcaattaagatacgtatgatgtgtaaaaatattttgctaacagcataaacaacaaatatatactaatttttcttataacctagtacttgctgtagatccaaataccttgataattgttgatattttggtcttttaaaatatatttattttacatattagccaaatctctagcttgatygctaatggctggtagatgagctaacaactttgtcacttccaagagagtgaaatgtgcatgtcatttgtcttttttgaatatatattgaataaaatacatatagagaacttatagataacaaaagataattttacaattatattgcagaaagtcacattccctttagcatttgtaggttttgtggtgtctctttctgcatgagatttttggtagcttcagaaacaaatttaaaccttgccctctagtgagaataagtaatactaaggtaggaacaactatgacccatgggccaaatctagtcagccatttgtctttgggccac

SEQ ID NO: 157023 - DNA, 403 bp, Homo sapiens
gaattcctaagacatcgtcctttcttctctcattacaattatgttcacaaagtgttagagagaattgtatgagtaccagaaagtggtgtcttgttcaagctctttgatttgttaatagagaggtgaaacttaattgcagagttctttctatgtttctgcatttataagcctcataaaaagcaggatccaaatacagtaacagagtcactattctgtccaataggaaaattatttcaatctggtcattcaatgccaggcaacagaaaggagtagtattaactaagactgtattcctttaagttaccattgagaaagaacttgaaaaaaaaaacattttgtgtcctagaattgagaatttgaagtcaaaaagcrggatatggtcacaatgctatgctcataggat

SEQ ID NO: 157024 - DNA, 223 bp, Homo sapiens
atttgcaatacttttcatgttatacatagaagtagctggctttaaacaatcaaatataacaccccatgtctgtgaggttgtgaagaaattagcataacctgctkactgttcatggccacggagatgggcacactggtgactgaagaataaaatgcatgaaaagtcaaagctgctcattgtgcttgagtcggtaattccccctacatacctctaacctagagca

SEQ ID NO: 157025 - DNA, 553 bp, Homo sapiens
gtgactgtcatctttaaggccctgggagtgttcatacttattttaatgctggagctgccaaatgaaaataatgacatatatttattgaatatgaacaatgtacaagatattcctttatactctctmtatatatattaactcatttaattctcacatgatgttttgtccattttacatatgagaaatgtagacacagagaaattaaagtatttgtccaatgtcacatggccagtaggaatttgaccccaggtagcctggattcagagcctgtattattgacctctgtgctatgatcaataatacaggctctaaaatattgcacttattcatgcagcagtttaaatgctgcaatacgtatttacctatatagctgtaaataggtatcgcaacatttaaacctatacatgaatacgtgcatgataaataatagatatatgaaaattttagaagtcaaaggatacatagaaaacaagagacaaacccaatatgcacacatttaacacatattaaagtgcctggtatatagcaggaagccttgaatacagaataaata

SEQ ID NO: 157026 - DNA, 562 bp, Homo sapiens
taattatattaaataatttataatttattgagcttctgttatgttccatgcaatataagtgctaaatttgcatagtataagagaaaaaaaggaagaatgaaaaggaatgaaagtcttagaaatgaaagtaatatttattttaatatataacccaattcttctctatttaccacctcatgtattttttcattaaatcattgattttatgtttacatgattcactgcagaaagtagaaatataatttcttttgttactggataacttttaaaaatatgtctatagttgttcagattttagcaattcagttgattctcccatctatgagtaacagtactcttttttwaaaaaaaagtcagattcaggatgtacatgtacaggtttgttaatgggaatattgagccatgctgaggtttgggcttttggtgaacccatcaccaaaatagtgaacataggtaactcagtcttgatttcattacatttttattccattattttctctaggactccattaccttagggagtctttatgttccagggttgggcttagtagggctcaagtct

SEQ ID NO: 157027 - DNA, 562 bp, Homo sapiens
taattatattaaataatttataatttattgagcttctgttatgttccatgcaatataagtgctaaatttgcatagtataagagaaaaaaaggaagaatgaaaaggaatgaaagtcttagaaatgaaagtaatatttattttaatatataacccaattcttctctatttaccacctcatgtattttttcattaaatcattgattttatgtttacatgattcactgcagaaagtagaaatataatttcttttgttactggataacttttaaaaatatgtctatagttgttcagattttagcaattcagttgattctcccatctatgagtaacagtactcttttttaaaaaaaaagtcagattcaggatgtacatgtacaggtttgttaatgggaatattgagccatgctgaggtttgggcttttggtgaacccatcaccaaaatagtgaacataggtaactcagtcttgatttcattacatttttattccaytattttctctaggactccattaccttagggagtctttatgttccagggttgggcttagtagggctcaagtct

SEQ ID NO: 157028 - DNA, 463 bp, Homo sapiens
aattcaatcatagtttaaactttaaaattatttcacattatttatgataatcatgtaaaatatagagataaatggtttatatgtggccaaattaacatcgtattctaaatagactgtgytctacaaattactttccaaattatagaattgggagagttgtatgatgtagggaactatggtagaataaaaagtttcctcatggacttgttaatttttgtgtgtgagcccttgacttaatacatgacattcctttttcttgacgttctatttcttaaatcaaatttgctgtcctctaaattggatggaaaaatcaagtttcaatttgcgttatgctctttgtcctttttcacttataaactctacattgatttgagtaaggctctcactacagtttatgaacttgggcagcttctttgaaaaaagaaaatgagttggcttgtgagtccattttccccaagctctt

SEQ ID NO: 157029 - DNA, 324 bp, Homo sapiens
tctaactatacttttatagccactaaacatcctcacttctctccctctccatctgttgatggacacttaggttgattccaaatcttggctattgtgaattgtgctgcaataaacatgggggtgcagatatccctttgatatactgatttcctttctttggggtatatgtctagcagtgagattgctggatcatgtggtaattctatttttagttttttaggaactaccaaactgttytccatagtgactgtactaatatacattgccaccaacagtgtaataggattctcttttctccatatcctcgctggcttttgttattgc

SEQ ID NO: 157030 - DNA, 543 bp, Homo sapiens
tattgctaaaggaattgcaggcaacagagtataacaaaaataggtttctatttgaatgtgatgtgtcactgcccattacataatgaaagggatccaattctgttgatctgccaccaggtgcaatctggttcccctgggctatggggctatatttgggaattagtgttggtctcccctgctggttgacttgaagttaggttagacttggtgaggggaagtayatgttgtgaaactcacatggaatctccttccctgcctcctcttgtcatctcttcattagcccattgtgatcaatggtgtatctggagaaagaggctgactgacattcatagagcatgtcttcttgctcactttcttatctagaatctcttttatagacacctcctgaggagtgttctctaggatgcaaatatactcatactcttctagcattctgagaggcacctgcacaaacctcttctccaaaccttgttattaatcttcaaatcttgttcctcctgaacctttgattgcttaccaaatcaccagcatcaacacaggagc

SEQ ID NO: 157031 - DNA, 544 bp, Homo sapiens
aattgcaggcaacagagtataacaaaaataggtttctatttgaatgtgatgtgtcactgcccattacataatgaaagggatccaattctgttgatctgccaccaggtgcaatctggttcccctgggctatggggctatatttgggaattagtgttggtctcccctgctggttgacttgaagttaggttagacttggtgaggggaagtacatgttgtgaaactcacatggaatctccttccctgcctcctcttgtcatctcttcattagcccattgtgatcaatggtgtatctggagaaagaggctgactgacattcatagagcatgtcttcttgctcactttcttatctagaatctcttttatagacacctcctgaggagtgttctctargatgcaaatatactcatactcttctagcattctgagaggcacctgcacaaacctcttctccaaaccttgttattaatcttcaaatcttgttcctcctgaacctttgattgcttaccaaatcaccagcatcaacacaggagcataaatatctggc

SEQ ID NO: 157032 - DNA, 490 bp, Homo sapiens
ttccatggctgtttttaattatcatttaccaagtgactaatttagatgagtaacatcgcctgtacttatgagaaaaccttcttttgcaaattgcttatccaggtattttgtatgtactaattttattatattatctatcttttttctcatttatacatatttgatatgaatctttggtcagttatatgaactacaaatatctgctttcattccatggtttctctttttactgtcttgatatctttgatgagtataaagtcttattttaaagtagtttgactcagtctcctttttagtgattagtgagttttgtattcttaaaaaatttttcctatactccaaggtaaagaagataatctttgttatcttctagaagccttattgtctcacttttcacrtttaggtcaacaatctatctggaactgattttttgcaaataatgtgaggtagaaactcaagattcatttttccccctgatttgaatgtttaa

SEQ ID NO: 157033 - DNA, 588 bp, Homo sapiens
tgggtgaggggcgcgtgggctcgctgggtgctggggtggggagggggcgtggacttcgttccggggaggcctctgcctcgtctgaccacaraacgccccgcctggaaagagagtttttcagaggaaggaaacgtcagggaactccagtgtgtgttttggacattttatctggcgaagctccgggggacagtttaaggacggtcaccctcaagtcaggggaccgtatggattgagcaggtcccgcactgagctccctggcggccacctccagtgatgagcacctccttagcggttggggccggggctgtggtcacggctgagagcctggaacccagccgcccttcagtggaggaaggccaggggaagggtaccgcggcagagggggtgtgtgtgtgtgtgtgtgtgtgtgtgtgtgtgtgcgcgtgcgtgcgcgcgtgtgtgtgttttgttttttgaggttttgttttttttttttttttgtgggaaaaacagaaatctgagggaaaagaacacagttaaaaattgctgtaaatgctggagtaactcccagggagttaactgttctgaaacaaccacttctactaactc

SEQ ID NO: 157034 - DNA, 588 bp, Homo sapiens
tgggtgaggggcgcgtgggctcgctgggtgctggggtggggagggggcgtggacttcgttccggggaggcctctgcctcgtctgaccacagaacgccccgcctggaaagagagtttttcagaggaaggaaacgtcagggaactccagtgtgtgttttggacattttatctggcgaagctccgggggacagtttaaggacggtcaccctcaagtcaggggaccgtatggattgagcaggtcccgcactgagctccctggcggccacctccagtgatgagcacctccttagcggttggggccggggctgtggtcacggctgagagcctggaacccagccgcccttcagtggaggaaggccaggggaagggtaccgcggcagagggggtgtgtgtgtgtgtgtgtgtgtgtgtgtgtgtgtgygcgtgcgtgcgcgcgtgtgtgtgttttgttttttgaggttttgttttttttttttttttgtgggaaaaacagaaatctgagggaaaagaacacagttaaaaattgctgtaaatgctggagtaactcccagggagttaactgttctgaaacaaccacttctactaactc

SEQ ID NO: 157035 - DNA, 588 bp, Homo sapiens
tgggtgaggggcgcgtgggctcgctgggtgctggggtggggagggggcgtggacttcgttccggggaggcctctgcctcgtctgaccacagaacgccccgcctggaaagagagtttttcagaggaaggaaacgtcagggaactccagtgtgtgttttggacattttatctggcgaagctccgggggacagtttaaggacggtcaccctcaagtcaggggaccgtatggattgagcaggtcccgcactgagctccctggcggccacctccagtgatgagcacctccttagcggttggggccggggctgtggtcacggctgagagcctggaacccagccgcccttcagtggaggaaggccaggggaagggtaccgcggcagagggggtgtgtgtgtgtgtgtgtgtgtgtgtgtgtgtgtgcgygtgcgtgcgcgcgtgtgtgtgttttgttttttgaggttttgttttttttttttttttgtgggaaaaacagaaatctgagggaaaagaacacagttaaaaattgctgtaaatgctggagtaactcccagggagttaactgttctgaaacaaccacttctactaactc

SEQ ID NO: 157036 - DNA, 440 bp, Homo sapiens
agcatgtccataggtgtttctttttaattacttagtggtgttccgtcatctggatgaaccaaggtgtgttcaaccgttcacccaggaagggcacttggattatttccaggttttggttattgcaaatagagctgctgtgaacattcttgtacaggtttttgtgtgaacatagttttcatttctctgggataaatgcccaggagtgcaattgctgagtcatatggttagcacatgtctaattttatgagaaactgctaactcttttccagaatggctacaccattttgcattcccaccggcggtgtgwgagtgattcaggaccttcccagcctgggcagcatttggtattgccactattttttttttttattattttagctcttctaataagtgtgtagtgatatctcctgatggtttaatttgcattgtcctgatggcta

SEQ ID NO: 157037 - DNA, 537 bp, Homo sapiens
acctatgatgtgctatgtttataaatactggctatactcacctgaactgaatatattttgaaggttagccctgtaaatttgcctcatcaggggaaagagaacttcaaagaacagaagtccatttgtcttagctttttctatgtgtttgctctgcttgtttcacctttctgaaaactagtggacatatagaagcctccctctcttccattccaattacaacatataagctgcgtgtactgatgctccacagtataagacaggactatgctgatctgatgtgacacaactccttgtgtgtcaygccaaaactgcaccaagcaatcttaggaaatgtaaagattttttgtgtttttttttttttacacaggattcttctctgtcaccaggctggagtgcagtggtgccataacagctcactgcagcctcgacctccggagctcaagccattctcccacctcagcctccagaatagcttggaccacaggtgtatgccaccatacctggctaatttttttaaaaaatatatttttggcagag

SEQ ID NO: 157038 - DNA, 507 bp, Homo sapiens
atgcataaatgagtgattttggtttgtaaaataaaatacagcaaatgttattgttatgattattcagctgccagggtgttttttaatggtactcagatgacaagtgatggaggaaactctgaggtaaataaaatgagattttgcaaacttgtaaatggttcatttagccttattctttagagagagagaagaagccttcacttttctctctctttaaagaatgaatgttaaaatactccgcaaaattttacattcagcaactcatagagtgtgtttttgttcttttatatatatatatatatatatatatatatatatatatatatatatatatatatrtatgtatttctaggcctggactcattcagagagataggagaaaaaatatcggagtaattctattgtcttttacaagtctttaccagtctttgctttcacttgaaagttttataaagatgacaactttatgtgtactcttcaatgtggtatcagcagcaacctgaacag

SEQ ID NO: 157039 - DNA, 451 bp, Homo sapiens
taatctaagttaaaaagttacactcttcagaacaagttaaaataatgaaatgcaaggtacaggtaaaaagaaatttttgcaatgcatacacccaacaaagaatttgtactaaaagtatataaccttccacttcaataataagacaaacacattatgtaagtatttaaatgaggttattgaacagccaaaactaatctataacattagagactagaccaatggtcacctgrgcctggagggtgactacctgaaaaaggagaaagaagaaactttctacattgatgaaagttgatcattttgtgaatgtgtgttggttatacaagcgtacatgtttcttatcattcctccaaatatctacttaaaatatgtgaattttattatatgtaaatgagatttaagtaaagatgactttaaaaatttactaaagtggtcatcaattgattttgtgtct

SEQ ID NO: 157040 - DNA, 595 bp, Homo sapiens
caaatgcagggctctcatgaagctcacagtataacaagaacaattgacattaagtaagtagtttcaataaagcctggtatgttttataataagcwtaatccaggtactttaggagagcatagctgtaatacctcacctccctcaccgaagggattcaggtaaagcttcatgaaagatgtgccttttaagcagagacctgtagagggctaagatgtgcccaaaaaagaaaagggaggaaaatcttatagaaagagggaataaaagatacacaaacctggaggttaaaaacaaaaacaaaacactgcatggtatagttaagtaaataaataaattttgtatccctgaaatatagaatatatgaaaaaataactagagataaggccagggaaataggcaaggatcaaaatcctgtgaaactggataaggagtaggaaaaggagcatatgagccttgctaagggggttgtactttatgctgaattaatgcagggccattccaagattttaagcagaacagtagtataattacatttgcttttatcaaggtcattctggttgtagtacgttggaagggaacatgaatgaaagcagacagg

SEQ ID NO: 157041 - DNA, 607 bp, Homo sapiens
aagataggcattttcggtattttaccaggtatttattgatttctatcaagtgtatcctcaagtactattaatgctaatagatgttccacatgttttaggagaaaaatagtatgttttttaggataagagaaacattaagtttctaagagactggactcctgagaaattgtgatggcaaagaataaaagcagagcacagtttcacaattaaataattctgggcaaatgtcctactaggtttcttagacaattttatttcttggacagcaggtacagagaattgagtaacccrtgctcctcacttcattgtacatcatactcaattattccagcatgttcctttccttattttattctatttatttttattctctccttcatccctcccaccccattgtcatttccctaccactgattcctttatgctgaattcaccataaattattcaatatgttctttgatatgtatgtaatagggtttggctttgtttccctacccaaatctcactttgacttataataatccccacatgtcaagggcaggaccaggtggaggtaattaaatcatgggggcagttttccccatgctgtccttgcgatagtgagtga

SEQ ID NO: 157042 - DNA, 542 bp, Homo sapiens
tttgtttccctacccaaatctcactttgacttataataatccccacatgtcaagggcaggaccaggtggaggtaattaaatcatgggggcagttttccccatgctgtccttgcgatagtgagtgaattctcacaagatctgatggttttataaggatctggcatttctcctgctggcactcattccctctcctgttgccctgtgaagaggtgccttccaccataattgtaagtttcctgagacctccccagccatrcaggactgtgagtcaattaaacttctttcatttatctttcctttataaattacccagtcttgggcagttctttatagcagcatgagaacagactaatacagtaaattggtattgaggggtggggcactgctattaaaatacccaaaaatttggaagggactttgtaactgggtagcaagctgaggttggaacagtttggaggtctcagaagaacagaaaaatgtgggaaagtttggagcttcctagaaacttggagggctcagaagacaggaagctgtgggtaagt

SEQ ID NO: 157043 - DNA, 259 bp, Homo sapiens
actgatattgtggaggttgcatgtatgctgctgtcttgaaaaagtcttggagtggttattttgcaaataaatcccacayctgtgcatcatgatcttactcagactcactggctacaacaaccaaccatattgaccttttgttggcaggccaatcatagattcagaattggagtcgttcattttttgataagcatttattaccaggctcatgtcctattctcaagtaacatatggttttataggcacaatgagataagag

SEQ ID NO: 157044 - DNA, 515 bp, Homo sapiens
tccctcttctgtgctctaggagcctaaacccaagcaactatagcataggctccctagccctctggcttctagttatactctgccaatgggggacaccagccagaaaccagaggcaggaacatagtgtagcaaggtattcatttcgctggatggttacctgccagttttccacacagctcgcttcaggcctcttcctccgtacagcttccctctttctggctcctggtaactctactctgccctggtctctttagctcagtggcagtcccagcacccccactgtcactggcccttagggaagacactagactttgctatgctccctaaacctcgcccacatctttcaaaatagtgcttttattcatttctactcaaagtgtccactttgagtagagccacytgtttcctgactgaaccctgactgagagttcctatagagagccagcctattctggaataataatagcaaaaataatggagagaaaaactgatgttgctgcattctatgtatttca

SEQ ID NO: 157045 - DNA, 546 bp, Homo sapiens
tctgtttaaactccagacaaatcatctaagacttaggaggagaaaaggagagggttaattgttacctacaacttgtgggattatatactgcaaggggtaatagtcaactcactactcaatagggagaaaaattttaaaaagagactaaaaccaacatagaaaattgtgtgtaggttcataataagtcaggcaggtatagttgaasatgcggataacaactaaaagttatcgagctctaactaagtcccaggcacttagatatttgattatacttgttcctcacaaaacactcttaatcctcacaaaatattacttatgttttaaatatggggaaattgaggcacagagaaatggagacccctgctcaagcagtcagggggtagggaatctgagtataagcctgggacccatcctcttaaacatgactctaaattaagtaaggataaaggaaaatattgtattacctaattggtagcatcaggcactaacacattctaaagtacttggtcatctaatccgaaaatagtttagggtgcttaaaaggct

SEQ ID NO: 157046 - DNA, 606 bp, Homo sapiens
ctcaagcagtcagggggtagggaatctgagtataagcctgggacccatcctcttaaacatgactctaaattaagtaaggataaaggaaaatattgtattacctaattggtagcatcaggcactaacacattctaaagtacttggtcatctaatccgaaaatagtttagggtgcttaaaaggcttttaagcatcagtcatacaccaaagatctttattcactggagccaagaggcagaaagtaagttccagttttyatttattcatcatttcactctgcccttggactcaaaagagcccatgccacctcctgatggaaaagcccaagttacgtttgggaattataatttctctttttctgattctacttactggcagggtaaaatatgtagaaaaaaagtgttcctccatttgccttcttaaatactttctcttgtttataaacctaacaatcatctatcagcaatgctgtttctaccctgccagaacaaggcctcaggaaaccatttcctctggagcaattccagaagggctcagtgagcactcaataccttttacactgatggactgtatgggtttcttgctctcagcccctgtaggatttgcac

SEQ ID NO: 157047 - DNA, 606 bp, Homo sapiens
ctcaagcagtcagggggtagggaatctgagtataagcctgggacccatcctcttaaacatgactctaaattaagtaaggataaaggaaaatattgtattacctaattggtagcatcaggcactaacacattctaaagtacttggtcatctaatccgaaaatagtttagggtgcttaaaaggcttttaagcatcagtcatacaccaaagatctttattcactggagccaagaggcagaaagtaagttccagttttcatttattcatcatttcactctgcccttggaytcaaaagagcccatgccacctcctgatggaaaagcccaagttacgtttgggaattataatttctctttttctgattctacttactggcagggtaaaatatgtagaaaaaaagtgttcctccatttgccttcttaaatactttctcttgtttataaacctaacaatcatctatcagcaatgctgtttctaccctgccagaacaaggcctcaggaaaccatttcctctggagcaattccagaagggctcagtgagcactcaataccttttacactgatggactgtatgggtttcttgctctcagcccctgtaggatttgcac

SEQ ID NO: 157048 - DNA, 492 bp, Homo sapiens
aaaggcctacaacccaaataaaatcctgggccagatggattcacagctgaattctaccagatgtacaaagaagagctagtgccaatcctactgaaattattctaagaaatccaggagtagggacttctccctaacttgatctatgaagctagcaccattgtgataccaaatcctggcagggacacaatgacaaaagaaaactttaggccactattcctgaccaacatagtgggtcaggaatagtgggacactgtgtgggacactgtgtggcatttggcccctgccctagagatctgtggagctttgaacttgagagaaatgatttagcatgtctggtggaggaaatttccaagcagcaaagcattcaagaggtgacttgggtgctcctaaaagcacccagctttatacrttcacaaagatatggtttggaattggaacttatatttaaaagataaacagagcataaattttctgaggttcaattcaagcctg

SEQ ID NO: 157049 - DNA, 681 bp, Homo sapiens
ttttgacttaagttagaagtaggcatgagcatgctattcaagcttctctcttaaaagaaatggaatgtcatgattgaagtcataagttttactggctagactttcaagagtaatagcaataggttattgtatatgcacatttaaaggacaaatgattctccttcaatgggaaattattttaaaattatacaataaagtgaaggaakaatttgagtcactttttgccaaatcaaactacaaggaatgttccaatatcaaagtttacctgtactttccctggcagaaaagctgttattgagatatatgagcctggttgtacaagaaatagttctaccagttctggggaaatcataactcacagtaattcagtcctcctgagatcttggcagaaatcaaatgttacttcacaacagctgtgcaatcttcatgggttacctctgtaaatggtcaatgatgaatggcaaaagggaacatggggttttgatttagttgaaaaggtcctaactgacatagcacacctgtgagtacagctctgtattttgggaatagcaacaaatgtttttgattctttggtccctgaacatctagttaaatttattgactggataactgaaacaagacgactgtggcatctcaaaacattgttgaaattttgggattttttttttttttcaaatctca

SEQ ID NO: 157050 - DNA, 543 bp, Homo sapiens
aatctttgggagtgacaataaagtaacataagagtgcagtgtttactgtgaatatgccaaactctcccttctcttgcacgtgtgggacttctagattggaccaggaaactataatgttttgttctaccttttgagaccacccaggagatcaagctggaacaggagactgtggctcatttctctggattgggagccaagaggaacctattacacatctgctctgctgtctgtcctgagtacctagtctttctgtatagtgtagttccaagaagtggacccaaagtctgagccacatgattttaagattgtctrtcttcgtgaagtttctcttcattattcggaaccagggactcctggccctctcaaagctataagaaccactttcttacattttgcctataagcaatgtctgcttaaaggtttttcattaaatggaccactccagaagttaattaatacatgttttcatgattttttttaaaaaaagatcctccaaatctttgttatctaacatattaaagactctacccttgggcatagggt

SEQ ID NO: 157051 - DNA, 565 bp, Homo sapiens
agacagttaccatttcttgaagagaaaatacatatatacaaatggtaataaagtaggaaagttcctaagagctgtggatgtaagaatttaggtctgggtaagagaaggaagtgagaattctgatatggaaggagaaaactgtgcgaagacctaaaagcaatttgggttatcatcaatttgtctagttagaggctctactctgagttattactctggtaccctagccactaaaatcacaaactccttgaactttttctagattcaaagtctgggcttctgtgttactgaattatgctacatcctacatccttaaaatggacacagcagatatagctgcacttgatataacttttcatatttgtttcacaaaatataagctartattgaatgtaactagcccataacaacaagcaacaacaataattcttcataagacaacttactccttcatcaatcactaacattcacaaaggttttctaatgtattgtctttttgtatcctttcagaaatccagggagtagaatacttcaattttaaaattaaaaaagaaagcatataacatgg

SEQ ID NO: 157052 - DNA, 342 bp, Homo sapiens
atctcatttgggaagatatggtagtctgccaactgctctcattgctttcagtatcctttctcctccattcatgttcaagggagtcatcagaattatattccttgtactcacattttggaaatcatatttctagttgaaagtctttccaatctggcactaaattcacactcctttcttacccccttctcctgcatacctgtgctccagacatggtatgcatctcagaagtcttcatatttttttcacagactytgcctactgactggagtggccttctccatccatccatctggtcaataagtcttccttcctctacctggtcttgctcaattagctagaaaa

SEQ ID NO: 157053 - DNA, 448 bp, Homo sapiens
attccctcaaaggcaaggaccacatttgtcttgtttcccactgtgactgcagaacatakagtagttcccactaagttatatgtgctcaaaagactctagttggttgaatgagttaagaaagaaaggagtacactgacacagaggtgactctcagatgggttaatcacggatgctttgcatataatgttccatctcatcttaaaggatgagttacagtttcagtatgaggttaggaaaagaatattgtagacagggagaaaactttcattagagcccgtcctcttttcccactactaattgccacctggaaaggatgtggagggtcttaacaatgtgatgtaaatggctgctacagttgaatgtgttacctactccaggagtagttgcatttttaataaaaaatagaacctccagtcaaatgatcatctcataatggcagacgttttga

SEQ ID NO: 157054 - DNA, 448 bp, Homo sapiens
attccctcaaaggcaaggaccacatttgtcttgtttcccactgtgactgcagaacatatagtagttcccactaagttatakgtgctcaaaagactctagttggttgaatgagttaagaaagaaaggagtacactgacacagaggtgactctcagatgggttaatcacggatgctttgcatataatgttccatctcatcttaaaggatgagttacagtttcagtatgaggttaggaaaagaatattgtagacagggagaaaactttcattagagcccgtcctcttttcccactactaattgccacctggaaaggatgtggagggtcttaacaatgtgatgtaaatggctgctacagttgaatgtgttacctactccaggagtagttgcatttttaataaaaaatagaacctccagtcaaatgatcatctcataatggcagacgttttga

SEQ ID NO: 157055 - DNA, 448 bp, Homo sapiens
attccctcaaaggcaaggaccacatttgtcttgtttcccactgtgactgcagaacatatagtagttcccactaagttatatgtgctcaaaagactctagttggttgaatgagttaagaaagaaaggagtacactgacacagaggtgactctcagatgggttaatcacggatgctttgcatataatgttccatctcakcttaaaggatgagttacagtttcagtatgaggttaggaaaagaatattgtagacagggagaaaactttcattagagcccgtcctcttttcccactactaattgccacctggaaaggatgtggagggtcttaacaatgtgatgtaaatggctgctacagttgaatgtgttacctactccaggagtagttgcatttttaataaaaaatagaacctccagtcaaatgatcatctcataatggcagacgttttga

SEQ ID NO: 157056 - DNA, 448 bp, Homo sapiens
attccctcaaaggcaaggaccacatttgtcttgtttcccactgtgactgcagaacatatagtagttcccactaagttatatgtgctcaaaagactctagttggttgaatgagttaagaaagaaaggagtacactgacacagaggtgactctcagatgggttaatcacggatgctttgcatataatgttccatctcatcttaaaggatgagttacagtttcagtatgaggttaggaaaagaatattgtagacagggagaaaactttcattagagcccgtcctcttttcccactactaaktgccacctggaaaggatgtggagggtcttaacaatgtgatgtaaatggctgctacagttgaatgtgttacctactccaggagtagttgcatttttaataaaaaatagaacctccagtcaaatgatcatctcataatggcagacgttttga

SEQ ID NO: 157057 - DNA, 597 bp, Homo sapiens
ttagggtttggggttattgtggaggtgggagaaaacgaatataagtctcctggcctgtagcagacattcatttaatgataactgttattattatcttaagattttaaaacttttatttgttttattttttattttattttattttattttgccagcagctaccctatgaccaatatctagatgcaaattgaaaagttggttgagcattcagctctttataaatagctttatgcttggtaaaaaccagcattatgattaacttttttttataacttttatatcctgcttgtaatggtgtgaaaaaaatgtttaaagatgttgaaataatgcagtttttaaaaaaagaggtaagtattcaatatcagctctactaactagtagggattacattctcttctttcctttggktgtgttttattttgttgggttgtgtttatcattcagctgagtaggatatcagaaatagtaagcatctgctccattgagattcgtagcaacttgttaatttcaggtgggattgtgtttagatgtgacttttggcagttgagttccaagatgtttatcagtttgctcagactgttatcatcataatttaga

SEQ ID NO: 157058 - DNA, 559 bp, Homo sapiens
atatatgcacttagagtagctttctttaaattcccaacattaattgcctaaattatttccctccattataaagttgatatttagcatcccaaaggatgtcattgatgggaataaaaaaaaatctcctaatgaaattcacaacacggaaaatattatgacatataacttaaagtatcagttattaattttaaaaaagagagaaaataatatgtcattaagtaaattctgatatttttacaacatgccataatatacaccatgcattttctttaagcaattagttttgcttgagtgctaaactacaatttagattatttttccgtttggaagtttacacacatttattctctctctctctctctttctctctctctctgaaaaattcttaagagtgacagartaatattctctgtaatttcctgagataatgttactggggtaaatgaagtgtcaggttccacactaattcatcacttattaattaacaatatcaacaactcctttttcattactgataacacattttagtgactaccagaaggattctttattacaaaac

SEQ ID NO: 157059 - DNA, 394 bp, Homo sapiens
atatgaaaatgtgcagaagctcagtgtagctagcctgtagaaaggacagaaggaaaacaagcatgggaaaacagggggaggtggagtttattcccagtagggaaaaatgctaattgagaagctagacaataatacgrcttgattagttctttaggaagatatttctggaagcaatgttataagggtcttcgaattgagactacagcatagagcagaagagaagaatagaagcagagaagagtggcagaaagatcagttgtcataatacactgtgtatatgatccccacagcccagagcgaactgggcttttaattatcttaatgtcttcccagatcctgggaataacgtgggagctccagcacgaagactattgctatacggagtattactttc

SEQ ID NO: 157060 - DNA, 308 bp, Homo sapiens
ttgtttttaataactatgatgaaatgacacactaatgggataaaacaatttttaatgcaacgaatctggagaaataaaagaagaccctgcaaacccttagttagatgttacagccaaagcacaaagagtagggaatgaattaggggtcaaaactctggaatctctcctgcccaacagacaaataacagttcttaatttcctstggcaggagattgatgatcacatctgaaacaacaagaagaatttgtgagctgtttccaaagcagatggagagggaccgcacttcagactaagtctaaaattccatc

SEQ ID NO: 157061 - DNA, 412 bp, Homo sapiens
tccatccttcccttgcaatgtgcccctttatattggttctttctcatttttactacttcttcattgccttatggtgctgggcacagtataaaactcactaaaygacattctatcaaggaggagatggtcaccaaagatccgaagtattcagtgaaatatttcccatttggaatgtaagatcctgggcagagataagtggaattgtatttccaaggacatactaaggtaccataggccttgattcttatcttagacaatctagtgtctcagggtctcagaggttctgcaattaaccagttaatgtaagtggcctggagctaaggctagggaatatgtgcagatgccagaagtggtgcctgagtaatcctttcctttgcacagtgcttacttcttgcaaagtgattctagatct

SEQ ID NO: 157062 - DNA, 583 bp, Homo sapiens
gacttaatgtcctttatatatttattctagtttttctaaaattatcatgtatttacaattgttgttaatcatattttaaaatatttcttaaatttaacttcttattgcactaacagaatacacttcaacacagtaacagactagcaagtagtcagctttgcagatgtcaccacatttatgtacagtgaactgagaggttcattagcaatgtgtaataacatgtcttatggtaacatagaagggataatagtcctcctaaaacactctatttaggcatagggagaaaaccaaattcatttcatgttggatttagactaataaatggctacaaatattcatcaacctctattgcctttggttttatgtaaagcctaaatataattttcaaatcactatttatttgcccttaggaaaagcaatggctactacaagtgatctctttataacactggagttagctgarattcaattgggtattcaattattacctcagaccatattggtagtgaaagtccccaaccacgtggaccctacggggtcccatttcagcgacattttttattttggccatttaaacaagtga

SEQ ID NO: 157063 - DNA, 591 bp, Homo sapiens
ttaaaaggatagttgggaaaattaaattaaagaaaattgagtgttggcagtggcagtacttttatttataactggttctgattcattaactcttgttaccaatctgtaatagaataagtacagaaattgaggttatgcagttagaaatgtttaaaacaatttgacattatcttggtgcttttattatatttattaagagcatctcttccaaacatattgggrgagaaaactggttcttcactacagatagtttgagatgtgtgtactgaactaggtaatcttcaatattctttcaacactgagtggtaagagaacataattaggaaccatatttgtgtatacctttcacctagaatagaactgaaaaagatgtgtaatttatcttttctcattttccttcttaaaagtgtatctttaaatatacatactctgatagcccagctttgccattcaggcacagactattcaatctaataataagataaaattggtatttctatgcagatactggttatttttgctgacttttgcaaattagctttttttattttgccctgcaacttcatgtattacttctagtagtttttaaaa

SEQ ID NO: 157064 - DNA, 369 bp, Homo sapiens
ggattgctcagctatttaacaataattaaatctctttactcaagcactcttaatgcagcratctcaggctttattttgaagtattggttaaaatgaactattgcacacccaaggaaataaaacttagtggagtatttggcttgaatgaaagctcacaattccaaaagaaactagaggccaatgcaaactgacaggcttgaataaagaatatggctaccttctttttagtaaatttaattccaaagtccttatactttttgtagacttcaagataagaatgcagccatgggccctgtagttctttgcctggatagagactatacataaagcacacctacaaatttattaaaatgacttctaatatcatgt

SEQ ID NO: 157065 - DNA, 369 bp, Homo sapiens
ggattgctcagctatttaacaataattaaatctctttactcaagcactcttaatgcagcgatctcaggctttattttgaagtattggttaaaatgaactattgcacacccaaggaaataaaacttagtggagtatttggcttgaatkaaagctcacaattccaaaagaaactagaggccaatgcaaactgacaggcttgaataaagaatatggctaccttctttttagtaaatttaattccaaagtccttatactttttgtagacttcaagataagaatgcagccatgggccctgtagttctttgcctggatagagactatacataaagcacacctacaaatttattaaaatgacttctaatatcatgt

SEQ ID NO: 157066 - DNA, 369 bp, Homo sapiens
ggattgctcagctatttaacaataattaaatctctttactcaagcactcttaatgcagcgatctcaggctttattttgaagtattggttaaaatgaactattgcacacccaaggaaataaaacttagtggagtatttggcttgaatgaaagctcacaattccaaaagaaactagaggccaatgcaaactgacwggcttgaataaagaatatggctaccttctttttagtaaatttaattccaaagtccttatactttttgtagacttcaagataagaatgcagccatgggccctgtagttctttgcctggatagagactatacataaagcacacctacaaatttattaaaatgacttctaatatcatgt

SEQ ID NO: 157067 - DNA, 591 bp, Homo sapiens
ttaaaaggatagttgggaaaattaaattaaagaaaattgagtgttggcagtggcagtacttttatttataactggttctgattcattaactcttgttaccaatctgtaatagaataagtacagaaattgaggttatgcagttagaaatgtttaaaacaatttgacattatcttggtgcttttattatatttattaagagcatctcttccaaacatattgggagagaaaactggttcttcactacagatagtttgagatgtgtgtactgaactaggtaatcttcaatattctttcaacactgagtggtaagagaacataattaggaaccatatttgtgtatacctttcacctagaatagaactgaaaaagatgtgtaatttatcttttctcattttccttcttaaaagtgtatctttaaatatacatactctgatagcccagctttgccattcaggcacagactattcaatctaataataagataaaattggtatttctatgcagayactggttatttttgctgacttttgcaaattagctttttttattttgccctgcaacttcatgtattacttctagtagtttttaaaa

SEQ ID NO: 157068 - DNA, 567 bp, Homo sapiens
agctttttccctccttgagttctcttctttagggctatctacttccggctagtttagttcaaattccaaatggtatttatttccattcaatattttcttttccatattccaccttttaactttcttagatatctcttttagtgatcagaagttttaaaaatttgataaagtttaatttattgtggtttttcttttatagtgagtgcctgtcgtgtactatctaagaaacctttgcctacctgcaaggtgataaagatatttcctactgttctaaaagtttaatagccatagctttcttattcaggcctactgttcctttcaaatttttgagtatgtgtgaggtaaaggtcattgtttgttgttttcccttaatgaatatctatttgctttggcacaatttattgaaaagattttsctttcctcactgaactgcatcacactcgtgtagaaagtcaagtgaccatatatatgttggtttagttctggacttttattgttctgttaatctatttatctatgcttatactactgccactctgtattaattaacgtaagttaatattaagt

SEQ ID NO: 157069 - DNA, 565 bp, Homo sapiens
ataactttgtttgcactatgaagaccagattatgcaggtagagacaaaactagaaaagaggagatggcagtaaaataatgtgagactgatgttagtagaaacttaggtggtggcaataagggtggagagaagtggattgatttttttattaaataaatgtggtgtaggagttggaagtgacagttattgaactcgaggaggtaaagagaggaagtcaggaggggcacccagatttctggcatgggcactgggcaacatggtggcagagaataatgagtttagcttgggaagtgttgggtatgaagttcttattccatatctagtatttactatgcctatggctttgggmaaatcctataaccttttttaacctaaaattagcatctctaaaaattagctaattctaaaatagagatgctaattcctgcctggcttatatggtgtgatgaagcactaataaaattatgtatatggaagtcttttataaactgttaaccactgtacaactgaaaagtgctacaattcagatcactgttccagtaactgattaaaaccttctgcaata

SEQ ID NO: 157070 - DNA, 598 bp, Homo sapiens
tatgacagcaggatcctggtgtgcactgtgtacacagggtttctggtggattgtacagtgtctggcacatggagagtgggcaacagaattttattcattggctgaaataggggataaaactctggcttcaacacttcactgagataactaatacataaatctcactttgtgtaaagagctggcaagtatgcttaaataagtttattcatcatgagataaaaatgattgaggtaatagaatattcatattgatgtgtatattgttacaagataaagctattaagcacacagcaaatcagaccgaacagtagtcaatattttaggaatcttgttatttcatggcctaagcttttggaaatccacataaggtaatcaaaatgcagtcataagtagaatttgaatctccaaagtctcaacgtcatagaaaaaggtaatttgtggaaataaagataatttatcaaattgatttaatctgaccaaaaaactatgtttattaatagctatgtaagcyattgtcttctctctatacagcaaaatcttaatattaaaattgagtttagtttaaggcaattttgctttgaccttctccctgagtttaa

SEQ ID NO: 157071 - DNA, 380 bp, Homo sapiens
gaattccttggactgagtttaagcaaaagatagaatacgagaatgtctcctggaactcagtggtaggagataaaactaggtctcacaaagaagtaggatcagtcaataaatgacrtcattcactttatctcttttggagtcacagaaccttccatttctactgaccctctgtatatgctaaatttctctccctccccttgtctgtctctttctatttcccaaacctaattttctctactttagtatgcacatgattacccccaggccactttaaatagcctctctagttgcaaatccaacaaaaattcatggaagtccctgtgctccaatttctaggaaagaaaaatttattgtcctactttgagttagatgtccatacc

SEQ ID NO: 157072 - DNA, 380 bp, Homo sapiens
gaattccttggactgagtttaagcaaaagatagaatacgagaatgtctcctggaactcagtggtaggagataaaactaggtctcacaaagaagtaggatcagtcaataaatgacgtcattcactttatctcttttggagtcacagaaccttccatttctactgaccctctgtatatgctaaatttctctccctcccyttgtctgtctctttctatttcccaaacctaattttctctactttagtatgcacatgattacccccaggccactttaaatagcctctctagttgcaaatccaacaaaaattcatggaagtccctgtgctccaatttctaggaaagaaaaatttattgtcctactttgagttagatgtccatacc

SEQ ID NO: 157073 - DNA, 623 bp, Homo sapiens
attctcttcccctgggcattttggccattttagcccacttctctgccatcagatatgaccacatgactcagttccaccaatagcktgtgaatggaagtgatatgcactacaccatggctaagttaacagatcctgtcaaaacaatctttcatgctctcttccacttctagatggtaggaatataactgactcttgtggcaaccttggaaacctggtattgaagaaaagaccacaaaatggaaagaaatctatgtccctgacactgcatggagaaaagctacctgaccaaaaatatacaaattggactcttttgtgagcaataaataaacttttattgtgttaagcactgaatgatggggttagattgttaaatcaattaagtgtcactctaatgtatacagaaaaatatttcttttctcaaatatttgtgggccagtttctttcgtttgaattattttgtatgtcaggtagaattggaccacatcttccagctctactgtcttcacaggaaaaacaaaaagagtttcatctacagtcaagctcttctgtggacacaatatttcacttttttgctttgccatccaatatagtttgtccttgtttgaatggtttggacagatgca

SEQ ID NO: 157074 - DNA, 584 bp, Homo sapiens
tgtagagtactttggatagtatggtcattttgccaatattgatgattccaatccattaacatgggacacttttccatattttgtgttcttttaagtttccttaatcagtgttttgtaaatttcattgtagagatttttcatctctttggttagatrcattcctagatattttattttcttgtagctattttaaatggcattatttcttgatttctttctcagctagttttccttggaactctccaaatttgaatatttatttattttattgtgtttcatatgttatataagctttttttctttcttttttcattttgttcaagttcattacaagttcagaaattctttcatctgtttgacctagactgatattgaggctcttaattgtattttttatcttattcattgagttcttcagttccaggatttctgtttggttcttttttatatctctttgttgaatttctcatcaaaatcatgaatattttttctgattttattgaattatctttcttctcttgtatcttgctgagtttctttaaagtcatcatcttgaatttattttcagatgtttcatagatttc

SEQ ID NO: 157075 - DNA, 535 bp, Homo sapiens
agccaatcactgggacaattcatgttgccaagaaagaatcctttaatcaggtgctgcaaccaaggagatgggagaacactgaaatttatctctcttttaatggttaatactgaatgtcaatttgattggattgaaggatgtaaagtattactattgagtgtgtctgtgagggtattaccaaaggagattaacatttgagtcactgggctgggaaaggtagacccacccttaatctgggtgggcaccatctaatcagctgccagcccaaccagaatataaagcaggcagaaaaaacatgaaaaggctagataggttactctcccatcctacatctttcccccatgctggatgcttcctgctcttgwacattggactccaagttcttcagctttggaacttgaactggctttcttgctcctcagcttgcagatggcctattgtggggccttgtgatcatgtgagttaatagtacttaataaactcctctttatatatatatatatataatctatcttattagttatgtccctctaga

SEQ ID NO: 157076 - DNA, 568 bp, Homo sapiens
acaatagtagctaccatttcccaccaccaatcccatagcaggcagctaaacaggcattcttggaacaacctccacatagcttgtgggagccagagagggcaaaaatagccctgtcctccaaacatcagggatctgtgctctaattactaatgcctacttttgattatagagatacagaaaaataggtggatggccattgtaggtgcacctcccctcattgttgcaacattgcccccacaagtgacttccaggaaatttaaaggaccagcatcctttcccctacatcattttttctcttttgtctttttttcccctttgtttgtgagccaggcatttaatactaagacactcaaactgcatgtatggagaaaatcagaaagtgactatgcatgcccagggacagatacaggctcagaacacaccagagaagatatttgtttacatctaaggctgatccytggcacagagacagctgacaacaacacaaaataataatttctcaaaaaccctagggaaagtagacaatatgatttttagaattactacattattagattcaaatgcccag

SEQ ID NO: 157077 - DNA, 521 bp, Homo sapiens
gttgagggtttttgcagtaatgtctatcaaggatattgtcctgaggtttcgtttttgtttttttttttctttgttgtatctctgctaggttttgttaccagaatgatgctagcctcatgagttagggaagagccccttttcctcagttttttggaatagtttcagtagtaatggtaccagcttctctttgtacatctggtagaatttggctgtgagtttgtcttttcctggacttcttttttgttgttggtrgcctatttattactgatgcagttttggagctcattattgttcagttcagggattcaatttcttcctggttcagtcttgggagggtgtacgtgtccaggaatttatccatttcttctagattttctagtttatgcgcatagaagtgttcataatattctctgatgtttatttttacttctgtagggtcagtgaaaatatcacatttgtagtttctaattgtgtttatttggatcttctctttttttcttctttattagtgtagctagtgg

SEQ ID NO: 157078 - DNA, 514 bp, Homo sapiens
atatggggtacatgagatattttgatataggcatctagtgcatttatcctttgtgttgcaaacaatccatgtatactcttttagttatttttaaatgcacaatgaaatattgttaactgaagtgaccctgttgtgctatcaagtactggaccttattcattctatttatagttttgtatccattaaccattcccacttccccaccctcggccacttcactacccttcccagcacatggtaatcatcattccactctctatatacatcaattaaaccacacttgctttttaatttataaatcttccatacacagycttttgtttctctgccgatgttactgttttccactgtgactgtggatatgtcagcttatccttcaaagtcttagtattactccattaaattcaccatgcccagggacagcgctccattttctatcaacagattttttttttgcctatttttgaactttataaaaatatcatcatacaatacatactttgctggcatctgg

SEQ ID NO: 157079 - DNA, 620 bp, Homo sapiens
ctttttttatatatatctctagggaattcaatatacatctaattaattattatatacctgtttagcattcctcagtagattgcatactgcatgacagcaggaaattttgtctgcttactgtatccccaggtcctaaaactgtgccttatatatagtaggtgtttaataaatatttagataactatataagataactatgtaagatactgctgcatgagtgagatagatagcaagttgtatatggtttttgtgatcatcatggatcttgcattgaattctcaaaaatatgaagaatttgggtatgtgaaaatatgagaagtggttttctagggtgaaaggaggatggaattggagagaaaagaccrtttctgattgcaacatattttcagtgtgactctaggcaaaggcattaacgtctccaagcttcatatccttggaatatatgttaaaattaatgctgctttgcacacatttgctcattcttatttcttctatggatatttctccctaagctgatgtagaaatgtttaaagcctttccctttcagaaaaaataacatctattggttatcccaatcctacaaagttcagcattgacatcttccctgaatttcaatccct

SEQ ID NO: 157080 - DNA, 620 bp, Homo sapiens
ctttttttatatatatctctagggaattcaatatacatctaattaattattatatacctgtttagcattcctcagtagattgcatactgcatgacagcaggaaattttgtctgcttactgtatccccaggtcctaaaactgtgccttatatatagtaggtgtttaataaatatttagataactatataagataactatgtaagatactgctgcatgagtgagatagatagcaagttgtatatggtttttgtgatcatcatggatcttgcattgaattctcaaaaatatgaagaatttgggtatgtgaaaatatgagaagtggttttctagggtgaaaggaggatggaattggagagaaaagaccatttctgattgcaacatattttcagtgtgactctaggcaaaggcattaacgtctccaagcttcatatccttggaatatatgttaaaattaatgctgctttgcacacatttgctcattcttatttcttctatggmtatttctccctaagctgatgtagaaatgtttaaagcctttccctttcagaaaaaataacatctattggttatcccaatcctacaaagttcagcattgacatcttccctgaatttcaatccct

SEQ ID NO: 157081 - DNA, 588 bp, Homo sapiens
aaatgaacgaggcacattaactcaaagattttggacttatatctgcgcagaattattgttatctccttgagaatataaggtaggtacatttttagtggtaggtgaagtacttttatcgcattaaatgggtttatttttaatgtgtcttatggatacaaggacatattatctctgagctaccaaggcatggaatacagtagacccttgttatcttctaccaggtatgctttttgccttctataaaagtgcaccaattttcaactgtggaatgaaccattgcttcactttcatttcttgtattttggttggggwtgatcctaaccccacaaccagagctagatgtgataaagacctgactatccatcctgtgtattacgtgtaggtgacccaaatagaaatataggaccccaggcaaggactgtttactggaataattaggaaaatactttttaactgtggttgcagaggagcatcatttgggggaatatctggataaaagaatgaagacagcaaagcaaacatagagaagaagagatgaagaaaggtactctatctctagggcataatttgagcttttaggcttagcta

SEQ ID NO: 157082 - DNA, 588 bp, Homo sapiens
aaatgaacgaggcacattaactcaaagattttggacttatatctgcgcagaattattgttatctccttgagaatataaggtaggtacatttttagtggtaggtgaagtacttttatcgcattaaatgggtttatttttaatgtgtcttatggatacaaggacatattatctctgagctaccaaggcatggaatacagtagacccttgttatcttctaccaggtatgctttttgccttctataaaagtgcaccaattttcaactgtggaatgaaccattgcttcactttcatttcttgtattttggttggggatgatcctaaccccacaaccagagctagatgtgataaagacctgactatccatcctgtgtattaygtgtaggtgacccaaatagaaatataggaccccaggcaaggactgtttactggaataattaggaaaatactttttaactgtggttgcagaggagcatcatttgggggaatatctggataaaagaatgaagacagcaaagcaaacatagagaagaagagatgaagaaaggtactctatctctagggcataatttgagcttttaggcttagcta

SEQ ID NO: 157083 - DNA, 668 bp, Homo sapiens
aagtggaattttgttgcttaaaaattccacaaaatatatccaactttctttgagtgagttgtgtatcttctctgtaatctatctcttataatcttgacactgtgcttttgagaatgacactgttttatttactcttcaattccccaagctgaaaaatggcataacattccctaatcatcacttttccatcaatactcaacactcagctaaaacatctgttactttgtgaaggctttcgttttcccacacccagacarattgaaggatctgttaatactcttctgtttcactataacattctgtctttaattccatcataccatatatcacattgaagagttattgttgatttacttgtctgtctttgccttaagacttgaatgcaggaaacatgttttttatctctgtccatcctacatattatatttactgataataggtatatgttgaatgaagaccaaaaggaagggctcaagtgattgtattgcatttgcagcctgataggtgagacatgaagcaaatgagtagaaagtaaagagaaaatatcatcctgaagtatcttggaaaaaatgaaacagtttacatcttgacacatgtctctattgtatcctttactagtgaacagtactgaacaatagactcaggtaaactgaaagaaagagcagatg

SEQ ID NO: 157084 - DNA, 668 bp, Homo sapiens
aagtggaattttgttgcttaaaaattccacaaaatatatccaactttctttgagtgagttgtgtatcttctctgtaatctatctcttataatcttgacactgtgcttttgagaatgacactgttttatttactcttcaattccccaagctgaaaaatggcataacattccctaatcatcacttttccatcaatactcaacactcagctaaaacatctgttactttgtgaaggctttcgttttcccacacccagacagattgaaggatctgttaatactcttctgtttcactataacattctgtctttaattccatcataccatatatcacattgaagagttattgttgatttacttgtctgtctttgccttaagacttgaatgcaggaaacatgttttttatctctgtccatcctayatattatatttactgataataggtatatgttgaatgaagaccaaaaggaagggctcaagtgattgtattgcatttgcagcctgataggtgagacatgaagcaaatgagtagaaagtaaagagaaaatatcatcctgaagtatcttggaaaaaatgaaacagtttacatcttgacacatgtctctattgtatcctttactagtgaacagtactgaacaatagactcaggtaaactgaaagaaagagcagatg

SEQ ID NO: 157085 - DNA, 619 bp, Homo sapiens
ctcacagcaaatgaagtgtggcaatgggctcacgctcatggaattcactagtcttgcaaaattccccattacctcgaagcagctgtcctgataaagtggtagaatgaccttttgaaggcatagttacagggccagctgggtggaaacaccttgtagagctggggcagtgtcccctagtatgtagcgtatgtcctaaattagtgaccaacatatgttgctgtttctcctatagccaatttttctgggttcaggaatgaaggagtggaaatgagagagtttcttcttattattaaatttagtcatccactatgaaattttatcttcctatctctagaactttaggctctgctggtttagaagtcttggttttcagaggaataatatttcctccagggagcacagcaactgtatcattaacctggaagtgaagatgaccacctggccacatgggctcatcatgccagtgaatcaacaggaaaaagagagggctactaaaytggcttgggataactgatcctgactattaaggagaaattgaatttctcttcagagaagttctcttagaggctggtatgacccatatatcaaggccaagtctgctggattagacctgtagtta

SEQ ID NO: 157086 - DNA, 560 bp, Homo sapiens
ccctggggttacttctagcttaccagttctggagacagaagtatcaagatgatatcggggcaactggatcagctggtgcagttgaggttgcttaggctctccctttcctgctcgggcctgccctaccatggtaccaagcctgtctatggaatgggctagattgctaataccagatctgtccaggcaagagattccagggttccacgaacaatctcagacatgttggaaggggtgcaggaactctggcgaggacaagctccaatacctttcatagtcctcagagaggataggccagggcacatctggattgggtctctttaaattctgtgtattagattcacttctgggattcattgcagtgtggcagagagaaatcatagtgcctgatacatagtaggctcctaataaaggttggttaaatgaatgakgaaaattgaataaaataaataggaaaggctgatggctggagaaaagatagattggcagtgatcctgggctagtgggctcagggaaacaggcctgttttcctcatgtgatccttaccaccaacaactgagctt

SEQ ID NO: 157087 - DNA, 560 bp, Homo sapiens
ccctggggttacttctagcttaccagttctggagacagaagtatcaagatgatatcggggcaactggatcagctggtgcagttgaggttgcttaggctctccctttcctgctcgggcctgccctaccatggtaccaagcctgtctatggaatgggctagattgctaataccagatctgtccaggcaagagattccagggttccacgaacaatctcagacatgttggaaggggtgcaggaactctggcgaggacaagctccaatacctttcatagtcctcagagaggataggccagggcacatctggattgggtctctttaaattctgtgtattagattcacttctgggattcattgcagtgtggcagagagaaatcatagtgcctgatacatagtaggctcctaataaaggttggttaaatgaatgaggaaaattgaataaaataaataggaaaggctgatggctggagaaaagatagattggcagtgatcctgggctartgggctcagggaaacaggcctgttttcctcatgtgatccttaccaccaacaactgagctt

SEQ ID NO: 157088 - DNA, 513 bp, Homo sapiens
tcttaaagtctattttgtctgatattagtatagccactccagctttcttttggttactgtttgcctgatatatgtttttccattcttttaccttgaacctatttctgtttttgaatcaaamatgtgtctcttatatgcagcatatagttggatcatgtattgtccattctgcaagtctctggccagtcctattctgaagttttcttgtaatacttgccaaatgcagaaatagtagccaacacatctactaatgttctgtttttcagtctcttttcctagagatgccatataagtaaatatgaagcttgcctcccaagttagattggttagtaatattttggcacaacataacatgcattgacatatttctggtctccaacaccaggcttcctctcagcacaccatcagctattatagcagtgccctatttcaatgtacctatatctgtcttagtatgatatttatattagtcatagtatgataaactataccctagtaataaattaactcaaa

SEQ ID NO: 157089 - DNA, 513 bp, Homo sapiens
tcttaaagtctattttgtctgatattagtatagccactccagctttcttttggttactgtttgcctgatatatgtttttccattcttttaccttgaacctatttctgtttttgaatcaaacatgtgtctcttatatgcagcatatagttggatcatgtattgtccattctgcaagtctctggccagtcctattctgaagttttcttgtaatacttgccaaatgcagaaatagtagccaacacatctactaatgttctgtttttcagtctcttttcctagagatgccatataagtaaatatgaagcttgcctcccaagttagattggttagtaatattttggcacaacataacatgcattgacatatttctggtctccarcaccaggcttcctctcagcacaccatcagctattatagcagtgccctatttcaatgtacctatatctgtcttagtatgatatttatattagtcatagtatgataaactataccctagtaataaattaactcaaa

SEQ ID NO: 157090 - DNA, 631 bp, Homo sapiens
cagtacaacagggtggctatcattaacrataatttaattatatattttaaattactaaaactgtgtaatgggattgtttgtaacacaaagaaagaataaatgtttgaggtgatgatactccatttaccctgatgtgactattatacattgtatgcacatatcaaaagatcctatataccccataaacatatacacctactatgtagccacaaaaactaaacattaaaaaaacacttttaagtttaaatcttagcagtctaacccaacaaaggtttatttctcactcatgtcaccatccaaggcaggtcaggtaactcctgtgtggctttctccaagcagtaaagatgttcccatctggcaatttaggcatttcagagctcttcacttctggagccatagaaaggagtgaagaggagtggctgataatgcagcggggccagggggcgggggtgttatttccaggatagaaaacggcacaaagttttctgcttacttctgatgggctacacatcacataactccaaatcaactgcaacagaaatagggactttataggaacacattggtatttggtgatcactagtagtctccaccacaccccattccataaacaaatcaaaatttcactttg

SEQ ID NO: 157091 - DNA, 594 bp, Homo sapiens
ggaattttcaggcagttaatacacagtcaccttgccaaacataatgcttgatgtgggctacaggccttctctttgggcccctaagcgtggctttctaaattattcatcctccagcttgcatgctccatgctctgtctccagcaattacagccacttatgtttgggttcctactacctgattcatagcagcagcagtgactttgctgctttcttctccttgtttgtgtcttgggtcaccctaacagcagaggcacattgccctagagaaacaagggaacctactgaaaacccatttcgctccaaggactacttttcttcttggccagagtgaaaaaaagcaatctgtgggagccaaattgattattttgtcaaaagaaaaggctaaaaataactgctcaggctagatccccattcccagarcaaacatcttaaaagtgccaatagccttggtccatagatggactaggaatagagacaatcctgcccttggcataccccctaccttgggttctgaactttgcagatgggcagagtaaggttacagagaaataaactctctctcattaggataactccacatgcccctattttctg

SEQ ID NO: 157092 - DNA, 594 bp, Homo sapiens
ggaattttcaggcagttaatacacagtcaccttgccaaacataatgcttgatgtgggctacaggccttctctttgggcccctaagcgtggctttctaaattattcatcctccagcttgcatgctccatgctctgtctccagcaattacagccacttatgtttgggttcctactacctgattcatagcagcagcagtgactttgctgctttcttctccttgtttgtgtcttgggtcaccctaacagcagaggcacattgccctagagaaacaagggaacctactgaaaacccatttcgctccaaggactacttttcttcttggccagagtgaaaaaaagcaatctgtgggagccaaattgattattttgtcaaaagaaaaggctaaaaataactgctcaggctagatccccattcccagagmaaacatcttaaaagtgccaatagccttggtccatagatggactaggaatagagacaatcctgcccttggcataccccctaccttgggttctgaactttgcagatgggcagagtaaggttacagagaaataaactctctctcattaggataactccacatgcccctattttctg

SEQ ID NO: 157093 - DNA, 434 bp, Homo sapiens
gtgggaggagctcatattctctctctttcaaacttgttgaatcagcaactgaaaaatgcaaaccctatgtaattttctgagtgctcttgccccctctgtttggcacacaactctgtgactgtgttttcctgcttgaaaggctctttccttggcgttagttttcctctctggstcctcttccttcttgaataaggatgatatcctttgtcttaattttttctccttatctcactgctgctcacaaaggcatagttccctctgatagctgcttctgggaacaagacccctccaaatcaatgacttgttttgtgaacttgaattaaccttgccaacagctccttaggatgttccactgtgaggaatgatctaaaactaaattctctttcccccatgataagtttacatgcccatttctttaggctatggtgcccagt

SEQ ID NO: 157094 - DNA, 453 bp, Homo sapiens
ctcttgtcagaacctgcttcccagctttcagaaaagcccagtcygatggaagggtgtgaagtagtaaaccaccgttctctgccttcttctttcaatcttgatctactttattccctagtagatgccattcagctcaggaggtaaagggttctgaacagaagagggattttgtttcagtttgcttttgtttttcgttgtattcccctgataaagacattgggatccctacccactcagttgttcccatcaacctcctgatatctcagaggaagtagagagatgcagggattatacaagcacctccggtaggagtggggtttgaaacaggctttgcttgccctggtcttgggctgccccttctcaagaacttgatctctaagtataagagactcagcctggagctgacattgagagaccccttcccagggtctcagggccggaaggagacttaac

SEQ ID NO: 157095 - DNA, 454 bp, Homo sapiens
aacctgcttcccagctttcagaaaagcccagtctgatggaagggtgtgaagtagtaaaccaccgttctctgccttcttctttcaatcttgatctactttattccctagtagatgccattcagctcaggaggtaaagggttctgaacagaagagggattttgtttcagtttgcttttgtttttcgttgtattcccctgataaagacattgggatccctacccactcagttgttcccatcaacctcctgatatctcagaggaagtagagagatgcagggattatacaagcacctccggtaggagtggggtttgaaacaggctttgcttgccctggtcttgggctgccccttctcaagaacttgatctctaagtataagagactcagcctggagctgacattgagagacyccttcccagggtctcagggccggaaggagacttaactaaacaccacc

SEQ ID NO: 157096 - DNA, 490 bp, Homo sapiens
gaattctgcagaggacaaaggtctttctcaaattctcatggtgagttgggagaagaagagctagtgttacaacttctgcctcccagagcagtgtcccttatgactcctggcagacttccctggcctcttcccttgcctgtcctcaacaacttcatgcccaggcctaaagctcacagggtcaatctcagtagctgggatggatatcccagcacacaccaaaggcctgagatcctgacatggttctcacttggtctgtgggacagggacaagagtagaaaaggtcaactgaaattatgctgcaaagtgacccctgmcctctggaagcttcctatttatttcatcttcctacttgctcacaccgggaatcaatgacctgttgggtttaacacatatcagccttgaggcattcctgtatttttatcagtcttagtgctttcctgatactatagtaagttttgttttgttgtccctcttccctgtctaggcattt

SEQ ID NO: 157097 - DNA, 490 bp, Homo sapiens
gaattctgcagaggacaaaggtctttctcaaattctcatggtgagttgggagaagaagagctagtgttacaacttctgcctcccagagcagtgtcccttatgactcctggcagacttccctggcctcttcccttgcctgtcctcaacaacttcatgcccaggcctaaagctcacagggtcaatctcagtagctgggatggatatcccagcacacaccaaaggcctgagatcctgacatggttctcacttggtctgtgggacagggacaagagtagaaaaggtcaactgaaattatgctgcaaagtgacccctgccctctggaagcttcctatttatttcatcttcctacttgctcacaccgggaatcaatgacctgytgggtttaacacatatcagccttgaggcattcctgtatttttatcagtcttagtgctttcctgatactatagtaagttttgttttgttgtccctcttccctgtctaggcattt

SEQ ID NO: 157098 - DNA, 591 bp, Homo sapiens
gagcaggtgtctctggcttgaaacctctgtagtctacacagaatacctccattgtatcttagctgccttgaacaacagctctgaggacctacagtgatagagacttctctacattgatgttgtgaagcgctacaaccacttcagttggttgctacaacagttttaagttggtgttgctataatcattttttaaaaactgtttagtattatacactccatttgaaaataagcatggccatactcggacagttctactttcaggtattgtattatttcctatgtctgctgtcaaaagttacctctaacttgatggttttaaaacaacagaaatttattttctcacagttcaagaggccagaagtcagaaattagtactacagggctaaaatcaaagagacagagggtcggggsctggttccaacatggccaaataggaatagctccagtctacagttcctagtgtgagcgatgcaaaagacgggtgatttctgcatttccaactgaggtactgggttcatctcactggggcttgtcagacagtgggaacaggacagtgggtgcagcccaccaagtgtgagccgaagcagggtg

SEQ ID NO: 157099 - DNA, 497 bp, Homo sapiens
ggtctccaacacagaatttggtcttcaggtcagcctggattctaatgggccctggcttttacttgcttctgtgttttctgctagcaacagagctgcattcaaaaggcagcggcaatcttcctgatctttgaaaacattaaaggaaagaggaaatcaaagggctcacatctgagctactcctcagggccaagttctctactgatctgtgcaactgaagaggggaaggaacacactgttgctgaagaaagaggtctctggggagaggctccatagaccccacagctaaaatgtgccctcaaaaggagaaagagattaagggaaaactaaggacaacaacttgcatgtagagagattgtctaaggtacaaggtatcagaggaagacttacagatagcaaagcacttccttacccacttgttcattccttaatgaaacatggaaggtgtttttyttcctccatcatattagattagtaaactgaggcttggagagagattg

SEQ ID NO: 157100 - DNA, 566 bp, Homo sapiens
atcagctttcagatatgtggaagacctctccttgctttacaactaggctgacaaatccttggtcattaatacattgtctttgccttcaagtcctgcccactgctctctgcaccttgggagtttgctttcagtcctgttgccattcttccggtcttcagaggtcttgggaagatctggaatgccttgggagttctttcttatttttagttcatttagatttctttgtgttattagttctataacggctattagtactatgttttctcttggtaattaggtggaagttataatctcataacttttaaaatctaaatcaaaagtgggagcattttactcattgttattgttgttattcatggtgccttgtgcccgtatagttgaatgtcatataggaaagcaagatttatatctaatcagcttactctatgtggtgtctagagccatgatgcatattttttcaccatggtsccaaataatttcctccttacaggtcatgctatgtgtcacaaccctcatgattccacagtttgccgaaacttcttagcactcctttatgagtctcccac

SEQ ID NO: 157101 - DNA, 566 bp, Homo sapiens
atcagctttcagatatgtggaagacctctccttgctttacaactaggctgacaaatccttggtcattaatacattgtctttgccttcaagtcctgcccactgctctctgcaccttgggagtttgctttcagtcctgttgccattcttccggtcttcagaggtcttgggaagatctggaatgccttgggagttctttcttatttttagttcatttagatttctttgtgttattagttctataacggctattagtactatgttttctcttggtaattaggtggaagttataatctcataacttttaaaatctaaatcaaaagtgggagcattttactcattgttattgttgttattcatggtgccttgtgcccgtatagttgaatgtcatataggaaagcaagatttatatctaatcagcttactctatgtggtgtctagagccatgatgcatattttttcaccatggtcccaaataatttcctccttacaggtcatgctatgtgtcacaaccctcatgattccacagtttgcygaaacttcttagcactcctttatgagtctcccac

SEQ ID NO: 157102 - DNA, 636 bp, Homo sapiens
atggcacatgcaaatcggctgctggtttcaatgattccagagtgactgcaaagacacagagcaagcacttgaaccatctcwctcttgccaaatgctgctgatagtgacaggacagtaaaaggccaccaggccagagaagcccagcaggaagcagtacagcttgaggagcggaggagacaggagatgaacgagctaccagagacactggagagacgggagactttgacttatttattaagctaaattatttacactgaggagtcagctgctctgaataatttatctcgggttccaagtccaaacgccatgttgaatgggaatgggtgaccctagccagtaaaagaagactcaaaagtataaaaagagagagcgtgctcaagtgctcaacccttccttgtcgacgtctgtacctctgaggggaagaggagactggcagggaaaggggctctggaggtggcctaatgtgccacccactgcaaaggagggccacctgggctgggtggctgctctcccattcctctttgctgattggggagtatgactcaggctgccaggggctacaaagccaccaggctacaggggaccaggagtggcttcctaagatgtgacgagaagctacagaggactcgaatcaca

SEQ ID NO: 157103 - DNA, 587 bp, Homo sapiens
ggaaatctcaccatgcttttgggcttgtaacgtggaagtggtcattctaccgttgcttcaagatcctttgggccgggcgcaggggctcatgtctgtaatcccagcactttgggaggccaacgtgggcggatcactgaaggacaggagttcaagaccagcctggccaacatcgtgaaaccctgtctctactaaaaatatgaaagttagccaggcacagtggcgcttgcctgtaatctcagctactcgggagaatcacttgaacccaggaggcggaggttacagtgagccgagattgtgccactgcactccagcctgggcaagagagcaagactccatctccaaaaaataaataaaaataaaaaaaattaactgagtattccatttcctattaaagaaaaatggaactacattccctggattgagtcctttgtgttaccagaaagtgggtaaggccccaggccccagctttggaactgaaaagattgggttggatttttgactctgtytaggagctgaatgacctgaggctggtatggcctccatgtctacatcaacataatggcgatgacaatgtgtacctcattgga

SEQ ID NO: 157104 - DNA, 508 bp, Homo sapiens
ttcacttgtgcctagaatccttctttcaacctcagtgtttcattgtgttggagagactgtagtcggggatgagaaggacaagggagagatggctatgamtggaatggtctgcaaaggtgagagtaaaatcagagtatgcaggagactcagcaaacaaagcataaacaactctacaaatcatattctggagaagggaagccctgcgagagtggtgaaaagcaagacatggggccaagatagagtgagagaggggatggacaagtggttaatgagctgcaaggtggaatgcagggtggaggacgacattccaaggggactggcaggggtaagcatggtaggggagaagcatgctgaggtcacttaaagagttaaatacgcatgcacacctctcctaatgctccacatgtttgctacagcatttttctttctttgccgaaagcaataatcattactgcgtttttcaagctagtatgtctttattcagcatccactgtgtgtgaagcctttc

SEQ ID NO: 157105 - DNA, 508 bp, Homo sapiens
ttcacttgtgcctagaatccttctttcaacctcagtgtttcattgtgttggagagactgtagtcggggatgagaaggacaagggagagatggctatgaatggaatggtctgcaaaggtgagagtaaaatcagagtatgcaggagactcagcaaacaaagcataaacaactctacaaatcatrttctggagaagggaagccctgcgagagtggtgaaaagcaagacatggggccaagatagagtgagagaggggatggacaagtggttaatgagctgcaaggtggaatgcagggtggaggacgacattccaaggggactggcaggggtaagcatggtaggggagaagcatgctgaggtcacttaaagagttaaatacgcatgcacacctctcctaatgctccacatgtttgctacagcatttttctttctttgccgaaagcaataatcattactgcgtttttcaagctagtatgtctttattcagcatccactgtgtgtgaagcctttc

SEQ ID NO: 157106 - DNA, 415 bp, Homo sapiens
gcctttttcccccttggattctaccaaggtctgttattgaggcacaagataggtggagggagagagacattaacaaaaatctttcggccggttgtggcggctcacgcctgtaatcccagcactttgggaggccgaggtgggtggatyatttgaggtcaggagtttcagaccagcctggcaaacatgatgaaaccctgtctctactaaaaatacaaaaattagccgggcgtgggggtacatgtctgtaatcccagctactcgggaggctgaggcagaagaattgcttgaacccaggagccggaggttgcagtgatctgaaatcatgccactgccctccagcctgggcaacagagcaagactccatctcaaaaaaaaaaaaaaaaacttccttgctaaacttttatgtaaccttgaa

SEQ ID NO: 157107 - DNA, 562 bp, Homo sapiens
tgggaaggaagtaaaatttatatgattctatcaagtgaattataaaggagccagaatctctggcacactcctgctgggaaatgaggagggtgagatttaccacctgcctcctgctttaggtttttatgaccttcacatttagatctttaaaaagtgaggggagatctttaaaagtgaggggagaatccttgtccatcgttctttgtattagtgaacattaaaggttctcaaggcctcctaaaatcaactattccaaagaatgttagactgggaagaagccatctaatccacctgcctgccttttcagatgaacatagtatccagtrtataggatacactcgagaaataattgttgagtgaatgactgaaaaaaatgcaagaagctcctggtccggaggggagagtaattcctctgagactctgcagctgactagagacaaagctggcttggaacccaggtctcttgttcctcagttaagttgtcctcttactaacatactctctgaccctcaatgcaaactgtctctttgcagctactacatacagcaagcacattattttc

SEQ ID NO: 157108 - DNA, 592 bp, Homo sapiens
aagcttatgggtgtagatgcyagtagatgggtaaatgtggtggtagaaacatgtggacgttctcctctgattgcttcctacttcactgataaaattgaagcaatgctgtcagctgagaatgatggtgaaggaacatatggtgaaggttttaagatagaggcaaatagatggaatgtagtatgaatgccagggaacactgtgactcaactgttaaagtgaattacatatggcccaagaaggactctgtacttctatatttgagtccttgtggatgaaatgcaacctaacttaataggtagacaagattgaaaacctaacttgggagtatgcatctgtaacaatagctgagccttggccaatcccagcagccatacttcaatcacccctacactgctgagtattcaaaactgttcaaataaggcaaatgctgagctgtaactaatccagttttttctatatctcacttctgatttctatacgtcacttccctttttttgtctataaatcttcttccaccatgtggctgcactggagtctctctgaatctgctgtgatttggggcactgccaaattcgcaaattgttcattgctt

SEQ ID NO: 157109 - DNA, 621 bp, Homo sapiens
atttaccatctgattcttttcagaaaaagcttggcaactcctgccttaaggcctcattgtcttccatatctggcagacaaaaagaaaaatagtgtgaaggggcctcagtcccttcttaaaagcctcactccaaaatgacacacatcacttctgcttttcttacattggctggaactcagtcacatggtcactgcaaattttaaagaaggcagggaaatgtatccagctgtgtgcctaggaaggaaaggaaactggtttttggtgaggttatcagtctctgaataccctattaatgggtttagattgccttcaaaagacaatgaggaccaaaccatgagagaattctgaaaacagaattgccaagccaaaattrtttaagagcatctccttacaatagtaaataaagagctacctgcaggaagcataactcagtatcaagtcactgaggcactatcacagacttacgagcacctggcaaacggcccagaacaatttttaaaagtcacctatttgtcaattaaacttcaccacaagtcaattagcatggtgatttttatgctccagagagaacaggctataatgaacagtcaggagttgtgaggactcacaataacagtaatt

SEQ ID NO: 157110 - DNA, 597 bp, Homo sapiens
cttctggtcattgtgatggcgattgtcaacctcttggtgctggtgggagtgtcatttagcgtgaaaatgagattataatgaagcttgaggtgtttctgaggtcattaggttggctatcttggttctaaccagtctcagctggtctggttacaaasggagctttttatcacaggtatcttgttccttaaagttaaacagagttaggatagggtggaaattcaattctgtcacatagacattacactaggtaacagttccaaacatggccaccaaaagtttgtttaaacatgccactcctcctttcaagaagttgtttatttccccctctccttgaacctgtaagatcttgtgacttgttttgaccaatataaaacagtagaagtgtccttataccacttcaagtctaacctttaaaagcccaacagcttttaattttagtttcatgaaatccagtgttcatgctgtaaggaagcgcagtctctcctgaagacagggaccacttgaaggggccctggaggatgagatgccatgtggaggaagaggccacatggaaaagactcaaggtaccacagccaactgccagctgcaagtacccag

SEQ ID NO: 157111 - DNA, 631 bp, Homo sapiens
cccaaattttgctcctgagcttcattcacattttcaaaggccctctagataatcccactggatagatacaggcaccacaaacacagcatattaaaataaaatcttatgatctttcctttgaacctgctgctcaaataccttatttcaattaatgaatttattattcacctagtttcatcagataacatcatatggttcctacttttccttatctgtataccccattgatatttaattactatttatgctacaattctggatagttccctctccttcatgtactgcttaccatttccacaaaccatgccacaggcaggcctttatttcttacctatgtcacctcaattacatcttaatatgcatctcagctggtagagtctcctctttactttttaacttctacccaccagaattagaatcatctggaactggatcctcaggtgtatcacraacttactggatcggtattctgtgggtgtaatcaagtaatcattggtgattctgatgcacagtgtgggaactactgctctacattaaagattatatcaaacatggccttcctccaatacacattatcattaaggctaatattcctctcctcagtgaagcttcaaagtgaataagagtcata

SEQ ID NO: 157112 - DNA, 540 bp, Homo sapiens
tttaccagtatttaaaacacatggccttattacttcaatgaaaattcaaattcacagctcccattagcattgcagagaatttctggcctagtttccctggatattaatggaagttcagatctcttttaatgagcttaatagggaagaattttggtattcaaataaactacttcccctctcttagcctaaggccaaagagaaaacagttaccattataaactggtcagataacttcaaagagacttaactgccagaaaagccattaaagactatataaacaacaaatgcacagtcatttctggtgcaatttgcaacatgaaatttaacttttggacatacttgtctcggtttcctcctaccttactgataatctatcgaatgcacttttttatgtcctcgttatcccattggtttttaaattttggacatcaagactcagccttctctcctcgacytcaggtgtatgtaactaaatatgttcctaatatctccactttgatggtgtagtagattgtaaaaaaaaaaaaaaaaaagttaaaa

SEQ ID NO: 157113 - DNA, 634 bp, Homo sapiens
gggaattctattttcttcacttttgagcaatattatttgaggttactgttccatgtgcttatcaaaaaacttaaggcctgtgttaaagtaacccatggaaatgtcaggcggcttcccaaccaagtagtcattcttatacttattttttgttcaacaaatttagttatgtataacaagggcttaacactgcattaggcattgaaggaaaacaaraaatggagagagaaaaaatatgtaaggtttcaatgtactttgagggagcccacagaagagcaggagaaagatgggagtcaggggaatggagtgtgttgtggcccaaatactacagatttctagagttcttactgacatttagtcaattttcttgggtaattgtttctctgtttactgtgtacttctaggacaatgttcagaaattttaaatgatttttttttatgatttccaccaattaaatcactgttatactagggcaagggcctgccgagttcctcatgcctccattctaggagccccaccccactgttggttgtttctaatatgtagccaagtaaaattgtcctgcttgtcatcatctcttaatttcacactcctgatttatttcacctctccttcccttattgaggctctacatag

SEQ ID NO: 157114 - DNA, 496 bp, Homo sapiens
ccacatatattatcccaacataaagtagtcctcgggaattatatgcaatttgcagattctgtcaggtttctcaggaagacgtgctcaatttgtaaatttatgtgaccagggaatatttattaataatgcctatttttaaccatamgacactgtgtaactataagtgctatatggttaaatggtacttatggaaattgtctattattctaaactatccattttttaagtatgcagtgaagagaaactcttagcttggtgctttaaaaggtgaaacagaacttgaaaaaaagtgaggcaaaccactgtgacattaaagcagagtgtgaaaaacagcagaaaactagtgtccaaaggggaggaatttgaaaatcagtgaaacttggagttttgagaagtgcggaaaagacttagtgaagccctggaagggatactggaagtgctttgcctaaatatcactggttgctataaatctcagtctcaggaaccaagatcagct

SEQ ID NO: 157115 - DNA, 458 bp, Homo sapiens
tggcgaaaacttggtcacattgtcattcagctgtaagagggacagggtaaagtcttttggatggctacactgccaagctaaacaaatgcacaattatttttctaagaaagaagaattggatgttggattggcaactagtagtatctacattccttcaactctctcattaatatcaacaacatttttgaacacttagtatgttctcaaattctcattagaaaaaaattaagatagccagaaatagtattagttttctgttaccaaacacttagtggattaaaaacaatatccatttagtagccaacaattctgwgggtcagaatccaggcagagtgggctgggctttctgcatagggtttcacagggccgatatcaagatttcaactagtctgggcttttatatgaatgctctagtaaagactttacttccataaacatccagattcttggctgaattc

SEQ ID NO: 157116 - DNA, 573 bp, Homo sapiens
atgtccttgttttcttgctagctaacagctggaggagtcactccactccttaggcaagccatattctttctcacatgacccctctatcttcagaccagcaacaaagtgtaaagtccttctcacatgttaaatctctgtgacattttctaccttcagccagakaaagctctgcactttaatgattgatataattaaatcaatcctactcagataatcttatctgaagtttaactttgctatagagtatcatataattacaatatactcacaggaatgatattgtatcatatctatagtttttgtggattagttagaaacactttggggggagctacttaaaaaattctacccaccacacaattcagttatgtccatatttagataaacattggcactaagttcttcaccacaatgtaagatgaaagagagaatggggaagaacctcactgtcaattctgtgctcatctggtcttttgggaggacagaattgttttagactttctgtttcaaatttctgtatacaacaaagtggttttaaatatgctcacacctctgccacattcttaagaattt

SEQ ID NO: 157117 - DNA, 534 bp, Homo sapiens
gcattaagcacagttcctaatacttgtgcatttgatatgtatttgttgctcaaaggaaaggctggaagacatcgcagctagttcaggtggcctttaggaggcttccactcacctgcaaacrtggatagaggaattcaaggagggagaagcttgccttatccaactgtaatttagatatccctctatggcatccttccagtgcttgagcttaagaataacagtgacagtactttttatttaatttttgaatctagacatgtatttcttcaaagtggctcctgcatactatcctttattattattattctttttaatttttacaattgcattggaatagatgtacaacaaaccgttcccagtgtcatatttttcagtgtatgatttggggacataaccttctctcaaaaattaggcatttggtttctactatgtgcaagactggagttaaggggatgggaccagagatgtggtatatgtacttgagagtcacagagtactgtggggaaacagacaaggaaagaattgaagctaatg

SEQ ID NO: 157118 - DNA, 621 bp, Homo sapiens
actgaacaatgagaacacatggacacaggaaggggaacatcacacaccagggactgttgtggggtgggggaaggagggagggatagcattaggagatatacctaatgctaaatgacgagttagtgggtgcagcacmccaacatggcacatgtatacatatgtaacaaacctgcacgttgtgcacatgtaccctaaaacttaaagtataataataataaaataaaaaaagatattaatgctgctttcccatagaagacatttagagcatttttacaattcttttaaaaagttagctatacatttcccgtgaataagaaaacttaaaattcagcttgtaataatgcagactgttctgaaataattttttagaagaaaaatgtaagaacatttattctaagaataatgagaaaacaaatacagtatcagttgagattttattcttgttaccatgggagacatgacaacggtcctgctagagcatgattaaagggttaaagtgaatgagaagattaaagaaaaaaaaccagacagacccagagggaaaagaaagccacaagaaaataggtccactaatgaatgaggaagggcatgaaattaatgatgactctaaaacgtttgagt

SEQ ID NO: 157119 - DNA, 621 bp, Homo sapiens
actgaacaatgagaacacatggacacaggaaggggaacatcacacaccagggactgttgtggggtgggggaaggagggagggatagcattaggagatatacctaatgctaaatgacgagttagtgggtgcagcacaccarcatggcacatgtatacatatgtaacaaacctgcacgttgtgcacatgtaccctaaaacttaaagtataataataataaaataaaaaaagatattaatgctgctttcccatagaagacatttagagcatttttacaattcttttaaaaagttagctatacatttcccgtgaataagaaaacttaaaattcagcttgtaataatgcagactgttctgaaataattttttagaagaaaaatgtaagaacatttattctaagaataatgagaaaacaaatacagtatcagttgagattttattcttgttaccatgggagacatgacaacggtcctgctagagcatgattaaagggttaaagtgaatgagaagattaaagaaaaaaaaccagacagacccagagggaaaagaaagccacaagaaaataggtccactaatgaatgaggaagggcatgaaattaatgatgactctaaaacgtttgagt

SEQ ID NO: 157120 - DNA, 559 bp, Homo sapiens
caactgcaatgatagtctactgctattcttaatacctaccactaagcccagagcaccctccagacaaatgaktcagacccctatcctgaatgtgagactataatggaagttattgagtggagaacaggggatgttattagatctcaggtccacaagaattctaagatctataaagcatccatttccctctacatgttccgaaggcccccagatgacttcagacatttcaggtagaattagggatatcagtaaaaagtactctgaaaataaaaatctgagactcaggagaatctcccagggtaacatattttgacaaacacacgccaaaagaaatagcatgttgcttgctgtcaaggaatggttatcatattgtccactgagggaccagaagaaataagttatctcatttatcatgtgtctaggtagggggaaataaaaaaaaactttactcaacaaactgcagggtcaaaatacattgcatcttgcatcttgcaattttcttccagattgtagaataaacacctgttttgacaatgcttctgcaaactcctctgcaaaa

SEQ ID NO: 157121 - DNA, 589 bp, Homo sapiens
tatgcatgttctagaacaacaaaaactatgtaacatagaacattagttccatggaacataataaaataggtgttaaatgtttaaagaatgatccactggaaattctgcttcatcgtagcatgtattttgcatagaattcaccttttcagttaaaaactacaaattctgaacaagttgtctctaaaaagcaataatttaaaggccctaagagtgattaaacacagacaaagttaaataaattcaactcttaaaagatcaaaaccaaagtcagttccatgtttatgcatctatcccatgcagggcactttccatcaaaacacctgaaactcaagcaaaatgatgcagtctttctgaattaaattagagagaaaaacttcagaactttcagagaggcttgaaaatgaggagggaaatcctgaaaaagagaatggcacagagtggggagccccaaaaatctacatattgggttggtgcaaaattaaatgcagttttttgttattacttttaatggcaaaaaccacaattagtttttcaccaacctaaaacaaaytttaattctcagctgatgtctgtattgtgcatgtgtgga

SEQ ID NO: 157122 - DNA, 516 bp, Homo sapiens
gttaaatgactttgaccaaaatgctatagtgatatgaacaatgaagtccaggctgaggtggtcagatggtgaagaagaacttgttgggaactggaataaaggctattcttgctatgcaaagagactggtggcattttgcccctgccgtagagatctgtggatctgtggaactttgaacttgagataaatgatttagggtatctggtaaaagaatttcctaagcagcaaagtgttcaagaggtgatatagcataaaaatttggaaaaattgcagcctggttatgcaggaaaaaagaaaaacccatttttgggggagaaattcaagacggctgcagaaagttgcggacgtaatgaggaaccaaatattaatcaccaagacaatggggaaaatgtctccagggcgtgtcagagamcttcacagcagcccctcccatcatagtcctggaagcctagcctaggagagaaaaatggttttctggcctgggcccagggaccccctgctgtgtgcagcctcagg

SEQ ID NO: 157123 - DNA, 621 bp, Homo sapiens
ctgcacaagctctctctttgcctgctgtcatccacgtaagatgtgacttgctcctccttgccttctgtcatgattgtcaggcttccccagccacgtggaactgtaagttcaataaacccttctttctgtataaattaccccatctcgggtatgtctttatcagcagcatgaaaacagactaatacaatgactgacctgttagagttcacacttgcatggagactgtaggccctttattttggccaatttctcccatttggaatgrgtgtatttacccaatgcctgtaccaccattgtatctaggatgtaactaacttgcttttgctttgatgggctcataggaagaagagatttgctttgactcagatgagactttggatttgggcttttgggttaaagctgaaatgagttaagactttcagagatggttgaaaaggtatgactgtgttttttaatgtaaggacatgagattcgggagtgcagtggcagaatgatatggtttggctgtgtccccacccaaaatttcatcttgaattgtgataattcccatgtgtcaagggcaggaccaggtagagataactgaatcatgggggcagtttcccccatgctgttcttatgata

SEQ ID NO: 157124 - DNA, 588 bp, Homo sapiens
ctccagaatctaaaataaaaatttgaaattttaaaaataaaataatataaaaaatgaaatagtgtaaactttaccaaaatatataacaatgatctatattaaaacctctgaaacactactgagagaattttaaaatacctaaataaatggagaggtgtactatattcatagattgaaagactcaccattgttaagatatcatttcctccagattgatctgtagactcaatgcaatttcaatcaacttcccaataaattttttaaaaataaaaaatttaccctgattctaaaacatgtgggaaaaaaaagcaaacccaaaatctagcacagaaatacacacacacatccatatacatgtgtgtatatatatcttacactcaaatatatatatactcaaataacyatatatgcattcatatatacatatatacacacatacgtacatatatacacacatatatgtacggatatacagctatttcatttatacacacacacacacatacacacgtccatatatatatatacacacacacatatgtggatgtgtgtgtgtgtgtgtacaaatgagaaagctgaaatacatta

SEQ ID NO: 157125 - DNA, 566 bp, Homo sapiens
taatacttcaaaatattaattttaaagatgcttggggaggtacaagagaattctgaaaaacaataccaaaaacttaagaaaaacaattcagtacatgagtgagaaattaactaaagagatagattttttttctggaatatcagctactcaggaggctgagggatgagaatcgcttgaacctgggaggtggagattgcagtgagccagactgagccactgcactccaacctgggcaacagagtgagactccatctcaaaaaagaaaagagacagagagattttttaaaacaaccaggtakaaattctggcactgaataattcattgcaggaagtaaaaaataaatttaaagtcttcaataatacataaaatcaagctaagaaagaacttgaagacagatttaaaaaacaaaaatttagttgacaaaattttagaaaaaaaaaaaaggatgagcaaagcatttgtaacatttgggacaacataatgcaaccaaatatttgaattatcagtattgctgtggtcaaagagaaaatgaaaagattagaacatttatttaacaaataatttg

SEQ ID NO: 157126 - DNA, 600 bp, Homo sapiens
taaaagaatagcagagactaaagtaaataatatttatacccagaaaatgacattgttcttcttttatcaaactgttagtgtgtgaggggtggcagggtgtgttggagcaatttagttgtagtctataggtgagctggctctgagatttgctgttgctttagttaaattcagctttttagaagcatcaaattaattgkgggtggagtcatttttttttttttttaattcagagtttgggttctgactacctaggaggaatgtctcatttctcgtatttggccatcagactttaacaagacctatgcacctgaaaatcagtgtaaatctttctcatttctcttgcccatctctcagtcatagatgattagttcttaattatatgtaaggttcaaaatgcctgccgggtttttgaaattctctttctctacccttatacctcagtaagttttgcaaatctgtatcacagtgtggttttgtttagctctcctgaatcttccctaggttcagaatgtcacttcttcaagctcagtgtaaggcccccatgacctgtagggtttctctcagttctcttgctttgccctcagaattaaacaggtacat

SEQ ID NO: 157127 - DNA, 592 bp, Homo sapiens
taagacgttgccatcatatgaaaagggtgctcctgagcagtgcattttaaaatggctttgcaaatggggaaactctggcagctagaaagctgttgaataagaacagcctgtggccccagagagcaagccctatattgyagaccagcttgtgctgttcctgagcctgttggccctcagatctctctgttatcctttgtctgacatactctgtaacaaagagcgagggaggactgacccttgaaatctttgtttaccagtctgccaggtcattaggcttcttactggatttgaacaacagagaaactggtacaagactggggggtggagaaaaaggagaatccagagtatttctctcctctctgtgtcatgagtatcttccccatcatggctaaatctcttctatgactccagctcactccagaaagttcttctgaggttcacacttctatcaggtgactttgtccctgggctccaggaacacctgctccctgtggctcaccagcctaggaatggtattactttcctgctggtgctcatctttaggtaacctcactgtgaactgtttgatgagatttctgtgttactatttaga

SEQ ID NO: 157128 - DNA, 592 bp, Homo sapiens
cacacaaaattggataagacgttgccatcatatgaaaagggtgctcctgagcagtgcattttaaaatggctttgcaaatggggaaactctggcagctagaaagctgttgaataagaacagcctgtggccccagagagcaagccctatattgtagaccagcttgtgctgttcctgagcctgttggccctcagatctctctgttatcctttgtctgacatactctgtaacaaagagygagggaggactgacccttgaaatctttgtttaccagtctgccaggtcattaggcttcttactggatttgaacaacagagaaactggtacaagactggggggtggagaaaaaggagaatccagagtatttctctcctctctgtgtcatgagtatcttccccatcatggctaaatctcttctatgactccagctcactccagaaagttcttctgaggttcacacttctatcaggtgactttgtccctgggctccaggaacacctgctccctgtggctcaccagcctaggaatggtattactttcctgctggtgctcatctttaggtaacctcactgtgaactgtttgatgagatttctg

SEQ ID NO: 157129 - DNA, 592 bp, Homo sapiens
taagacgttgccatcatatgaaaagggtgctcctgagcagtgcattttaaaatggctttgcaaatggggaaactctggcagctagaaagctgttgaataagaacagcctgtggccccagagagcaagccctatattgtagaccagcttgtgctgttcctgagcctgttggccctcagatctctctgttatcctttgtctgacatactctgtaacaaagagcgagggaggactgacccttgaaatctttgtttaccagtctgccaggtcattaggcttcttactggatttgaacaacagagaaactggyacaagactggggggtggagaaaaaggagaatccagagtatttctctcctctctgtgtcatgagtatcttccccatcatggctaaatctcttctatgactccagctcactccagaaagttcttctgaggttcacacttctatcaggtgactttgtccctgggctccaggaacacctgctccctgtggctcaccagcctaggaatggtattactttcctgctggtgctcatctttaggtaacctcactgtgaactgtttgatgagatttctgtgttactatttaga

SEQ ID NO: 157130 - DNA, 563 bp, Homo sapiens
gtttttttaactccaaacaaccacagtaggtcctcagcaatggttcttaaccaggataaaatggccgaaatgtcagaaatatgattcagaatatggataggaacaaagatcatcgacattcaggagaaagtcaaaaccccatccaaggaatctaagaaatatggtgaaacaatgtagaagataaaagatgaaatggctgttttaataaagaaccaaactgaatagacagagctaagaaactcaactcacttcaagaatttcatagtaccattgcaagtgttaataggagaattgaccaagctgaggaaatatctcagagcttgaagaccggttctccaaaataagtcaggcaggcaaaaataaagaaaaaacartaaagaagaatgaataaaacttctgagaaatatgggattatgtaaagaaaccaaatctatgactcattggcattcctgaaaaagagggagagaaatcaagcaaattggaaaacatatttcaggatatcctccacaaagatttctttaacctcactagagaggacaaccctcaaatccaggaaatgcaga

SEQ ID NO: 157131 - DNA, 564 bp, Homo sapiens
tcatgcttttctgaactcgagtggactccaccccttcttactgcccctgcacctgtggcctcttttgtccacctgctgcaggtgagaatgcacctcctttcttccttgacaatccccttttctaatgctggcctgatccttctaaccgctaatcacagcaatgtggagctaacctaaaccctgcgccccatcccacctcagctatagaatctgtccccatccccatccctctacttttcgcttttgagccagtcttacccatcctttcaccaatcctgttaatgtcccacatatggccccatcctgccaccccaaaggtcctgtccctctaacaacatgcctttgactctgactgttaaaggtcagggtaacaccatctctggcatgggaacaatcatagctattgaatgtcccatccccctacactggctatgttaggggcctagtgtctatctctcttagtcctttaactgctccccaacagagcttcaactkcctctcacaaatctcccacccatccatccattgttacccctggcctgaccctgccatagctatagagac

SEQ ID NO: 157132 - DNA, 625 bp, Homo sapiens
aagcattttatctattaaatgaatttctgtacttgttataggtagattcagattttctaattattcttagttcagttttggtaatttrtatctttctaagaatctttgcatttaagttttccaatttgttaatgtaaatttgttcatagcagtcctgtgaactctttaatttccataggactggtagtgatgaaccgtttcatttctgattttgaaaatattctatttctctcttccttcttggttagtctagctcaagatttctcaattttgttgacttttttccaagaacatgatttttattggtttttattttctcaagttcattgatttctactttttattatttctttccttttgcttgttttgagtttattttactcctttttctagattcttgaggtggaagcttagattaagatttttctctttttttaatgtgtttaatgttataaatttccctccctgcactaactgcatgccacaaattttgattttgtgtgtgtttttgttttaactcaactcaaaatattttctaatttccctcatgatttcttttttgactatgggttatttaaaagcatgttatttaatttccaaatatctggagatttccaaatttcct

SEQ ID NO: 157133 - DNA, 565 bp, Homo sapiens
cccagattcctcaatgtttggcaagtttgccaagaggttcaagctgccctctagctcatctggctgctgctcttgcccaggctgtctgatgacttgctgggccaccaggggccctgcctttcccagcatggaagtatgtgactctccccacactccctgcgccaacaatgccaagaatcagaaacaagggccgggagtgttagcaggccccgcatgagtggcagcttagagggcttgcattgtgcttggtgcaccaagagcagattgttattctgcaggcatgaattagagcctgggcagaaagcaccatggtcttgcccggtggtgtcttgctgctgctggagaagtgagagggctgyggttgtacaaaatttctgcaggccatgttccaggaattgtccttagagggctcatcagaagtggaaacatttgcttcttgaattccaaacaccctgaaattccattagtctattattttccccctaccttccccacttctcctgctgtgaaatggcatcaattcattaactctgctcaaaggcgattgtattctcatgacttcaat

SEQ ID NO: 157134 - DNA, 489 bp, Homo sapiens
atcaacagtaatattgccatcccatgtaaaaatcctttgatattgccaggaaacaactttaaatcaccagaaagctttaacatcaaataatacttttagaaggaggggaaaagccttccacctcgacatcgagcctatgaagtattccctaaaaaagaggractaatctgagaaaagtttacacatttttaatactctaagttgtagataatgaaattgatttaaatcaaagttaactagaataggattcatgtgtcatgaattatattgtctattgtctcataagcaacaagtgacacttattatcttggctgacaaaatcagctaccatttaatgaaccaagttaagaataactcaggtgactgataccaaaaataaatctctaatacagctgagaatccagaaacacaaataatatgttgagtaagtaataaaagtgacatttcaaattagtaaggaaaaaatggattattcaacaaatagtatgg

SEQ ID NO: 157135 - DNA, 229 bp, Homo sapiens
ccaactctattttctctagcaactatttcattctgcaagataaggtactatattcaacaaacaaaacaatgatcaacataagtgatatttgtgatttgtaaaaatcctgtttcttggtttagagtgaattataaccatctgagaatgtgatgtaaattatgtttatagctccyagtacagcgatttctgtttattcaaagtaaatctggtaagcaaatggtaaaaattt

SEQ ID NO: 157136 - DNA, 627 bp, Homo sapiens
cctagttgggctgaactaggcagttaaactgattgcttacctttccccatctttttgcccttgagtgacactcgcctttggtcatttggacttgtgctgatgaaggtgtgctgatcaacttggcatggttgccctttctggactcttatccaccttcctctctctctggcttcagggtcttgtcaacagagtagtagggagattaaagacacgaagtctgggttcaaattcaacggagttcaaattcttatgggatctcccatgttctttctctgcaacctggagcaaattattgaacctgactgagcctcaatttactgttacttgaaaaggggatcatttgcacagatagttacaaagattaaataagatgatatttragacatttggcatatgacccgatggtgggcccaggatgattatttctcttgcactgaatttgaagctaaattcgctggtctttttaaaaggctttattgagctagaataattttgctttcccagattcagtaagcatttatcatgtgctgccatctcaggattagtcactggcttggtgcttccatacattttatttcacttcatccttgcagtagccatgtgaaataggagttattgttcccagct

SEQ ID NO: 157137 - DNA, 627 bp, Homo sapiens
cctagttgggctgaactaggcagttaaactgattgcttacctttccccatctttttgcccttgagtgacactcgcctttggtcatttggacttgtgctgatgaaggtgtgctgatcaacttggcatggttgccctttctggactcttatccaccttcctctctctctggcttcagggtcttgtcaacagagtagtagggagattaaagacacgaagtctgggttcaaattcaacggagttcaaattcttatgggatctcccatgttctttctctgcaacctggagcaaattattgaacctgactgagcctcaatttactgttacttgaaaaggggatcatttgcacagatagttacaaagattaaataagatgatatttaagacatttggcatatgacccgatggtgggcccaggatgattatttctcttgcactgaatttgaagctaaattcgctggtctttttaaaaggctttattgagctagaataattttgctttcccagattcagtaagcatttatcatgtgctgccatctcaggrttagtcactggcttggtgcttccatacattttatttcacttcatccttgcagtagccatgtgaaataggagttattgttcccagct

SEQ ID NO: 157138 - DNA, 624 bp, Homo sapiens
tttaaacaatagcaagagattggaataaatgcagagcsttgttcagatgtatcaattttggtatttttttattttgattttaagtaaatccagcaaacctcattattatttttaatctcacttagtttttaaccattctctttatccagacagctcacccaaggttaaacaaaaacactaacattttactacctatgttccaggccttttgaaaaacagttttgtaacttaattcagctgatctttggtaatcagaagctaacaccaagcactgtttttcttcagcagtctaaagttgaaatttaagaacaatcagcatgcaatcaaaagctgattgtaaatgaacaataatgaacataaaagtgaaatcacttctgagggttctaatgaaagaaaaaaaggagtaatagcagtagttgaaaaaggagcatgataaaaagtgggtgcggttatgccaataggcaaatagtggtgaaaattagccagcaataatattccatggaatgctcaacgagttttggggagaatggggaaaacaaatgttataagagagtaaaaaatctatataaatgtgtagatttactgctgtagatgaagtcatctaggaagaatcgtagtggattt

SEQ ID NO: 157139 - DNA, 595 bp, Homo sapiens
aggaggggagttgaaatgggaaacaaaaggcctgctttgagtttccagtttttacttccagcttttacttccagctttttggtcttgatgacagggtgcaatggtggctaaactccrgtagaaaacctgtagtctttttgcactggagaactgaaggacagagttcaggatccctaagcagcgggaaactgggggtgggagggtgtctcagaaaggagagagtcagagaggaggagtcctggattctgtgtataaactgaccaaatcagaaggtatttcatgaacaacacatgcataaggctgactgtaagtggcccagctaaagtaaaaaagaactaaagtaagacttgagctgctgcccaagagacagagtttgcagtttgagtctgaatatgtgtcacccatgaatcactcttcactgggatctcagcttttttcacttatgtctgatacacacaatgtaaatattctcttttcccactgttcagttgcctgtctcagtttcatatgcttagttcacagttgttgggctttgaaaggcaggcaagaggtctgaaaaactgataaccagtgcaaagcctcagccaaggcagga

SEQ ID NO: 157140 - DNA, 595 bp, Homo sapiens
aggaggggagttgaaatgggaaacaaaaggcctgctttgagtttccagtttttacttccagcttttacttccagctttttggtcttgatgacagggtgcaatggtggctaaactccggtagaaaacctgtagtctttttgcactggagaactgaaggacagagttcaggatccctaagcagcgggaaactgggggtgggagggtgtctcagaaaggagagagtcagagaggaggagtcctggattctgtgtataaactgaccaaatcagaaggtrtttcatgaacaacacatgcataaggctgactgtaagtggcccagctaaagtaaaaaagaactaaagtaagacttgagctgctgcccaagagacagagtttgcagtttgagtctgaatatgtgtcacccatgaatcactcttcactgggatctcagcttttttcacttatgtctgatacacacaatgtaaatattctcttttcccactgttcagttgcctgtctcagtttcatatgcttagttcacagttgttgggctttgaaaggcaggcaagaggtctgaaaaactgataaccagtgcaaagcctcagccaaggcagga

SEQ ID NO: 157141 - DNA, 561 bp, Homo sapiens
ttttttacataattacatcaaatgctggtcttgtcactattagtgttattttaaatatccattaattgaacatttatcatatakagaaatataggaataaataagaatatatagagatagatacataaatgtagttacaggtagctagatatagatgcatacatgattgataggtgatagatttaataaacagttggaagttcaaacaaccctatgaggcaaggtttattatctccactttacagatgaggaagcacagaaaagtgaagtaacttgttcaaggttatatagacagtaattattgtcaagattccaacccagggctcaaaagtccacgtgctttctaggcttaccttctttgagattttttatttctggcaagtaaataggaaagagtaacaggcaacagacacagcaaaagacttagccctttgcatctctccctccaaagtgctatgaaatagtaaaagtgcataatgggtgttcttagatgctaatggcaaatcttcaggtatacaatgaggtacgaccactgggaaaataagtgaggtgagaggcagc

SEQ ID NO: 157142 - DNA, 601 bp, Homo sapiens
gtaaaggggcattatgtctacagtttattctcaagtagttcaaaaattaatttggatatataacctaaatatagtaagtatggttaaataaacatattagtaattgggaaatctaggttaagagaaatggaagttctttgagttattcttgaaactaatctgtaaatttgaaatcacttcaaaataaaaagttaccaaatgatatggtttgactctgtgtccccaccccacccaaatagcacctcaactttcaataatccctccatgttgtgggagggacccagtgggaggtaaytgaatcatgagggtgggagtttcccatgctgttctcatgatagtgaataagtctcatgagatctgatagttttataaatggtagttcccctgcatacgctctcttgcctgctgcgatgtaagacttgcctttgctcctccttcaccttctgccatgattatgaggcctcctcagccatgtagaactgtgagtccattaaacctctttttctttataaattacccaccctcaggtatgtcctaattagcagtgtgagcacagactaacacattaaactaaacaaaaaaaaaaaatgtaattagaaga

SEQ ID NO: 157143 - DNA, 578 bp, Homo sapiens
aatcagcctttccctacccttatatatgtggttgtgagtgaaacttcttattcttcctcactgagaaacagacctgagaccttgtcctcaaccagtcacaacattacatactctcagctacaataagtgacttggtgattggcatgttactcttccagagcctattaactgcctagcagccttgctaacattttggattacaatataattcatctttctttttttctttttcactgaacaatgaacttgagagagtatatggtctggagttgatactgtagggagtacagccarctcaaaagacatggagcctagagacttaacaaaaaaaaagacaacaggtttctggtgacatgatttgaacactagcattatgcagtgcttgcagccagcactactctttgactttctacctatgtgtctcattgaattgcttattactagtattattattattgttattattatttttgctcaaaccaatttgggccagatttctgtgacttaaaattctaaactcaaacattcctcacatcatataaagggaaagcaaaaaatgtaagcctttttcacttacc

SEQ ID NO: 157144 - DNA, 578 bp, Homo sapiens
aatcagcctttccctacccttatatatgtggttgtgagtgaaacttcttattcttcctcactgagaaacagacctgagaccttgtcctcaaccagtcacaacattacatactctcagctacaataagtgacttggtgattggcatgttactcttccagagcctattaactgcctagcagccttgctaacattttggattacaatataattcatctttctttttttctttttcactgaacaatgaacttgagagagtatatggtctggagttgatactgtagggagtacagccagctcaaaagacatggagcctagagacttaacaaaaaaaaagacaacaggtttctggtgacatgatttgaacactagcattatgcagtgcttgcagccagcactactctttgactttctacctatgtgtctcattgaattgcttattactagtattattattattgttattattatttttgctcaaaccaatttgggycagatttctgtgacttaaaattctaaactcaaacattcctcacatcatataaagggaaagcaaaaaatgtaagcctttttcacttacc

SEQ ID NO: 157145 - DNA, 564 bp, Homo sapiens
catttgaaataaccaaaagagctgggggttcaagattgttcccttaagctgaacttcgatccaagaagacaggtgccccccaactattaatgactcagtcactaatattatgccccataattttgtttttgtttgcttgtttgtttgttttttgagacggagtcttgctctgtcgcccaggctggagtgcagtggagccatctcggctcactgtaagctccgcctcccgggttcacgccattctcctgcctcagcctcccgagtagctgggactacaggcgcccgccaccacacccggctaatttttgtattttcagtagagayggggtttcaccgtgttagccaagatggtctcgatctcctgacctcgtgatctgcccgtctcggcctcccaaagtgctgggattacaagcgtgaaccaccgtgcccggtgatgccacatgaattcttaactacacatttctcttttaaaatgggattctaccaattactgtattttgatgcctgtttaatagatattggtggaggaatacacctcggtgtactgaacacttctcaaaagct

SEQ ID NO: 157146 - DNA, 612 bp, Homo sapiens
ctcagtcattcttgatgaatccagtgccctaaacagttactacattcaggtaaattagaattaataaagtaatatgtgaactgcctccggcaagtagagttttcagcaggtgcatgtaccatgcttgttacaaaaaaaaaaaaatcattttartgataggtctttcactgaaaggaaaaaaaatctaagtagaattctaaaatattcataagtattaaaatccattctgtcgaaatgagaaaagaattataggctagacagatctagtacaaaactacttttaaaggtcagttatctcctgttttgccctgatcagtgacatgtacttaatcaaagtagaaggaccatgggatgagacacttataattaatagactaaacatgttcatcattttgtgacaactaaatattttacaacttaacccagaaatcatgagcacaaagtattccaagcaattatatttttgtctaaaataaagtcttacagaaaaaccatagagagaagagtgcttcaaatctttcctctcctgaattaacaattttttctattactttatggggagatacttacaaatagctgcagagcctctgtctgattgatctctggcatagg

SEQ ID NO: 157147 - DNA, 379 bp, Homo sapiens
cccactaagcctgaacagacttcaaatcaattgattggcattcaagaggaaacctatggccttccttgggctatacacacattttgccaaagccaagggcttagtctaaaaagcaaagacaatgtcactgggcatgtgggaaygtggatttgactgtggtatcaatgctcctgtcctctgtgtcagtgacttaagatactaaaggaccctaacataacactgtgtatctcaataatccagtgaagagtgacccagctttctcaggaagtcctgccttgccctgtgaggatcaagtgatatccagctatcaggatatactacttctaggatgcactgcctactgcccaccacgcagcaataaatagggtctattgtaaaa

SEQ ID NO: 157148 - DNA, 586 bp, Homo sapiens
aaaccttattttctatcaatttttcatagttttatgaggagtaaaagaaattttttaaaaaatggcacctaaaacaatgcctaggtatactaagaactaaataaatcgtagatagtattgccttctgcatacaagaaaattattttattataagcatttatctgttttgttgatgttgttgttccctagcggatctgcagagttcctaagaatagggctatatctacgcagcaatatctagcagtagaaatcctgaattaataaaagatggaasacttttgcattctagccccatatatgggcttcagatttcttaattggtaaaatgagaactttctaataaatatttaacaaactgataaagtgaattaaggtattaaaactctgtagtgcaaggtatatgatcaataagtgtctcctgaattgagtcagtaaagattgtaactatactggatttgactagagggtattttcttgataaatagctggtttgttctctgtagagaaaagaggattagacattaatagtctcctcgtcctctctgggatgacagtgattctttaaagtaggctctaagataagact

SEQ ID NO: 157149 - DNA, 392 bp, Homo sapiens
ctccaaacccagtcagacaaccaattccagtgggtaataatatctcttgctcagggaaaatcattctcataaacaagattgtattaccttgagggagtcaccacttgaagtaagaaaaaggaaactttgagatggtttagacacaaatcataaaaaacgatgcatgtttgagaaatacatcttaggaacgtaatgccctaaaactgatttattgggaaactttagctctgtggacaaaagaccaacattacctatgaagaaacaacatgtagctttttctgtttaaaacttargacagcaaggtaaattacatcagaagttagggtcatgttgcatttctaagaacatcctaggataagaattccagatgcttttattatcagatggtttat

SEQ ID NO: 157150 - DNA, 348 bp, Homo sapiens
gtggggaaactagggagggggagagagagaaaaaaaaaagaacccactgaactcatccttttacaaggaacccactcctgagataatggcattaatctattcatgacctaatcacctcttaaagatcccacctctgaatgctgttgctttggggattaagtttccaacatatgaaatttaggggacgtatttaaaccttagcactgtstggagcagtggagaacatttcaacactggaaatgaaggaagatgtttaaccccatcaaagatatacattcagtaatgtactttagtaagcagatgccttatttgaaagcagtccttaatgtatgaacatgaaacttacat

SEQ ID NO: 157151 - DNA, 552 bp, Homo sapiens
acacactgtgtgttctccagcatatccgaccaagatggtactatagctgggtgttgtcatatgaatataaggtagaacttcttcacactgatgatttagctcaacacaacaataaggagaacaaatatctcttggaaggaaaaaagttagttcaggctagcaaaaaaaaaaaaaaaatcagagtacaaagcattttaccattaaaagagccttactgaaggaaactgtcgatagatttcctaaattactctcagaagaactgaggacttaaattagacaaagaaycttacgtgattccatctggatccagcccttgaactaatttacttgaaatctaacagcatatgtgatgctcaaaggaagaaaactgaggactactttgagcctttaataaaggcacccttgaatcagttacacacagaaattcactagcatgtgttccacaaattctctgcatcctgaatgctatacttcagatgctttgctaaggtgagctttatgaaggctacaaaaacataacgcctacaaaactattaaaaaacagtttaatga

SEQ ID NO: 157152 - DNA, 551 bp, Homo sapiens
accattctcctgcctcagcttcccgagtagaggggactacaggcgcccgctaccacgcccgactaattttttgtatttttagtagagacggggtttcaccgtgttagccgggacggtctcgatctcctgacctcgtgatccgcccgccttggcctcccaaagtgctgggattacaggcgtatgtccctgttttgactgaccttggcatatgacagagtggtttaagaagcacagactctgggctcaggcagagctgggaaaaaatcttgcctccatgacttaatcagtgggcaaattaccttggaaattatttttttccttcaattattttatattcaggggtacatgtgcaggtttgttacatgagtrtattgtgtaatgctagggtttgggcttctattgaccccatcagccaaatagtgaacatcatccccaacaggtaggttttcaaccctcctcccccttctttcctccccacttctgtagtccagtgtctattgttttcatctttatgtccatatgcacccactctttagttcccacttataagt

SEQ ID NO: 157153 - DNA, 434 bp, Homo sapiens
ggaatggctatctagtatctatcaggaatggctccttttgggaagaggtgtggagcctgcctgccctggsttagagtcccagctccgtctcagtcttcatttactcatccagcagtcactggggatcttctatggaccaggcactgtgctaggtactggagatgcaggtggtgagcaagacaggtgagacagcaaagctgagcaagggataacaggtaagcaaatggcagagtcatgtcaatgttgggtgccaatacgggtaataaatcacatggaagcgagtgatggatacggaagataattttaattgggtggtcatggaaggcttctcagaggaagggacatttgagttgaggcctgagaaggaggcagtcagggaaagggtcctggaaaggatgtgctatgctgagggaaaagtgcacgcaaagaccctg

SEQ ID NO: 157154 - DNA, 408 bp, Homo sapiens
aatggctccttttgggaagaggtgtggagcctgcctgccctgggttagagtcccagctccgtctcagtcttcatttactcatccagcagtcactggggatcttctatggaccaggcactgtgctaggtactggagatgcaggtggtgagcaagacaggtgagacagcaaagctgagcaagggataacaggtaagcaaatggcagagtcatgtcaatgttgggtgccaatacgggtaataaatcacatggaagcgagtgatggatacggaagataattttaattgggtggtcatggaaggcttctcagaggaagggacatttgagttgaggcctgagaaggaggcagtcagggaaagggtcctggaaaggatgtgctatgctgaggraaaagtgcacgcaaagaccctg

SEQ ID NO: 157155 - DNA, 317 bp, Homo sapiens
cttctgggcccttcttctcagtcctgaactccctccctactctcttcctccaaccccatgtatctaggacaagaattccagccaagtcctgggtgagaaggtcttggggattgtggtacagaacaccaaagtagccaacctcacggagcccgtggtgctcacyttccagcaccagctacagccggtgagtgggggccagccatcaagagaacaagcgcccctcggccatgtcaccctttcctctccctccctccagactcatttgtctttataatgaaacgattgcctgatcgagcagtcaggtccaaatggggcgg

SEQ ID NO: 157156 - DNA, 493 bp, Homo sapiens
ctctcactcagctcccacgggactcagaagtgcgccgccatgctgcctagggtactgtccccacatctgtcccaacccagctggaggcctggtctctccttayaacccctgggcccagccctcattgctgggggccaggccttggatcttgagggtctggcacatccttaatcctgtgcccctgcctgggacagaaatgtggctccagttgctctgtctctcgtggtcaccctgagggcactctgcatcctctgtcattttaacctcaggtggcacccagggcgaatggggcccagggcagaccttcagggccagagccctggcggaggagaggccctttgccaggagcacagcagcagctcgcctacctctgagcccaggccccctccctccctcagccccccagtcctccctccatcttccctggggttctcctcctctcccagggcctccttgctccttcgttcacagctgggggtccccgattccaatg

SEQ ID NO: 157157 - DNA, 620 bp, Homo sapiens
cggggcattttctggatggttttttgcccccatcttacagccattaatccactctgtataatgaagctagagggatctttccaaagtgtagaccccaagggagtcacaccttgattaaagccttcagtggtgacccattgtcctcaggacagtttaaattccccaggtgattagagaggccatgcccaaacaagttcctatttaattctccacctcctcttcccccatcccacacattattgattaacatcrgtaataatatgagtaatcatggccccatgcagaggacttactctatgccaggccaactctaagcgtttttcttgcattatatctttctttgaatcctcataaccatcttgtaagatagatatagtaaccccccatttacagattaggaaactgacgtgtgacttgcccagggtcacctagctcataagcaacagagaaaggatgaaagcccacggtcacctctaacgtgagccaagctgctctgggggaacgacatctccagagatgttagccactcctcagggaaacttcctttctgctctgcctctggcctcaggcccaggccccacttgggcctcactctagaaggcacaggaggatgaagaaac

SEQ ID NO: 157158 - DNA, 571 bp, Homo sapiens
caccctccacagattttgatttaattttcctgggtgtggggcctagctgattctaaagtacagccatatttgggaacccctgatccagttaatcctaaattgcaaccagaaccttgaaagaaggccaggcatagtggatcattactgtaatcccagcactttgggaggctgaggcaggaagrtcacaaggctaggagtttgagaccagcctgggcatcatagcgacactcccatctctacaaaaaaacaaaaacaaaaaatgtttaactaccccagtgtggtggtgcttgcctgtggtcccacctactcagaggctgaggcaggaggatcatttgagtgcaggaattaggagactgcagtaagctatgatcacaccactgcactgcagactgggtgacggaggagatgctgtctctaaaagaaacaaacaaaaaaaaagaatcttggaagaccttacccaattgtcacttaagtagctttgtcactttgctatcaggatatttgggatctgtcccccaaagctcagagcagccacagcagacctcaggacaaagtaagtgccccagaagct

SEQ ID NO: 157159 - DNA, 583 bp, Homo sapiens
gatagccaaacttcaccctccacagattttgatttaattttcctgggtgtggggcctagctgattctaaagtacagccatatttgggaacccctgatccagttaatcctaaattgcaaccagaaccttgaaagaaggccaggcatagtggatcattactgtaatcccagcactttgggaggctgaggcaggaaggtcacaaggctaggagtttgagaccagcctgggcatcatagcgacactcccatctctacaaaaaaacaaaaacaaaaaatgtttaactaccccagtgtggtggtgcttgcctgtggtcccacctactcagaggctgaggcaggaggatcatttgagtgcaggaattaggagactgcagtaagctatgatcrcaccactgcactgcagactgggtgacggaggagatgctgtctctaaaagaaacaaacaaaaaaaaagaatcttggaagaccttacccaattgtcacttaagtagctttgtcactttgctatcaggatatttgggatctgtcccccaaagctcagagcagccacagcagacctcaggacaaagtaagtgccccagaagc

SEQ ID NO: 157160 - DNA, 511 bp, Homo sapiens
cacaataactgctatgtactgtggcagtggctgtttgatgccttccctcgtctctccatcctttcttgcttgctgagagcactctgattttgttcagggtggctgtgtgcctgttgctcagcccagcaccacaggtcatctgctggagagtcctttcccagcctgccccacagctaaagacagtcatgtgacttagatttgaccaatggcacccaagaggaagtgcgctttcccagtaarctccttctcttcctacctttaatctggcagccattttgtgaccattctgcaaatacctaagaataaagggccaatatactgaagaaagcagaagagaatatagaaaaagcctgggccatcgttgatatgggtggactctttgccaagctgaaagcgctcttccgcagacctctcattttggaatatgattaaatggctgcattgcttcagcatgttgttggagtcttctattttattctgctacttgcagcccaaagcattcttagccatg

SEQ ID NO: 157161 - DNA, 343 bp, Homo sapiens
atctcacacttcttcaggtgaaaggtctgttgggttaggctgatttcttagctcacagtctcacaagactgaaatcaaggtattggccagcttactctttaactgggggatctcaggaagaatttgcttcaatgcttattcaagctctttgcagaattcagctccatatgactataggactgaggtccctatttacttgattggcctgggattgttagaccatagatgctagctgtgttccctkgctcaaagctaacataactggccttctcatcttcacatctatctgccttaattctcctctgtcttcctcttctttttatttaggactgactccagctag

SEQ ID NO: 157162 - DNA, 506 bp, Homo sapiens
ctctacagaaatgattgcctttgcccaagacaccaccgacaaaaacaacagcaaaaagcattgcaatttgaacttattttttttcaataaaatatgattagagtattctcagagtatagtcaaagcatacccattattagcaaaagggccaactatataygcaaatacattgtggcttctctggtgctaagatccctgggtctgtctctttttatctgctattcagctgtttaatcactgctctcaggaacttaggtgtttttctggtgggaagaggctgtcattaatcatttatccaggttattttttcaatttattctgggcaatataaatgtaaaactggacaacacaagtctgctctttctcacttttataccatgatgcttttaacatctgtcctttccatgaaggcaacctaacataatagttacaagaactagtatggggtcaaattcaagatcggctacttatgacttgaatttggccatgtgatttaacttacttaa

SEQ ID NO: 157163 - DNA, 604 bp, Homo sapiens
ttcactcacctctactcattcatagagacacatttcaaataccacctcctatcagaagcccccataaattatcaccataacattctctccattcctccttgagggaggtaaaatgtaacaattatcagataaaaagatctttaggaacctaaaactcaaaagatagttcattttaggaatgaaaatgggtctgcagcctgtgtgaacccataaatcatggtattataggaccagtgctcttcctgccaacattttccctaactgccagcttgtgggtgccaagcactctcttgcattataggatttaacacaggacctgacttaatatagcaatgttttcttatcatgtctcatcatttcttctttcttctggatacaccaacgttttgtcctccttttttttttttctgttgtaaatgggaaaaagcttgaaaaagactcgatggctatcatttcaatacatagaataaatagttccattcaatttatttcaattgaatagacagatccattcagtctacaatactgaaggatccagattaatcacctcccaaaattgactggaataaayagagataaataaaaaccaaatacagatatgagt

SEQ ID NO: 157164 - DNA, 439 bp, Homo sapiens
ataatagatgtttcacctctgatttctttagattaatcatttatacagagcatacacacacacacacacacacacacaccatttgcaaaattaaccaagggaattcaggattgagatcatggggtcatagcacatctgctttaatcagtccttggcccagagaaattagaaaaaacacatttatatacacattttcttataccataaaaaattcttttaataatttataaaatgggataatgcagaactttactcaatacacayttacatgaataaatgaaggatgaaatcttaaatgttgacttaagtagctttacagctttgtgataatgcaaattttgtcaaacctctatgaggttacatttcttaatcttttaagcagccctatgattatattgcctgaaagatctgtgtgtgtgtgtgtgtgtgtgtgtgtgtg

SEQ ID NO: 157165 - DNA, 439 bp, Homo sapiens
ataatagatgtttcacctctgatttctttagattaatcatttatacagagcatacacacacacacacacacacacacaccatttgcaaaattaaccaagggaattcaggattgagatcatggggtcatagcacatctgctttaatcagtccttggcccagagaaattagaaaaaacacatttatatacacattttcttataccataaaaaattcttttaataatttataaaatgggataatgcagaactttactcaatacacacttacatgawtaaatgaaggatgaaatcttaaatgttgacttaagtagctttacagctttgtgataatgcaaattttgtcaaacctctatgaggttacatttcttaatcttttaagcagccctatgattatattgcctgaaagatctgtgtgtgtgtgtgtgtgtgtgtgtgtgtg

SEQ ID NO: 157166 - DNA, 596 bp, Homo sapiens
tctctttactacagttgattcccatacttacacaggagctacctttgcaaaacacaaatttacgtgttattcccttgttataaacatttgggtgggctccacatttcgtataagatagcatccctaaacagtgatctctttcatgcctagatgtttttgtgtgtgtttcttctttggaatgccttacagtctctaatgaaaagtgacagatgattgatagcatccctcccatcaagatccagctaagtgccacctcctcagtgaggcagtaaacctctctcaagcaaaactattgctgcatcctatcccactctgagaagagttttctttrtatctcttatagcattgccatgtcgtgttccattatttccatctgcataccctttgtttgcaagcatgagggttatattcccagagttactaaatatcttagtagtagctgaatatttaaatcaagcttatgaatcaaactcattaaaatattagaggcttttaccagcaggttccagatgtattgcaaatgtgaatgtctgaaatgctcatggctcgtgattgatggtgttaccaatgttccgtggaacagatgacaaagagtt

SEQ ID NO: 157167 - DNA, 596 bp, Homo sapiens
tctctttactacagttgattcccatacttacacaggagctacctttgcaaaacacaaatttacgtgttattcccttgttataaacatttgggtgggctccacatttcgtataagatagcatccctaaacagtgatctctttcatgcctagatgtttttgtgtgtgtttcttctttggaatgccttacagtctctaatgaaaagtgacagatgattgatagcatccctcccatcaagatccagctaagtgccacctcctcagtgaggcagtaaacctctctcaagcaaaactattgctgcatcctatcccactctgagaagagttttctttgtatctcttatagcattgccatgtcrtgttccattatttccatctgcataccctttgtttgcaagcatgagggttatattcccagagttactaaatatcttagtagtagctgaatatttaaatcaagcttatgaatcaaactcattaaaatattagaggcttttaccagcaggttccagatgtattgcaaatgtgaatgtctgaaatgctcatggctcgtgattgatggtgttaccaatgttccgtggaacagatgacaaagagtt

SEQ ID NO: 157168 - DNA, 596 bp, Homo sapiens
tctctttactacagttgattcccatacttacacaggagctacctttgcaaaacacaaatttacgtgttattcccttgttataaacatttgggtgggctccacatttcgtataagatagcatccctaaacagtgatctctttcatgcctagatgtttttgtgtgtgtttcttctttggaatgccttacagtctctaatgaaaagtgacagatgattgatagcatccctcccatcaagatccagctaagtgccacctcctcagtgaggcagtaaacctctctcaagcaaaactattgctgcatcctatcccactctgagaagagttttctttgtatctcttatagcattgccatgtcgtgttccattatttccatctgcataccctttgtttgcaagcatragggttatattcccagagttactaaatatcttagtagtagctgaatatttaaatcaagcttatgaatcaaactcattaaaatattagaggcttttaccagcaggttccagatgtattgcaaatgtgaatgtctgaaatgctcatggctcgtgattgatggtgttaccaatgttccgtggaacagatgacaaagagtt

SEQ ID NO: 157169 - DNA, 551 bp, Homo sapiens
attactgccaaaactagcttcatttaaatttatgagaaataataaatcaatcattaaaatggaaactaggcatgaataaaatcgagacaagaacagtgacagcattttaagtaaactttgtaacaatcctcaaatagcccaatacttattgtttatgcaattgttttcatacaaccttgtattgagcctccttaattatgccatagttgaattacaattaatatctaaatagaaacataaaacctggtttatcccatgtagcgatctgtaccagcaaacatccttcacaatcctctcattgsaaagtctctggggttgcttaggcattctatttttcttttcctttactttagtaatctggttggcaaagctaattcggagcaggatgtgctgctcctgtaacctgtttacaaatctttaacatctggaaaaacgtagcttctctgttggtctccctgtacccctgactcactgacattaagtgtatttatcactacctaaggtgggagtgaattttacatgctatgttgttgttgttgctgttcgtctgc

SEQ ID NO: 157170 - DNA, 527 bp, Homo sapiens
ttattacaatcaacaatatgtacatacatatatgtacacacacatcttttttaaatgtatggataaatttttagtagtagagttctcatttattaggaaagaccagttcttggtgtaataacttatataaattagtgtgtaagtatgggagcatgtgtaaattaatacaacatttcaattaatcataatatgtaaagagttaatattgatattatgctcaawtgaatgtattatatacctgagatcctattacaacccctctttattatgtgtttacttgaaagctttctaaactattggagaaaagtcttccaaaagacttctggaatcattctttcccaatagtcaaataactcttagcctggaagttgcttttgttcagggtgttttgtaaagtcaccacacaaagagaatgtgtaagtagcaggcgttttccagtgtatgacatgaaagagagcacgtccctaacctattaaaactgcttaaacatgttgaaaagccaataaaagactgtatatttagaataa

SEQ ID NO: 157171 - DNA, 607 bp, Homo sapiens
tgtctgcacaaatgtcaagagtataacatattatatttaaatattagttgtgtgtctgaaatatgagctaggactcaattgtaatatattaagcactatttctatcaatgagttattaattattgaaactcaatgtattctgaaataactttctggatgttttattgtttaaatcatgtattgatgctgatttaatttctcttttccttttaggggtatataattagattggaaaaaaatcatctataacaattacaggtagtccagaacattaacaatacagtaaaaaaagttatactacattgttcctccctattaagaaatggaattgtttgttaaaagaattttaaattattcttttcacaaaagtaacrtttatgtaagaataaactagcagaatcatcatcacctaatcatcaccaccatcgtcactgacaccatttattgagtgctgactttgtgtttgacgttgagaataatgctctaaaaaaatcattccaaactcaaaacaatcttaagaattaactattattttacttatgcatgagaaaactgagatttgaagatgttagaaaaattccagcacacagttaacaggtaagagcta

SEQ ID NO: 157172 - DNA, 559 bp, Homo sapiens
gtctccttggtgtcaggcgccccattgtgacgacagggacgatgatcaaaagtatgctggtggttgaggaagaagaaaaggagtggagttgcagggcagaggcttgacagaatcgcctccagcctggggcagctggggtggcgaggttggggctggttgctccctgggcaataaaccatgctgaagaatgtcattatccccaccttcagctggggtggcgaggttggggctggttgctccctgggcaataaaccatgctgaagaatgtcattatccccaccttcagctgggggcacctgggcatatctgaaaatcttgggaaagtgttcacgttttcagcacttaagaaaaggaagaagtggcagccgcagaggctattccaggcctttcagcagcatctcagcacctgcatcgagtgccacctgaaccacaacctgggcctgcarctttaggctgggacacctgtgagagctcaagcctcaccgccaccagccactttggattcacttctcctctggctgtgcgtgctggagtttgggtctcctagtctctggtctgc

SEQ ID NO: 157173 - DNA, 648 bp, Homo sapiens
taaacaatgtggtagagccttcagccacttggattcttttgagaaacataaaataactcacactgggacaaaactctgtaaatggaaggtatgtggtaaggccttcagatatttcagttatctttgtaaccatgaaaccactcatactggagagaaacactatgaatgtagacaatttggtgaagcctttagttattccagtaactgctctaaacatgraagaactcatactagaggaaaacatgaatgtaatgaatgtgaaatcacattttattccctcagttcctttcaagcacataaaaaactcacattgttaaaaaatgctatgcatgtacaaaatgtgaaaaagccttcacttattccaactcccttcagacacacgaaaatctcatactggagagaaaccctttagatgtaagaagtgtggtcatggtttcagttattcctcttacttttgatatcatgagagaactcacactggagaaaaaccctatgaatgtaaaaaatgtggtaaagctttcggatatagtagttccctatgaaaacatgacagaactcatactggagagaaaccctatgagtgtaaggattataggaaaatgtttagttatgccaatcatcttcgtagccatcaaagaactcacacca

SEQ ID NO: 157174 - DNA, 628 bp, Homo sapiens
ttattctctttgctttgaagtgcagtccctgggtggacctgcaaagcttataatacttttctccttttgactgagtatatgtaactaataaactgttgttaatcttctctgtctagtaatggatgtcatgggcttgactgtcccagtagcactaaggtgctaattcctcccttaacaatgagtaggctactgaaataattgacaacacaaaaagagtggaccaaaaatgactgaggatgtcttttcaactttaactaactgctcttgggttactggttctattatacactgaaagtcacctggttcagagccaccaattggtgagcttttgtttggtctgcacaggagtttatgacctttatcaggagttgctgtctttatccacactaaaggactctcatctgtagattgctttgagtagtataaacattttaacaatattgattattccaatccatcaacataaaatattgtacttttcttgtattgtctttaatttctttcatcagtgttttatagtgtttattgtaaagatcttttacttttttgattaacttcattctggggtrtcaaaatttgttcatgtctactgtaaatggaatttatttttaaatttcatgttcagctt

SEQ ID NO: 157175 - DNA, 582 bp, Homo sapiens
cattaacaacacagttgactgtgtaagcctgtgaccccctgagaccatggacctcaggaccactagggccccagacttcactttggccagcaagggagactggagttctttcactggtgaggaataaacacccttatctggggttaggaaagctcagcaatgattcatcagccatggaggagaggacacaatgaacctgatagataagttggtagcattctggggtatttctaccttaaaaagaattgatcaaggaaatacatagatgcaaggagccctagttcataartgtcagttatgatcatggaataaagttctgctgtaaatttaaagctgcatcacagttctctcttcctaaataagaaaccagcaggaaaagaaattttgaagtcagagacaaggatcctgggaggattcaaatctaaggtcaaggattgatcattggttcttagaggtagagtgaggatatgatgtcctgccaccctcagtagatttgtaaatgctattccttggaccttgtccctcctatattgcttgttattatcttttcacatttttctccatgtagtcctgattcagttt

SEQ ID NO: 157176 - DNA, 548 bp, Homo sapiens
gagatgggattttgggggcagtcataccaaggatgtgtccttgggaaggccagaaacactaccccagagggagcaacataagccaaggtgggacccagaagctgactttgaggtatacacctaagagtagaattgttggattataaagtttatgtatgttcatctttaggagataccaccaaagtgtttgtgaaagtgttcataacagtttacacacagagaagaatatgatggctccagttgctctayagtcttttcaacacctgatgtttgagggaaggtgcccaggtagtggtggccagtccctgagatgtggagcctccactggctaacaagtaaagaattctaaccctgggcaggtcagccttcaaggccccttctctgggtcctgccactgcagaaatgctttaatgttgtgacaaagtgaatagtgtggcagatatcagacctcttcaactacttccaggaggctctgtggctgtgggaggcacaccagagcaagctgttgctgaagaagctggagactcaaaaaagaacagagaagcatc

SEQ ID NO: 157177 - DNA, 582 bp, Homo sapiens
cttgggtcttatcagagttcattatacaggtaaaactttgcctcctatgggcacactatccagcaattaggattatcactctcacacatgcacaaagcccactggtgaggttctgaatctcacatgtgcaaacagtccacggttggaattgggactgttctatgtggatctggcaacagtttggaaggtgactcatttctggacccaactcatagtcatgtgaatgtctctcatgcctggtcccaggtagtagaagagacgttgattcttgtatctaggcttactgcaacagataagatcctgggctttccacttttacagaygtctcagagaattacaacactcatgcatattgaataataccctaaggtggtacagagagtgtgaaaagagtgcccagctcaaaattttgattgtgactcttatatgcacacacagcccacagttaggattaaatgtgaagagaacccactcaggaggtcctggatctcacttacagaaatagtttacagttagaattgtgactatcatatctggatccatccacaaatgggatggtggctcatttctgaacccaactca

SEQ ID NO: 157178 - DNA, 590 bp, Homo sapiens
atatcacaatggtatgatatcataatgtgcattatgatatcacaatatattatgatatcataattcatatactattatracatcacaatatattataattcatgtaattatatcataataacataaaattttgttaggtaattttacaagaaaattgagttaaattttgtaacaacattgatctataaacttaataaaacctaagaatatttcctgcttttgtataaacgactgctttatgatattataacattgacagagcaggagcaccgtcacctctgacaaacactgccactttaagttctagctccctttctagcctcatacatttcaaaaaaatcacttcttttctaactacaagcagccagaaagagcggacagtaaaacacagataagacagcttaggcacagagagaggtgggggaaaagtcttttgggtaactgccaaacttcagcctcatacaatgggccccaggaaaacagtgggccttaataagcacatttctgtcccttcaggtgcactaagatagggaagctaaaagcagacttgggaggtatgtctgcagctgcaaaaagatgcgtgggaaaag

SEQ ID NO: 157179 - DNA, 590 bp, Homo sapiens
ttaatgttgttacacaatttaactcaattttcttataaaattaactgacaaaattttacgttattatatcataaaaataaataaatatgatatcacatatgtgttatgacatcacaatatattataataccataatttgtatgtatcatgacatcacaatgtacatgacaccataatttgtatgtatcatgacatcacaatattttatgatatcataatttgtatgtattatgacagcacaatatattttgatatcaattcatatgtattatgacatcacaatatattaaggtatcacaattcatatgtattactatgatattataataacattaaaattttrttaggtaatttataagaaaattgtgttaaattttataacaacattaacttataaacttaatagaatctaagaatattatctgctcttgtgtaaatgactgcttaagatattataacatatattcaaaatttgtttatatatcaaataaattatatataatattatagtatcaatatataatgatattataagttccatttaaatcctatttaaattcagacaattttattaggcagtgtctgtctgt

SEQ ID NO: 157180 - DNA, 573 bp, Homo sapiens
aactgcttttctactttgagtttctatgaatgaaattacataagtacctcatatgggtggaatcatagaatatagtaaagaactcatgaggaagaataatacacactgtgtaacatgtttattaatttaaataaacacaagagaccagtagtacatggtgattatagagaaagacagataaaaaagaaaaagcagttagaagtgtgtgttaaatttatgactatggcgtctcaagttccagaacagtgaggcccctgtcccagacacagggctgatcacggtgaagctgggagctcagtgtagctgtatgactccaaagcccatgctcagtccaaatgtcactgagccctgaggaactctgcccctgccagcccaggcactcagtggccctgagattcaccatggcctgttcttggtcttgagtgtgttgctggcctactgggatgggsgcttagctgacagaacaaataggagcttcaggaaagagtggcagttgtgaggccaccaggagccacacctcaggcttcccactgcctgcccaggggtcaccatgcagcagggcctaatgttgac

SEQ ID NO: 157181 - DNA, 490 bp, Homo sapiens
catctcacgaatttgaaaattgtgtacaagagactgtatacaagagttatagagactctggattctgttgtgtccctttgaagagtgttgatttttaaagagagtgctaattggcctggattataacttcaattcttgtctctcctaaggagggcacaggggacatcctcattcacttcttatacacacatatctcatatatgtattatatatagaagtgtttataatgatatatactattttatctaggattcatcatttttctctstgagagtgttagtttaactagctaattcccattagtgaaagcaagaatgtcagttttgatttttggatttagtataaatgaaattatatagtttggatacttttacatcaatttttaaatgcaagattatatttgtgatattcatttatgctgttgcatgtatctacagtctgttcatttaaaaattccttttttacattgtggtaaaatatacataaaatt

SEQ ID NO: 157182 - DNA, 555 bp, Homo sapiens
ggttgtctcttcaatgattgatggagtttattgtttcctttgttgtgtagaaattkctgattttgttgtaatctcatttgtctatttttgcttttattgcctgcacttttgggttcaaacctaaaaaatcattgctcagaccaatttcatgtattttttcccctgtttccttctagtattcttatagcttgaagtctaatgtttatttaagtctttaatatactttgagttgatttttaaaaaattttgagtatatgtatgagataaaagtccaactttattccttttatattgatatccagttttctcaacaccatttacttgatatgaagttaatcttattaaatttaagacttgttttctgtcctaacatgatctttcctggaaactttttttttgtctgctcttgagaagaatgtgtagtcttttgctgttggaatgagtgttctgtttatgtctgtgaggcacttttgatctaaaatattcttctagtctaatgtttccctattaatttttgtctggataatctgtctgttatcaaaagtggtaaatcga

SEQ ID NO: 157183 - DNA, 555 bp, Homo sapiens
ggttgtctcttcaatgattgatggagtttattgtttcctttgttgtgtagaaattgctgattttgttgtaatctcatttgtctatttttgcttttattgcctgcacttttgggttcaaacctaaaaaatcattgctcagaccaatttcatgtattttttcccctgtttccttctagtattcttatagcttgaagtctaatgtttatttaagtctttaatatactttgagttgatttttaaaaaattttgagtatatgtatgagataaaagtccaactttattccttttatattgatatccagttttctcaacaccatttacttgatatgaagttaatcttattaaatttaagacttgttttctgtcctaacatgatctttcctggaaactttttttttgtctgctcttgagaagaatgtgtagtcttttgctgttggaatgagtgttctgtttatgtctgtgaggcacttttgatctaaaatattcttctagtctaatgtttccctattaatttttgtctggataatctgtcygttatcaaaagtggtaaatcga

SEQ ID NO: 157184 - DNA, 607 bp, Homo sapiens
tcatttttttgcatttaatcttttttatgactcaaataaatatattcaaaactacaaacctttttactttgggctgtagctttgcataaagagctttaaacaaagcrcaatgtttgcacaatgctagttagttaagtaacacatacaaaaattatctctactttctgtgcaattttcccttaacagttgaataagttacaactttatttagtctctatgtcagcaaaatatcaggacatatgtaaattatatatacttgcttaggcagttttaattaaagctattagaaaaaataagataatttagattacatttgggaatgcataattatcttttaattcaataataaattcttaattttttttttttagatggagtctcgcactgtcacccaggctgaagtgcaatggcacgatctcagctcactgcaacttccacttcccagattcaagcgactctcctgcctcagctcctgagtagcaggaccaggtggatcacctgaggtcaggagattgagaccagcctggccaacatggcgaaatcctgtgtctaccaaaaatataaaaaattaaaaaattcttaatgctttaatgagggaatgaaggat

SEQ ID NO: 157185 - DNA, 587 bp, Homo sapiens
ttattaattgtgtattcccacttccccagaaatatccttccctcgatacttcatctttctatctttctgctccaatctggactgttttgtcccaagcactgttacaaaasgatcctcaaactctcctatgatgtatatgttgcttcttaaatatcatatattttttctgtttttgttagttcttcatttttcaagagtatttcccaagggactaccaggaaattaacagaacaaaaagcttacagtttttctgagtacttgctaactgacaatatctcaaatttaattttcctcttggttgacatcttgattgtgtgtatcattctaggttaaattcattttattccagaattttaaaagcagtgcttccttatccttcatcatgtattgctgcctttaagaaatccaatatcattctgattttttatgttgttattgttttaatatgtgtttctttctccctctttagaagctttttgtatcttctttttattttgaagttccagtatcttcttttggtatgattggtatggtttggtgtgggcctttctcatttgtagtgctgaaaaaatgcttggacactttaa

SEQ ID NO: 157186 - DNA, 603 bp, Homo sapiens
ctgtcaattttggattaattcaagggttaattatccattttatgatttttccattcctcctccctcctctctctttctgtctgcccgtttgccatcttcctatttgatggcacgtgagccatggcatagaaagcagaactaatgttagatgaratgcaacatgtctctattaaatccaaaatgcctctttgaaaaaggtttaccagtgctataattatttttttaatttggatctgtattagcctgaagtcattagttctatttcatatccaagtacatatcagctaaaagtaccctataagaagatctgttattctaataatgacaataaataagttgaatttggtttcaagaatagagatgcatcttgatatactgtagcactataaagtaaagcaagctattcagaaccatttaaaattatacattgcaattaaatcataagacaatgattacagtaaaccttatcccttagtcatgtgttgggctttcaaaaaattattttagaaaatatttttaaagtccgtatgtgtaggagaaaatatagttttgtagcatgggacaaataaaatacagatgttctttctacaacagaaagaacat

SEQ ID NO: 157187 - DNA, 603 bp, Homo sapiens
ctgtcaattttggattaattcaagggttaattatccattttatgatttttccattcctcctccctcctctctctttctgtctgcccgtttgccatcttcctatttgatggcacgtgagccatggcatagaaagcagaactaatgttagatgaaatgcaacatgtctctattaaatccaaaatgcctctttgaaaaaggtttaccagtgytataattatttttttaatttggatctgtattagcctgaagtcattagttctatttcatatccaagtacatatcagctaaaagtaccctataagaagatctgttattctaataatgacaataaataagttgaatttggtttcaagaatagagatgcatcttgatatactgtagcactataaagtaaagcaagctattcagaaccatttaaaattatacattgcaattaaatcataagacaatgattacagtaaaccttatcccttagtcatgtgttgggctttcaaaaaattattttagaaaatatttttaaagtccgtatgtgtaggagaaaatatagttttgtagcatgggacaaataaaatacagatgttctttctacaacagaaagaacat

SEQ ID NO: 157188 - DNA, 592 bp, Homo sapiens
aaggaaagccctaaagttcctcaatcaatgaaaaatatgtaaatcaaagtgcatgatctattttgaagggtttttgcttggatctgaaaaacatcctgctgytttttttaatgagaagagaattgtgtgtttttttcttctcctttttaaaatggaggatttaactctacagggttccctgtagaaaatgatatattttatgaactctgtataattccatgtatgtgctcagctggaataggtttaatttctattgttgctgtgtaggaggtaggacttgaagagtgagaaatgaagcagaaggcagtttattgtgaaattgatgcttagtagtgtagtgattcagagtgtagcatgtgtgagaatcactgacttactgacccataatatatttattggcagaccttcatgctacttgcacacaaatcaaggagagaagatggtgatcttactctatattagaaaaaaataatattaaaggcaaaaaatgcctaattggaatttgggatcctttgagaattatgtgtatataacattagaaaaagaaacatatacacacacatatacacataaataaattttgactatcatt

SEQ ID NO: 157189 - DNA, 592 bp, Homo sapiens
aaggaaagccctaaagttcctcaatcaatgaaaaatatgtaaatcaaagtgcatgatctattttgaagggtttttgcttggatctgaaaaacatcctgctgctttttttaatgagaagagaattgtgtgtttttttcttctcctttttaaaatggaggatttaactctacagggttccctgtagaaaatgatatattttatgaactctgtataattccatgtatgtgctcagctggaataggtttaatttctattgttgctgtgtaggaggtaggacttgaagagtgagaaatgaagcagaaggcagtttattgtgaaattgatgcttagtagtgtagtgattcagagtgtagcatgtgtgagaatcactgacttactgacccataatatatttattggcagaccttcatgctacttgcacacaaatcaaggagagaagatggtgatcttactctatattagaaaaaaataatattaaaggcaaaaaatgcytaattggaatttgggatcctttgagaattatgtgtatataacattagaaaaagaaacatatacacacacatatacacataaataaattttgactatcatt

SEQ ID NO: 157190 - DNA, 404 bp, Homo sapiens
gggacaatattgaagctttcaattcttttatcctttcttgtagacctgtaaagaatattacaaagagtgasggatttgcaatttaccaggaaagatctcagccaagtaacaaaaacaagttattctcttgtgacttgaagaaacaaagtgtattatattcactagtcctttctccctatgtattgcttttacaggattatattatttaagataaagtggtattattgtaaagtattctgataagccctttctctggagtctactccctgagaaagaatacatatcttattgtagtttcccagcatgttctttaagatataagacagatataaatctaaactcaaaagaaatgttaactaaactctcaatcagtacttatcctgtcaaatatcttgctagaattc

SEQ ID NO: 157191 - DNA, 591 bp, Homo sapiens
ttagcaacttcacttttaacgctactatgaaatgaataaaatagtgtgcttccatatttaatattatagttggaaaataatttacaataaatggaagctataccagcagtgtccacagttaccattatcacttcatagaagagatttttcccatcaaaattttagcatgctttaccaaatatttattttgtagtgagtatggaatgactaatgacaaaaagattttgaaaatgtcttattctttctctcatacaatamgatgttctatacaaaaaggaaagtaaaaaatttgagaagacgacaatgtgaaatacctgatagacctcaatcatctgtttaagagcatgtttagtgcattttgtgcagctgtaaactaagggggagtcaattgagatgcgtgaggagaaggtggtcaggagaatggtgaaacaaaaccaggagaaccacacatggaagactcaatataattgccattctgccacttctttgcttttgtaattgtgcatattgtttatcttctctcaatttattttatttaattaataaatgcaacaaaatattttttgtctcatgaggttttgtacatagttg

SEQ ID NO: 157192 - DNA, 630 bp, Homo sapiens
taacactttttaatctcttgatttattgctaaggacttagtactgttygtgttcccctacaattcatatgtttaatccctcatccccagtgtgatggtatttggagatggagtcttttattagtgtccttctagagatcccagagattgcatctcttcctctgtgtctctctgtttaccacggaggtggttaaccaataaaataaatttttagacaaaatgcacaagaaaataaaaacaaataatttacactgagatgaacaaaagtttaataacatataaaaaggaaagtttatacaatttaggagatggctttctgcaaaccagaaagagagccctcaccgggaaccaattacccagcaccctcatcttggactttccagcctccaaaattgtgagtaataagtgtttgttttctaagccacctaatttacggtaatttgttattgtagccccagatcactaagacattcattaatttaaataattttcctgatataaccaattgtttaatttgttttgtttataaatcattattgaaatatcagctctaaaattatttataaatctacagattttcttttaacttaattcagcacttaaaaatatatatacagtcaacaccactttc

SEQ ID NO: 157193 - DNA, 630 bp, Homo sapiens
taacactttttaatctcttgatttattgctaaggacttagtactgtttgtgttcccctacaattcatatgtttaatccctcatccccagtgtgatggtatttggagatggagtcttttattagtgtccttctagagatcccagagattgcatctcttcctctgtgtctctctgtttaccacggaggtggttaaccaataaaataaatttttagacaaaatgcacaagaaaataaaaacaaataatttacactgagatgaacaaaagtttaataacatataaaaaggaaagtttatacaatttaggagatggctttctgcaaaccagaaagagagccctcaccgggaaccaattacccagcaccctcatcttggactttcyagcctccaaaattgtgagtaataagtgtttgttttctaagccacctaatttacggtaatttgttattgtagccccagatcactaagacattcattaatttaaataattttcctgatataaccaattgtttaatttgttttgtttataaatcattattgaaatatcagctctaaaattatttataaatctacagattttcttttaacttaattcagcacttaaaaatatatatacagtcaacaccactttc

SEQ ID NO: 157194 - DNA, 630 bp, Homo sapiens
taacactttttaatctcttgatttattgctaaggacttagtactgtttgtgttcccctacaattcatatgtttaatccctcatccccagtgtgatggtatttggagatggagtcttttattagtgtccttctagagatcccagagattgcatctcttcctctgtgtctctctgtttaccacggaggtggttaaccaataaaataaatttttagacaaaatgcacaagaaaataaaaacaaataatttacactgagatgaacaaaagtttaataacatataaaaaggaaagtttatacaatttaggagatggctttctgcaaaccagaaagagagccctcaccgggaaccaattacccagcaccctcatcttggactttccagcctccaaaattgtgagtaataagtgtttgttttctaagccacctaatttacggtaatttgttattgtagccccagatcactaagacattcattaatttaaataattttcctgatataamcaattgtttaatttgttttgtttataaatcattattgaaatatcagctctaaaattatttataaatctacagattttcttttaacttaattcagcacttaaaaatatatatacagtcaacaccactttc

SEQ ID NO: 157195 - DNA, 440 bp, Homo sapiens
agatcacgccgctgcactttagcctgagggacagaatgagactgtttctcaaaaaaaaaaaaaaaaaaaaaaaaaagtaaagaaaagaaagagaataagggtaagagacraacatgatgaacatttgcatactatttcctgttaatatttcacctgagtatgagagtcagagaccattaagaccactaaggaactcttctaaaggcaataaacttgggaatacatacagttggcaccttgattccaggtgaggccaggatatgcaagaagtatgtagcaaatgctccctaaatatgatggtagagcaacctatattaaaatggtggtataatgtgaaaacatggagaatagtggaggtcagttatgagaaaactcatcattttcaagttatgctctagttgtatcaggcttcagagtgccataatagaacatccagaatt

SEQ ID NO: 157196 - DNA, 440 bp, Homo sapiens
agatcacgccgctgcactttagcctgagggacagaatgagactgtttctcaaaaaaaaaaaaaaaaaaaaaaaaaagtaaagaaaagaaagagaataagggtaagagacaaacatgatgaacatttgcatactatttcctgttaatatttcacctgagtatgagagtcagagaccattaagaccactaaggaactcttctaaaggcaataaacttgrgaatacatacagttggcaccttgattccaggtgaggccaggatatgcaagaagtatgtagcaaatgctccctaaatatgatggtagagcaacctatattaaaatggtggtataatgtgaaaacatggagaatagtggaggtcagttatgagaaaactcatcattttcaagttatgctctagttgtatcaggcttcagagtgccataatagaacatccagaatt

SEQ ID NO: 157197 - DNA, 440 bp, Homo sapiens
agatcacgccgctgcactttagcctgagggacagaatgagactgtttctcaaaaaaaaaaaaaaaaaaaaaaaaaagtaaagaaaagaaagagaataagggtaagagacaaacatgatgaacatttgcatactatttcctgttaatatttcacctgagtatgagagtcagagaccattaagaccactaaggaactcttctaaaggcaataaacttgggaatacatacagttggcaccttgattccaggtgaggccaggatatgcaasaagtatgtagcaaatgctccctaaatatgatggtagagcaacctatattaaaatggtggtataatgtgaaaacatggagaatagtggaggtcagttatgagaaaactcatcattttcaagttatgctctagttgtatcaggcttcagagtgccataatagaacatccagaatt

SEQ ID NO: 157198 - DNA, 600 bp, Homo sapiens
atgatagaattttaatatttaaaaagaagatgatttggctgagttggcacaagtaagggactcataattatttctgaaattatatctcctccattgttattgtcaagataacttttctcttacaagattatgcttagtgaaatttattttcatttttcttactttcaaaaaatgttgtcaaatgtmtgtctgtctccacattaagtatatcataatactgatggtataaaacaaacacacacaaaactgataatctacatagcaactttacacataatttcataataaacttttcaaaataaagtataagcaaatcatatttaatttaaatgatatctaatttcattcatagtatagtgagtagttatattacagtaaaaaagatataatttcactattcagttatatatttctgtccctgagacattcaattatgagttatttgagaacatttcattcacagaggttggcctctaagactaaggaattggtaaatactgatgaatattttctccattaagatggagagccatcaaggcaaaagtttgttttattttactattctttagttttccacagaacgtatatttgagaaatatt

SEQ ID NO: 157199 - DNA, 600 bp, Homo sapiens
atgatagaattttaatatttaaaaagaagatgatttggctgagttggcacaagtaagggactcataattatttctgaaattatatctcctccattgttattgtcaagataacttttctcttacaagattatgcttagtgaaatttattttcatttttcttactttcaaaaaatgttgtcaaatgtakgtctgtctccacattaagtatatcataatactgatggtataaaacaaacacacacaaaactgataatctacatagcaactttacacataatttcataataaacttttcaaaataaagtataagcaaatcatatttaatttaaatgatatctaatttcattcatagtatagtgagtagttatattacagtaaaaaagatataatttcactattcagttatatatttctgtccctgagacattcaattatgagttatttgagaacatttcattcacagaggttggcctctaagactaaggaattggtaaatactgatgaatattttctccattaagatggagagccatcaaggcaaaagtttgttttattttactattctttagttttccacagaacgtatatttgagaaatatt

SEQ ID NO: 157200 - DNA, 600 bp, Homo sapiens
atgatagaattttaatatttaaaaagaagatgatttggctgagttggcacaagtaagggactcataattatttctgaaattatatctcctccattgttattgtcaagataacttttctcttacaagattatgcttagtgaaatttattttcatttttcttactttcaaaaaatgttgtcaaatgtatgtctgtctccacattaagtatatcataatactgatggtatraaacaaacacacacaaaactgataatctacatagcaactttacacataatttcataataaacttttcaaaataaagtataagcaaatcatatttaatttaaatgatatctaatttcattcatagtatagtgagtagttatattacagtaaaaaagatataatttcactattcagttatatatttctgtccctgagacattcaattatgagttatttgagaacatttcattcacagaggttggcctctaagactaaggaattggtaaatactgatgaatattttctccattaagatggagagccatcaaggcaaaagtttgttttattttactattctttagttttccacagaacgtatatttgagaaatatt

SEQ ID NO: 157201 - DNA, 580 bp, Homo sapiens
acatgaaaaatatagagaaacaaatcttcaattcaaaagacagaaaaaaataagattctaatacaatrttaaaatatgtcaaatacaatatatgagactgcaatttggtttctcatttgaaaactagatatggaaaaatgtgaaagagaattataaggcttctataagacatatactgcctctcactccaaaatcctagaaaaatatagatgatgggaagggacaaaagaattttttttgttttgctatacatcctgtgttatataaagacagactgaataggtgacatgggatgtggaataaagtgtcttggcggtagaactagtgcagcttaataggcaaaatagtgggtatcttgtttgtaaaggcagtaaagaaatctgtgtcttctatgagtcagaaaagaaaaataatcatgaataaaatcagaaagtataatagagcttttcaaagtaacaaacagaaataaatgaatagctatttcaataacaaatgaaaatgatgaagagtggcaacaattactaaaatagttaaaaaatgcaacattagaacaaataaatataatttttaaaattaccca

SEQ ID NO: 157202 - DNA, 580 bp, Homo sapiens
acatgaaaaatatagagaaacaaatcttcaattcaaaagacagaaaaaaataagattctaatacaatgttaaaatatgtcaaatacaatatatgagactgcaatttggtttctcatttgaaaactagatatggaaaaatgtgaaagagaattataaggcttctataagacatatactgcctctcactccaaaatcctagaaaaatatagatgatgggaagggacaaaagaattttttttgttttgctatacatcctgtgttatataaagacagactgaataggtgacatgggatgtggrataaagtgtcttggcggtagaactagtgcagcttaataggcaaaatagtgggtatcttgtttgtaaaggcagtaaagaaatctgtgtcttctatgagtcagaaaagaaaaataatcatgaataaaatcagaaagtataatagagcttttcaaagtaacaaacagaaataaatgaatagctatttcaataacaaatgaaaatgatgaagagtggcaacaattactaaaatagttaaaaaatgcaacattagaacaaataaatataatttttaaaattaccca

SEQ ID NO: 157203 - DNA, 580 bp, Homo sapiens
acatgaaaaatatagagaaacaaatcttcaattcaaaagacagaaaaaaataagattctaatacaatgttaaaatatgtcaaatacaatatatgagactgcaatttggtttctcatttgaaaactagatatggaaaaatgtgaaagagaattataaggcttctataagacatatactgcctctcactccaaaatcctagaaaaatatagatgatgggaagggacaaaagaattttttttgttttgctatacatcctgtgttatataaagacagactgaataggtgacatgggatgtggaataaagtgtcttggcggtagaactagtgcagcttaataggcaaaatagtgggtatcttgtttgtaaaggcagtaaagaaatctgtgtcttctatgagtcagaaaagaaaaataatcatgaataaaatcagaaagtataatagagcttttcaaagtaacaaacagaaataaatgaatagctatttcaataacaaatgaaaatgatgaagagtggcaacaattactaaaatagttaaaaaatgcaacattaraacaaataaatataatttttaaaattaccca

SEQ ID NO: 157204 - DNA, 647 bp, Homo sapiens
ggtgtctacccgcctccccctaaattcatgtgtggaaatccaatccctctgaagagctaattaagctaaaatggggtcattaggttagggccctcctccaatatgactggggtccttataagaagaggacaataggatgtagacacacgcagagggaagactgtgtgaaggcacatggaaaagatggtcatcttgcaagccaaggatagaggcttcygaaagaaccacctccactgacaacttgatctgggatttatgccctcctgagctacacagtctgtggtactttgttatggcaaccccacacattatcaatcctgtggccatgcctctcctcaaccttcatgccaaatggtaacatctgtagtagcatccacattactggttcttactaattttctcacaaagctaacccatttttacaaagaaaagctgaaaatggaaagaaagaagaaattaaaatgatctcactcataattatttttgctaatctcttgacaataccaccaacaatagtcattgcacatctaaatgatgaaaagcaatagacttaaaatgcttgtcttcgtgcaatgcagcatgatgaactagtggtttagtatattcacttcgatgtgaccatgtttctaaagtcccatgacacctgc

SEQ ID NO: 157205 - DNA, 556 bp, Homo sapiens
ggattataggatttttctgaaggaagtgtgaaaattaggaagatggaattattttgtagagacagaagtgtcaacgtttatgctgtattatgggaagtatgctgtgtgacagactgtcacatcctaacccttggcattctgtggcaaatatggctcaaataatagagaaacaagaaacctaaactctcacactcactgaactccktgtatatgccttggggctcaatggaattcagaaaggaagggtgttctttccagttccagccaggtgtctaattgtgggaaatgctagattgtagattctaaaaattcttcattcttcaggtgcgaagagtatatcaaaaactataggtaatggatgataaggaacagtattttcaaaaagaacaagatcaaatatcaatgccaaatatccatgcggaaattttatttttctcagaaattcccatcacaagctccctcaattgcctcaaatgtacaaaaattatgattctaaagcaatgttaactgcgtcatggaccaatgtgtatatattagctcagtctggtaatcagta

SEQ ID NO: 157206 - DNA, 617 bp, Homo sapiens
acaacacagtttacttacagtatatttatgttgactcctttatgggacaacagaagattctttcattgttactgttactgctctaacagggtcacacccaatgatcacacagcaaaaggagccaattatgtgcaatacttcatatagaaattttacattttaccttcaactacaacaataagagaatgaagccataggttttggtgttttctaattcttcacttcctatcgaaattcaccaacatttataatgaacagttcttccattatcaagacactttcctctctgattctaaaatcaaggattgttaktttagacccatacctttattttaaaagacactgtactgggtatacataattatgaaatatgtctattaaataggtccctgctctaaattcactgattttcttaaacaaaaaagtaaacttttatctagcatgtcaaagtcattcataaagtagaaagccttttgtaataaatacttcccatcaacattattagagggtgacattaggaacaacaaagtattccattcagaatattctaatcattccagtatttgagagagtgaatgtttttcaatcatctaagattttattcttcaggtatttca

SEQ ID NO: 157207 - DNA, 666 bp, Homo sapiens
gcctattttataataaaatgttcagaatggctgtatggatacttgaagtatggtttctactgaatgcctattgcttctgaatcattgcaaagtaaaaaaaaatcataagtagaaccttcttaaattggggattgtctgtatattttaccaaaatwaaaaaattaggtttaaagaataaaaagagagaccaggcaagaaatgatggtagcttggcctaggttagtaaaagcggatagatatagaatgtattttggaggtaggacctggaggacttttggatagatcaagggaggcaaagaggaggaaaagtgagaagaaaacagcactcaagagtgacttctaggtttttaacttgagcatgtggttagatggtggttccattcacagagctgaggaagacctggggcttgtgatggtggtgaagaacaagtggaggagaaatctagagttctggatatagtaagtttgagatgcctactgccatacaaccaaatgcaggtgtcaaactgatagtcaaagagtaagtctggaggtcagagggaagggggactgtcctggagatatgatcctggaagtcattcatatataaagacctaagaagagaatgtagtgaaagaagttggccttgccattatacttggcttgaaagctcagaatatattatat

SEQ ID NO: 157208 - DNA, 460 bp, Homo sapiens
agtgtaaaagaggatatggggaagaaaatgacatttttcaaatttggattatttatttatgttcctctttgttgtataaatggatttgggggtgccttgccggggtagaaacattacaaaatgtttgtttaaaaaatgaaataaatgaggaaatgaaggtgaagagaagtaagttgaagtcaagattaaaattagcactcaaaatgcatgctgtatgatgtatatgattacttgaagaaagactgatttggcttgacgtttctgaagggcgagagcaaagagagaagttgtctcagtgcaagatccacattgtcctgaggataaaaataaagacccagctttcyctggcactgagagtggagaaaatttctcctgtaagacaagggccaatgtttactacccatcaaggtgaaagagctaccaagacaagcagacagatgaaaatatgaatccagaattc

SEQ ID NO: 157209 - DNA, 622 bp, Homo sapiens
gcactataagcgggatgggtaggtaaagtgagacgtagaagcatttcgaaccgagggtaaataacccaagtggaatagctgttgaggatttaggarctacaatcccccctccctttccttttgcagctgcgtgaaactgccaagcctgtcttgcaagcacagagtggctctgctgtctagtccagagctaacatcagagcgccccctgctggcaattagagcagaacgctgcgggtcagccccctgcgaagcgaatcttgtttttctgcgcaccccacctttcactgactccttccaccgcccccacgtccattctccagcaaaaccccgcggcaggggaataccttgtcaaggactgaacatttaaatgaataaatgataataataataataataaaatgcgaaggaacccccccaccttcgcttggcctctggggaataaactatcaaaagccttggcagaggacacctttcctttttctacatctctgtattctctgcgttttcgctacagtttgtttttcctgcagaactgcagattccgagtccaaggaaatgtttttaatagatgctgtagacgttttaaaaatggatatctgatggggaaagaggccaatacaaa

SEQ ID NO: 157210 - DNA, 589 bp, Homo sapiens
ttacagcaaccatttattctctgctatatgctagatattttacttgacttatttttaatctttactgtaacacatctaggcaaaatattaatatacctattttacaaaaaaggaaacacactcagcaatttttagggacccaggagccagaattccatttcttccaatttccttcaatgtgttcacgatgtatcaagtaactcgttcatttagtcaagcaaccattttagctgatttagtcacygattcaactaataacatttactcattgtcttagatttgggaggcatagcttgatagctgcaaggattatgttaaatgtcagtgaaataatggaatgtggattggctcatttcatcttaaagatcctgctcacagggcaccaaacattaaactagttttaataattaaattgatagacatttcctggagcaagaagctgtggctacattctgtaagtttgttgggtaatacaaaacattgtgtgggtgtgcaaaaatcaagcacacactgctaatgaaatcattatgatcaaggctgaagaggcttcacaaaagaaaaacaaagcgtcgttgagttactgatctgt

SEQ ID NO: 157211 - DNA, 506 bp, Homo sapiens
tttccattttattaagaaactctggggccgggtgtggtggttcacgcctgtaaccaagtcgggtagatcgcctgagctcaggagtttgagaccagcccaggcaacatggcaaaaacccatttytacaaaaaatccaaaaattagccaggtatggtggcgcacgctgtagtcccaggtactcaggaggctgaggtgggaggatggcctgagtccaagaggcggaggttgcagtgagctgagatggcaccactgcactccagcctgggtgacagagctggaccttgtctcacaaaaaaaaaaaaaaaaaaaaggaaattctgggtgttgccctccccattagggtgtttctttgacatcgtccagaacattatgtgtatttcagatttttagattattttatagccttcaatcataagagtggcctcagtcaaaatgcaatcattgtctctccaatgaaaattttctagtcccaaatcccagtggtcacccctgggtggcactaacag

SEQ ID NO: 157212 - DNA, 506 bp, Homo sapiens
tttccattttattaagaaactctggggccgggtgtggtggttcacgcctgtaaccaagtcgggtagatcgcctgagctcaggagtttgagaccagcccaggcaacatggcaaaaacccatttctacaaaaaatccaaaaattagccaggtatggtggcgcacgctgtagtcccaggtactcaggaggctgaggtgggaggatggcctgagtccaagaggcggaggttgcagtgagytgagatggcaccactgcactccagcctgggtgacagagctggaccttgtctcacaaaaaaaaaaaaaaaaaaaaggaaattctgggtgttgccctccccattagggtgtttctttgacatcgtccagaacattatgtgtatttcagatttttagattattttatagccttcaatcataagagtggcctcagtcaaaatgcaatcattgtctctccaatgaaaattttctagtcccaaatcccagtggtcacccctgggtggcactaacag

SEQ ID NO: 157213 - DNA, 646 bp, Homo sapiens
atctggcaggctgatgtcatgtgtctggattttgctgatgatgacagcaggatagtagagagtagacagcaggatagtagactcacaggtacagcatggctaactgagtggccagcactagctgcatggtggatatcctacttggccttagcagatgtattagtttgttctcatgctgctgtgaagaaatacccaagactgggtaatttataaagaaaagaggtttaattgactcacagttctgcatggctagggaggcctcaggaaacttacaattatggcagaaggcaactcttcacaaggtggcaggagagagaatgattgccaagtgaagggggaagcccctaatgaaaccatcagatcttgtgagaactcgctcactatcacaagaacagcatgggggaaaccacacccgcaattcaattatctccccctggtctcgcctttgacacttggagattattacgatttaaggtgagatttgggtggggacacagagccaaagcatatcagtagaccaagaaggaaccatctgaaattgacaaagaatccattgctttacaaagtctcctcttttagggttctgctttatttttttacacaaaagtaacaaacwctctacactattgacaccttttactcagag

SEQ ID NO: 157214 - DNA, 372 bp, Homo sapiens
tattgtctttcctgctcttatgtcccttttctttcatcaagaaccaagccttgcctggacaagccccagaaggaataacagaattaataaagtgacarctaaccttcatggcaggcactgttctaagcacttaacgtgactaattgaattatctcacctgatctataatgtgggtgctattactctccccattttactgatggggtaaatgaggtacaatagattatgtaattggctcaagttatgcaaccaagggacagaaccaggatttcaaacccaggcagttgggtggcagagtccattcccttcaccttttggtttagttcattctcactctgctatgaagaaatacccaagaatgggtaacttaaa

SEQ ID NO: 157215 - DNA, 498 bp, Homo sapiens
atcatatggtttttgtttttaattctgtttatgtggtgaatcacatttattgatttctgtatgttgaaccaaccttgcatgccaagaatacagcttacttgattttagtgaattaatattttgatgtggtactagatttggtttgctagtattttgttgagatttttgtgtcaacgttaatcagggatattagcctgatgttttctttctttgtcatgtctctttcagatttgttagatttggtattaggctgatgctggcttcatagaatgaattagagaggaatccctcctcctcaactttttggaatagttttagtaggactggtactagtttttctttgtacatttggtagaatttggctgtgaatccwtctggtccagggcttttttttagttggtaggttttttactactgattcaattgcagagttcaatattggtctattcagagttttaatctcttcctgattaaatcttgagatattgtgtgtttcct

SEQ ID NO: 157216 - DNA, 545 bp, Homo sapiens
aagctcctctctaattttagttgtttgttttcttctgctagctttgggatttgtttgttcatwtttttcctagttactttaggacaaaatgttgatagttaatttgaaatctttctaacttacttcttgataccagtgtttagggctataaactttcctgttaacatgctttatctggatcccatgtgcagatgagaagaatgaattttctgtggttgttgaatggagtgttctgtagatttctcttaggtccagttgctcaagtgtcaagtttaagtccagggtcttttggttagttttctggcttgatgatctgtctaatgttgtcaattgggtgttgaagtatcccactattattgtgtgcttgtctaagtcttttcataggttaggaagaaattgttttatgaactgggtgccccagtgttgggtgtgtatatatttagaatagttaagtttcttgttggattgtaccctttatcattatgtgatgtccttcattgcttttcttaatttttattggtttaatgactgttttatctgatata

SEQ ID NO: 157217 - DNA, 545 bp, Homo sapiens
aagctcctctctaattttagttgtttgttttcttctgctagctttgggatttgtttgttcatttttttcctagttactttaggacaaaatgttgatagttaatttgaaatctttctaacttacttcttgatacmagtgtttagggctataaactttcctgttaacatgctttatctggatcccatgtgcagatgagaagaatgaattttctgtggttgttgaatggagtgttctgtagatttctcttaggtccagttgctcaagtgtcaagtttaagtccagggtcttttggttagttttctggcttgatgatctgtctaatgttgtcaattgggtgttgaagtatcccactattattgtgtgcttgtctaagtcttttcataggttaggaagaaattgttttatgaactgggtgccccagtgttgggtgtgtatatatttagaatagttaagtttcttgttggattgtaccctttatcattatgtgatgtccttcattgcttttcttaatttttattggtttaatgactgttttatctgatata

SEQ ID NO: 157218 - DNA, 545 bp, Homo sapiens
aagctcctctctaattttagttgtttgttttcttctgctagctttgggatttgtttgttcatttttttcctagttactttaggacaaaatgttgatagttaatttgaaatctttctaacttacttcttgataccagtgtttagggctataaactttcctgttaacatgctttatctggatcccatgtgcagatgagaagaatgaattttctgtggttgttgaatggagtgttctgtagatttctcttaggtccagttgctcaagtgtcaagtttaagtycagggtcttttggttagttttctggcttgatgatctgtctaatgttgtcaattgggtgttgaagtatcccactattattgtgtgcttgtctaagtcttttcataggttaggaagaaattgttttatgaactgggtgccccagtgttgggtgtgtatatatttagaatagttaagtttcttgttggattgtaccctttatcattatgtgatgtccttcattgcttttcttaatttttattggtttaatgactgttttatctgatata

SEQ ID NO: 157219 - DNA, 543 bp, Homo sapiens
tggactgcaacttatctgttgctgggcttctattcagaaaccaaagagttgacttagttttcaaagcatcatccgaaggagagaagtgtgctagtcagaggccagtttctggttctcccagtgatttctcagtccctttktaccagaggagagaggctgatcctcactaatccacttcatcaaactggtcacatcagaaaaaaactacctcctaaccagcttgtttcttctgcttgagaatgttctagaaacagagatacttcttattgaatcctttgccttttttagcagagcaaaatatagtaaatctaaaataaaaatagaaaagatctgttgctattcattttcttctctcaaataaatataaacctaaatattttcaaaaatttcaggtacttattttcctttttccttaggtatgatagtcaaaacagtacatttaaagaaatccctttgttctttagcagtttatagtctgttaagggagataatactgcaataatacatgctagatgaatggtactgtcaggaaatgacaagtat

SEQ ID NO: 157220 - DNA, 627 bp, Homo sapiens
ccatgttctctgtattgtgatttttttcaatgacatgtgtttgccctaggggtctgaagaatattttaacttttttgttgttctattcactgttgtttactgatgtctactcctaaaggaaatgtttttaaaaggtacagaaacacaactacacagagatacgatctatattttaaaggaagatttggttttagacctttctcagatgtgtttagggagttgagttcmtattcagttctaaaagcatcaaccctcagtggacaccagtgttgtagtcagccaagttgaaatcattgtacaaggacgtattttcagcaagttccagacttcattcaaaagggaaaagtttcttgtactttgtcttcataaagagtagctgctgtaacttcgaaggggaaaaaaaaaatcacaggaactagaagtattgatatctgatttaaaatgcaaaaaacaaaaaaaggattacaagagaaaaggagcaaaatgtgttcagtgtgccaaatgcaagcatggtaataatctgtaagcatttagaagatataatgaatatttccttaggaggaagagtcatcatgtagttgagtgcagggtgctaggacaaggagaaatgggtcctgatttctgtgt

SEQ ID NO: 157221 - DNA, 566 bp, Homo sapiens
agttcctcgcttgtaaaataaasataatggtttgtatctagcaggattgatgaagagatctgatgacatagcactgtaaagccctctgcctaggacctggcacagaaaagtaataaataaatgttattcattattattcttactaattaccttgcacacattatcatatatccctgcaacaattttgtaaaaaaaaattacctctatgttacatattgggaaacagttcatggaggttaagtattatacctgagataatgttgctagtaagtagtagagcttgagcatgaacccagatctctttgactctgagacctacgtggtcaacctctacacgatactgtactgataaaactactcatgagcccaaaatgatcaccctcaaccttctctgctaactccaggattcaccactgataggcaacaatttctctatgtcttaatgtaaattcatttatttactgaacttatcatgcttctaatatgagtctaagcactgcataaggcatgggggtctacagtagggagtaatgctgctgcaatctagtgagatgatcagacagtac

SEQ ID NO: 157222 - DNA, 566 bp, Homo sapiens
agttcctcgcttgtaaaataaagataatggtttgtatctagcaggattgatgaagagatctgatgacatagcactgtaaagccctctgcctaggacctggcacagaaaagtaataaataaatgttattcattattattcttactaattaccttgcacacattatcatatatccctgcaacaattttgtaaaaaaaaattacctctatgttacatattgggaaacagttcatggaggttaagtattatacctgagataatgttgctagtaagtagtagagcttgagcatgaacccagatctctttgactctgagacctacrtggtcaacctctacacgatactgtactgataaaactactcatgagcccaaaatgatcaccctcaaccttctctgctaactccaggattcaccactgataggcaacaatttctctatgtcttaatgtaaattcatttatttactgaacttatcatgcttctaatatgagtctaagcactgcataaggcatgggggtctacagtagggagtaatgctgctgcaatctagtgagatgatcagacagtac

SEQ ID NO: 157223 - DNA, 650 bp, Homo sapiens
gtggtcaacctctacacgatactgtactgataaaactactcatgagcccaaaatgatcaccctcaaccttctctgctaactccaggattcaccactgataggcaacaatttctctatgtcttaatgtaaattcatttatttactgaacttatcatgcttctaatatgagtctaagcactgcataaggcatgggggtctacagtagggagtaatgctgctgcaatctagtgagatgatcagacagtacctaccctaagtaaaagtgtgtgtgtgtgtgtgtrtgtgtgtttaaaattgtaaagagtactgtgaaaaatatcacagggcacagtaacagggtgacaagtgaaatctcctttaacaagagtgtcacagaaaggcatctgccagaagataaaatttaggctgagacttttaaagtgtttaaaggagccaatatgtgaggaacaaaaggcagagtaatcatgtgcagaggccataatgtggaattgccgaggcatattggaggaatgcagcagtgctggagccgctgaggacaggggatctgaggagagagagcaagcaagggagaagagtgatgaggaaaaaaggagccgagtggtcatggaggtccatgttgtggagttcagattatacattaagtgcaatga

SEQ ID NO: 157224 - DNA, 465 bp, Homo sapiens
gctctgtgtctattcccaaccaaccagctatgatcagggaccagaggcagcatgaggggtaatccttggagaggctgtggatgaagcaggctctatgaaaaaatgtcacatttcttctattcaatctcatctcccatactagagagtgagctcttcatgacatgaatttttatcttgtcaaatttgtacccccacatcaattaacaatgttttttacatagtatgtgctcgataaatatatttccaaataaactaaattactcaagactaaatcaatgtcacatgaaattgaaaatctgtctctttttttctccctatctctttttgtatgtttcctttctgtctccatgtkcctttctcttccatgtaactagtatttttttttacttgctgtcagactttaccattcagaaatgaccaaaacaaaaggaaaaaaatggtacaaagagaaaatcagcagttctg

SEQ ID NO: 157225 - DNA, 483 bp, Homo sapiens
tgagctgcatcaacatttatgggtaacaattgccaagcatgcctgagtcacccctaaagctagctagaattgtcagccaaagcctcccttcagggtatcccagaaagtccgtaggaaacatcaacacagtttctctttgtgaaaacctccaaatgtatcattaaagttccagagggaatattcaaacttatggtatttaatttcttaaaagagtttagatgggaagcgcctgagtactgaggatgaarggctatatttataattacataagttgtggaaaattgctgtcattcagagactggccaggagtgtggatgaaaaactaggatgtgttttatcctacccagaggctactttaattctttcagcctcatagctttataaattctcaaattagggagtcttaaaacagaagcttctattttggcaaagattcattaatattcatttatgtccagtttctcatacctggggtagttatac

SEQ ID NO: 157226 - DNA, 483 bp, Homo sapiens
tgagctgcatcaacatttatgggtaacaattgccaagcatgcctgagtcacccctaaagctagctagaattgtcagccaaagcctcccttcagggtatcccagaaagtccgtaggaaacatcaacacagtttctctttgtgaaaacctccaaatgtatcattaaagttccagagggaatattcaaacttatggtatttaatttcttaaaagagtttagatgggaagcgcctgagtactgaggatgaagggctatatttataattacataagttgtggaaaattgctgtcrttcagagactggccaggagtgtggatgaaaaactaggatgtgttttatcctacccagaggctactttaattctttcagcctcatagctttataaattctcaaattagggagtcttaaaacagaagcttctattttggcaaagattcattaatattcatttatgtccagtttctcatacctggggtagttatac

SEQ ID NO: 157227 - DNA, 483 bp, Homo sapiens
tgagctgcatcaacatttatgggtaacaattgccaagcatgcctgagtcacccctaaagctagctagaattgtcagccaaagcctcccttcagggtatcccagaaagtccgtaggaaacatcaacacagtttctctttgtgaaaacctccaaatgtatcattaaagttccagagggaatattcaaacttatggtatttaatttcttaaaagagtttagatgggaagcgcctgagtactgaggatgaagggctatatttataattacataagttgtggaaaattgctgtcattcagagactggccaggagtgtggatgaaaaactaggatgkgttttatcctacccagaggctactttaattctttcagcctcatagctttataaattctcaaattagggagtcttaaaacagaagcttctattttggcaaagattcattaatattcatttatgtccagtttctcatacctggggtagttatac

SEQ ID NO: 157228 - DNA, 489 bp, Homo sapiens
ggagtcttaaaacagaagcttctattttggcaaagattcattaatattcatttatgtccagtttctcatacctggggtagttatacatgatgtttttaatgtcttaattctggcttgtaaaaaatattttaaaagacacattccttatacttgtatcatgtataatataattacagtctacagggttctttgttttttggacrtcaggtacagaatgttctcttaatcataccattcagttcacagctaattattatcactggtctatacaaggcactatcttgttttatttgactctgggttttattttctttttgtcttgtttttagacaggactcactctgtcccccaggttgcaatgcagtggcacgatcatggcttactgcatccttgacctcctgggttcaagtgatcctcccaggtaacagggaatacaggtatgcgccactgtgccctgctaatttttttgtattttttgtagagacaggg

SEQ ID NO: 157229 - DNA, 567 bp, Homo sapiens
atttcatttttgaataagcgataggtttttaagataacctacttaaagaacatctaattatttgattctaactactgcatagaacttactctgtgtatatttccaccatgttttccctattccctcttctcatgaaggaccctctctgttactgcaatgagtaccttcatacatgtatacttagaggttagatgacagactgtccaatccagaatacttctgagagagattagtggtactattacttaacctgccaaggtaaactagttcatacrgcttatgtgacatcctttgggatctacaccaaagcaagcatagtattcacatgttttaatccaactactaccagattacccaccagaatacagtactaggctacactccaatcagcacagacacagtctctatattgttttcattataatatttgcctatagttatgttcttaggatttttaatttataaaaggctctcaagtcaatatcaagaaaaactaacccaaatacctaaacaattttaaagtcattaaaaacattgatcggtctaagatagagtcaggggccaaat

SEQ ID NO: 157230 - DNA, 567 bp, Homo sapiens
atttcatttttgaataagcgataggtttttaagataacctacttaaagaacatctaattatttgattctaactactgcatagaacttactctgtgtatatttccaccatgttttccctattccctcttctcatgaaggaccctctctgttactgcaatgagtaccttcatacatgtatacttagaggttagatgacagactgtccaatccagaatacttctgagagagattagtggtactattacttaacctgccaaggtaaactagttcatacagcttatgtgacatcctttgggatctacaccaaagcaagcatagtattcacatgttttaatccaactactaccagattacycaccagaatacagtactaggctacactccaatcagcacagacacagtctctatattgttttcattataatatttgcctatagttatgttcttaggatttttaatttataaaaggctctcaagtcaatatcaagaaaaactaacccaaatacctaaacaattttaaagtcattaaaaacattgatcggtctaagatagagtcaggggccaaat

SEQ ID NO: 157231 - DNA, 589 bp, Homo sapiens
agtggtactattacttaacctgccaaggtaaactagttcatacagcttatgtgacatcctttgggatctacaccaaagcaagcatagtattcacatgttttaatccaactactaccagattacccaccagaatacagtactaggctacactccaatcagcacagacacagtctctatattgttttcattataatatttgcctatagttatgttcttaggatttttaatttataaaaggctctcaagtcartatcaagaaaaactaacccaaatacctaaacaattttaaagtcattaaaaacattgatcggtctaagatagagtcaggggccaaatgtaatctcagagccatatgttcacttatgtgtacaactgattaaagatgtattggtaaaaatcttatatctcaacatttccaaatattttcttcatgaagatacactcagtgacactcacatttgggactactaagattatttgcctgtgatacgtaatctgtgcatagaagctgtgaaatcacctctttacctcccactgacccttaccaatagtgtattagaacactagctttgagaaccaatgttacgta

SEQ ID NO: 157232 - DNA, 564 bp, Homo sapiens
tgagttcccttgcagggaaaccttttctacctcaacccacagaaacattgtgagtgcctatagaaagaaaaacccctgaaggcagctaaagacaaagtggggagacaggactagcaaccctagcctgttaaattctactctttatctcagctaaagaccatgccaaatcagagtggttattcagcagcaccatgctgtaggcggtaggctccacaggtcttctaagcatgaaccctgactcagattttcaacattgttggggtgtctcctttaagacctcctccccartttgagacaaacagtgctccaaatctttgcaagagctgaacgaagctgggtttatggcaccatctagtgatgaaaaggaggcagttatctaagtaaacgtaccttaggaagaccaaagaagccagagagtaaagcatggaataaataaccaatccttcagtgcaaagccatagacatacatccacaagaaacaatagtaaacagggaaccataacatccccaagtggaaaaaataaggagtcagtgatcaactctaatgaaatggtgatacgtgag

SEQ ID NO: 157233 - DNA, 598 bp, Homo sapiens
tttagaataatctaatacagtaattgttgtgtgtaatccactcacatctctagtatgaaaactaaaagacaaatctaccaaaaataataaaaactacaccaayttgttaagagatagccaatataaacagataattgagacaacaaaaagtcaaaatgtgaagagaaaggaattaaattacagagtttttttagtttttccttcatttgttcatcttatttttttgtgtgtatggtccaagttatcatctgtttaaaataacttgttatatctataaaatgtttttaagtcttatgataaccacaaagcaaaaacctataataaataaactaaaaatttcaatagatggtgaaaaagcagttgacaaaattcaactcctgtttatggaaaaaaaaactcttaataaactgggtataaaaggaacatccctcaaaacaataaacgacatagatttaaaaattcacagctaacatattgaacagggaaaaatttaaagcttttcctttgggatctgaaacaacacaaggatgctcacttttaccatttttatccggtattttactggaagccctagccagagcaattgggcaagagaaag

SEQ ID NO: 157234 - DNA, 598 bp, Homo sapiens
tttagaataatctaatacagtaattgttgtgtgtaatccactcacatctctagtatgaaaactaaaagacaaatctaccaaaaataataaaaactacaccaatttgttaagagatagccaatataaacagataattgagacaacaaaaagtcaaaatgtgaagagaaaggaattaaattacagagtttttttagtttttccttcrtttgttcatcttatttttttgtgtgtatggtccaagttatcatctgtttaaaataacttgttatatctataaaatgtttttaagtcttatgataaccacaaagcaaaaacctataataaataaactaaaaatttcaatagatggtgaaaaagcagttgacaaaattcaactcctgtttatggaaaaaaaaactcttaataaactgggtataaaaggaacatccctcaaaacaataaacgacatagatttaaaaattcacagctaacatattgaacagggaaaaatttaaagcttttcctttgggatctgaaacaacacaaggatgctcacttttaccatttttatccggtattttactggaagccctagccagagcaattgggcaagagaaag

SEQ ID NO: 157235 - DNA, 598 bp, Homo sapiens
tttagaataatctaatacagtaattgttgtgtgtaatccactcacatctctagtatgaaaactaaaagacaaatctaccaaaaataataaaaactacaccaatttgttaagagatagccaatataaacagataattgagacaacaaaaagtcaaaatgtgaagagaaaggaattaaattacagagtttttttagtttttccttcatttgttcatcttatttttttgtgtgtatggtccaagttatcatctgtttaaaataacttgttatatctataaaatgtttttaagtcttatgataaccacaaagcaaaaacctataataaataaactaaaaatttcaatagatrgtgaaaaagcagttgacaaaattcaactcctgtttatggaaaaaaaaactcttaataaactgggtataaaaggaacatccctcaaaacaataaacgacatagatttaaaaattcacagctaacatattgaacagggaaaaatttaaagcttttcctttgggatctgaaacaacacaaggatgctcacttttaccatttttatccggtattttactggaagccctagccagagcaattgggcaagagaaag

SEQ ID NO: 157236 - DNA, 519 bp, Homo sapiens
ccaagaaatattaaaagtattgtataatttattccaaactctacatataaaatattaattacaaatttaaaatataatcatagttcctcatcagaaatgttcctcaacagagatttatcatccttttttgaaatgttataataattaatcctttaataatcaagcaagtgacatcatagttcatgggaracacaggttattaaaacagaggtattcattaacacatttgaaaacttcaggcattttattctttcatcacaatatctaacgaattatatagaatcataatagagttttacttctttttggaggcagcgtcttgctctgttgcctaggctagagagcagtggcctacacacagctcaccacagccttgacctcctgggtttaacatcgagtgatccacccacctcagcctcctgagtagctgggaccataggtatgtgccaccatgcccagctaatttttttgttttgttttttggtagagatgaagtctcacaatgttgcccagtcaggt

SEQ ID NO: 157237 - DNA, 519 bp, Homo sapiens
ccaagaaatattaaaagtattgtataatttattccaaactctacatataaaatattaattacaaatttaaaatataatcatagttcctcatcagaaatgttcctcaacagagatttatcatccttttttgaaatgttataataattaatcctttaataatcaagcaagtgacatcatagttcatgggaaacacaggttattaaaacagaggtattcattaacacatttgaaaacttcaggcattttattctttcatcacaatatctaacgaattatatagaatcataatagagttttacttctttttggaggcagcgtcttgctctgttgcctaggctagagagcagtggcctacacacagctcaccacagccttgacctcctgggtttaacatcgagtgatccrcccacctcagcctcctgagtagctgggaccataggtatgtgccaccatgcccagctaatttttttgttttgttttttggtagagatgaagtctcacaatgttgcccagtcaggt

SEQ ID NO: 157238 - DNA, 580 bp, Homo sapiens
tatgttaccataaaatatctagtttctagtgcttaaaacattaaattgtttgcaacatatttttccgtacgttaatcaacatactttgcgatcccttattaagttctagcctctgcaacaaacgtgaaaaaaagcaaagacgcayaactcaaatgtgagaagcacggaaatttcctagaccgcagggttcgttctcagtagtcggcaataagctggctttcagagtcaggaacttgataaagttgttttggaggatgccccagctgtgtgaaggtccatttcgttttgcatctgaagagaagcaagcgagactcccctacagggagtaatggttcagcggggcaaggtttgaaaacccagagctggacaaaggcgggaacgcacgccgccgcgccggggctaggggtgctgacggcccgcgcagctcgcgggcctccgggtttgaggccctggggtcagccctgctccgggcttcgcgcccgggcgcgggtcagagccgccaacttcgggccaatcagcgagcggcgtcccggcgcccgcagcgcccaggcccgcgccccccgcgcccccgcagcaggaa

SEQ ID NO: 157239 - DNA, 618 bp, Homo sapiens
actagggtgcctttcatctgcatataaccctctcccctttgcctctgacctaaagagctggtgaagagtagtagaaagtgctagtaatcyccaaaaagggctccactgacaacatgatctccagtcatccttcagggcaaaattggagaaaataaaccacttatttattttttcaagtgggagttggcgagaatgttcaaatgttaaaaacaggaataaataatttatctgaattagaggtgtattgaatagttgccaaatggccaaatgttaaaatcaacattttttgaaggccaaatacaaccatcaccaaatgacgtctgtacagagttgaaattctccttttaattcattcttaaaagatgtgaaaaattctcaaacagaccttccttaaaggtttctggcttaaatttaattactttaaaaattaaacacagatcttaaaaatcattttatttaatgttatgaagagtactgtaaacaactctgcaaagattagaattattatataatccttgttgtttccttatattaccatatagatttttagaaacagctggccaacctactttcttttgagatttttattaatttcagtttatttttttcatgtgtttg

SEQ ID NO: 157240 - DNA, 618 bp, Homo sapiens
actagggtgcctttcatctgcatataaccctctcccctttgcctctgacctaaagagctggtgaagagtagtagaaagtgctagtaatccccaaaaagggctccactgacaacatgatctccagtcatccttcagggcaraattggagaaaataaaccacttatttattttttcaagtgggagttggcgagaatgttcaaatgttaaaaacaggaataaataatttatctgaattagaggtgtattgaatagttgccaaatggccaaatgttaaaatcaacattttttgaaggccaaatacaaccatcaccaaatgacgtctgtacagagttgaaattctccttttaattcattcttaaaagatgtgaaaaattctcaaacagaccttccttaaaggtttctggcttaaatttaattactttaaaaattaaacacagatcttaaaaatcattttatttaatgttatgaagagtactgtaaacaactctgcaaagattagaattattatataatccttgttgtttccttatattaccatatagatttttagaaacagctggccaacctactttcttttgagatttttattaatttcagtttatttttttcatgtgtttg

SEQ ID NO: 157241 - DNA, 417 bp, Homo sapiens
aacttgcttttgtgaatctatttttttaattatgaaaattataaaacctaaactgagattaaatattaatgaygaaaatgtagtatatgagttgacatgtgctgtaggtataaaatacaaccagatttcaaagattttgaagaaggtaaaatgactcattaataatttttgtattggttacatggttgaattgataatattgtgaatatattggtttaaatataggtattaagattaattgtgtatatttccctttgctctgtttcatgttactactattaaaattacatatgtggttcacattatatgtctgttggacagtgctggcatagagagtgtcaagagtaccctgagctctttctcgggaattagctcatggcaaatttagagagaagtataggtcatatttatggagaa

SEQ ID NO: 157242 - DNA, 417 bp, Homo sapiens
aacttgcttttgtgaatctatttttttaattatgaaaattataaaacctaaactgagattaaatattaatgatgaaaatgtagtatatgagttgacatgtgctgtaggtataaaatacaaccagatttcaaagattttgaagaaggtaaaatgwctcattaataatttttgtattggttacatggttgaattgataatattgtgaatatattggtttaaatataggtattaagattaattgtgtatatttccctttgctctgtttcatgttactactattaaaattacatatgtggttcacattatatgtctgttggacagtgctggcatagagagtgtcaagagtaccctgagctctttctcgggaattagctcatggcaaatttagagagaagtataggtcatatttatggagaa

SEQ ID NO: 157243 - DNA, 261 bp, Homo sapiens
ctattttatctattaaataaagacagaaaacatttcacctccactgctttctactcccactttgcatgctctgttaatgtgtgattaaagtcattattattaactttacatattcatcttctacttcaataatagaagctgytggactttggagttcctgattttgattacttggacaattgactgtgaaattttcattaatgataggaagaataagttttagtgttctgtagcactatagagggactataataaacaaca

SEQ ID NO: 157244 - DNA, 464 bp, Homo sapiens
ccaactctatcattttacagataaaataagagtactgatgataagaggcttccccaaggtgacagagcctcagagcggccaagccaaagccagaagatagtcttgataaagtgttcttcctgtcatataccacatataaggaactactctaagaatatattaatatcagatgtagctaggtaatggaatgtaagcttctcctgtgcctgagactgaggccasaaagttaactgtatgttttgagcccagtgcttgaccaaaaaagaataattttgtaagtcactgaagtaaagagaaagaataaaaaattatatggggccaaattcccttcagcccataaatgcattggattattttaggctcatttggaaaatattttatctagtgaagttaaaattatagttgcataatttgctaactaattctacttcattcctgacctgattattctagttctcatgatg

SEQ ID NO: 157245 - DNA, 545 bp, Homo sapiens
tgtgtgatgatatgtaatgaaaaataagcatttttgaaaacataacctggttgatatttgtatctcccttaatttacacttttcctaccttcatttacactttctctctacttgaaacacttgctttaacccctaaaaattcataaaagaaatgttcttgtaatagttcctacaactaaaaacactttcattaagtatgctttctatgctccccaatcaaaacatttgtataacataraaataatgaaagatacaaatattggactgcttaccaggctttaagctttaccttctctgcccgatactttttatctttctaagtaaatccagcacccagtacaaaatatctaagaaagagtaaacatcgaagacatatttgttgaatgaaaaataacaaatgtgttcattttcatgggggacactacttctgagtgtacaccctgaccatcctcctccttcaaagaacattaaatttattcatatacctactctttcctatgaagactgataaaaagctgacctttcccagctctaggttatgcctg

SEQ ID NO: 157246 - DNA, 618 bp, Homo sapiens
ttgtaataggcctcgtctttatcctttcaggctgttataacaaaatactttagactagatacttggtaagcagcagaaatttattgcttacgtttctggagcctaggaagtctatcaaggtgccagcagatttggtgtctggtgagggcccgtttctaattagatagcaccttctagctgtgtcctcatgtgacagaagggacaagcaagctctcttgggcttcttttacaagggcattaagcccatacatgaggacacagtgctcataacctaatcatctcctaaagggcccacctcttaatacaattccattgcggtttcagtttcaacgtaygaattttggggattcacgaacattcagaccatagcaggctgatacttactatacagtacttttccattttgtgtagcaaagccacttcagaagtgatactggtttcattagtcaaagtggtagtatgcttttcctgtactttttctgttctaactgcatgttattggctgagaaagtgtgaacattctgtcaccattgccagcttatgcttctgtttctttattttagttgaattatttaaggggaagataaggacaggcttatatgcattatgctatttgga

SEQ ID NO: 157247 - DNA, 453 bp, Homo sapiens
gaggcttgagtaggtggttttcccctcacagtgtaaacaaagccaccaggaagctcaaactgggcgaagcctaccacagctcagcaaagccactgtagccaatcttcctctctaaattgctcctctctgggcagggcatctctgaaagaaaggcagcaaccccagtcagyggcttatagataaaattcccttttcaatgggatacagcacctgagggaagtgggggctgtaggcgcagctttagcagacttaaacattcctgcctactggctctgaagagagcagcagatctgccagcacagtgcttgagctctgctaagggacagactgcctccttaagtgggtccctgacccctgtgcctcctgactgggagacagctcccagcaggggttgacagacacctcatacaggagagctctgactggcatctggcaggtgcccatctgggacga

SEQ ID NO: 157248 - DNA, 427 bp, Homo sapiens
tagattatctaactaaaatgatactaaaatatggttttaactaaaaagttaatacaagggaaaaataggatgataaaatcattttattaatccaaaaagaaggcaaggaatgaggagaaagacaactgtgtcatatagaaaatagtaacatggtaagtataaacccaattagatcaatcattgtgctaaatttaaatggactaagtatttcaatttaaagacttatactattaatgaattggaccaaagaacaaagcaaagctgatgcctctttagagacaattttaaaacttaaagactcagaaagcctgaaaataaaagaatgaaacaaatatattatgcaaagasaaatgaaattaggtttaaccttattaatatttgataaaatgcactttaaggaagaaacattactagaaataaagagggt

SEQ ID NO: 157249 - DNA, 445 bp, Homo sapiens
attcataagactttaaatcctgttaaagttttatgaagccttagcgttgcccaatttttaatatagatttcagacctgcaaagacttctagccttatagtcatcagttatctctttgttgttgttgttaacatggaatctcgctctgtggcccaggctggagtgcagaggtgcaatcttggctcagtgcaacctgtgtctcctggattcaagcaattctccagcctcagcytcccgagtagctgggattacagatgtgtaccacttcacatggctaatttttatgtttttggtaaagatggggttttgccattttgcccagaatggtctcaaactcctgacctcaagtgatttgccggcctcagccttccaaagtgctgggattataggcatgagctatcatgaccagcctgtagtcagcttttggagaattttccctacagcat

SEQ ID NO: 157250 - DNA, 640 bp, Homo sapiens
tgattgaaacacattaacaaatttgtaagcccatactgtcagtgagagaaaatgtttttaaaatctcatttgctatcattagaggataataagttattattaaaattagtaaagaaaaggaattaagcattttatcctgccttttcaatactaaccatagttcaggctaaccagacagcagaaattgatgatgaaaagctcctctttacaggagaatgctaacttataaataaagggggaatatttgagttagcgaatcaccattttgaaatccctaataatattactgatttggcaagaattctccatggatactaaaaccattaggcaaaaggttgatggtgaaaaaatatatatccatttagcagtatcagctcacagattacttgctaagaacaaaggggaaacaggacatttacaacagaaaaattaccttaacccaatgttggcatcagtaacagtgggaagccagatacattatatgccccctactgttatgcagcacaaataaaccagcatcactccataaygtatttttgccagaaatatttatatctaacttccagactgcaggaattatagaagatagagaaacaagttaaataaagccctgggaatgtaatcaggtaaatccagatgt

SEQ ID NO: 157251 - DNA, 417 bp, Homo sapiens
agatctaacagattggcagacaccagatcatgcggggaccaacagaccaggaatccatctagacagttactttgggcaggtacagttatttttacccaaaaaacattttaaagacacatctgttacaggcactgcaaaaactgatatttaaagattctcatatataatacccaggaaagaatacagtctgcctgttccttatatgtgacatactgccatgtttctcaaacaattcctgttttcttaagtgcccaaggatcctcaataatgaatgccagaccatcactgggargcacgaatttaatttttcatattgtaatttctaaaagagcaatttaggactataaatacctcatatttacatacttaagatgcttatatgtgaaggtatgggaatttgtaacacttctcactaaa

SEQ ID NO: 157252 - DNA, 606 bp, Homo sapiens
cctattttttgtttatttctgagactttgcctttgctatgatttaggaaaaaatcaattggcatggaaatatattcacacacacacgtatttcagtgaaaaaaagcagtgtataaacctcaactcaagcatatcctcaacttcgtaaaatagaaaaattatgtacagcaaatatacatttacataatgtttaattatgattatctctgaatggtgtgtggcttttaaaaaaattyttcatatatttcgagtattctacaataaacgtgttcagaaaactatattgaaaaatttagtagttcaggtacatattttatgtagtttttttaaagaagagaaagtgccttcaataaaatgtgctcttattcagacttttcaatgggtcatttttatgaatgtgatcttctaattggagcttaaaggcaggaacctggcatttctgtgatctactctgagaaagagtattaacttattctgtagccttaagctcttcacttaacctttcagcttaccctttgtgaagagaggataatagccattctgcagaactacaatggcaaattagcttaggtttgtaacgtgctttaaagatgaatccctgccttaa

SEQ ID NO: 157253 - DNA, 606 bp, Homo sapiens
cctattttttgtttatttctgagactttgcctttgctatgatttaggaaaaaatcaattggcatggaaatatattcacacacacacgtatttcagtgaaaaaaagcagtgtataaacctcaactcaagcatatcctcaacttcgtaaaatagaaaaattatgtacagcaaatatacatttacataatgtttaattatgattatctctgaatggtgtgtggcttttaaaaaaattcttcatatatttcgagtattctacaataaacgtgttcagaaaactatattgaaaaatttagtagttcaggtacatattttatgtagtttttttaaagaagagaaagtgccttcaataaaatgtgctcttattcagacttttcaatgggtcatttttatgaatgtgatcttctaattggagcttaaaggcaggaacctggcatttctgtgatctactctgagaaagagtattaacttattcwgtagccttaagctcttcacttaacctttcagcttaccctttgtgaagagaggataatagccattctgcagaactacaatggcaaattagcttaggtttgtaacgtgctttaaagatgaatccctgccttaa

SEQ ID NO: 157254 - DNA, 606 bp, Homo sapiens
cctattttttgtttatttctgagactttgcctttgctatgatttaggaaaaaatcaattggcatggaaatatattcacacacacacgtatttcagtgaaaaaaagcagtgtataaacctcaactcaagcatatcctcaacttcgtaaaatagaaaaattatgtacagcaaatatacatttacataatgtttaattatgattatctctgaatggtgtgtggcttttaaaaaaattcttcatatatttcgagtattctacaataaacgtgttcagaaaactatattgaaaaatttagtagttcaggtacatattttatgtagtttttttaaagaagagaaagtgccttcaataaaatgtgctcttattcagacttttcaatgggtcatttttatgaatgtgatcttctaattggagcttaaaggcaggaacctggcatttctgtgatctactctgagaaagagtattaacttattctgtagccttaagctcttcacttaacctttcrgcttaccctttgtgaagagaggataatagccattctgcagaactacaatggcaaattagcttaggtttgtaacgtgctttaaagatgaatccctgccttaa

SEQ ID NO: 157255 - DNA, 466 bp, Homo sapiens
tggttaattctgcttcatgacacataatgaaaatatttgcatttagttttttgaagtagactctgtgaaaaatgtcatggatttaattgttaaattcattcgtttatttgccagcgattttacttattgccaatttgtggaactattaaaaggaatagaagacaaggaatttaatggatttgtgccrtttgccaatactctatgattgagttgcagaagagttttacaaggatttatcatactgctgactctgaagattttcttgagaaataaatacttgacaaataatcaaagacaaaaaaatcttggtgtgatttgtgttttctcaccaatatcacattgcacataaatgagctaaattgaagctccagggaagggaaaaacattttataacctagctggttgttgaaactttcaatacaaatcaataattatgtttttacacataaaaaaaattcagttgatt

SEQ ID NO: 157256 - DNA, 567 bp, Homo sapiens
gcagaaatctggtgtgaggtgttctctccagtagacttagtaataaagtagaggacagcagagtaaccagggacaaggattgaaaaccagggaatcccaaaaagaatttgaaagtcagagatggagggggtcacagcccacaatctttcstgctcttgatgcccacaaaagtacaaggagaccagaaagctgactgacagggaactgacagcctatctgccagtgcaggcccactgaagagagacccatttgccttctaccacctgcaggactgacgccacagaggactattcaataacagtcttgagctccaatgagtcaaccaagggatacagcccatacaaaggagcagagctgctagaaaaaggaagataaggcagaagaattagacccacgctctgtgttctgcagcagacagaatacctcaactaaagggaatacctgaattatctaagaaaatttaaggagattcaaatacagcactcaaaaaaaaaaaaacttttaagagttaaaaaccattaacttcccaattaaatatctttacagaatgaattgaaagaaagagat

SEQ ID NO: 157257 - DNA, 583 bp, Homo sapiens
ccaatcctatcagcatgttctgttaccccacactaccaaagtagccactatcttggtctaaactgctatcacctctcacatggattactgcagtagaatcctaactctcccagtttacacacttgccctgtggcaaacttttctcaacagaacagccagagtcatgcttgataaacttatgtcactcctttgttcaaaactctgcagtgccctctcatttcackcaaagtaaaagtcaaaggctttgcagtggcctaaagggctctaagcagtggatcttcccctaacactcatcccttcattagccctctgacctcctcctcaactgcttgctcattgcattccagccacactgacctccttgtgcttggaccacaacaggcaaactcccgtcttaggtcctttactgtagctgcctcttctgcacttagaatgctcttcccgtagatatatgtttggctaatttcctaccacccttcaaataattgcccaaatctctcctgtttagtgaggattaactgacccatctaacatgtatagcatcccacacacacacccacacaccttttctgccaagtcaacc

SEQ ID NO: 157258 - DNA, 583 bp, Homo sapiens
ccaatcctatcagcatgttctgttaccccacactaccaaagtagccactatcttggtctaaactgctatcacctctcacatggattactgcagtagaatcctaactctcccagtttacacacttgccctgtggcaaacttttctcaacagaacagccagagtcatgcttgataaacttatgtcactcctttgttcaaaactctgcagtgccctctcatttcacgcaaagtaaaagtcaaaggctttgcagtggcctaaagggctctaagcagtggatcttcccctaacactcatcccttcattagccctctgacctcctcctcaactgcttgctyattgcattccagccacactgacctccttgtgcttggaccacaacaggcaaactcccgtcttaggtcctttactgtagctgcctcttctgcacttagaatgctcttcccgtagatatatgtttggctaatttcctaccacccttcaaataattgcccaaatctctcctgtttagtgaggattaactgacccatctaacatgtatagcatcccacacacacacccacacaccttttctgccaagtcaacc

SEQ ID NO: 157259 - DNA, 571 bp, Homo sapiens
ctgtctcttaactatctaaaattttaagactatgaattttagcctgtggtcatcaaaccactttggagctaaaaagktccaaagattgagattgaggcagaggatgctggtggcctttggcaggaaaggaggtagaagggtttgtcttgcaaccggacatgggtgtctccttaccctgggtgctagcacccaaagagcaggaaacctaagaaccagccccgcccatccctgccatgctggctggcgccagcgagtgtgagccagggggtgcaaatctgaggctccctgcagtgcttccagggcacatggcttacccttctcccagtccctcagggggaaggccctcccccagctcaggcacctcaaatgcccctctaacctgaagctgcactgaaccatcaggtgcccttgctttccgtttcctcccaaattttaacagcagtttaaagaagaaaagtaagcctctttgggcagtgagaggctaaggtgaagggaatgacactgaccctgggctaggatggggcctggggcgagtgagtgtcgggggcggcggggagcatttccggccctc

SEQ ID NO: 157260 - DNA, 600 bp, Homo sapiens
gtctcctttaaatgtacttaaatcaaatttgcttacaatatccctgcccccaattccatgatttgagggagaagaagatgaaaaatgtactttgtgatacaaaatggatgactctttatggtcctgcacagctgcatgttccagcatcacattaacctctggatcttctcagcattcactctggaatttttaaaatgtcataacagtgtattttcaaaataatatccttgtgcaccccctcctccccaatcgtgtaatattgtcaggatgttttatctggtgccatatatcctgcacatgacaaatccatttccccaaacaaaccatcgcatatgtccacactgtccataaattttgaatcctgacatcaacactattaccctctgacgtttgggttggcctgagttgtgcaaaattgagggggtgatgtttttaaggaatgaggggatgtcactcttttctttctgatgggtcccctctggagaaagtgatgtcrggaacatgcaaaacttaaccctactggagaaagccccagatactctccccagggtatccagagattaaaccggccagatctgtaagcatctccacctctggggg

SEQ ID NO: 157261 - DNA, 501 bp, Homo sapiens
gtgctctctgtaatcatggtgagatatcaaggcctgttagactaacgcattccttttaagtagtcttgttgagaaggaaaatgtttcttagcagtcacactagaagtggccaactacaggatagtgattctctttttaaatmgacattgtctttgccagtaaggaacagtataaggactacgtccaactcttttttagggggaaaactatttgtctacctagtagaggaggaaatagtttatttcatcgcccatgttgatatttatataaaatttttgaattttgataattacctgtggaataagatatgagcttgtaagtctggtgaaattttcaatgtttgtttaaatatcttcgcaatttagctctgattgatttttatgtaacttagagttggttgaatttagataaccataactttacctttttttaacacaaatttacaataatatttaacatgagtaacaaaaggaaatatgatccaatatctgagatgaattc

SEQ ID NO: 157262 - DNA, 592 bp, Homo sapiens
catttttagaagaaacggactttcttttctgggcttggtggttcatgcctgtaatcccagaacttcaggaggctgaggctggtgaagtgcttgaggccaggagtccaagaccagcctgggcaacatagcaagatgcagtctctacaaaaaaaaaaaaaaaaagaaaaattaattagccaggcatagtggtgcatgcctawtcttccagctgctcaggaggctgaggtgggaagatcacttgagcccataagttcgaggttacagtgagctatgatgacaccactgcactccagcctgggcaacaagaccctatctcttaaaacaaaacaaaacaaacaaaaacaaaaatagagtcttgagccaagtgaacaaatgtccaatggtggaatttgtgagaatagaagagcagaaatgctttcttttctgggcagctaacatcctaccaacaggggcgcactcactggccaatgcaaggagagtctagccactgatcttccatttattctgtgatacctaattaagttcagctttctacctctgaattgaaggggccagcaaatcattctcaccttgtagcattagcaaagaaaga

SEQ ID NO: 157263 - DNA, 592 bp, Homo sapiens
catttttagaagaaacggactttcttttctgggcttggtggttcatgcctgtaatcccagaacttcaggaggctgaggctggtgaagtgcttgaggccaggagtccaagaccagcctgggcaacatagcaagatgcagtctctacaaaaaaaaaaaaaaaaagaaaaattaattagccaggcatagtggtgcatgcctaawcttccagctgctcaggaggctgaggtgggaagatcacttgagcccataagttcgaggttacagtgagctatgatgacaccactgcactccagcctgggcaacaagaccctatctcttaaaacaaaacaaaacaaacaaaaacaaaaatagagtcttgagccaagtgaacaaatgtccaatggtggaatttgtgagaatagaagagcagaaatgctttcttttctgggcagctaacatcctaccaacaggggcgcactcactggccaatgcaaggagagtctagccactgatcttccatttattctgtgatacctaattaagttcagctttctacctctgaattgaaggggccagcaaatcattctcaccttgtagcattagcaaagaaaga

SEQ ID NO: 157264 - DNA, 553 bp, Homo sapiens
gaattctccattaatatttatatggggaatagctacaccaaatcctttttttttttcactcccttttccctcctctctataggtcttctactgtctgtcactacagtcacacaggatttcgtgggtgtccccaagaggacaagtgggaccccactggataaagcacagcaaatgagtaatctgaagctgacacacctttccataagaactattgctctcaattcactggtttatattttttcaaaacaggaaaagaaaataatccagtttaaaraccaatggaatctttggctgctatcatttaaatccaaagtaagctatccaatctataaaatttagccaaatatatatctttgtccatgatgtgcatctttttcaagttgaaatataagacgctatgccccttgggtgaatggcactgcatctgaagggcccacggtgtactggaaagaataaaggctgtgggcaaatgttttactcctaccgcttcacagttacgcaacttgggaagcattattgaacctcaatgaatcttagcatcttctataaaatt

SEQ ID NO: 157265 - DNA, 617 bp, Homo sapiens
atgctaccacctagacaaaagccactgacctgaatgccagagctaatgtgactgttgcatactaagctgacttttagcttcaaactttactaatgtgtttacactgaaaaagaatgaaatgaaaacctattttcaatttgctatgtcagctaaagaaagtaaaaaaaaaaatgtgtggtagatgcttaaggcagaggaaatgaggactattgctggaaatttagcactgcacaatagagaaaaacatggctttatattctaggtccccatggatagctgcctatgaatatcatagcaatgctgttctaagcaaggtaattcttctcataccagtttttctcttgctcaaggtcatgtctaagagtagaatgaaatcagcataatgctttaaaatatacgtccagtgaattcagkttaaattctaaaacgtcaggttgattctttttgtaagcttggttccagattttagcttgtgcaatgagaaaatgttgcctgaatatttttctgtacttgaattggcatactttaaagttcaaaatgggaggcaggtaaatttaagttctagaatttaaaaggtttaacattataatctgttttctgtctctgtatgtttgaaa

SEQ ID NO: 157266 - DNA, 583 bp, Homo sapiens
ctgattgatataaaaagtgtaagaacacttgcagtttaatgttaagcagttacattgcaaagactagtctcaaattttagaacttcattgaaaaatcagtcataaattgtttctccataaacaattaaaaaccagttttctgattctggttaattgtttctttttcattaaatttgttaaatggggatcactaaaagtaaggtctcacaagatagtgtgcatattgctttacattttaaacttccatatggcagatctttcccctgtgaacttgaaaggatagatagtatcattttattttataaatgatgacatccacagaggcwaagtgattagctgtgtcattccaacaaatagtagactggaaatctaaatcagtatttctttgaagggaaatatatacatctacacctgtgtgtgtgtgtgtgtgtgtgtgtgtgtgtgtgtacacgcatttcttatgtcacaggactaacacaatgaaatgttattttaagaattgaaacttagtgtgagaagtattatgtgcaaatgtataaaacattgtcacacattatacaatcgatcccagattgtgtccctt

SEQ ID NO: 157267 - DNA, 397 bp, Homo sapiens
ttaacccatgagagttatcygcagttagcatttgtgttgaagtaaagttgcactaaatgtatgtagggttataggagaatgatttagatcatatgaaactgtgaagggagaagaacataccaggatgaaagaagtaatttaagagtcaaagctacagatatttcaagtaatatgtaggagaaaaagaagcttaacttcaatttcattaaggatagtgaaaatccatctcagtagtgttcaggatgataacagattgcaaaagaaatggaaggaagagatggtgagaaaaatgaaggcagctggcatacatcatatcttctaggggtctggcaatgaagaaaaatagagaaaaacttcctaaaatattgggatgaaatttacttaattgcattttggc

SEQ ID NO: 157268 - DNA, 606 bp, Homo sapiens
tatagtcccagctataggaagctgaggtgggaggattgtatgaccccaagagttcaaggatgcagtaaactatattacatcactgcacttagcgcagggcaaaaagcgagacatcatctcttaaaaaaatccataaattccagagataaggaaccaagtaattaaattatggagagaattttcattatggtagtagtggttttaaaagaagagcagtaccagcagtaaggagtgagtggatggaaaggattaaatactgtaagtagaatttttcttcaaagtttgataatgatgaaggtaaatacataagaatagctagagtttggtgaaacatgaaacacacagaaattttctgaagaaagagaaaaaattcgaagagagagagattatgatgacagtttggtttagaaaggagctaaagaggagaaatttgttaaacattgaactattgagctaatagaacaatcatgtttgttattagtgaagaggaaaatggaaattcatgtgragtggttataataatctcagtaataattgaggcaatgtggaagtacagtgcagagtgaaaaagatttgaaaatgctactggggagagtcaattagaga

SEQ ID NO: 157269 - DNA, 532 bp, Homo sapiens
ttcataaattatttctgtcttaggcagaaatattctattttatttattttagtagcactttttgcagcatcatattttactggaaggtccttatgtttctgaaactcaaaatagactatttttcctaggaacagtatttatatcttattctttttgtaaacacagtttttgaaaaagtgtctggtacatagtaggaattcagaaacagttgttgtataaagtactttcattatagcacttattgcattccatttattgattcaattaacacatattcattgaaaaccttctacataccactcatactacaactgtgagtggtatgtagttctagtkcttaaggtatggcagtaaatacttgataggacatattctatcggtaaatactgataggacatattctagaaggggataagggaagaaataagtactatgaagaaatcaacgaatggtatattttgaacactgacagatctaagtgttattttaggaagggaggtcatggaggcccttactgaggaagtggcattca

SEQ ID NO: 157270 - DNA, 620 bp, Homo sapiens
aaagtgattggaggtgaaatgaaaagaaagaaaatggcmagacatggtgcacaaataactttcaaagactcataaattgcacatcttgaagatctttatgcctgagaatactgggcatctatgattcacaaaacactttacaaactaatattcttggcccccattttgtaactggcaaaaaaaggaggtaggcaataataagaacattattcagagtcatggaggaagtcacgaagtgcgccagatacagagccagttaccctggcaacattcttctgtttttccattcctgcatgccttggtattgggtttcagttgtggttctttaacttataggctgatcgtatattcagctttcacaatatgtcatgggcattttcctctggatttggctgtctctctcctgattctcctttcactaatttcactgtgtcagatgtaccacttcaggaaaatatggttatatgacaatctaaacatagaaagtagacaagaccacctggtgatggttcaagtgcaaaaagattactcacttaaaaaagaattcacaaaattcttttaatcatctcttctaggtcaccacaagagatttaatttaaaaaatttacaaacaagtttga

SEQ ID NO: 157271 - DNA, 620 bp, Homo sapiens
aaagtgattggaggtgaaatgaaaagaaagaaaatggccagacatggtgcacaaataactttcaaagactcataaattgcacatcttgaagatctttatgcytgagaatactgggcatctatgattcacaaaacactttacaaactaatattcttggcccccattttgtaactggcaaaaaaaggaggtaggcaataataagaacattattcagagtcatggaggaagtcacgaagtgcgccagatacagagccagttaccctggcaacattcttctgtttttccattcctgcatgccttggtattgggtttcagttgtggttctttaacttataggctgatcgtatattcagctttcacaatatgtcatgggcattttcctctggatttggctgtctctctcctgattctcctttcactaatttcactgtgtcagatgtaccacttcaggaaaatatggttatatgacaatctaaacatagaaagtagacaagaccacctggtgatggttcaagtgcaaaaagattactcacttaaaaaagaattcacaaaattcttttaatcatctcttctaggtcaccacaagagatttaatttaaaaaatttacaaacaagtttga

SEQ ID NO: 157272 - DNA, 620 bp, Homo sapiens
aaagtgattggaggtgaaatgaaaagaaagaaaatggccagacatggtgcacaaataactttcaaagactcataaattgcacatcttgaagatctttatgcctgagaatactgggcatctatgattcacaaaacactttacaaactaatattcttggcccccattttgtaactggcaaaaaaaggaggtaggcaataataagaacattattcagagtcatggaggaagtcacgaagwgcgccagatacagagccagttaccctggcaacattcttctgtttttccattcctgcatgccttggtattgggtttcagttgtggttctttaacttataggctgatcgtatattcagctttcacaatatgtcatgggcattttcctctggatttggctgtctctctcctgattctcctttcactaatttcactgtgtcagatgtaccacttcaggaaaatatggttatatgacaatctaaacatagaaagtagacaagaccacctggtgatggttcaagtgcaaaaagattactcacttaaaaaagaattcacaaaattcttttaatcatctcttctaggtcaccacaagagatttaatttaaaaaatttacaaacaagtttga

SEQ ID NO: 157273 - DNA, 575 bp, Homo sapiens
attctccaaaattgttttaaaatggcataagaaagcacattttattcctgtgtttgattttagaagctaatttatcctgtcgccttatttaactagrtcaaaggaggcatagaactctagttcaaactcaacctactcattccctacttattgacaatagctagggtttaattaactatttatactttatgaggaaaaaagttggtggatctgcatttcctgctttgccttgagtgaaatctccaagtcttttctattgacctctaattctgatgcaggtgatctgcacaccccatgctccaggctcttggaaggtagtgctcctgaaaccgtccccaagaaaattttataaaatagattaagggaaaaaataaaattcagctaggcttgcagctcaatcagaggtaattattaagccagcttgccctttgtctcacttccttgtagctggttactacttactactccaggaagacctccaggataatgtagcccttgtcacaatattctttgttctatagataaaatctaagacattgtgagatgataagctttctgtttgagtttctccttta

SEQ ID NO: 157274 - DNA, 575 bp, Homo sapiens
attctccaaaattgttttaaaatggcataagaaagcacattttattcctgtgtttgattttagaagctaatttatcctgtcgccttatttaactaggtcaaaggaggcatagaactctagttcaaactcaacctactcattccctacttattgacaatagctagggtttaattaactatttatactttatgaggaaaaaagttggtggatctgcatttcctgctttgccttgagtgaaatctccaagtcttttctattgacctctaattctgatgcaggtgatctgcacaccccatgctmcaggctcttggaaggtagtgctcctgaaaccgtccccaagaaaattttataaaatagattaagggaaaaaataaaattcagctaggcttgcagctcaatcagaggtaattattaagccagcttgccctttgtctcacttccttgtagctggttactacttactactccaggaagacctccaggataatgtagcccttgtcacaatattctttgttctatagataaaatctaagacattgtgagatgataagctttctgtttgagtttctccttta

SEQ ID NO: 157275 - DNA, 577 bp, Homo sapiens
tgtagacatcttggattctagaagagtttgtaatggattaaagggttaagctatgaaattgttgccctctgtgatttttccacactagaacagactgacatggtttgaagcagttgggctttaacctatagataggaggacagagatgattgcctatgaagcaattattaaatagctgcattttggcatgttctagttgaaaagatttagttttacctatatcacctcatcatcactaatttaatcatcctcagaaaatgcaaaaataatgatgtacatttgacaagtcttatacaaaattatgtttcatagctttgtggtcagaattaagccatgttctaaaatacaaatgaatagtytacagcccactaattcctaactgtaagtgttaagtctatataaaaataagagacaagcttgtgatcaggaatagcttccaattatgaaaaatttaaataaaaataatagaatgtgcttaatttatttatcatatacaaagtagacatatgtgaccaaaatgattcattatttttacgattttcatgggaataagtttgacaatattaagtgctggaga

SEQ ID NO: 157276 - DNA, 479 bp, Homo sapiens
tatacttcttaaaatattttgtaattttttccatcttaaaaaaaggtgtagaataacatatttatttgaggaattatttttgttttaatatcataacataaagccataacaggtgttcaacaaataatgattgaaatagcacatctcttctaaaaatagcrtccttatatttgatctcactttttaaaaattcttttacctattttttcattaatcacttatagagcacctattacgttttgggcatcatgccaaacaccccaaagaaaacacacacaggtaaagtccttggagagtcacaatctgcgggagacaacagaatgtaaacagctgaaatgtgatatgtagattaaggagcaagctctgaaagggccagtagatcagtctagagcagagtttctcaaccttcacactattgacattttgggccaggtaattctttagtgagtggctgtcctgtacattgtgggtttagtgaa

SEQ ID NO: 157277 - DNA, 479 bp, Homo sapiens
tatacttcttaaaatattttgtaattttttccatcttaaaaaaaggtgtagaataacatatttatttgaggaattatttttgttttaatatcataacataaagccataacaggtgttcaacaaataatgattgaaatagcacatctcttctaaaaatagcatccttatatttgatcwcactttttaaaaattcttttacctattttttcattaatcacttatagagcacctattacgttttgggcatcatgccaaacaccccaaagaaaacacacacaggtaaagtccttggagagtcacaatctgcgggagacaacagaatgtaaacagctgaaatgtgatatgtagattaaggagcaagctctgaaagggccagtagatcagtctagagcagagtttctcaaccttcacactattgacattttgggccaggtaattctttagtgagtggctgtcctgtacattgtgggtttagtgaa

SEQ ID NO: 157278 - DNA, 479 bp, Homo sapiens
tatacttcttaaaatattttgtaattttttccatcttaaaaaaaggtgtagaataacatatttatttgaggaattatttttgttttaatatcataacataaagccataacaggtgttcaacaaataatgattgaaatagcacatctcttctaaaaatagcatccttatatttgatctcactttttaaaaattcttttacytattttttcattaatcacttatagagcacctattacgttttgggcatcatgccaaacaccccaaagaaaacacacacaggtaaagtccttggagagtcacaatctgcgggagacaacagaatgtaaacagctgaaatgtgatatgtagattaaggagcaagctctgaaagggccagtagatcagtctagagcagagtttctcaaccttcacactattgacattttgggccaggtaattctttagtgagtggctgtcctgtacattgtgggtttagtgaa

SEQ ID NO: 157279 - DNA, 400 bp, Homo sapiens
aagcttccggaaatggagtattgtggggaatcaggcctgcctgaccctgcagttgcccatgtggttatgagaagaatctctctgtaagattctccttttttccagaaggaaatagagcagaaaacactcttcttttccctctgtccttatcctacctaaaattgctctatattcagcactgtggcccagagagggtcccgcagacaggctttcttaccatctgctcctgctgcctctgttacctccttcctaccacaagaacagctstcctctttatcttccttcctgtccaggacttgcctggagaaatactggtgatatcctcagtcaggtaggctacaactgacctctgtgccccgatgggactcatcttccctttccctgaagattttgacttcat

SEQ ID NO: 157280 - DNA, 565 bp, Homo sapiens
gaagttgaaagtcgatttgaagttgaaaatcaaccagtcctcaactctcattggttttcttaattcactgtaaatttgcaaatacttttataaaaactgccctttataattgtacagcaattctatctctactatgctaattataaagagagttttgccactatcttaccaccaagtataaaagaaacaaaatattcayaaaaaatgatccaaatgggactcacttccagaatggtgatgtgaagagcttttcaaatccactccctaaaaacaacaataactggtgaaaattatagataaataaccatttaaagttcctggtaattgtcctaaggacatacagcacgaagaaaatatttattcaagacaatctcttatatttcagtaagaactgcaaacaattgtgatgcttgaaccacaatatatttccccaccctctccagttgagtgtgatgatgttccagtaaggatgggtgcagccactaacgcagggccccctctcaacctagatcctcgtctacagtataccctgagagaagcaggccaccagcattactcatcatcc

SEQ ID NO: 157281 - DNA, 565 bp, Homo sapiens
gaagttgaaagtcgatttgaagttgaaaatcaaccagtcctcaactctcattggttttcttaattcactgtaaatttgcaaatacttttataaaaactgccctttataattgtacagcaattctatctctactatgctaattataaagagagttttgccactatcttaccaccaagtataaaagaaacaaaatattcataaaaaatgatccaaatgggactcacttccagaatggtgatgtgaagagcttttcaaatccactccctaaaaacaacaataactggtgaaaattatagataaataaccatttaaagttcctggtaattgtcctaaggacatacagcaygaagaaaatatttattcaagacaatctcttatatttcagtaagaactgcaaacaattgtgatgcttgaaccacaatatatttccccaccctctccagttgagtgtgatgatgttccagtaaggatgggtgcagccactaacgcagggccccctctcaacctagatcctcgtctacagtataccctgagagaagcaggccaccagcattactcatcatcc

SEQ ID NO: 157282 - DNA, 226 bp, Homo sapiens
tataaaggaacaattggctcaagcttctgtgttctctttccttactgtgatctgtagctagatgccaggcccatggatatartgcaatggtgacaaaaaagggctggctcaggatagcccagtctaccaatggtaccatagcagacacttgaggctcatagcaatggaactcctattgtaccaaatttcctatgagtcaagtgtacaaaagtataacataagtatc

SEQ ID NO: 157283 - DNA, 528 bp, Homo sapiens
tgtccttgttattgtttattattttttttctttacagtttattgaaatatatttgacatgcaataagctgtacatatataaatgtacaatttgagaagctttaacctgtagatatagccataaaaccattaccacaatcaaaataatgaacattcaccctcaaaagtttccatgtgtccatttgtaatcccttcctccctttgtccccatccttaggcaatgactttttgcattatatcagtataaatatgttttcattttctagaattatacttaaatggaatatacagttcataatgtacttttttggtccagcttctttcactagcataatatcttttgaaatttactcatgttaatatctttattaatagttcattactttttttgctragtagtattccaatgtatgtatataccacaatttatttattctttcacctattgatggacatagggttggttgcagtttgcagctttaacaaacaaagctattctaaatattcatatacaagattttatgtgaac

SEQ ID NO: 157284 - DNA, 564 bp, Homo sapiens
aacatttgaatagaggcagtccagagatattcagtagaagcctttttatcctatgttatctgatggaatttggcctattgtttgaaaataatcagttaaactgagaaatcatatacgacaataaatatgtactttaaacattttaaacacacaaattcacactcaatcatgttttgatgttgaacattttagtatggattccttgattgtgctttattgtagtcttgattatataagtaagcctttcaatgtgttacctagaatttccagtataagtttcattttgtttggggtttttttaatgtaataagatagatacttgctcagcagtctgaagagaaataattttaataccctgttttcatccacatttacagttgttttactgacacataatttcagggtaccttttttaagggaactcttatacactgttggtgagaatgcaaactagtttagccactatggaaagccgtttgtagagttttcaaagaayttaaagtacaactaccattcaacccagcaatcccactactggatatatacccaaggaaaataattcat

SEQ ID NO: 157285 - DNA, 559 bp, Homo sapiens
ttcttctttatacatatttttttgtttttgaatgccttaatgataatagtggctgccgtcagggatagaaactgggtcgcaggggacaggaatggagtgccttttacattttgaaccttgggatgtattaccaattttttaagaaagctacaatttagatttttaaaagttaaattatgtatttgttacaactgtaatcagaagcagtaaatgatattttaatgtctcatgaaattaacaaacatgtatacacataaaatatttaaataacaatgaaatacatgcggccataaaaaagaatgagttcatgtcctttgcagggacatggatgaagctgaaagccattattctcagcaaactaacacagcaaaagaaaaccaaacaccgcatgttctcactcatragtgaaagctgaacaatgagaacacatgaacacagggagggaaacatcacacactgggcctcgcaaggggtcagggggaaggggagggagagcattaggacaaatacctagtgcttgcagggcttaaaacctagatgacaggttaacaggtgcagc

SEQ ID NO: 157286 - DNA, 544 bp, Homo sapiens
tcaacaatgaacaaaaagatgtgcttcctagaataggacctaaacaaccacactagaactatttagcttttctgacacctcatgacagaaaactggatttaaatctatgtgccaccctccacattggtttcttcagccagaaggtttgctataaatagatttttaaaagatcatttaaattagtcactctcagccttctgtgcagtggaagaggcattaagatcaaattatctcaccatagatattgaaaaaaagaatacgtagaacttaattcccatttcctccccagkcttagagaaagcctagccaagggaagtttacttaagagaggcaaacttttatcctgaacttccgcatgttttagccttgtactccaacctcaggacccagattatatggggaaacagataaggatagaaatgcacttaggtttaaaaacctatcattcaagcaatgtgctaactgagcataggctctcctattcacagtgtacgcaaagaagattgacgagagatagacatgtagtttgtattgtgatcaaatt

SEQ ID NO: 157287 - DNA, 544 bp, Homo sapiens
tcaacaatgaacaaaaagatgtgcttcctagaataggacctaaacaaccacactagaactatttagcttttctgacacctcatgacagaaaactggatttaaatctatgtgccaccctccacattggtttcttcagccagaaggtttgctataaatagatttttaaaagatcatttaaattagtcactctcagccttctgtgcagtggaagaggcattaagatcaaattatctcaccatagatattgaaaaaaagaatacgtagaacttaattcccatttcctccccagtcttagagaaagcctagccaagggaagtttacttaagagaggcaaacttttatcctgaacttccgcatgttttagccttgtactccaacctcaggacccagattatatrgggaaacagataaggatagaaatgcacttaggtttaaaaacctatcattcaagcaatgtgctaactgagcataggctctcctattcacagtgtacgcaaagaagattgacgagagatagacatgtagtttgtattgtgatcaaatt

SEQ ID NO: 157288 - DNA, 641 bp, Homo sapiens
tttctcctgttcatcctacagctggagtgatatgtttaaaacacaagtgtgatcacgaaacttctcatcttaaaatctttaattagctgtcccttgttcttaacatgaaactcttaatctttagtgtgaccttcaagatcctgcttctcattatcagtctcactgggcacctctcctgtgctctctgctactggccttcctttggttcttaaaaagtccttctttctacctgaaggcccttagatatgctgatttacccatgtaagaaattctcttcttttctactcttccttctatgattccctgacttttacttacccttcagattccagaataaaactcttcttgttcaagcaaaattttccctaaccccaccacccagwtcatatgccctattaatctatttctcttttagaatagttgccacatttgcaatgaaatgttctttggtgtaatgaaatggcatgttaattatcttcttcgcctgacagaatattagtcatgtatatctaatttactgctttatccttatctctaaccttgcacaaagtaagtactcaataaatatttatcaaatgagtgaatgaactccagtagttaccagtgttatgataaccatgatcaggaaaactattagtaaa

SEQ ID NO: 157289 - DNA, 466 bp, Homo sapiens
ttaaggtaaatgaaactatgacaatgcaaatttttcctacttaatattttctttaattttgaagctatgactccctaaataattttttaattagtatcttcatcaacatttacagaagaatcacatgctatgagtaccaaaaacttcttctttatgtttaaytcaattaatttcgatttcaagttaactccatttcttttgtggtttttgactttataaatgctatctagtccctaatattctaattataaccctccatatatctgaaaaaaagaaatattattagggtacaaaatgaagatttataatatagaagataacacaatgagaaggtaatctggtaactggaggttcaacattttcaatacctgtgggtaaaacaaaccaagccagatgaaatgtacctattgtgtatttaagaaattagacagcttagcatccaaaaaaaacaaaacctttctaaatg

SEQ ID NO: 157290 - DNA, 222 bp, Homo sapiens
tgagtcttccaatttatgcatatggtatatttattcataatttagatctttgatttctttcatcagtgttatgttgttttcagtatataatacctgtttgtgttttgttagatttacacctaagtagttttaaattttctgtgtaattgtaaattatattgtatttttaattttggtatccatgtatttttgctagcwtgtagaaatataattatttttata

SEQ ID NO: 157291 - DNA, 554 bp, Homo sapiens
ctttactatatttatattttatgaaacaagagaaaagagtgacataaatgctacaaataagaaattgtgagaaaaacaaaattagagtatgtgtttagtgaatgagattgtacagatatgagagagaaggaatgaaaatgagggagtatgtgaatgagtcattggatgttagtgtttaaataggaaatatattattgatgtttgggcctaatttcctaaattagaaatggaaattattgtatcttttacatatctgtatgtaattcagaaatacatctatctaagtgtggtattgaggtggaaatgcccatattatcatccaaatgccagaaagaaaattttatggaagtgaaatataaaccaaaggggaagaaatacgtaacttagactagcrttcagattggaaatgctgggatggaagaaagcagcttgttttaaactccactccgatactttcgtttcaataggattttaaatcctaacaactttcctagcctggactaatgagatagttggaccgacctggtaattagtatggactgtgcctcccagga

SEQ ID NO: 157292 - DNA, 589 bp, Homo sapiens
tgtcctttttcttctatagcatcaaaatattatataagttattgttaataattttcaatgaattctttatgatttaaataaaaatcattcttattgggctcatatgttttacccccacaaaattgtgaatagaatttgtacagtttcatgaactctgaaataacaaatgtaggcaattttctttttcttttttcttactcagaggtttccaacacattttattttgcagaccactggtttgtagctttttagraccaacatctgtatcaattcctataaaatgttcaatcaatttcagttccatagcaggctcttccatgctgcgcaccatgcttatggctgaaggtctagttacacacgcataaaggctgcccttcccgctggttcctggacgagggcgcatccaagttaaagcctcttccaggagctccatcttcgcagggggtcatttcctttggcagtaagtcagtttatgtgtgcggctttggtgcctgtgagcaggaagcaccagaaacgtgcaggatgtgctattttttctctgatgaagatgggcacttgaggatccagtgcttgtgcttaatgacaggaa

SEQ ID NO: 157293 - DNA, 625 bp, Homo sapiens
cttgggagttctaaggccctgcccaccacctgttccccaccttactaccacagctgatgctctctggaaagtgccatctcctggcaggaggccagccagcacaaaaatagtgcattaaacaaccaaagctaaggacccttacagagtccatttcacccccctgccacttccatcagaacaggtgctgttatccatggctgagagacccacagacagttcacatcacaggactctgtgcagacaatccccagtaccagcctagagcctggtaaacttgctgggtggctagatccaaaagcaagaaaacaatcactacagcttggctctcagaaagacacatccataggaaacgggggagactactacatcaagggaacaycctgtgggacaaaataatctgaacaacagcctttagccttagacctttcatctgacagaaaccacccaaatgggaagaaaccagaaaaccgactctggtaatacgacaaatgaggttctttaacattccccccaaatcacactagctcaccagcaatggacccaaaccacgaagaaatccctgatttacctgaaaaagaatttaggaggttagttattaagctaatcagtgagggaccagagaaag

SEQ ID NO: 157294 - DNA, 625 bp, Homo sapiens
cttgggagttctaaggccctgcccaccacctgttccccaccttactaccacagctgatgctctctggaaagtgccatctcctggcaggaggccagccagcacaaaaatagtgcattaaacaaccaaagctaaggacccttacagagtccatttcacccccctgccacttccatcagaacaggtgctgttatccatggctgagagacccacagacagttcacatcacaggactctgtgcagacaatccccagtaccagcctagagcctggtaaacttgctgggtggctagatccaaaagcaagaaaacaatcactacagcttggctctcagaaagacacatccataggaaacgggggagactactacatcaagggaacatcctgtgggacaaaataatctgaacaacagcctttagccttagacctttcatctgacagaaaccacccaaatgggaagaaaccagaaaaccgactctggtaatacgacaaatgaggttctttaacattcccccmaaatcacactagctcaccagcaatggacccaaaccacgaagaaatccctgatttacctgaaaaagaatttaggaggttagttattaagctaatcagtgagggaccagagaaag

SEQ ID NO: 157295 - DNA, 592 bp, Homo sapiens
taatcaaacaatttttccattttacccgcccccgccaaccccggcycaggctaaacttctgtgtgagtaaaatgtggaatatgattttggactcttgaaaaagcctcctttctctaatagcacacaaagactttctattcacaagcagagagacggctcaaaatgcaaaataaatttattatcaccaggaatacttgctatagctattcgagaacaggggctggaggcaatagggactatcctgtgtggtagtctgtagggagcctgtgtgaggcactggatgcccgagaaaaaatatagagattaagtagattccctaacacagctgttgggcccctacttcccaacagggcctagagctggccctaagaacattaaagaacagcaggaggtttgcgagagaaggaaaagtacaaataacttgttttgtagaggcctagccatttaggaactggatctacctcagctgtgtatctcctagcccagccccagggctggcagagagtagatgctcaggagccgtgtgtgctaagtggaggaaatgcaaatggtaaaccggcccatggaggatcaagatgagtaactatctatg

SEQ ID NO: 157296 - DNA, 564 bp, Homo sapiens
aggtattcactgtcctcctgtgatgagttactggattaaatggccatagatagttttgacaaagcacaagcaaattattaccaaataatctcaccatgatattggagtcttcctgtttatggcccaggctccccttcattcaaaaagttctgaatctgaaaattggctcagattcagaaactgggcayctattctgctctaagccctaatcaacccttaattgttgctgactatataaattgaacaatactgttgttgactgtccaacttattctagagatctaggcatctttatcgctctctctgcaggtcaggcacaattcttgatgtgctctgaacttgtactcattatggcagtcccatcaacctggatgctgactgttaagtaccactacttggccttcattattttgagatcccatcatctcctcatctgctaggggactgagttctgtaacagcatctcctacatttgtcctggtctatagaggaaagttatcactgagtctttaaggatgctgaagctctcttcagtatagtccttattactttagtaaacagagt

SEQ ID NO: 157297 - DNA, 564 bp, Homo sapiens
aggtattcactgtcctcctgtgatgagttactggattaaatggccatagatagttttgacaaagcacaagcaaattattaccaaataatctcaccatgatattggagtcttcctgtttatggcccaggctccccttcattcaaaaagttctgaatctgaaaattggctcagattcagaaactgggcacctattctgctctaagccctaatcaacccttaattgttgctgactatataaattgaacaatactgttgttgactgtccaacttattctagagatctaggcatctttatcgctctctctgcaggtcaggcacaattcttgatgtgctctgaacttgtactcattatggcagtcccatcaacctggatgctgactgttaagtaccactacttggccttcattattttgagatcccatcatctccwcatctgctaggggactgagttctgtaacagcatctcctacatttgtcctggtctatagaggaaagttatcactgagtctttaaggatgctgaagctctcttcagtatagtccttattactttagtaaacagagt

SEQ ID NO: 157298 - DNA, 606 bp, Homo sapiens
attattttctatatacagttgggcctcttttagaaggttgtaatttttatgcatttaatagaaatgtggccaggcacggtggctcattcctgtaatcccaacactttgggaggctgaggtgggcggattgcctgagctcaggagttcaagaccagcctgggcaacacggtgaaaccctgtctctactaaaatacaaaaaattacccaggcatggtggcatgcacctgtagtcccagccactcggaaggctgaggcaggagaattgcttaaacccaggaakcaaaggttgccgtgagccaagatcacgccactgcaccccaacatgggcgacagagtgagactccaactcaaaaaaaaaaatgttcttgccaattaagaaaaaggttttaaggttgtgaggaaataggtatgtgagtttcactcatcatcaccagttcttttagttatgtcacttggactcaaaagtacattttccataaaaaaatgaaacaaaatccatatttttaaatggagaaatgtaaaaagatgtgatctacaaaattattacttcttgttttctgccaaacagccagatttgtttttcaaatgtataattaattctaatta

SEQ ID NO: 157299 - DNA, 606 bp, Homo sapiens
attattttctatatacagttgggcctcttttagaaggttgtaatttttatgcatttaatagaaatgtggccaggcacggtggctcattcctgtaatcccaacactttgggaggctgaggtgggcggattgcctgagctcaggagttcaagaccagcctgggcaacacggtgaaaccctgtctctactaaaatacaaaaaattacccaggcatggtggcatgcacctgtagtcccagccactcggaaggctgaggcaggagaattgcttaaacccaggaatcaaaggttgccgtgagccaagatcacgccactgcaccccaacatgggcracagagtgagactccaactcaaaaaaaaaaatgttcttgccaattaagaaaaaggttttaaggttgtgaggaaataggtatgtgagtttcactcatcatcaccagttcttttagttatgtcacttggactcaaaagtacattttccataaaaaaatgaaacaaaatccatatttttaaatggagaaatgtaaaaagatgtgatctacaaaattattacttcttgttttctgccaaacagccagatttgtttttcaaatgtataattaattctaatta

SEQ ID NO: 157300 - DNA, 608 bp, Homo sapiens
caacacaggagttgagaacttaagcttcctatatgtcactttctatgccataaaacttcctagctttttgttgtttcttttccttttggaaacatagctggaatagtgtttgtttgtttgcaagcttcacttccttaaggattttagctttttctagatcgattatttgaattcacgctattctatagtatatatccttgggaagtgtsttaggacaggtttctcagaatcgaatcctgagacaagggtgtgtatgcaagagatttattaaggaagtgaacccaggaaaatcctgtaagggaatgaagaaagtaagacagcaaaaagaaagaaacgaagcaaggatgggatccaagcaaaagtcaacctcagcccagccctgtaggaaaactctagagttaaattgtgcctcaggttttttcctagttgaagccagaaacctgggctttcatactctgcaccagtggatcattggctgggggaacagggcagggaaaggggtggaagatgtgtctgtgagagcttaaactgcccggtccctctggctctcggggtgtgtgtgtgtgtgtgtgtgtgcgtgcgtgcgtgtatgtgtgtgtgcgtgagca

SEQ ID NO: 157301 - DNA, 578 bp, Homo sapiens
gaccttcagctacatactagagctttgacagctctaacatctcaggagagaggcctgggttggctgtgtaatttaatcaactttagcacatagaaataggggaaaacattcacatgcaatgatagaagactatgcccctcttccttctctctgcaccccttcacagcaattcattgtatttgctgttgtctacttgtycttcgtccatcctgtctctcatttccctcttcttttttttttttttttgagatggagtctctctctgttgcccaggctggagtgcagtggcacagtctcggctcactgcaacctccacctcctaggttcaagtgattctcgtgcctcagcctcccaagtagctgggattacagacatgcaccaccactcctagctaattttttttgtatttctagtagaggcagggttttgccatgttggccaggctggtcttgaactcctggcctcaggtgatccacctgcctcggcctcccaaaatgctggaactacaggcgtgagccatcatgcccagactcattttcctcttctcacaaaaacgttgaaagtgagagaagggaagt

SEQ ID NO: 157302 - DNA, 584 bp, Homo sapiens
cagctacatactagagctttgacagctctaacatctcaggagagaggcctgggttggctgtgtaatttaatcaactttagcacatagaaataggggaaaacattcacatgcaatgatagaagactatgcccctcttccttctctctgcaccccttcacagcaattcattgtatttgctgttgtctacttgtccttcstccatcctgtctctcatttccctcttcttttttttttttttttgagatggagtctctctctgttgcccaggctggagtgcagtggcacagtctcggctcactgcaacctccacctcctaggttcaagtgattctcgtgcctcagcctcccaagtagctgggattacagacatgcaccaccactcctagctaattttttttgtatttctagtagaggcagggttttgccatgttggccaggctggtcttgaactcctggcctcaggtgatccacctgcctcggcctcccaaaatgctggaactacaggcgtgagccatcatgcccagactcattttcctcttctcacaaaaacgttgaaagtgagagaagggaagtgagcccttatca

SEQ ID NO: 157303 - DNA, 578 bp, Homo sapiens
gaccttcagctacatactagagctttgacagctctaacatctcaggagagaggcctgggttggctgtgtaatttaatcaactttagcacatagaaataggggaaaacattcacatgcaatgatagaagactatgcccctcttccttctctctgcaccccttcacagcaattcattgtatttgctgttgtctacttgtccttcgtccatcctgtctctcatttccctcttcttttttttttttttttgagatggagtctctctctgttgcccaggctggagtgcagtggcacagtctcggctcactgcaacctccacctcctaggttcaagtgattctcgtgcctcagcctcccaagtagctgggattacagacatgcaccaccactcctagctaattttttttgtatttctagtagaggcagggttttgccatgttggccaggctggtcttgaactcctggcctcaggtgatccacctgcctcggcctcccaaaatgctggaactacaggcrtgagccatcatgcccagactcattttcctcttctcacaaaaacgttgaaagtgagagaagggaagt

SEQ ID NO: 157304 - DNA, 608 bp, Homo sapiens
caacacaggagttgagaacttaagcttcctatatgtcactttctatgccataaaacttcctagctttttgttgtttcttttccttttggaaacatagctggaatagtgtttgtttgtttgcaagcttcacttccttaaggattttagctttttctagatcgattatttgaattcacgctattctatagtatatatccttgggaagtgtgttaggacaggtttctcagaatcgaatcctgagacaagggtgtgtatgcaagagatttattaaggaagtgaacccaggaaaatcctgtaagggaatgaagaaagtaagacagcaaaaagaaagaaacgaagcaaggatgggatccaagcaaaagtcaacctcagcccagccctgtaggaaaactctagagttaaattgtgcctcaggttttttcctagttgaagccagaaacctgggctttcatactctgcaccagtggatcattggctgggggaacagggcagggaaaggggtggaagatgtgtctgtgagagcttaaactgcccggtccctctggctctcggggtgtgtgtgtgtgtgtgtgtgtgcgtgcgtgcgtgtrtgtgtgtgtgcgtgagca

SEQ ID NO: 157305 - DNA, 550 bp, Homo sapiens
agtgtttatcttttttttttatagttgatctgtaataggcctttatatatctaggaaaatatttccttgtcaaatgyattgcagcttttttcttgtttgttgtttgtccttcagctttgtttatggcacctttataataaatcagcttagaaattttatgttatcaaatcttttcatcatcccctttacatcttttgacattggtaacaccgctgaagaattacaaaaaaatgtatctggcttggtgtggcagctcacgcctgtaatcccagcactttgggaggccgaggtgggcagatccattgagcccaggagtttgagaccaacctgggcgacatgatgaaaccctgtttctacaaaaaatacgaagggagttgtggtgcacacctgtagtcccacctattcaggaggctgaggtggaaagatcacttgagcctggaagttcgaggctgcatgattgcccctctgcactccagccggggtacagcctgggcaacagagaagctgtctcaaaaacaacaacaacaacaacaacaacaacaaaacaaac

SEQ ID NO: 157306 - DNA, 595 bp, Homo sapiens
aggtgagccccccaggtagctgggactataggtatacaccactacacctggataattttagtattttttgtagagagggagtttcatcatgttgcccaggctggtmtcaaactcctgagctcaagtgatctgcttgccttgacctcccaaagttttgggattataggtgtgagccaccacacctggcgcagctcttctttatacatctgtgaatccattgggtcctgggctctttctggttggttgatttattacagatttaattttggaacttgttattggtttgttcagagtttcaatttcttcctgattcaatcttgaaaagttgtatgttttcagaaatatatccatgtcttctaggtattctagtttgtgtacatagaattgttcttaatagtctccgaggattttttctatttctgtgaggtcagtggtaatatcccctttgccatttctcattgtgtttatttggatcatctctctttctttctttgtctagctagcagtctatcaatctcatttattctttcaaagaaccaatttttgcctttgctctcttttgtatgggtttttcttgccccattttgttcagttc

SEQ ID NO: 157307 - DNA, 644 bp, Homo sapiens
gatttcatttttaaaaaattttcgagaattgctttatggccaactgtgtggtcgattttagagtatgtgccatgtgcagctgagaagaatttatattctgttgttgttgggtgaagtgttctgtagatgtctgttagatccatttggtcaagtgtcaagtttaggtcctcaatagctctgttagtattctgcttcagtgatatgtccaatactgtcagtagggtgttgaagtctctcattattgttgtgtggtcatctaagtctctctgtaggtctctaagaagttgttttataattctgtgtgctgcagtgttggatgcatatatatttaggacagttgagtcttctggttgaattgaaccctttatcactatgtaatgcccttctttgtcctttytgatcattgttgatttaaagtctattttgtctaaaataagaatagcaacccctgctttcgtttgtttgttttccatttgcttgatagatttttcttcatctctttactgtgagcctttgggtgtcattgaatgtgagattaacctaatgaagacagcatacagttgggtcttgcttcttatccaacttgacactctttgccttttaagtgggggcatttaggccaggtacttttaaggttaatattg

SEQ ID NO: 157308 - DNA, 643 bp, Homo sapiens
acatgaatttcaacagcatgctacaggacatcaacatttgtttcttgtccacttttgattcttctcagcaatgtgaaaactcttcattatacttgtctctaggctcacttcactcagttacctggggccatcattggttaatatagctcttttaaaaaatgaaaatgagataatactggttgtttcagcaatagctcatctatgtcagtaccttttctaaatcttatgagctcaagtattttattttaattcttgcttatgtaattttgtgactgttctttctggtccaattaaaattattcattaattcacacgtgtagtcaaaaaaatacttattgggaggggactataagctaagttccaaaaatatacaaatgaattttaccawtgctgaccacaagcattttaaagtgagagttacaaatatttttatgtgtgtgtacattataatagcaatatagtatggcaaatgccataacaacagtagagaacaaaagatgtttttagctaccttgacagaactgggaaagcctcttcacggagaaggaagcatttcatattgccaggcaaataatattttggaaattgcaggggaggaaagaagtccagacaggagaaacagtaggccaaaggcatagaaatg

SEQ ID NO: 157309 - DNA, 503 bp, Homo sapiens
cttaaaaactatagacagatagggtttctttccaacataggcaagaatttttatatcctttgtatctcaatcactatactgtacttatttttatcaaaaagtaattacataagatatctttccaaatgtatrtctgtcttctcctccttcttttttctttttagtctcttttgctcacaatccttctatggatgaagcttacggtaaatgttgacatatttgagaggttcattatataacattctgcccaccaaaagatcagaagcatttccttttttttatgttcttccatcataaatatctatggcatcacctgaagtgaattcattagtatgcaaatctccacactttactattctctcagctcatcttccaaagttaatgaagcataagtaaatgtgtttgattaaatcatccagacttcttcccaaggctgctaagattgggcattcaccccaaggttgggaaagtggggaagggggacattcaagtatccctcaagc

SEQ ID NO: 157310 - DNA, 615 bp, Homo sapiens
cctgggggcagtttccctcctttgatagtgagtgaattctcatgagatctgatgtttttataaggkgctttcccccttttgcttggcagttctcctggctgccaccatgtgaagaaagaagtgtttgcttccccatctgccatgattgttaagtttccagatgcctccccaaccctgcggaactgcgagtcaattaaacgtcttttctgtataatttacccagtatcgggtatttcttcattgcagtgtgagaatgaactaatacaccaatgctgttttaactacactgacatgaacatattaatgttttctcctccttgagcaatttcttctctattgccacccttctgagataaaatgttttgttctccccttcagaggcaaatttctccagaaaaaaacctaatttgctccactcattttcaaattatgtaaccaccacttgtgaatgttttgcaatctggtctgttttcatcactacaaaagggcggtgctatcacagttcaccagaaatccttgtcactacagcatccactggcattatcacagatcaaaggtttcagatatcattgttcaccatctctcctaaacatattacatattttaagaaaagtt

SEQ ID NO: 157311 - DNA, 615 bp, Homo sapiens
cctgggggcagtttccctcctttgatagtgagtgaattctcatgagatctgatgtttttataaggtgctttcccccttttgcttggcagttctcctggctgccaccatgtgaagaaagaagtgtttgcttccccatctgccatgattgttaagtttccagatgcctccccaaccctgcggaactgcgagtcaattaaacgtcttttctgtataatttacccagtatcgggtatttcttcattgcagtgtgagaatgaactaatacaccaatgctgttttaactacactgacatgaacatattaatgttttctcctccttgagcaatttcttctctattgccacccttctgagataaaatgttttgttctccccttcagaggcaaatttctccagaaaaaaacctaatttgctccactcattttcaaattatgtaaccaccacttgtgaatgttttgcaatctggtctgttttcatcactacaaaagggcrgtgctatcacagttcaccagaaatccttgtcactacagcatccactggcattatcacagatcaaaggtttcagatatcattgttcaccatctctcctaaacatattacatattttaagaaaagtt

SEQ ID NO: 157312 - DNA, 494 bp, Homo sapiens
gcttcatacttttaaacagcctgctttcatgagaactcactatcatgagaacagcatcaagggtatggtgctttaccattcakgagaaatccaccccaacgatgcaaccacctcccaccagttcccacctccaatattggggactacaatttgacaggagatcttttgggggacagatatccaaaccacatcactgcatcttcacatactggcctaataggggagatgaccctcttcagcctgaccagagatgctcagtacttactgaagctttttgctctcccaaacccacgatatttgttcttatcaacccccaggaaactagagcatgctatgtcctgtcagtggcctaaaacagatgagttgcaagccacactgtcaggcagcagttggaaaagttaaggtggggagaggccagatgggtagtatttcaaatctttctaagtagaagctgaagacttctgttttattgttggagcaatccagggggatga

SEQ ID NO: 157313 - DNA, 494 bp, Homo sapiens
gcttcatacttttaaacagcctgctttcatgagaactcactatcatgagaacagcatcaagggtatggtgctttaccattcaggagaaatccaccccaacgatgcaaccacctcccaccagttcccacctccaatattggggactacaatttgacaggagatcttttgggggacagatatccaaaccacatcactgcatcttcacatactggcctaataggggagatgaccctcttcagcctgaccagagatgctcagtacttactgaagctttttgctctcccaaacccacgatatttgttcttatcaacccccaggaaactagagcatgctatgtcctgtcagtggcctaaaacagatgagttgcaagccacactgtcaggcagcrgttggaaaagttaaggtggggagaggccagatgggtagtatttcaaatctttctaagtagaagctgaagacttctgttttattgttggagcaatccagggggatga

SEQ ID NO: 157314 - DNA, 583 bp, Homo sapiens
ttgcctaagccaatgcctagaagagtttttccaatgttatcttctataatttttatggactcaggtcttagatttaagtctttgatccatcttgagttgatttttgtttaaggtgagagatgaggatccagtttcattcttccacatgtgacttcccagcactatttattgaatagggtgtcctttccccaatttatgtttttgtatgttttgttgargatcagttggctgtaagtatttgggtttatttctggttctctattgtgttccgttgttctatgtgcctgtttttataccggtatcatgttgtttactatagtcttgtagtatatttgaagtcaggtaatgtgatacctctagtggttttttttgtttttgtttttgtttttttcttactattgctttgtctatgcatgctctttttgggatccatatgaattttaggattgttatttctagttctatgaagaatgatggtcatattttgatgggaattgtactgaatttgtagattgcttttggcattttcacaatgttaattcttcattaatgcaattttacaatattaattctatttatgagc

SEQ ID NO: 157315 - DNA, 629 bp, Homo sapiens
attaaataaaacttagttatttaaatcctttatatttttacttaatttttttcaatcacctgatctcttaaattctgaaagattttctaaattcttctataatgattgcaaatttgaaaatttatcattgtgttttttctaattgaaatgatgaaatatttgatgctaatgaaaatttcaaagcatataaatgaatagctatgactgttggttgatcttatgaactagaacattaccaactgataggctttggttgtgtccccacccaaatctcatcttgaattcccatgtgttttgggagggaccaagtgggaggtaattgaatcatgggggcaggtgtttcccttgctgttctcatgatagtgaacaagtctcacaagatctgatggttttaaaaaagggagtttccctgcacaagctctcttctcttgtctgttgccrtgtgagtcatgcctttcactttgcaacatgattgtgagccctcttcagccacgtgtagctgtaaatctataaacctcattcttttgtaaattgcccagtctcaggtatgtctttatcagcagcatgaaaacggactaatataccaatactttgcaacacctctgtgacttcctgtatcttattcgtct

SEQ ID NO: 157316 - DNA, 625 bp, Homo sapiens
ctagttatataacatatatacatattgttcttagttcagcacaaaatgatttaagctatgggcttaatttcctcatcatttgaataatataattaacaagatgaactcaagagctacatatcaaacttcagatctccaaaactgagactatacattcttttcaaacaacaatggaactctgacaaaaactgactatataccaagcaaccaaaaaaaatcttgaataagttttacagagcatgtaaacagaccatgtaacattgccaaaatattataaaattcaaaaagaatactaaagaacaaataaaagaaatccattgatttrgacatttaaaaatatttcagtaaaaattaaaacataattaaataatatttttaataacaatactggataccaacacataatcattggcaatattccttactgaacctccttgcagctaccatctaccttttgattagtctttcttattctgaagcacattagtactgagctcaccattttcatctccagtatttattctcatcattcttggtaaagttaaatttatatacacaatttatccataatcttgaaagttcaagttctagacttcctcaattgcaaagtggcttcttccacagc

SEQ ID NO: 157317 - DNA, 546 bp, Homo sapiens
tttgctatactttcttattcaagctgatttttctctttcttttctttctttctttttttgcagacaggctgtcactccatcacccaggctggagtgtggtggtgtgatcacagctcactgtagccttgaactcctgagctaaagggatcctcctgcttcagcctccagagtagctgggactacaggtacaccaccatgcttagctaatctgtgtgtgtgtgtgtgtgtgtgtgtgtgtgtgtgtgtgtgtgtgtgtgtgtagatggggtctcgctatgttgccaggttaatctttacattctggcttcaagcaatcctcccgcctcagcctcccaaaacgctgcgattataggagggatccactgctcccagcctcaagaatcttatcggaatgccattataaatcagtggctcccaagtttcatgtatttaagaatcaccaaggcatcctacatgcaaaagcagactctagkgtcctcattgccttaggtagactttgagaacctgagtcttaagtatctccagttgatgctgataacacatgat

SEQ ID NO: 157318 - DNA, 552 bp, Homo sapiens
gcatgagcaggtcaggcaatggcaaatggcatgatgtgacctcgagtcaacatcggaggcatcaaaggtaggttggatccaggtgatgaagtgccctcatcacttagccaggtggtaagtgcttttattacatggaaggctttgtttttgttttttaaattagtgtttcttattacgaaagtagcacctatgtgtgattttaaaatctacaaagagcatacaataaaaaagccatgccagatattcagttccatagcttccctcccaggaaacacccaccatcattaactacttatgtatctttgcggaaatagtgtaggtataagcatcttctttatttatcctttgttgcatgcaaaggaggatactatacaaatcttgctttgtatcttgaggttggtccrtatcagcacatttagatctatcttattctttttgacagctccatgttttcaaattatgtagttgaaccatgtcttatttaaccagttaactaatgatagacattaaatatgttatagtgaataaacaatgctgatttgaatatttttg

SEQ ID NO: 157319 - DNA, 552 bp, Homo sapiens
gcatgagcaggtcaggcaatggcaaatggcatgatgtgacctcgagtcaacatcggaggcatcaaaggtaggttggatccaggtgatgaagtgccctcatcacttagccaggtggtaagtgcttttattacatggaaggctttgtttttgttttttaaattagtgtttcttattacgaaagtagcacctatgtgtgattttaaaatctacaaagagcatacaataaaaaagccatgccagatattcagttccatagcttccctcccaggaaacacccaccatcattaactacttatgtatctttgcggaaatagtgtaggtataagcatcttctttatttatcctttgttgcatgcaaaggaggatactatacaaatcttgctttgtatcttgaggttggtccatatcagcacatttagatctatcttattctttttgacagctccatgttttcaaattaygtagttgaaccatgtcttatttaaccagttaactaatgatagacattaaatatgttatagtgaataaacaatgctgatttgaatatttttg

SEQ ID NO: 157320 - DNA, 634 bp, Homo sapiens
ggtggcgggttaccagctactcaggaggctgagcyaggagaatcacttgaacccaggaagcagaggttacagtgagctgacatcgtgccactgcactccagcctgagcaacagagcgagactctatctcaaaaaaatacaataaaaaaagtcatttgagcattagaaaacagtttggctgtttgggaagctcagcagcctcttcaaatgagtaaatggtgggttttcatcttctccaaatatacctttctaaatctttgtttacatttcaaatagttgcaaacatttttcagagtaatatattgtaaatatcttaattattaattttccttaatcaaaagaagttactatgattaatgtgatcctgaattcaaaataaaattatgacccagacacaacaacttcactcaaaggcaaaataatatttaaaaaataaataaataaaattatggaaatttcaggagatggtatcaaatgttttctagatgtcctttaaaattagtgattgattcacacactcacattgacttgagaaaaataaaatagggttcaaaaatgattcaaggcatctaagctattaaaattaaattgtctatggaccctagtatgataaatgccaagagaaatgagttgga

SEQ ID NO: 157321 - DNA, 634 bp, Homo sapiens
ggtggcgggttaccagctactcaggaggctgagctaggagaatcacttgaacccaggaagcagaggttacagtgagctgacatygtgccactgcactccagcctgagcaacagagcgagactctatctcaaaaaaatacaataaaaaaagtcatttgagcattagaaaacagtttggctgtttgggaagctcagcagcctcttcaaatgagtaaatggtgggttttcatcttctccaaatatacctttctaaatctttgtttacatttcaaatagttgcaaacatttttcagagtaatatattgtaaatatcttaattattaattttccttaatcaaaagaagttactatgattaatgtgatcctgaattcaaaataaaattatgacccagacacaacaacttcactcaaaggcaaaataatatttaaaaaataaataaataaaattatggaaatttcaggagatggtatcaaatgttttctagatgtcctttaaaattagtgattgattcacacactcacattgacttgagaaaaataaaatagggttcaaaaatgattcaaggcatctaagctattaaaattaaattgtctatggaccctagtatgataaatgccaagagaaatgagttgga

SEQ ID NO: 157322 - DNA, 634 bp, Homo sapiens
ggtggcgggttaccagctactcaggaggctgagctaggagaatcacttgaacccaggaagcagaggttacagtgagctgacatcgtgccactgcactccagcctgagcaacagagcgagactctatctcaaaaaaatacaataaaaaaagtcatttgagcattagaaaacagtttggctgtttgggaagctcagcagcctcttcaaatgagtaaatggtgggttttcatcttctccaaatatacctttctaaatctttgtttacatttcaaatagttgcaaacatttttcagagtaatatattgtaaatatcttaattattaattttccttaatcaaaagaagttactatgattaatgtgatcctgaattcaaaataaaattatgacccagacacaacaacttcactcaaaggcaaaataatatttaaaaaataaataaataaaattatggaaatttcaggagatggtatcaaatgttttctagatgtcctttaaaattagtgattkattcacacactcacattgacttgagaaaaataaaatagggttcaaaaatgattcaaggcatctaagctattaaaattaaattgtctatggaccctagtatgataaatgccaagagaaatgagttgga

SEQ ID NO: 157323 - DNA, 634 bp, Homo sapiens
ggtggcgggttaccagctactcaggaggctgagctaggagaatcacttgaacccaggaagcagaggttacagtgagctgacatcgtgccactgcactccagcctgagcaacagagcgagactctatctcaaaaaaatacaataaaaaaagtcatttgagcattagaaaacagtttggctgtttgggaagctcagcagcctcttcaaatgagtaaatggtgggttttcatcttctccaaatatacctttctaaatctttgtttacatttcaaatagttgcaaacatttttcagagtaatatattgtaaatatcttaattattaattttccttaatcaaaagaagttactatgattaatgtgatcctgaattcaaaataaaattatgacccagacacaacaacttcactcaaaggcaaaataatatttaaaaaataaataaataaaattatggaaatttcaggagatggtatcaaatgttttctagatgtcctttaaaattagtgattgattcacacactcacattgacttgagaaaaataaaatagggytcaaaaatgattcaaggcatctaagctattaaaattaaattgtctatggaccctagtatgataaatgccaagagaaatgagttgga

SEQ ID NO: 157324 - DNA, 540 bp, Homo sapiens
taaggacgacagttattttagccagaaacttgggatttgtaaagggatatctgttgagaagaagaaaaaaagtttgattttttttttacacccttaccaatttacacgttcttgaaagcatttgaattttattaaatcgaaaggttgatttggcataagttactattgcacaatttagagttagactgtcagtgmtttgggatgtggatggtaatcgttacaagagattttgctaaaagtaagctttgaaataaataggttctgcttcagatacctaagaaggcataggcagattcttagagatggcactgcagagaaggcatgcagtatcccttctggccgcaggagtgctgtaatgtccttttccaccaaacagcatctctgcattaagttctactaaaacaatatgcttggttcttccccactcaaccacaatgggacaggcagggtggatcagaaagccatcactgaattagcaagtcatctaataaggatctggcaaaggattttagacatttctatattttgcagacttcaagc

SEQ ID NO: 157325 - DNA, 601 bp, Homo sapiens
tatgcatgttatctcatatacttttaatcatctctgggttacttttaaaaatgtaaatgctatgtaaataggtgttatactgtattggtttttcatttgtattatttttgtattcttttttattgtttgtttgctttttcccaaatattttctatctatggtttgttgaatctgaggatgtggaacctgtggatatggagggctgacttatatagagggaacatcataaaacctttttctcccttagatcattacttcttgagcacctggcaaatgtaaagtactgttctagaagctgaaggatttccgtaaatgcagaatatgttaccctaccctcaaggattttacagtccagttggtgaatggaataggtcgtgcatagtrcaagtcaataggcacaagcacatgaacaaatcagacagtaggggtcatggtatataagagaagggtgatccagaaataccaaaaagtatctatgcagagtgtgagtcaacactgtgtacataaaactaagtttttaggcccagttaattaacattgctgtttttactttttcattagcatgttggcagataaattgaacatgactccagaagaagct

SEQ ID NO: 157326 - DNA, 505 bp, Homo sapiens
ataacttattttttctctaggactgaaataggtgagcagcttactaatgcctttcttgatttgtatagcagaagtatttcctttctgactaacagaggtaccactcgagtcactgcaacagagagccacagctccttaaccagttccggacttgagccagttcatagccccagagctcattgaatgaagaggtcaaatctctggaaccagcatcctcactgtaaatctttttcctggtcttccacaataggacctcagtccatttactcagatgactgtgtttctgggaacaggaactaactggacctttggggatgactggacattaattctaaactgaccttartttcttgatgcccaaaatgtcattgtgattcaccacattagagaggcttatgaagactggatgatttctggggtattggcttgagcctatgccctagtgggcttagttgatccccaaacctaccccatgtttatttcttcacttctggagtgaatagtt

SEQ ID NO: 157327 - DNA, 585 bp, Homo sapiens
cctctttttctaaggtaagacttagttcttaaggtacaaacgtttttaaaaataggtggaaggaatacttgaagtttagaaaagagaagaccctcaaatgggcttttgttttccttaagtccaagatacacaagttggatgtggtaggaatgattattactgtctgctagatgaacacttaatatatacattatgtgtatgtgtttctcttattgcaaagagtgaagaaaatctggaacctggaggtgggggtcattacctgtrtaattctacatgggtgaactttatatacaataccgtttcaatagaccccaagttgggcaaaaggtttcaggcagccatgctgattgatatttagtgagcttgtcagcaaaacccgtagattagaaatataacttaaatatttatttaagagtgtattaaatacaaagaagttattgtcattcagtagggaatgaatacccttatgattggggaagtttattactgtttattgaccaagggagacttttggtagtagaggaatttgaaagctttcagaatgcttctaggatgagactttagagaacttggtttgaaagacat

SEQ ID NO: 157328 - DNA, 543 bp, Homo sapiens
ggcacagagtgaaggagggaagatgaaagtttagattggcaaagtagataagtgaactggacttccatgcaaacaaatataaattttatattcaatgcattgaagattttcaattttaagtaggacttgtaacatattcgattctacattaaaaagataattactttggcaatactgagaatgccttgaaagaaaaccagttaagaggttggttacaaaaaactatatgtacacacacatatmtaataatatgattcattatatattatatgaccatattatatattatatgtatgcacatacattacagttgattcttattacttatgatggataggttctataaaatcactatgaacactgaatcagtgaacactggaacattattcctatgagaaatacagccttaggttcctacaagcctttgatcacaacattttcatcaactaatcattacataatcttgttttacatatgcttctgtttaaagacactttatttaatatatattgttaatacattaacaccaaactcatggcaaca

SEQ ID NO: 157329 - DNA, 543 bp, Homo sapiens
ggcacagagtgaaggagggaagatgaaagtttagattggcaaagtagataagtgaactggacttccatgcaaacaaatataaattttatattcaatgcattgaagattttcaattttaagtaggacttgtaacatattcgattctacattaaaaagataattactttggcaatactgagaatgccttgaaagaaaaccagttaagaggttggttacaaaaaactatatgtacacacacatatctaataatatgattcattatatattatatgaccatattatatattatatgtatgcacatacattacagttgattcttattacttatgatggataggttctataaaatcactatgaacactgaatcagtgaacactggaacattattcctatgagaaatacagccttaggttcctacaagcctttgatcacaacattttcatcaactaatcattacataatcttgttttacrtatgcttctgtttaaagacactttatttaatatatattgttaatacattaacaccaaactcatggcaaca

SEQ ID NO: 157330 - DNA, 362 bp, Homo sapiens
tgctgaaaacaactaaaaatgatgaacataatattaataaacagccaaggaagcattaatataataaggaaattacaggccaaacaagaccctaggaaggtaagtaagaacaaaagctactttcatcctgagggtatttgcccaacttacgaattttgaattttaattttctcaagacgaagaaagtccattgtggcaagagaaatagaagcacacaccaaytgaggaataaactagaagacctctctcataataaactggtacaatagttataccctcagcgtcaaggtagctcagtagtaaatcagtcctcatcacatcttgcatcccacatttacatcatttgggtggtttagggaccc

SEQ ID NO: 157331 - DNA, 585 bp, Homo sapiens
aaaatgcactagtaagcccctgctatgtagcagatacctgttgcttttgcatgtctactttccatttccccttcctctaaaaaagcaatcttattttccttaaagttactcatccaaccccatccatttataagtaaggcttacctttctgtagaccacaagagtggtaacatgaccccagcctgaccaattaaaacattccattttcattgtcactgtgattgattcaggagtgagactgtttcccaagacaaaccaatgaaagtagaactgttgatggaacacctgagagaactggaactgctcttccagtttaggttactaaactggtaggttgtgagtctggtggytatcttgaagccatgaggaaagagcttgcctgttgtattagcttattttcacactgctataaagaaatttccacaactgggtaatttataaaagaaagaggtttacttgactcacagttctgcatggctgggatggcctcaggaaacttacaatcatggcagaaggggaagtggtcatcttcttcacaaggtgacaggagggagagagagagagagagagagaaggaaaggggga

SEQ ID NO: 157332 - DNA, 585 bp, Homo sapiens
aaaatgcactagtaagcccctgctatgtagcagatacctgttgcttttgcatgtctactttccatttccccttcctctaaaaaagcaatcttattttccttaaagttactcatccaaccccatccatttataagtaaggcttacctttctgtagaccacaagagtggtaacatgaccccagcctgaccaattaaaacattccattttcattgtcactgtgattgattcaggagtgagactgtttcccaagacaaaccaatgaaagtagaactgttgatggaacacctgagagaactggaactgctcttccagtttaggttactaaactggtaggttgtgagtctggtggttatcttgaagccatgaggaaagagcttgcctgttgtattagcttattttcacactgctataaagaaatttccacaactgggtaatttataaaagaaagaggtttacttgactcacagttctgcatggctgggatggcctcaggaaayttacaatcatggcagaaggggaagtggtcatcttcttcacaaggtgacaggagggagagagagagagagagagagaaggaaaggggga

SEQ ID NO: 157333 - DNA, 578 bp, Homo sapiens
ttttatttttgaatctggagatttgtcatactttcttataagctcagcaattcatttaaaagtgtttcaactatttttatctggcatttccaggtgttttatggccaatggctttcaggatatctagtctctgtatgctggaaacggaagtcttatttatctttttgaaggttaatgtttgtttttcargaagtgcttttctttagcttctttcactactttctatcttccctcttccatactttttcctctttctatatttccctcttccacagtttttcctctttattattatttttgtctaataaaccctggtttttgttgttaaacataatttgcttgctgagcttattggatttaaatcataattagagaagctcagaaagcaccatgtttcattgactacatgatgtgagtgagttgatgttgtcttttgaaagaatccaggagagaaattttcagtgacaacatcagattctaagatgcactagagcaaggagtatggatgtcttgtccattcacttgctacatgatcttgggaaagttgcttaacctctgtgagcctcagtttccttact

SEQ ID NO: 157334 - DNA, 578 bp, Homo sapiens
ttttatttttgaatctggagatttgtcatactttcttataagctcagcaattcatttaaaagtgtttcaactatttttatctggcatttccaggtgttttatggccaatggctttcaggatatctagtctctgtatgctggaaacggaagtcttatttatctttttgaaggttaatgtttgtttttcaggaagtgcttttctttagcttctttcactactttctatcttccctcttccatactttttcctctttctatatttccctcttccacagtttttcctctttattattatttttgtctaataaaccctggtttttgttgttaaacataatttgcttgctgagcttattggatttaaawcataattagagaagctcagaaagcaccatgtttcattgactacatgatgtgagtgagttgatgttgtcttttgaaagaatccaggagagaaattttcagtgacaacatcagattctaagatgcactagagcaaggagtatggatgtcttgtccattcacttgctacatgatcttgggaaagttgcttaacctctgtgagcctcagtttccttact

SEQ ID NO: 157335 - DNA, 643 bp, Homo sapiens
atacatgttctgtgtgaagaaaagaagttaaatcaccagtgccccagtctggcaaaggtgctttctattargctaaaaattggtaactggggagaaaaaatcagccagagattttggacttcccagattcaattacaactagggctcctcacatgacttgaatatcaacaaagcaaacacaaccacactacagggaagtagacattatcaaaggagatggtagcctcatcccgggaaactagacagagatatggcctagttataatagcaatgtaccatatattcccagtgctgttagacacaaaatgtaggacgtgctctgtgcctttaaaaaattccttttctttctgccagttcaattttatatctaccttcagttggtacatcatgtttgtagtttttcactttgtatttcctagaaaagacatgagccagttactaaagggaatcattacttgttttcaaagaatctgaaatgaacattttgtttaaatttttgacttatttataacatgtcacattgtagtatcttccctagacagtaagatttcaatgaattttaaatcatgggcttcataagagatttaaaatattcaaagcaattaaatttttatgaattaaattctttctaagcaatatgtac

SEQ ID NO: 157336 - DNA, 643 bp, Homo sapiens
atacatgttctgtgtgaagaaaagaagttaaatcaccagtgccccagtctggcaaaggtgctttctattaggctaaaaattggtaactggggagaaaaaatcagccagagattttggacttcccagattcaattacaactagggctcctcacatgacttgaatatcaacaaagcaaacacaaccacactacagggaagtagacattatcaaaggagatggtagcctcatcccgggaaactagacagagatatggcctagttataatagcaatgtaccatatattcccagtgctgttagacacaaaatgtargacgtgctctgtgcctttaaaaaattccttttctttctgccagttcaattttatatctaccttcagttggtacatcatgtttgtagtttttcactttgtatttcctagaaaagacatgagccagttactaaagggaatcattacttgttttcaaagaatctgaaatgaacattttgtttaaatttttgacttatttataacatgtcacattgtagtatcttccctagacagtaagatttcaatgaattttaaatcatgggcttcataagagatttaaaatattcaaagcaattaaatttttatgaattaaattctttctaagcaatatgtac

SEQ ID NO: 157337 - DNA, 456 bp, Homo sapiens
gaattctttaaaaatagaagtcatgtcaaaaacttttctctcagttccattctttcccacctycagtctccaaaatctgtgttcagccagttgccgccatgtaaaaatgactgaatttagaaatcaattccagttctccaattaactactataaactctggggaggtgagttggtttccttgagtctgagtttctcacccacaaaataagatgatacctgccttccttcataccgagtttattgtgaggatcatatgagacaacatatgagaaagtgcagcataaataagatagcactttattgacctcatgttatcgccgcctttcattgccacctatcactacttttcatttaaagtttgatttctgtgagagtgctgctcatatgcacatctgccccgtcactactaaatcacagatttcctaaatgtattcttgtctgcctatgtcagagtt

SEQ ID NO: 157338 - DNA, 552 bp, Homo sapiens
atctgtccatctcaactcaagcctcgcwtcattactttatcccttcaaagcatcttattacctagaacacccaggagagtgtactgagaactgcataataaaaaaagtgaataaaatccccatttgttgtgtgcttatataggcatacctcattttattgcacttcactttatagcacttcatagatactgttattttttacactgaatatttgtggcaaccttgcatcgagcaaatccataggcatcattttttccaacaatgtgatcacttgggtctctgttacacttttgtaatttttgcaatccttcaagtttttcattattattatatctgttatggggatctgtgatcagtgatctttgtggttaccattgtgactgttttgtggataccatgaaccggactcagataagacagtgaacttaattgatgaatgttgtgtgtgttctgactgattcattgactggccattcacccatctctctccttctcagcccttgctattttctgagacataataatattgaaattaggccaattaataatcct

SEQ ID NO: 157339 - DNA, 531 bp, Homo sapiens
attttcatttaaactaagttgaaaaaggggaggaaggcagttcccttaccactagaacataagctctgaaagggcagggatttttatctgttgctcactgatatgttttccacacaataagaacatagtaggtgcttaatatttgaagtattttgtgaatactggatggaaaagaagatgacagataatacatgatagacagacagatgtaaataaacactgaactccaccatgagtgtgtaggcaggataaaatgaaatctctcgtcgcctcatggaatctgtcttttcaaattatccctagaagtcttttcaacctggggcaatacatcatatactgagatttcaactgcatgagtctacctttttttttctagtacagtaagaratgaacactgttgaaggggagctggggaaaaaaactgataggtgacagacaggtactcaacaaggcagttttggaaagaagaacatctaaggaaattaatagctagaaagccgtgcatgcctattgtctcagtatgttttctgc

SEQ ID NO: 157340 - DNA, 520 bp, Homo sapiens
tgaaaattcaactcctgtttctraacttgtggtaaattttcccttttacgtcctccacaaaaaaatacaaaaataatacagaggccttatttctattttagttctagaaaattatgacaaggctctcaatattagagcaaaaactggaactttgccataatacgattcccattaagactggctctaaagtcaaggtactgggacccattctaaaggacaatataatttgtttttaaaccttgtgtccgttagaaataattgggtcagagcgggttacaaatggcagaaatctgattcaaacagagtcaaataaaaaagattatttgttgtttaacttatctgaaaatctagatttaaagctaacttttggcctggttgcattcagaactcaaatgatatcaacatgactctcctctttctctcatctctctgcattttctgttttgcttaattcataatggggttaggcaaagaacttctataacccaatatttccctccaaaaaaaccccctaagattg

SEQ ID NO: 157341 - DNA, 514 bp, Homo sapiens
ttctaaacttgtggtaaattttcccttttacgtcctccacaaaaaaatacaaaaataatacagaggccttatttctattttagttctagaaaattatgacaaggctctcaatattagagcaaaaactggaactttgccataatacgattcccattaagactggctctaaagtcaaggtactgggacccattctaaaggacaatataatttgtttttaaaccttgtgtccgttagaaataattgggtyagagcgggttacaaatggcagaaatctgattcaaacagagtcaaataaaaaagattatttgttgtttaacttatctgaaaatctagatttaaagctaacttttggcctggttgcattcagaactcaaatgatatcaacatgactctcctctttctctcatctctctgcattttctgttttgcttaattcataatggggttaggcaaagaacttctataacccaatatttccctccaaaaaaaccccctaagattgcctctcatttgg

SEQ ID NO: 157342 - DNA, 520 bp, Homo sapiens
tgaaaattcaactcctgtttctaaacttgtggtaaattttcccttttacgtcctccacaaaaaaatacaaaaataatacagaggccttatttctattttagttctagaaaattatgacaaggctctcaatattagagcaaaaactggaactttgccataatacgattcccattaagactggctctaaagtcaaggtactgggacccattctaaaggacaatataatttgtttttaaaccttgtgtccgttagaaataattgggtcrgagcgggttacaaatggcagaaatctgattcaaacagagtcaaataaaaaagattatttgttgtttaacttatctgaaaatctagatttaaagctaacttttggcctggttgcattcagaactcaaatgatatcaacatgactctcctctttctctcatctctctgcattttctgttttgcttaattcataatggggttaggcaaagaacttctataacccaatatttccctccaaaaaaaccccctaagattg

SEQ ID NO: 157343 - DNA, 472 bp, Homo sapiens
tgtacttaattaattagtgagctcctttaaacacttcccttacagacaatttttcctcattttttactttacctaaaaggtctcaagacatttaaccaatacttggtgtagtcattctttacagtaaaagataagaaggcagtttcaatcctaggaatgtgaacacattacagatatatgcacatttcttcagcttagagtccatctaatttaattgcaagtaaaaaacaaatacaaggacatcaactctcaaattatttttctcgatggttgttgagctatcaatcccttacctctgggattatcagtctcccrcagcacaaggactttactccaattaagtgagatccaaaggaactccatttttatttcaagattaaatttaagatcagcttctcaaatagggaaactgaagtaagaaaataagttttttcttaataaattttaatttagaagatctcacatttttcct

SEQ ID NO: 157344 - DNA, 573 bp, Homo sapiens
tgggccaaagcacagctgcctcttcccccagttactacacagtgtttccaaacaccagaaaactgcttggaaaccatcagtttgcaaaggcaaaaaagggcctttgggtggcttcttttcttcccatccccagataggcccattcatttggggtyggctgccaaaacacaaaacaaggttgttaaatgatagaagtggctgattagaaagaaagctttaagggtcttaggatacaataaagacttaactgatccaatgaactagtggattctgctataaaatctttttcttctgcagtaatagtcacacagaagtgtctgttggcctttaaggttactgaattggaaattttgtgacttgtttaagtgtgcaacagcggctttctcaggctgctaatctcatattgtccatgtattatctgcttatttctctcaataacaggctcatcatgagtatatattactaaaatagatggtgcatatgtaatctactcttagggaaaaggtctcccttgttcctggagaattttactcctgaatgaatagaaggtacatcattgagcaggcaggaaca

SEQ ID NO: 157345 - DNA, 616 bp, Homo sapiens
tagagttccagttcagattctgtcctcagtcacaactcctgaataactgaaagtgtcctagtcaacattcacctacaaatgctacagtttttaacttgactttacacacagacacacacacacacacgtgtgtgtgtatatccacatggagctgaagggcagtgagctttgatagacatgtgatagacatatrgtgtgagtgagaaacaaacttttgctgttacaagcacttaaaatattggagcttatttcttcctatgcataacctaacctatcatggccaacgtagatttttggagaaaaataaaatagggaagacagatagggagtgttgcagtgggaggcaagtggtattttggtttataatagagaaaacagaagagctcttatggaagtgtcttttgatctaagacccaattagggaacaattatgcctggatgtaagatggtggcgatttgcattctccagtccccagtttgtccaccaggaaactcggctgagttcttgacccaagttaccatgagatacttttgtagccttccaataatttcccattttgtgcctaatctgatttgaatatgttttgtttctagcaccataacttgtcctgtcctt

SEQ ID NO: 157346 - DNA, 503 bp, Homo sapiens
atgattttttttttgatgtttaggtggagctttgtgcaataatgttttaaagaaagaataaaaaatattttcagtggctatataatagtctccaatgtctcatctattggttttctttagatgtttaaaacctcagtatgagttaaattttatgaaatggggtcactgacatctgcaaaagtacaacaaaaatatatactgaatatcctgtggactgaaacacataattgtctaatgaaaaggttatccactgtgttaagtccatcactggcagaaaatttctattacttctaagagaacagatttgactgtatcttcaaagagctcaaattttatgttgactggaatttgtccatcggtattactacgttctattaccagcttatggtatctawtttataaagtcaatttacatgcaaagctttttgtattatttgtgctacttaaattcatcacaatacatttatatctcctttgtgaaatcacttcctgtctccaagcta

SEQ ID NO: 157347 - DNA, 569 bp, Homo sapiens
tggacacagtacagtcttggagatggcttgaaattttgtttttttttttcttttttggagatggagtctcgctctgtcacccaggctggaatgcagtgtcacaatctcagctcactgcaacctctgcctcctgggttcaagtgattctcctgccttagcctcccgagtagctgggactacaggtgcgtggccaccaagccaagctaattttttgtatttttagtagagacgagctttcaccattagccaggatggtcttgatctcctgacctcgtgatcygcccgccttggccttccaaaatgctggcattacaggcatgagccaccacgcccactgatggcttgaaattttcaaatgctattgcttaatttgaaatgatcttctactttctttctctacatcccatcttaacacatatacacacattccagtataattatcacctctccagtggagtccactgatctatttaaagtatgttcctattaccttattttacactctgtttccttcataccaatacaatcattcatatttcatgtatttgtttttatgacttcctcactaa

SEQ ID NO: 157348 - DNA, 422 bp, Homo sapiens
aattcttttagaaaccaatgctggtgtgctcattgctactggctaggtattgcttctaggccatttcagtgaacaaagttggaaagagatagatagaaaaagatagaaatggggacagagttagagatagagagatatagagatggaatagatatatatacagagagatgtatatagatatataactgtatttgatattcctaatacaaatgtaatattatagggttttttctttaaagttctttatattctttttttctcttatgttgaaatactgatttctaataatatttccctacatatttacttaatttatcgtactcttttttttktttttgtttttgtttttgtttttgagacagagtctcgctctgttgccaggctggagcgcagtggcgtgatctcagctcactgcaacctcc

SEQ ID NO: 157349 - DNA, 557 bp, Homo sapiens
cacacaatccaaggggatacagtgttgcctgaaccttagcgattatttttaaaagacaggcagtttatggcaaaaacttcatgtgaataaagcgaaagggtcgttgagggcattggctggttttattttttgtggttgttaactgctacagtaagtgaaggaattacggacttatgtgggtattacaaaggctttagcagggatggctgaacgtgacttgctctctctctctctctctctctctctctctctctctctccttttcctgaaaaagaaaataggatacttggctcttagaaatgtgtgaggacttaawtttcacattccttttgtttcagagagttgagaagctgttgttaacatattacatgagactaatatatcagagtgggttcagagtatgagctgtaagacgtattgtttagtttcagcaatagttgaactaaatagttaccaactgtgtgttttgggcaagggacttcctcagtaaaaatgtaagatgataaaatattataaaacatgagagtgcccctagagattttcgtgagctaaatgag

SEQ ID NO: 157350 - DNA, 275 bp, Homo sapiens
tttgagacagagtctcgctctgttgcccaggctgaagtgcagtggtgagattttggctcactgcaacmttcacctcctaagttcaagtgattcctgtgcctcagcctcctgagtagctggaattaccggcacatgcctccacacccagctaattttcatatttttcagagagacggggtttcaccacattggccaggccgatctcaaactcctgacctcatgtgacccacattggcctggcaaagtgctgggattacaagcatgagccaccacac

SEQ ID NO: 157351 - DNA, 453 bp, Homo sapiens
  misc_feature (1)...(453): n = A,T,C or G
gcttcctaagtgctaagtttgaaattagcaccatgtcatttccattcacatttcgctggccaatgaaagtctcatgatgagccacagtcaagagtcagagaygtaccctcatgaggctgtggagagagtgtagattcagggagcggtgagaaactggggccagtacaccaatctacagcatgatttgtcatcatttttcattctctgctagtaagattgccaaagtctctctgcactcattgaattcatcctagtttccatttagctctctttctctcttaccacaatacctaaaaatctttttatggggttacaactctgtctcaggagccacctcagtttggtggcacagagctccccacttgtactctgaaactcttttcttgaagatattgctatccatgtgcatgagttatttttcttctccatagcatccacattaaacannnnnnn

SEQ ID NO: 157352 - DNA, 578 bp, Homo sapiens
gagacacagtataaacttttgtttgcaagraaaatttgtagccgttttacatcttccagcgctccttgggtcacccttgaagaaatcagatataatcttactctggtctttaaataagggaaaccagaggtgatccctggaggttcagaagactcctaagacccagataggttagagcagctctatgttactaaattggtgaattaattggtgaaaataaaagaataatatattttttaaaaaattttaaaaatgagactgccttatcactaaggatacataatggtttaatggataaataagctatttgttttttactggccatgtatgctcctgtttctttgagcttctggctcttgcttctggatccttcaccagattacatcttcgacagcccctgaaaatttggagttacctgagagtcgaagacacctgtcctacttgattcttcttacttgtacagtcatctgagaacaaaattcaaaaaggccagtcatgctttaagcaggtctcatttcccagactgcaaacaaacatggaggtctatctgggaccagagacttgactacctgatgctt

SEQ ID NO: 157353 - DNA, 578 bp, Homo sapiens
gagacacagtataaacttttgtttgcaagaaaaatttgtagcygttttacatcttccagcgctccttgggtcacccttgaagaaatcagatataatcttactctggtctttaaataagggaaaccagaggtgatccctggaggttcagaagactcctaagacccagataggttagagcagctctatgttactaaattggtgaattaattggtgaaaataaaagaataatatattttttaaaaaattttaaaaatgagactgccttatcactaaggatacataatggtttaatggataaataagctatttgttttttactggccatgtatgctcctgtttctttgagcttctggctcttgcttctggatccttcaccagattacatcttcgacagcccctgaaaatttggagttacctgagagtcgaagacacctgtcctacttgattcttcttacttgtacagtcatctgagaacaaaattcaaaaaggccagtcatgctttaagcaggtctcatttcccagactgcaaacaaacatggaggtctatctgggaccagagacttgactacctgatgctt

SEQ ID NO: 157354 - DNA, 605 bp, Homo sapiens
cttccctaagtatagagacacagtataaacttttgtttgcaagaaaaatttgtagccgttttacatcttccagcgctccttgggtcacccttgaagaaatcagatatratcttactctggtctttaaataagggaaaccagaggtgatccctggaggttcagaagactcctaagacccagataggttagagcagctctatgttactaaattggtgaattaattggtgaaaataaaagaataatatattttttaaaaaattttaaaaatgagactgccttatcactaaggatacataatggtttaatggataaataagctatttgttttttactggccatgtatgctcctgtttctttgagcttctggctcttgcttctggatccttcaccagattacatcttcgacagcccctgaaaatttggagttacctgagagtcgaagacacctgtcctacttgattcttcttacttgtacagtcatctgagaacaaaattcaaaaaggccagtcatgctttaagcaggtctcatttcccagactgcaaacaaacatggaggtctatctgggaccagagacttgactacctgatgcttgccttgattccag

SEQ ID NO: 157355 - DNA, 600 bp, Homo sapiens
acagtataaacttttgtttgcaagaaaaatttgtagccgttttacatcttccagcgctccttgggtcacccttgaagaaatcagatataatcttactctggtctttaaataagggaaaccagaggtgatccctggaggttcagaagactcctaagacccrgataggttagagcagctctatgttactaaattggtgaattaattggtgaaaataaaagaataatatattttttaaaaaattttaaaaatgagactgccttatcactaaggatacataatggtttaatggataaataagctatttgttttttactggccatgtatgctcctgtttctttgagcttctggctcttgcttctggatccttcaccagattacatcttcgacagcccctgaaaatttggagttacctgagagtcgaagacacctgtcctacttgattcttcttacttgtacagtcatctgagaacaaaattcaaaaaggccagtcatgctttaagcaggtctcatttcccagactgcaaacaaacatggaggtctatctgggaccagagacttgactacctgatgcttgccttgattccaggatactctgaattt

SEQ ID NO: 157356 - DNA, 605 bp, Homo sapiens
cttccctaagtatagagacacagtataaacttttgtttgcaagaaaaatttgtagccgttttacatcttccagcgctccttgggtcacccttgaagaaatcagatataatcttactctggtctttaaataagggaaaccagaggtgatccctggaggttcagaagactcctaagacccagataggttagagcagctctatgttactaaattggtgaattaattggtgaaaataaaagaataatatattttttaaaaaattttaaaaatgagactgccttatcactaaggatacataatggtttaatggataaataagctatttgttttttactggccatgtatgctcctgtttctttgagcttctggctcttgyttctggatccttcaccagattacatcttcgacagcccctgaaaatttggagttacctgagagtcgaagacacctgtcctacttgattcttcttacttgtacagtcatctgagaacaaaattcaaaaaggccagtcatgctttaagcaggtctcatttcccagactgcaaacaaacatggaggtctatctgggaccagagacttgactacctgatgcttgccttgattccag

SEQ ID NO: 157357 - DNA, 622 bp, Homo sapiens
tttttctattttccatgtcttaattgaggtaagacccttctgggttctctatcacatgccttgtgaattgtgctctccttttttgggaactggcactatttccagccctgtgtgastgttgggtactgttctagctaatgctttcaagtggttctttcctggggtagttttttcacacacatgcacctgtgaaattaaaaaaaaagaagaagaagaaactttttatctgaggaatgtgagcccctttaaattatcaagcttggagaggcattggaatgaaactgcagtcacatcactcccccttgagtgattatcttgtaaagccacttgctatacgggctccagactaactgatgccaagcagccataaaataccatatgctggacaccacgactcatatcctatagttcaacagtgtataaccaataactaatccatgtcatctctgtaagccaatgaaaatttctatcaaagaactttgtatccatccacttcttcttacttttgcctttaaaaacctgcttgtaacaaaagctgattgagcactccctgagttaacttggaagtgtgtcctgggcagctgtgctcactttggctcaagtaaactctttaaattatatc

SEQ ID NO: 157358 - DNA, 622 bp, Homo sapiens
tttttctattttccatgtcttaattgaggtaagacccttctgggttctctatcacatgccttgtgaattgtgctctccttttttgggaactggcactatttccagccctgtgtgagtgttgggtactgttctagctaatgctttcaagtggttctttcctggggtagttttttcacacacrtgcacctgtgaaattaaaaaaaaagaagaagaagaaactttttatctgaggaatgtgagcccctttaaattatcaagcttggagaggcattggaatgaaactgcagtcacatcactcccccttgagtgattatcttgtaaagccacttgctatacgggctccagactaactgatgccaagcagccataaaataccatatgctggacaccacgactcatatcctatagttcaacagtgtataaccaataactaatccatgtcatctctgtaagccaatgaaaatttctatcaaagaactttgtatccatccacttcttcttacttttgcctttaaaaacctgcttgtaacaaaagctgattgagcactccctgagttaacttggaagtgtgtcctgggcagctgtgctcactttggctcaagtaaactctttaaattatatc

SEQ ID NO: 157359 - DNA, 622 bp, Homo sapiens
tttttctattttccatgtcttaattgaggtaagacccttctgggttctctatcacatgccttgtgaattgtgctctccttttttgggaactggcactatttccagccctgtgtgagtgttgggtactgttctagctaatgctttcaagtggttctttcctggggtagttttttcacacacatgcacctgtgaaattaaaaaaaaagaagaagaagaaactttttatctgaggaatgtgagcccctttaaattatcaagcttggagaggcattggaatgaaactgcagtcacatcactcccccttgagtgattatcttgtaaagccacttgctatacgggctccagactaactgatgccaagcagccataaaatamcatatgctggacaccacgactcatatcctatagttcaacagtgtataaccaataactaatccatgtcatctctgtaagccaatgaaaatttctatcaaagaactttgtatccatccacttcttcttacttttgcctttaaaaacctgcttgtaacaaaagctgattgagcactccctgagttaacttggaagtgtgtcctgggcagctgtgctcactttggctcaagtaaactctttaaattatatc

SEQ ID NO: 157360 - DNA, 516 bp, Homo sapiens
tcatgtcttatggggtattatgtaccttatatcttaacattttccwcttgccgcttcttggtttgaggggagaaatgccagcatgtggcaaatggagaataagactgatggaagcctcagggcaaggccttcacttcccattgacactgttcccaattccctccagcatgagctgagcctcctcaggctgtggttgtgcagcagacagggtgtgaggaaaccctgctcagccctggttacccaggatggcactgagttctaaaacgcaaaggttatgtggtgaggggcctggctgaagacctggtgtggtacttttgtgagcagtggcacgatttgaggctgggtaggagagaggtgcagggcctagctccccaaaagaccaacagataaactggggcagagagagagattccagtgtaaccgggaaggctgcagatcataacaattatggctgctgatttggcatcaaagatgtggcattgtcaaagccacaattgttgagaatggcaccaacat

SEQ ID NO: 157361 - DNA, 516 bp, Homo sapiens
tcatgtcttatggggtattatgtaccttatatcttaacattttcctcttgccgcttcttggtttgaggggagaaatgccagcatgtggcaaatggagaataagactgatggaagcctcagggcaaggccttcacttcccaktgacactgttcccaattccctccagcatgagctgagcctcctcaggctgtggttgtgcagcagacagggtgtgaggaaaccctgctcagccctggttacccaggatggcactgagttctaaaacgcaaaggttatgtggtgaggggcctggctgaagacctggtgtggtacttttgtgagcagtggcacgatttgaggctgggtaggagagaggtgcagggcctagctccccaaaagaccaacagataaactggggcagagagagagattccagtgtaaccgggaaggctgcagatcataacaattatggctgctgatttggcatcaaagatgtggcattgtcaaagccacaattgttgagaatggcaccaacat

SEQ ID NO: 157362 - DNA, 516 bp, Homo sapiens
tcatgtcttatggggtattatgtaccttatatcttaacattttcctcttgccgcttcttggtttgaggggagaaatgccagcatgtggcaaatggagaataagactgatggaagcctcagggcaaggccttcacttcccattgacactgttcccaattccctccagcatgagctgagcctcctcaggctgtggttgtgcagcagacagggtgtgaggaaaccctgctcagccctggttacccaggatggcactgagttctaaaacgcaaaggttatgtggtgaggggcctggctgaagacctggtgtggtacttttgtgagcagtggcacsatttgaggctgggtaggagagaggtgcagggcctagctccccaaaagaccaacagataaactggggcagagagagagattccagtgtaaccgggaaggctgcagatcataacaattatggctgctgatttggcatcaaagatgtggcattgtcaaagccacaattgttgagaatggcaccaacat

SEQ ID NO: 157363 - DNA, 516 bp, Homo sapiens
tcatgtcttatggggtattatgtaccttatatcttaacattttcctcttgccgcttcttggtttgaggggagaaatgccagcatgtggcaaatggagaataagactgatggaagcctcagggcaaggccttcacttcccattgacactgttcccaattccctccagcatgagctgagcctcctcaggctgtggttgtgcagcagacagggtgtgaggaaaccctgctcagccctggttacccaggatggcactgagttctaaaacgcaaaggttatgtggtgaggggcctggctgaagacctggtgtggtacttttgtgagcagtggcacgatttgaggctgggtaggagagaggtgcagggcctagctccccaaaagaccaacagataaactggggcagagagagagattccagtgtaaccgggaaggctgcagatcataacaaytatggctgctgatttggcatcaaagatgtggcattgtcaaagccacaattgttgagaatggcaccaacat

SEQ ID NO: 157364 - DNA, 310 bp, Homo sapiens
tattggggtgataaattttggttgtgaaagcaacctttgggggcttgaacaggcaatccrtaggaaagtggatggtcaggaagaaaacacctccttggcaaggactgtcattaattatcacccagaggccccgtggagcactgggcaggaggattcgtctgcaagttggttaattccttcaggatccactttagtgccatcctaccccactgctgggggctggggtggcccagccacactgcactttctatatataagttttttgaaaatgctgcttcactgttaccttgccttgtatgttagtgcccat

SEQ ID NO: 157365 - DNA, 513 bp, Homo sapiens
  misc_feature (1)...(513): n = A,T,C or G
nnnnnggaacaaatgtttatcgccaagacagtggggaaaggtcttcagggcatgtcagagacctccctgctgtgtacagcctaggaacttggtgcactgtgtcccagccactccaaccatggctacaaggggccaaggtacaccttgagtcatgacttcagygggtgcgagccccaagccttggcagctttcacatggtgttggtcctgcaggtgtgcagaggacaagaactgaggtttgggaacctagatttcaggggatgtatggaaatgcctggatgcccaggcagaggtgtgctgcaagggcagagccctcatggagaacctctgctagggcagtgcagaagggatatgtggggttggagccccgacacagagtccccactgggacacttcctagtaaagctgtgagaagagggccaccatcctctagaccccaggttagtaaaaccactgacagcttgcaccatgcacctggaaaagactcagacactcaatgctagctgtgaaagct

SEQ ID NO: 157366 - DNA, 513 bp, Homo sapiens
  misc_feature (1)...(513): n = A,T,C or G
nnnnnggaacaaatgtttatcgccaagacagtggggaaaggtcttcagggcatgtcagagacctccctgctgtgtacagcctaggaacttggtgcactgtgtcccagccactccaaccatggctacaaggggccaaggtacaccttgagtcatgacttcagcgggtgcgagccccaagccttggcagctttcacatggtgttggtcctgcaggtgtgcagaggacaagaactgaggtttgggaacctagatttcaggggatgtrtggaaatgcctggatgcccaggcagaggtgtgctgcaagggcagagccctcatggagaacctctgctagggcagtgcagaagggatatgtggggttggagccccgacacagagtccccactgggacacttcctagtaaagctgtgagaagagggccaccatcctctagaccccaggttagtaaaaccactgacagcttgcaccatgcacctggaaaagactcagacactcaatgctagctgtgaaagct

SEQ ID NO: 157367 - DNA, 516 bp, Homo sapiens
taattctgcttatatgaagtacctagagtagtcaaagtcatagagacaggaaataatggtggttgtgccaggggctagggagggaagaatgggaaattaatgggtatagggtttaggaactttagtctaagaaagkagaatattggatgccagaaattcagttttctttctgttccaagatccctttagctagagcgacatattgaagtcagagttcctaagggaaaatcattgtgtatggagatcatccttgtggatcaaatgtgaatcaatagtagatcaaaagatattccacttttgcagatattgacatttgttggacccgtaagattttatctagtattagatagataagatgtgaaccacttctcaacgctgcagactcaaatactaggaaatactaagaacctcaggacaaacaaatagccagtccaaaaagactcacagactagataagctgtcatctaccacctaacagataatgtatccctgttaaccactatctccagatgttca

SEQ ID NO: 157368 - DNA, 518 bp, Homo sapiens
tataattctgcttatatgaagtacctagagtagtcaaagtcatagagacaggaaataatggtggttgtgccaggggctagggagggaagaatgggaaattaatgggtatagggtttaggaactttagtctaagaaaggagaatattggatgccagaaattcagttttctttctgttccaagatccctttagctagarcgacatattgaagtcagagttcctaagggaaaatcattgtgtatggagatcatccttgtggatcaaatgtgaatcaatagtagatcaaaagatattccacttttgcagatattgacatttgttggacccgtaagattttatctagtattagatagataagatgtgaaccacttctcaacgctgcagactcaaatactaggaaatactaagaacctcaggacaaacaaatagccagtccaaaaagactcacagactagataagctgtcatctaccacctaacagataatgtatccctgttaaccactatctccagatgttca

SEQ ID NO: 157369 - DNA, 518 bp, Homo sapiens
tataattctgcttatatgaagtacctagagtagtcaaagtcatagagacaggaaataatggtggttgtgccaggggctagggagggaagaatgggaaattaatgggtatagggtttaggaactttagtctaagaaaggagaatattggatgccagaaattcagttttctttctgttccaagatccctttagctagagcgacatattgaagtcagagttcctaagggaaaatcattgtgyatggagatcatccttgtggatcaaatgtgaatcaatagtagatcaaaagatattccacttttgcagatattgacatttgttggacccgtaagattttatctagtattagatagataagatgtgaaccacttctcaacgctgcagactcaaatactaggaaatactaagaacctcaggacaaacaaatagccagtccaaaaagactcacagactagataagctgtcatctaccacctaacagataatgtatccctgttaaccactatctccagatgttca

SEQ ID NO: 157370 - DNA, 465 bp, Homo sapiens
aataatggtggttgtgccaggggctagggagggaagaatgggaaattaatgggtatagggtttaggaactttagtctaagaaaggagaatattggatgccagaaattcagttttctttctgttccaagatccctttagctagagcgacatattgaagtcagagttcctaagggaaaatcattgtgtatggagatcatccttgtggatcaaatgtgaatcaatagtagatcaaaagatattccacttttgcagatattgacatttgttggacccgtaagattttatctagtattagatagataagatgtgaaccacttctcaacrctgcagactcaaatactaggaaatactaagaacctcaggacaaacaaatagccagtccaaaaagactcacagactagataagctgtcatctaccacctaacagataatgtatccctgttaaccactatctccagatgttca

SEQ ID NO: 157371 - DNA, 506 bp, Homo sapiens
gaattccctccactgtggcacaagccctgccgtaaattgtgattatctataccttgtcagttttatctgtgtatatatcttttacagtaatccccacatccaccagagaacctaggttattggcagaatgaggtttgggaattttggtcctctggccagacactatcagwtagtactctgattccaccatttttgaaattatatacaacaaattttaagtattgtttattttggagagttcaggttaaaggaaatgaagactattattcagtattatttctgtaattttgtaattttaaccataacataggtttcttatcaaaacgtatggaagccagaaagcagtgaagcaacaatattttctccaaaacaaacaggacaaactttggcaggagtgacaaatctggcatgcaatggtggcttctatatcagaaatcaagccttttactttgtgagaggcaggagtttttagttctttgtcttccttttggctgccagaggaattg

SEQ ID NO: 157372 - DNA, 419 bp, Homo sapiens
gcaccaattacattccccaaagtgtgtgagactgcgtcttttccccagaatttaaaaccaatgctagaaattatcagtcttttagagataattttaagcttatttatcatcaaaggatttcttcatagtcaatttccccttagactataaatccgcaagagatggcaaagctggaagaactgcctagaatttcagcaaacttgaattcaatagtctctctgttytttcctgttttggcacctacccttttcttccagttaagattggacacaatagaaaaataattaataaatgtaataaaaatgtaagcctggacgttttgctcacagtgttctcactgggtctaaattttgtgaatgtggttccttggatggtctcatgggtatgcttgagactttaggcccttgggacacctggtg

SEQ ID NO: 157373 - DNA, 506 bp, Homo sapiens
gaattccctccactgtggcacaagccctgccgtaaattgtgattatctataccttgtcagttttatctgtgtatatatcttttacagtaatccccacatccaccagagaacctaggttattggcagaatgaggtttgggaattttggtcctctggccagacactatcagttagtactctgattccaccatttttgaaattatatacaacaaattttaagtattgtttattttggagagttcaggttaaaggaaatgaagactattattcagtattatttctgtaattttgtaattttaaccataacataggtttcttatcaaaaygtatggaagccagaaagcagtgaagcaacaatattttctccaaaacaaacaggacaaactttggcaggagtgacaaatctggcatgcaatggtggcttctatatcagaaatcaagccttttactttgtgagaggcaggagtttttagttctttgtcttccttttggctgccagaggaattg

SEQ ID NO: 157374 - DNA, 506 bp, Homo sapiens
gaattccctccactgtggcacaagccctgccgtaaattgtgattatctataccttgtcagttttatctgtgtatatatcttttacagtaatccccacatccaccagagaacctaggttattggcagaatgaggtttgggaattttggtcctctggccagacactatcagttagtactctgattccaccatttttgaaattatatacaacaaattttaagtattgtttattttggagagttcaggttaaaggaaatgaagactattattcagtattatttctgtaattttgtaattttaaccataacataggtttcttatcaaaacgtatggaagccagaaagcagtgaagcaacaatattttctccaaaacaaacaggmcaaactttggcaggagtgacaaatctggcatgcaatggtggcttctatatcagaaatcaagccttttactttgtgagaggcaggagtttttagttctttgtcttccttttggctgccagaggaattg

SEQ ID NO: 157375 - DNA, 506 bp, Homo sapiens
gaattccctccactgtggcacaagccctgccgtaaattgtgattatctataccttgtcagttttatctgtgtatatatcttttacagtaatccccacatccaccagagaacctaggttattggcagaatgaggtttgggaattttggtcctctggccagacactatcagttagtactctgattccaccatttttgaaattatatacaacaaattttaagtattgtttattttggagagttcaggttaaaggaaatgaagactattattcagtattatttctgtaattttgtaattttaaccataacataggtttcttatcaaaacgtatggaagccagaaagcagtgaagcaacaatattttctccaaaacaaacaggacaaactttggcaggagtgacaaatctggcatgcaatggtggcttctatatcagaaatcaagycttttactttgtgagaggcaggagtttttagttctttgtcttccttttggctgccagaggaattg

SEQ ID NO: 157376 - DNA, 562 bp, Homo sapiens
atgtacctaccaggtgaaactaaatcagtatactcaaaacatcacagcagggtccttaaactgtgtaccaacagtacctcagctrggccagctctaagtaggatgtctagagtaagacttcggccctaagattgtatcattattccaaatgtatgcctgtacatagtaaataataataattcaaacaaatgagcaataatgaataatgaaatatcttcctcccacccaaaaccctagatctgcagtcaccttccacagaaacaaaactgctaatatatatatacatattatgcatatatatgtatatattagcattattatatataaactatatatatatacacacacatatatatagttttaaagctgtgggtggtagaacactttctaagtattgtcctatatcttacttttatcacttaaaataccttgaagttctgtttatattaatagaaatccactttaaaatgtctgctgcacagctgtaccagaattaatttaaccattctgcctattggcaaatttgtaagatgtttccactcttttgattttacaagcattg

SEQ ID NO: 157377 - DNA, 562 bp, Homo sapiens
atgtacctaccaggtgaaactaaatcagtatactcaaaacatcacagcagggtccttaaactgtgtaccaacagtacctcagctgggccagctctaagtaggatgtctagagtaagacttmggccctaagattgtatcattattccaaatgtatgcctgtacatagtaaataataataattcaaacaaatgagcaataatgaataatgaaatatcttcctcccacccaaaaccctagatctgcagtcaccttccacagaaacaaaactgctaatatatatatacatattatgcatatatatgtatatattagcattattatatataaactatatatatatacacacacatatatatagttttaaagctgtgggtggtagaacactttctaagtattgtcctatatcttacttttatcacttaaaataccttgaagttctgtttatattaatagaaatccactttaaaatgtctgctgcacagctgtaccagaattaatttaaccattctgcctattggcaaatttgtaagatgtttccactcttttgattttacaagcattg

SEQ ID NO: 157378 - DNA, 562 bp, Homo sapiens
atgtacctaccaggtgaaactaaatcagtatactcaaaacatcacagcagggtccttaaactgtgtaccaacagtacctcagctgggccagctctaagtaggatgtctagagtaagacttcggccctaagattgtatcattattccaaatgtatgcctgtacatagtaaataataataattcaaacaaatgagcaataatgaayaatgaaatatcttcctcccacccaaaaccctagatctgcagtcaccttccacagaaacaaaactgctaatatatatatacatattatgcatatatatgtatatattagcattattatatataaactatatatatatacacacacatatatatagttttaaagctgtgggtggtagaacactttctaagtattgtcctatatcttacttttatcacttaaaataccttgaagttctgtttatattaatagaaatccactttaaaatgtctgctgcacagctgtaccagaattaatttaaccattctgcctattggcaaatttgtaagatgtttccactcttttgattttacaagcattg

SEQ ID NO: 157379 - DNA, 562 bp, Homo sapiens
atgtacctaccaggtgaaactaaatcagtatactcaaaacatcacagcagggtccttaaactgtgtaccaacagtacctcagctgggccagctctaagtaggatgtctagagtaagacttcggccctaagattgtatcattattccaaatgtatgcctgtacatagtaaataataataattcaaacaaatgagcaataatgaataatgaaatatcttcctcccacccaaaaccctagatctgcagtcaccttccacagaaacaaaactgctaatatatatatacatattatgcatatatatgtatatattagcattattatatataaactatatatatatacacacacatatatatagttttaaagctgtgggtggtagaacactttctaagtattgtcctatatcttacttttatcacttaaaataccttraagttctgtttatattaatagaaatccactttaaaatgtctgctgcacagctgtaccagaattaatttaaccattctgcctattggcaaatttgtaagatgtttccactcttttgattttacaagcattg

SEQ ID NO: 157380 - DNA, 466 bp, Homo sapiens
tttgactctgcatttctagctatatgagctggggccacttacttaactcattcaaaccttagtttcctcaacttggccgggtgtggtggctcacgcctgtaatcccagcacwctgagaggccaaggcgagttgattgcttgaggtcaggagttcaagacctgcctggccaacatggtgaaaccccatctcttgactaaaatacaaaaattagctgggtgtggtggcacgtgcctgaagtctcagctacttgggaggctgaggcacgagaatagcttgaacccgggaggtggaggttgcagtgagcctagattgtgccactgcactccaacctgggtgacagagcaagactccatctcaaaaacaaaacaaaacaaaaaacaaacaaacaaaaaaacaccaaacctttgtttcttcaactggacaagaagctaattgtgattctaaattcaaaagttgctgtgatga

SEQ ID NO: 157381 - DNA, 466 bp, Homo sapiens
tttgactctgcatttctagctatatgagctggggccacttacttaactcattcaaaccttagtttcctcaacttggccgggtgtggtggctcacgcctgtaatcccagcacactgagaggccaaggcgagttgattgcttgaggtcaggagttcaagayctgcctggccaacatggtgaaaccccatctcttgactaaaatacaaaaattagctgggtgtggtggcacgtgcctgaagtctcagctacttgggaggctgaggcacgagaatagcttgaacccgggaggtggaggttgcagtgagcctagattgtgccactgcactccaacctgggtgacagagcaagactccatctcaaaaacaaaacaaaacaaaaaacaaacaaacaaaaaaacaccaaacctttgtttcttcaactggacaagaagctaattgtgattctaaattcaaaagttgctgtgatga

SEQ ID NO: 157382 - DNA, 606 bp, Homo sapiens
gagtcaaacgttgcattatcaaatattatttctctacatctctgatagttcaatatatttttaaaattaccttccttgtctcagagagaaaactctttctccttacattccaacaattgttctgtgaaagctcagtgttcactggagacaggataagggtttctgatagatcgacctggcttgtacccagcactgcaggctcttgcctgcactgctgggacctagggctggtagagctgtaactgcacagagaagactgcctgcttcttataggttggttgtcgctgtctggaagagtttagcgctgctctgcatcttctgcctcacctgaaatcctacgtgtatcctatgccgttcctatgaaaccagtttagaacaccaaacataccacccacagtttaaccctttttggcactcttagaagcccaagcacagagttcrgagaaatgtgagcacctgtatgaagagaagatgggtacaaaggaatgagtgggggttcctcttcaccatccctaaaactgtggcagtatttagcagcatcattgatgaggctggtctcagaactgtgcaaacatctgccctgcctggcctctcaatgaaaaagct

SEQ ID NO: 157383 - DNA, 571 bp, Homo sapiens
caggagctcagcaacgtaggctggaattaccatctcttctgagacagaacactggtcctcaatcttcagatgtgtaatgcaaagacttgaataccagaaaagarcaatgttaacatttaaagctaaaacttcagtagtgcttatcatgtgccagtaaatgctgctagttgcctagttccttgcttcttatgagtggttgatcagaaatatccaatgcagatatttcgtttatctctattaccagttcatgccatggtgtgtaagtgctttctttactactggaaatagagtcattagcatctttaaactcagatccaaatcagaaaacttgtccttgaaattctgtttctctagaaccactctcagtacataaatctttattagggttcttcagaaaaacagaaccagtcggatagatatagatatatgatatcatatatatcctaaaggatatatatatataaaatatatatttatataatttattaagtttttaatattttctatttttgtcctcattgtcttgagcatatggagcacatttttaatagcattacaagttttaatatat

SEQ ID NO: 157384 - DNA, 503 bp, Homo sapiens
tgctggtgaagaaggtgaaggagtgtgtgtggaggatccacagaatttcctggtttttcttggcctagaagagatgtgaattwcaaagagggcaactggaaagtgaacctttgtgacatttggcatcctataggtcctcagaacggatttgtaaaggccagtgagcactcacacagccataaattaattggctgaaaattgtcttatgggtattttgatctacatttaatcaggaagccatcagagtttaagggattaatcaacagatatgaattttaggaaccaaggagaatatatcccagtcaggacttgggaatggagcagagggtcctgtggcaggatacctctatgtcactatatcctgtgaaatcaggatatcactgccatccttccaaggcagttctggctctggccagaaattccttgctacattgtttgcccttctgcgatttgtctagacccttgtcctgccttttttggaggcggcatctattggacactca

SEQ ID NO: 157385 - DNA, 503 bp, Homo sapiens
tgctggtgaagaaggtgaaggagtgtgtgtggaggatccacagaatttcctggtttttcttggcctagaagagatgtgaatttcaaagagggcaactggaaagtgaacctttgtgacatttggcatcctataggtcctcagaacggatttgtaaaggccagtgagcactcacacagccataaattaattggctgaaaattgtcttatgggtattttgatctacatttaatcaggaagccatcagagtttaagggattaatcaacagatatgaattttaggaaccaaggagaatatatcccagtcaggacttgggaatggagcagagggtcctgtggcaggatacctctatgycactatatcctgtgaaatcaggatatcactgccatccttccaaggcagttctggctctggccagaaattccttgctacattgtttgcccttctgcgatttgtctagacccttgtcctgccttttttggaggcggcatctattggacactca

SEQ ID NO: 157386 - DNA, 503 bp, Homo sapiens
tgctggtgaagaaggtgaaggagtgtgtgtggaggatccacagaatttcctggtttttcttggcctagaagagatgtgaatttcaaagagggcaactggaaagtgaacctttgtgacatttggcatcctataggtcctcagaacggatttgtaaaggccagtgagcactcacacagccataaattaattggctgaaaattgtcttatgggtattttgatctacatttaatcaggaagccatcagagtttaagggattaatcaacagatatgaattttaggaaccaaggagaatatatcccagtcaggacttgggaatggagcagagggtcctgtggcaggatacctctatgtcactatatcctgtgaaatcaggatatcactgccatccttccaaggcagttctggctctggccagaaattccttrctacattgtttgcccttctgcgatttgtctagacccttgtcctgccttttttggaggcggcatctattggacactca

SEQ ID NO: 157387 - DNA, 550 bp, Homo sapiens
tttatcagcttgggaactattttttgttggtttatttgtttgttttaaaaatacacatcttcagcggggtgcggtggctcacacctgtaatcccagcgctttggaaggctgaggtgggtggatcacctgaggtcaggagttcgagaccagcctggccaacatggcgaaaccctatctactaaaaatataaaattagccgggcatggtagcagacacctgtaatcccagctactcgggagaatgaggcaggagaatcacttgaacctgggaggcagagtttgcagtgaaccaagatcgtgtcactgcactccaccccgggtgacagagcgacactctgtctcaacaacaacaacaacaacaacaaaatacacatcttctccttcctccacatttatatatrctctatagccacaggctatggtaggaagtaagtagagctttgcagaagcactttaggttatctttacattctctctagattagtctagattagtctataagtaatttcagcttgtaaattcaatcattttgatgctcacaatcatgctct

SEQ ID NO: 157388 - DNA, 579 bp, Homo sapiens
agttggaaaacacaacgcttgctaaaagagagaaacagaaattgtgaggctccttcaactgcagatatcccctctctttctcaggcctttgccattttcttcagggcaaatttttcaaagcatgcttctttgtggagtgaactgttatttcagttgtgactaatttgctaaaatcacagagatcataagcttgtatttttcagcctatttatcaaaagaaagctgacctcaattgtgtgatctgagtgtttgtgttttcccaaaattcatatgttgaaatctgaacrcccaaggtgacggtattagtaggtgtggtctttggaaggtgattaggtcataagagaaagtccctagtgtttggaattcatgccctcatgaaggagaccctggagagctagctagtcccttccactaggtaaggacacagtgagaaagcaccatctgttaggaagcaggcactcattagacaatcttggacttccccgcatcttgaactgtgagaaataaatattttttgtttataaaacatcattttatgctattttcctttctatatggtgtttttaaaggattttaaaa

SEQ ID NO: 157389 - DNA, 579 bp, Homo sapiens
agttggaaaacacaacgcttgctaaaagagagaaacagaaattgtgaggctccttcaactgcagatatcccctctctttctcaggcctttgccattttcttcagggcaaatttttcaaagcatgcttctttgtggagtgaactgttatttcagttgtgactaatttgctaaaatcacagagatcataagcttgtatttttcagcctatttatcaaaagaaagctgacctcaattgtgtgatctgagtgtttgtgttttcccaaaattcatatgttgaaatctgaacgcccaaggtgacggtattagtagrtgtggtctttggaaggtgattaggtcataagagaaagtccctagtgtttggaattcatgccctcatgaaggagaccctggagagctagctagtcccttccactaggtaaggacacagtgagaaagcaccatctgttaggaagcaggcactcattagacaatcttggacttccccgcatcttgaactgtgagaaataaatattttttgtttataaaacatcattttatgctattttcctttctatatggtgtttttaaaggattttaaaa

SEQ ID NO: 157390 - DNA, 664 bp, Homo sapiens
aaataagcagcattttattaaatgtatgaaggtgatgttggggacttgctagaatcaatgcaaagctatgggmaaataaagacctggtagaataagacaagataaaaagcaaaggagagaaaatggatgtggataatgaccctgagaagaactttccaacacagtgatctgattatcaaaggattaagtgaagttcttgagaaaattagtgatgtcctcaaatatgtttacaaaaattgatattctttctgattattctgtgaaagttaagcatgaagggatgactattgggttgtattaggctgtactttggggaaaaattctactccagaacattctatttagattttgagtgacagaactgcatttaaatattttctttcataaaatatttaatctcaaagtctggcatataacaccttttaagagaatcatgaaaacatccacttagtttagtagattgaaacaagaaggaggctcatcccttgccttacagagtctcctttggttgaaaatcacttaaacattgaactgagaacatttgctgtgtttcctgatttatagatatgtttctaagaaacatatctataacttccaaacagtcccagctggctgtagctaaggctgtgtaattgataagatgcatctggtttcaaggcacaga

SEQ ID NO: 157391 - DNA, 585 bp, Homo sapiens
aattaatgtgattgatttgcacagtataataattattttgcattacgttggatttctcctttgtatctgaaggaactccattcatttaagtacattggtgtaatatttttatcattcttagaaccaaatatctgcttacatcctgtggtagaaaactcaaacataaactcaagctaacaaaagacagtgatttaaatagctgctaggtcagtagtatgaaaaacaaacagaaagaatgaaaagaaaaagaaagtctttggccaacatactactktctgctttctagaggtcacctgtttcaaaacctatttttcctcttgccgtttggttctgaaattcatttaatacagaattaattctgtattgaaaataaggtattggacgagatgcgacagctcacgcctgtaatcccagcactttgggaggacagggcaggcagatagcctgaggtcaggagttccgagaccagcctggccaacaaggtgaaaccccatctctactaaaactacaaaaattagctgggcacagtggtgcacatctgtaatcccagccacttaggaggctgaggcaggagaatctcctgag

SEQ ID NO: 157392 - DNA, 585 bp, Homo sapiens
aattaatgtgattgatttgcacagtataataattattttgcattacgttggatttctcctttgtatctgaaggaactccattcatttaagtacattggtgtaatatttttatcattcttagaaccaaatatctgcttacatcctgtggtagaaaactcaaacataaactcaagctaacaaaagacagtgatttaaatagctgctaggtcagtagtatgaaaaacaaacagaaagaatgaaaagaaaaagaaagtctttggccaacatactactgtctgctttctagaggtcacctgtttcaaaacctatttttccycttgccgtttggttctgaaattcatttaatacagaattaattctgtattgaaaataaggtattggacgagatgcgacagctcacgcctgtaatcccagcactttgggaggacagggcaggcagatagcctgaggtcaggagttccgagaccagcctggccaacaaggtgaaaccccatctctactaaaactacaaaaattagctgggcacagtggtgcacatctgtaatcccagccacttaggaggctgaggcaggagaatctcctgag

SEQ ID NO: 157393 - DNA, 585 bp, Homo sapiens
aattaatgtgattgatttgcacagtataataattattttgcattacgttggatttctcctttgtatctgaaggaactccattcatttaagtacattggtgtaatatttttatcattcttagaaccaaatatctgcttacatcctgtggtagaaaactcaaacataaactcaagctaacaaaagacagtgatttaaatagctgctaggtcagtagtatgaaaaacaaacagaaagaatgaaaagaaaaagaaagtctttggccaacatactactgtctgctttctagaggtcacctgtttcaaaacctatttttcctcttgccgtttggttctgaaattcatttaatacagaattaattctgtattgaaaataaggtattggacgagaygcgacagctcacgcctgtaatcccagcactttgggaggacagggcaggcagatagcctgaggtcaggagttccgagaccagcctggccaacaaggtgaaaccccatctctactaaaactacaaaaattagctgggcacagtggtgcacatctgtaatcccagccacttaggaggctgaggcaggagaatctcctgag

SEQ ID NO: 157394 - DNA, 555 bp, Homo sapiens
gtgtacataaacatacacataaattctacacaagatgaacctggaaatgaaaatttccaagcgcatgagaacaatgagcatcataaagatcaaaagacaggagaaattactctagaataatagcaaatattaaagcattcttctaagagggactttaaaatcctctagttatgaggaggaggaaaagraatataataaaaatgataacaatattgacacaaaataatggcagctaaaatatattgagtacttttgtcactaaagttgactgacttatttaatacaacaaatcactgaggaaaatatagggggaaacggcaatttttgcctgagcaccattaaatcactgaaactctacttagcttctcaatttctagacactggcattagcaaacaccttaagagaaaaaaaaaatgctgccaaatgctggagattcctttgtggacttcccttcacccccctgagtcttactctcatttccaaaagtaaaatcaataattatggagcaaagacaggaagatatgaatcaagaataagtagagctagaggaaaac

SEQ ID NO: 157395 - DNA, 535 bp, Homo sapiens
tgcctgtcttacattctcctttctggccaaaggttaaattgtaatacatgttattcaccacgttgaatttagaattgaaaaataartgaaacacatggggagagtaaaatgtaatggaaaaataaaaggctgtgaaatctgacagaccagatctaagctctactacttcttaatttggtgactttgagtatgtcagctgaagtcctcttaagcctcagtttctacatatataaaatagtaaaatattgcttactttccaaagctgctgtgagaattaaacctatgctaatcacctaaaatagtgtagatgccacagtaggtattcaaaaactggtagctacaattatttttcagatctgttttacttctcatttatattactcaacaactcttaaatgcaactaacttattctatggtaaattggaagacggtacgtttgctatttataatcaaagctgctttctggagaaggttaatttgggtaagcaaaaggcccttttgtctgaacatttcagtagtttgggtttacaaatt

SEQ ID NO: 157396 - DNA, 535 bp, Homo sapiens
tgcctgtcttacattctcctttctggccaaaggttaaattgtaatacatgttattcaccacgttgaatttagaattgaaaaataaatgaaacacatggggagagtaaaatgtaatggaaaaataaaaggctgtgaaatctgacagaccagatctaagctctactacttyttaatttggtgactttgagtatgtcagctgaagtcctcttaagcctcagtttctacatatataaaatagtaaaatattgcttactttccaaagctgctgtgagaattaaacctatgctaatcacctaaaatagtgtagatgccacagtaggtattcaaaaactggtagctacaattatttttcagatctgttttacttctcatttatattactcaacaactcttaaatgcaactaacttattctatggtaaattggaagacggtacgtttgctatttataatcaaagctgctttctggagaaggttaatttgggtaagcaaaaggcccttttgtctgaacatttcagtagtttgggtttacaaatt

SEQ ID NO: 157397 - DNA, 540 bp, Homo sapiens
agattttccatttctttatgattcagtctttgtatgttgtatgctttggagmacctaaacatataaaacagatatttatatttatacaatatgtaaatattgtattgcaacccatctctttcttcagatccacaggatctgatggattgcaatataacagtagaaaacttccatacctcactttcaatgctggaagatcatccagacagaaaattaataagaaaacattcaacttgaacaacactttacagaaacactttacaggacctaaatgaacagaagaatttaaccacttcttcttagttatccaatttgttgatgtataattgttgatgatagtccctgatgatcttttgtatttttgtggtattatgaatcttcttttttttaaattaatctagtttgtcaaatttgttcatcttttcaaaaaagaacttattttatctatcttttgtattgtttttctagtctctatttcatttatttctgctctgatttttattatttcctttcttatgctaactttggcttagtttattc

SEQ ID NO: 157398 - DNA, 599 bp, Homo sapiens
tatattcttaaaaactcctaagagagtagattttaagtattctccctacaaaagtatgggaggtaatgcatatggttaattagctcaattgagccattctacaatatatacatattttataacatcatgttgtgcacaataaatagacacamtttttatttgtcagttaaaagaaataaattacaaagataaataaatgcttttttttaaaaaaaataaaaatttggtacaatcctgtcaaactctatctcctaccgctgaattctctaaagacaagtaagggttgggtgatgccatggacacacaaattgaaaatactcagtagacttaaatggtttcgagcatttccttaaggtccgatcatcttttaatcccttattccactccggttctctctgactacagcactccggagggataccaagaggagagaaaacctgaatgaagtagcagtgcaaatggctgattttaaaaagaaaccaagcttcctaagttggtaatcaaggttgaagcacagcagtaggcagggggcagtgactctcatcttattctttagtactgtgggtggtccgtttgatgtttaaaacactcctgaggcc

SEQ ID NO: 157399 - DNA, 567 bp, Homo sapiens
accatgtcttttgcagcagcatggatggaactagaggccattatattaagtgaaacaacttagaaacataaaatcaagtacctcatattctcacttacaagtaggagctaaataatgtgtacacatggacaaaaagtatggaataatagacattggagactcagaagagttggggatagaaaggggaagagtgatgagaaattacttaatgggtacaatgtacattatttggaagatagatacactgaaagcccagacttcaacactacccaatatatccatgtaacaaaattgcacttgtaccccttaaatgtatacaaataaaataactaaatgaataaaatttccaaaaaaaaccataaaatttcaaaaaatcttgagtacttgttcttggcctttgactctcagccaaaatgtggatamtgaaaataattatttctaacattctgtcacaggtgttttaaaataatttcagccaggtttggtggctcatgcctgtaatcctggcatttggggaggacaaagtggtaggatcacttgagcccaggaatttgaggccagcctgtt

SEQ ID NO: 157400 - DNA, 406 bp, Homo sapiens
aaaaaataaaaaaataaaaaagtgtgagcaatcatgccagtcattccatgcaatgaactgacaccctggagaaagcctgaaaaaggagttgtgaatctgtgtcctcaggtgccccagcacttctagytgagttaggttctagtgtttctgaaagtattggtttttcaggctgcatgacaaattatcacacatttagcagatgaaaacataatttttatctcccagtatctatgggtcaggaacccaggcgggactgagctgggttctctaatccagggtctcatgaaactgcaattgagatgtcagctgggctacattctcttccagtggctgagccagagaggaatcttccaaattcactcatgttgttggcagtgctcatttctttgtggttgcaggactggga

SEQ ID NO: 157401 - DNA, 406 bp, Homo sapiens
aaaaaataaaaaaataaaaaagtgtgagcaatcatgccagtcattccatgcaatgaactgacaccctggagaaagcctgaaaaaggagttgtgaatctgtgtcctcaggtgccccagcacttctagttgagttaggttctagtgtttctgaaagtattggtttttcaggctgcatgacaaattatcacacayttagcagatgaaaacataatttttatctcccagtatctatgggtcaggaacccaggcgggactgagctgggttctctaatccagggtctcatgaaactgcaattgagatgtcagctgggctacattctcttccagtggctgagccagagaggaatcttccaaattcactcatgttgttggcagtgctcatttctttgtggttgcaggactggga

SEQ ID NO: 157402 - DNA, 409 bp, Homo sapiens
tttttctgaatgaaccctcccttaatactagataagcctattgtttagattttcttacattttattttatgcacattttcagragccatttacacaaaattaggatactgccagtgtgtactttttttacacaataagtctactttgttcactgtctccccagtatccaaagtagtgtctggcacacagcaggctctcaggaggtccttgatgaataaatgaatgaccagatctacataggataatgcatgtgacaaagaggaaaaaaaacttcaaaagctagagctgaattccccttagggagatagctgcccttttgtggataatccattgtgatggttaattttatgtgtcagtttgcctgggccattagatgcccagatatctggtcaaacgttatactgggtgt

SEQ ID NO: 157403 - DNA, 409 bp, Homo sapiens
tttttctgaatgaaccctcccttaatactagataagcctattgtttagattttcttacattttattttatgcacattttcagaagccatttacacaaaattaggatactgccagtgtgtactttttttacacaataagtctactttgttcactgtctccccagtatccaaagtagtgtctggcacacagcaggctctcaggaggtccttgatgaataaatgaatgaccagatctacataggataatgcatgtgacaaagaggaaaaaaaacttcaaaagctagagctgaattccccttagggagatagytgcccttttgtggataatccattgtgatggttaattttatgtgtcagtttgcctgggccattagatgcccagatatctggtcaaacgttatactgggtgt

SEQ ID NO: 157404 - DNA, 505 bp, Homo sapiens
gaattcataaggcaatgggtctctgagagggaataaaagaagagaaaatatattttcaagaagcaccatgaaaaagcagaacttcacattcaattagattctacatatatctgttaagtatctcctatgtatagggaacagaactaggccagagcatttaaaaaaaaaaaaaaaaaggccagataatgtctggatgcacgtactccattctagtgctacaatcagtgattataatgtccaattctctttttttagtawattttcttactgaagtaatatacacggaaaagtttatgagagtacagctcaatcaatctcaacaaggtgaaaaaaatctatgtaatcactagtcagatcaagaaataaaatattatcaaaattcattgctgctttggctgttttctgaggccttcaagtgcctgtttttcataatttttctagcttgtatacttctgtcaagggttaatccatcacgaactgctccctcatcctcaagcaaaagttc

SEQ ID NO: 157405 - DNA, 289 bp, Homo sapiens
cgtgtctgagactcccaaagcccaagygggcatgtgttacactgtactcctttagctttgccgtctgcagacagcttgtgtattaatcagctcaatggactctctgccttatagcaagggcagggggcattgtgacaaccttctgtatcccaagctcttgcccagtgtcccaaaagaattggatcacacgcgggcttgaaggatgagagcaaggttttattgagtgatggaggtggctctcagcaagatggatggggagccagaaagggggatggagtgggaatgtggt

SEQ ID NO: 157406 - DNA, 562 bp, Homo sapiens
ggtgcaggggctttaaattcatcacaaggtgataggtgtgggggctctgggtgctatctacccgacacaaacgcggaggcttagggtattgtcacccgtgtgaattcctgggaactgtggacatagcttgccacagtaccttatcagttcattgcactcttygatgtgctgggagtcagcttgcacaagttaagtccttgaggaatggggtgggtaaggagcccttgatgtcttgcaaatgaaggagccaaatggagtccgtccagctttctcagtaaagggagagtctattcatattaaaacaaagtgaggtatcacagagaacatggacccatgacacagcctcagaaagtcctggcaaaatgtgccccaaggtggccggggcatagcttggttttatatattttagggagatatgagacatcaatcaatatgtgtaagatgtacgttggttccgcttggaaaagcaggacaacttaagcagggaggggggcttccaggtcacaggtaggtgagagacaaatggttgcattcttttgagattttgattaacatttccaaa

SEQ ID NO: 157407 - DNA, 622 bp, Homo sapiens
tatgacattttatagaagagacttgagcatctgtgaattttagtatccgtgggggtcctggaaccaattccccatggataaccaggaacatctrtggcagatgtctttgcagatgtaattaaatcttaagataaatgcagtgacttgtagttttagaagaagagaaaatacaaagagccacagaggagaacaccatattgaagatggaggcaaaaactggagagacacatctaaagccaaggattattggcaactaccagaaggaggtaggtaagaaagagattcccagaacctccagaaaaacacaaacctgaaaagaccttgatgtcagacttctggcctctggattgtgaggaataaatttctgttctttaattccacacaatttttgataatttgttatggtagccctagaaaatgagcacacaatgtttttgatttctagtatttaaaaaattctttcttagcatttccatctctttgcttacattactcgtttcttcttgcgagttgtctattttttcccattagagctcttaatatattaattgcaatgatttaaaaaatacgtgtttgataattccaacacccatgtcatgtctgagtctggttctgatgtttg

SEQ ID NO: 157408 - DNA, 626 bp, Homo sapiens
tggaaaacagtttggtagtttcttataaagttaaacatacaattaacataagacccaggaatttcactcctcagtattcatccagaagaaataaaaatatatttgacacaaagattgtaaatgtagacagttttaattgtagtatcagaaactggtggggaggaaacaaattgtggtatattcatacaatggaaaactcttcagaaataagaaggaacaaaccactgaatcacacaacatggacmaatctcaaatcattatgctgatggaaagaaaccattcataagaatacacagtacatgacgccgctttcatgatgttctggaacaaagaaaactaacctatagtgatagaattcctatcaatggctgccaacaattgggagtgaaaggaactgactgagcaggtatacaagagaaccttctggggtgatggaaatattctgaagcttgactggagtgttggttacatgggtatatcaatttatcaaaactcactgaattgtatatttaaagtaggaacattttattgtaaataaattacacctctataatgttcgttttaaaaaatattagatacatcagctggaaatcacttggttttaacaaaaaattttctctgtaatc

SEQ ID NO: 157409 - DNA, 519 bp, Homo sapiens
aagcataacaggttgaagtggttttcaaaaagctacttctagtgttcttcagctttctattatggcagcatcatcttgtgatgaagacactggctcacttggacacacrgtcagcatgcataaatacatctcagtgatgatcaagttactgccatctacaggaccgcttgcaaataagatgaagagagctacctcagtgttagcagcaaggcttcgaggtctgtactactcaaaccactcctaagggtatggccaatgcacagtttgaatgttagggaacacaccaggtaatgttaaagattcaccagttttccccttggaattaattctaataaaatcttccacagggtaaattaaaaataaatttctctccccttttactcttcattatttttagtctcaaaagcctcatatactgttccaatgaaacaagaattggctctgaaccaaaaccaaaaagaagggaagaaaatccagagtattctatgatgccctgttaagtattagcgtgtggcttcc

SEQ ID NO: 157410 - DNA, 533 bp, Homo sapiens
ccaaacgttctctcttatttatttctctcttatctctcttattatttcggtttgcctagaagagtcatgaacatgtcactctgaccagtrttttggctgtttttctctcttattttgagttttctgttatcctgtagtttatttgcctagttcttattttagctgttgtttggatttttccgtccttctgtcaccacccagggctatgctcctatcagcagaacacagccaacaaatcattagtttgctaatgacacaagtgatagcaatgcagtccatggattgactacttcttagtcacgtgtccacccttcatccaatcagctgtggccttagtcgggtgtctacccctcatccaatcagctgtggccttgctgaaggtggcattctgaagtcagctacctgcttagcaagatgtgtgggcagaaattcatcccgaaagtgacgtggacagacagtcctccgatctatggttagtacagttatgggtcatttaatgacagggatacattctgtgcaatgtgtcattaggt

SEQ ID NO: 157411 - DNA, 559 bp, Homo sapiens
cctctgctctttcctgaccactgatcgctgctttctgctctgccgtggagtctctttgctggtgagcttttggagctctgggaaaaacacctttgctagttgtgctactgttactaccattgttccttggaggagaattggtggaaccaaagcttttctcctttcatggctctcatcattcctccaaggcaccacttactgtgtagcaggacgagccgcagacaagaacyccttagacaccgaactgtagaaggaaagggctttattcagctgggagcattgacagactcacgtctccaaaaactgagctccccgagtgagcaattcctgtcccttttaagggcttacaactctaagggggtccgtgtgagagggtcatgattgattgagcaagcagggggtacatgactgggggctgcatgcacctgcaccggtaattagaatggaacagaacaggacagggatttttccatacaatgtctgtaatctatagatagcataaccgattaggtcaggggttgatctttaactactagccccagggtgtggcgccgggctg

SEQ ID NO: 157412 - DNA, 451 bp, Homo sapiens
ttagttaaatatcactataacctggcaagccataaacatcttctttagacaactaaattaatggatctttacaccttttacactgctagggaaaaaatatcatcacagttagactaattgtaagttttttattcaacattcattcaacaaatayttatgatcattgaagatttcccaagcattcttctaccttctacaaaaacagccaaaaattcctgtgctttaagatagttatatttttatcataaaatgtaatgcagtgctccaaatagattttacctttcatttaagaatttcgagatgaatctgtagtagtcagagttctaggatgaaggcatctgtagtagtcagggtttgccagagaaaacagaaccaacagggtgtgtgtgtgtgtgtgtgtgtgtgtgtgtgtgtgtgtgtgtgtgtagagagagagagatttactttaaga

SEQ ID NO: 157413 - DNA, 451 bp, Homo sapiens
ttagttaaatatcactataacctggcaagccataaacatcttctttagacaactaaattaatggatctttacaccttttacactgctagggaaaaaatatcatcacagttagactaattgtaagttttttattcaacattcattcaacaaatacttatgatcattgaagatttcccaagcattcttctaccttctacaaaaacagccaaaaattcctgtgctttaagatagttatatttttatcayaaaatgtaatgcagtgctccaaatagattttacctttcatttaagaatttcgagatgaatctgtagtagtcagagttctaggatgaaggcatctgtagtagtcagggtttgccagagaaaacagaaccaacagggtgtgtgtgtgtgtgtgtgtgtgtgtgtgtgtgtgtgtgtgtgtgtagagagagagagatttactttaaga

SEQ ID NO: 157414 - DNA, 451 bp, Homo sapiens
ttagttaaatatcactataacctggcaagccataaacatcttctttagacaactaaattaatggatctttacaccttttacactgctagggaaaaaatatcatcacagttagactaattgtaagttttttattcaacattcattcaacaaatacttatgatcattgaagatttcccaagcattcttctaccttctacaaaaacagccaaaaattcctgtgctttaagatagttatatttttatcataaaatgtaatgcagtgctccaaatagrttttacctttcatttaagaatttcgagatgaatctgtagtagtcagagttctaggatgaaggcatctgtagtagtcagggtttgccagagaaaacagaaccaacagggtgtgtgtgtgtgtgtgtgtgtgtgtgtgtgtgtgtgtgtgtgtgtagagagagagagatttactttaaga

SEQ ID NO: 157415 - DNA, 451 bp, Homo sapiens
ttagttaaatatcactataacctggcaagccataaacatcttctttagacaactaaattaatggatctttacaccttttacactgctagggaaaaaatatcatcacagttagactaattgtaagttttttattcaacattcattcaacaaatacttatgatcattgaagatttcccaagcattcttctaccttctacaaaaacagccaaaaattcctgtgctttaagatagttatatttttatcataaaatgtaatgcagtgctccaaatagattttacctttcatttaagaatttcgagatgaatctgtagtagtcagrgttctaggatgaaggcatctgtagtagtcagggtttgccagagaaaacagaaccaacagggtgtgtgtgtgtgtgtgtgtgtgtgtgtgtgtgtgtgtgtgtgtgtagagagagagagatttactttaaga

SEQ ID NO: 157416 - DNA, 273 bp, Homo sapiens
atcaaattcatttggatttttcggctttaaggtatgaatcttcaaaggattgacttatttgaaggtctacatgaatatctgattagcttctccatatactgatgtatatcatggtgaggaagggaagaattttcaaatccycaggttaactctgaagtcagaatatccatcctactgccattgtttgagggctaaaataactatgaatttatgataaactttcttccaaaaatctacatgtcaaatactttgactttgggcccttatacataa

SEQ ID NO: 157417 - DNA, 564 bp, Homo sapiens
gctcccactgcctgacagcatccattccagaaaaaaggacacacttccttgaactctccaaatcgcctaccacaagcccaagctctccacgtaacaccctctcaccgagacactgcacagcgccccctggtgcacattccccctcactacagctagtcaataacccaatgttgtctgactacaggtgatgctcctggtagtctttgtctaggggtagtaggtacccaaattgccacagtgtcgcttccactgcattctattggtcaaggcaagtcacaaagccactcaggtttaaggggagaggaaaaagactctaccttctgatccatgacrcagcatgagcttacagggagggaaaggattgatggtggctgtctttgtaaacagtgtaccacagtactatagaacagccacttaaattttcagaaagcagttgaattttaagttaaaaatgtatgtgaaacgctggtgctggccacctagttaggccatagtctgtggctatgctttattcagacaataagaggatttagcttctctttacatcttcacaatatgacttcc

SEQ ID NO: 157418 - DNA, 625 bp, Homo sapiens
gtcctggagatgggttgtggtgatgtgtgcacaatagtgtgaacgtatttaatgacactgaactgacactaaaaaaaagttaaaatggtaaactttattttatgtacaatttatcccgcttttataaaaggaaaaatgtatcttttttattaaaacggggttgagagttttgggaactgtttttctactcctcatatcacccttgtgaaatagtaaaagattcatctggctttctttctcgtgtagattgtggggaaaaaaaaaaaaaatatatatatatatatatatatatayacacacactagaaagtgctattatcagttcaaagagatattagagctggccccaagcatgcacatttagaaatgttttggaaaagttaaatttaatgaaacaaagtgtatttcgtcacactggaagctagcgtctgcagtaaggctgacttcgacataaaaatgtagaatgatttgacttattttctactcataagtggattgctgttgtttgattctgtttatagaggatgtggcctaaaataaaacatataatatgtccaaaagcaaaacctacaattgtctggtgtcatgctttcataatttacttcattgatttattcatttattca

SEQ ID NO: 157419 - DNA, 627 bp, Homo sapiens
ggatacgtaacttcttaaaaattttggtttttctatcacttcaaattttttgcttagaatgtgatataatttatctgaaacatgaaatacagtaattagagttgctctgatttttctctttagacatacctttagtcctatggtataaatttaaattatcacagaaaataaaataaaatttaatttaaaaaaacttacagagtcccrcagtgttgcccagactggagtacaagggtgctatcatagctcactgtaaccttgaacttctgggttcaagaagtcctccagcctcaggctctgagtagccaggactacaggcgtacagcatgatggcataatgcttggctaattttttaattttttttttttttttttttttttttttttttttagagataggatttcattatattgcctaagctggtctcaaacagctagccttgagcaatcctcccatcttggcttctcaaagcaatgggataacaggcatgagccactatggactggtcaacatttaaattttttaactacaatttttctaggtcttttaaggatcaaatcattgatttagcaaacattgtgagtgcttatttgatggatcattgaatatttgttgatttgctatac

SEQ ID NO: 157420 - DNA, 627 bp, Homo sapiens
ggatacgtaacttcttaaaaattttggtttttctatcacttcaaattttttgcttagaatgtgatataatttatctgaaacatgaaatacagtaattagagttgctctgatttttctctttagacatacctttagtcctatggtataaatttaaattatcacagaaaataaaataaaatttaatttaaaaaaacttacagagtcccacagtgttgcccagactggagtacaagggtgctatcatagctcactgtaaccttgaacttytgggttcaagaagtcctccagcctcaggctctgagtagccaggactacaggcgtacagcatgatggcataatgcttggctaattttttaattttttttttttttttttttttttttttttttttagagataggatttcattatattgcctaagctggtctcaaacagctagccttgagcaatcctcccatcttggcttctcaaagcaatgggataacaggcatgagccactatggactggtcaacatttaaattttttaactacaatttttctaggtcttttaaggatcaaatcattgatttagcaaacattgtgagtgcttatttgatggatcattgaatatttgttgatttgctatac

SEQ ID NO: 157421 - DNA, 627 bp, Homo sapiens
ggatacgtaacttcttaaaaattttggtttttctatcacttcaaattttttgcttagaatgtgatataatttatctgaaacatgaaatacagtaattagagttgctctgatttttctctttagacatacctttagtcctatggtataaatttaaattatcacagaaaataaaataaaatttaatttaaaaaaacttacagagtcccacagtgttgcccagactggagtacaagggtgctatcatagctcactgtaaccttgaacttctgggttcaagaagtcctccagcctcaggctytgagtagccaggactacaggcgtacagcatgatggcataatgcttggctaattttttaattttttttttttttttttttttttttttttttttagagataggatttcattatattgcctaagctggtctcaaacagctagccttgagcaatcctcccatcttggcttctcaaagcaatgggataacaggcatgagccactatggactggtcaacatttaaattttttaactacaatttttctaggtcttttaaggatcaaatcattgatttagcaaacattgtgagtgcttatttgatggatcattgaatatttgttgatttgctatac

SEQ ID NO: 157422 - DNA, 618 bp, Homo sapiens
actagcagtgggtactgtgtcccaagaaagataagtactatccaaataactgtatgggaagtattatgtatttatcaatattaattttctttctctgccaatagagtggcaaaaatgaagcagtggatcgataaataaataataaatattaaaactatgtgggcaagaagcatattatcttctaaatattttattacaaaatttagtttaataattatttaacaagttcattcaacaggagaaaataatgcatatttttcttccatattcaaaagtcaaatttagttgttatttacaaaaacatttgcaaagtttactagttggtcatattaaaggtataaataaaagtgggaatgtcaatgacaacataacattttccttgtaataaggacatttaaaaaggacatttaaaatgactttattacyctgctcacttacaaaatattaaatgagtagagatattgccaaatcatttcaatacatgagaaccatcactcttttaaattaaagcacaaaaatcaaaaagtcaaacttacaggaatgtagaatgatagttaccagaggctgggatgggggagtggattgggaaaataaagatgttggtccaagggtacaaag

SEQ ID NO: 157423 - DNA, 408 bp, Homo sapiens
gatggagacaaaatgaggaattctgtttccttctgagtcttggtggcatatcagttattagactctgaggtcccttttgtgtttaaaatgtattaaatataatctgttgtatacatacactcacacatgcattaatatattaatatattaaatcttatatactgtatagtaaatttatgtaatatagttacatattacataattagaaataaatatgtatcartgctatttaattgtacattgacatatgtgtgcagatgtagtcaaagtattcaaaaattatagagaaaaatttgttttttaattatatgcttaagctggacagtatttcattcaaatataaggaatatctataataataaattgaataacttacaaatatgggtaatctgttgggataataaactc

SEQ ID NO: 157424 - DNA, 606 bp, Homo sapiens
ctggttagcaactttaatctcatctgatacgataattcccctttcccatgtaggctaacataatgggattaggaagtgaacagaggtaagggatgggatttgcgaattttctgctggccataataaacaataccaatttggttacctattctaatgaataaatatgtcttatagatattttccaaatcaatctttacaaaaactcttcagaatagcgatatctatcgcagcttggaaaataatggctgaggttcacagtactaactggccgaagatctaacagcaagtgggagaggcttgattcaagggcaagtggagagactagaatgacatgcctttcatgaatattgtttttctgagcaacattctttgcccatygggcaaaatatacttctatttcttagtcatataattatactggtgtgttacatgttcatatatgattttttcccaactgtccacaaatgacttttctgagccagctcctcttcatggagctactcaagcctctgattaaatttcctgggttcattttgttttctttttactttaacgaaatactggctggattgctgtcatttgtgaccaaaaacattgtgcttaccc

SEQ ID NO: 157425 - DNA, 606 bp, Homo sapiens
ctggttagcaactttaatctcatctgatacgataattcccctttcccatgtaggctaacataatgggattaggaagtgaacagaggtaagggatgggatttgcgaattttctgctggccataataaacaataccaatttggttacctattctaatgaataaatatgtcttatagatattttccaaatcaatctttacaaaaactcttcagaatagcgatatctatcgcagcttggaaaataatggctgaggttcacagtactaactggccgaagatctaacagcaagtgggagaggcttgattcaagggcaagtggagagactagaatgacatgcctttcatgaatattgtttttctgagcaacattctttgcccatcgggcaaaatatacttctatttcttagtcatataattmtactggtgtgttacatgttcatatatgattttttcccaactgtccacaaatgacttttctgagccagctcctcttcatggagctactcaagcctctgattaaatttcctgggttcattttgttttctttttactttaacgaaatactggctggattgctgtcatttgtgaccaaaaacattgtgcttaccc

SEQ ID NO: 157426 - DNA, 614 bp, Homo sapiens
ttcatgtaatttgtcaatgtcctaatctatttataaatattcccaattataaaagaagtggattggcaaatatttctaaggactcagtgataaattttgccatcagtcatgtcaataaaggtaattcaacatttatatcctctcacacaattcttattcatctataaaaaatattttttctacaaaataacactcagtactttatgataaattatattaaagatatcagaattatttcagattagattttacagctatctgaatctaaatttaggcaaagtgcaattatgaaaatgttgttttatagcatcatttttttgtgatgatcttatatgctcatttaagttcagctttctctttaatttcctgtgccaatgaatttacttttcatacaaaatggcacgtacatcactgtgaaaaaaataaaatatctagtaatatcacaactcaatggaaggaaataaataatggaaaataaggtcaaaattaactttacaaataagwtttaccaaagtatatgatagtagagagaataaaatactgacttgtgatttatatgtgaaagaagcattcgtactaaatatacgtgaaaccttggaaaattgcttaaggtc

SEQ ID NO: 157427 - DNA, 410 bp, Homo sapiens
tcagcctcaaatcatgaccactgggcaagtgtagtcaaagccccacagtttaagaataccagttaggtttctctaatctcatattatcagagagtgacatatgggacactttcataagccttgttcagttacagagcctggactgcacgacccagacatgccccsactcaagtgcccccatttaacaacatttttttctggtacccaagatccaccatcattgagctatacccagcaactcaaagaaatgagtaatgttctttatgttgtcctccttcggtctaaatctatgatgattaaatatttatatctgactatatttatatataatatattcacatattaatatgtatatttatacctgacatatatttatatgtttgaatatttatgcctgcaaaacaatttat

SEQ ID NO: 157428 - DNA, 610 bp, Homo sapiens
gaccagtagagacaaatgatcacaaaacagagaaaaaaatagactgtcgaaaacatcggtgctgtcaagagatacgggaaagcccagcattcaatgaagaagcaggagaagtgtctgtggcctataggaattagaggttatgtggaaggatttagaagatcaatgtgtaccccttagaacagctgcctaatactcaagagcctcaagccttctgatttatatatgcagatactacatatggaatttgttaaaaattagatcgcctctactttttgggtggtgtgggtgggaggagaggaagcagtaggctagaatcagtctttatacatgtctgagtttccctacatagctggcaaccacatggtattaagaactgaatcagtgtgttttgcacagaaayctattaaaggcttctcttgctttgtttattgttttaatgttttttttttaatttaaggtaattttagattcacctgcttttgtaaataataatagagtaatatttgttctctaatagtaatacacttttgactcattttcactatctaaataagcaaatataagtaatctagccctaatttcattgttcagataaaagcaggcatttaaa

SEQ ID NO: 157429 - DNA, 503 bp, Homo sapiens
tctagactcactctgtgctagaagagaatccactcctctgatgggatggaccccatcctagcagaattcaygccctgctaactgaagtggtcctgggccttgaataaacatcaggcagtggtggctgcaggccttgggttagccccggtattgtactggtctgaagggattcgggtgtgactctgtgtagtgctagctgtggtagccatgagagtgggcacgtcacctctccccaactccagacagcacagtgtacagagagactccttctgactggggaaggagtaagagactttgcctggttacccagggaattatccctcatcttaccgaagtctagcaagtctgtgtatgtaggaggatctaagagctgcagcattcctaggcttaggaatctaagcctaggaatggttctgaaatggcttctgcaatgttctgaaatggctgcaatgttctgaaatggctgcaataattgcaggcttaggccaaaacactcaatctct

SEQ ID NO: 157430 - DNA, 412 bp, Homo sapiens
cagaggcaaacagccaagtactttcaagattcaatgcatacaactaatttagagaccaaggaatgctagcactttttaaaaggcatattttcagggggaaagctttgatgcttaatacatcacaataatgcacacagagaagcaggatgctgagccctaacctgaaaasgctcacttttgaaagcgagtaataacacttttgatatgaatgctagaatatataatgctgtggtatatatagagacatcattacacggagagtcaaatgcatcaaacaagccatttacttttaaaatgctctgtagtttattttgcaatttattattaattaaagacctaattggttcaagacttggactataccattgaatcactaaaaacaaaaacacttctaaggagaacaaatgaattc

SEQ ID NO: 157431 - DNA, 527 bp, Homo sapiens
atatttttgttgctagaaattggtaaagccagaatataaactcaggactgttgattccaaatctctggctcaatctgtaataaatggtgaagacgtctctaaaaaagaaaaatagcattctcagccatgtatttcctaaccagcattttcaaattgcatatagagaggaggcattacatcatgataaatattgtgattcttttgctaagtgctctcttgggacagataatatctgaacatagatacttgatcattatttagtccaaacccacatgtgagcttacgttctctgttgtcagagatctaacycacacaaagaggtatcctgaatgattttatgatagtttctttctttcttttctcttttcttttcttttcttttcttttctttctttctttctttctttctttctttctttctttctttctttctttctttctttctttctttctttctttttttgagacaggactctgttgctcaggctggagtgcagtggctggctggatctcagctcactgcaacc

SEQ ID NO: 157432 - DNA, 494 bp, Homo sapiens
tcaattcaggtaaaaacagcaaaggtatgaggtttgagtaagaatagtytgacttttggctgggagcagtggctcacgcctgtaatcccagcactctaggaggcccaggtaggtagatcacctgaggtcaggagttcaagaccagcctggccaacatggtgaaaccccatctctactgaaaatagaaaaattggctgggtgtgatgacatgtgcctgtaatcccagccactcaggaggctgacacaggagaatcgtttgaaaccaggaggcagggattgtggtgagaggagacagtaccactgcactctagcctgggcaacagagcaagactccatcaaaaaaaaagagaataggctgacttttgtgagtaaatggatcttaaggtatcatcccaattaaaagaatgagattaaaagttaaaatgattgacatgtttaacccactttagggagtacttttattccaaataatgagttttctaactaaatagcat

SEQ ID NO: 157433 - DNA, 608 bp, Homo sapiens
gaggacaggactgggttgctccagttggcaatgtggttaagatcttcaatatttatgtttcttatgaaatggtacctgaactttccttgcaagagaacatgatcacataactatgtgtgtgtggcccatgtgggttttcagagtcagtgaaggtaggacaaggctgctgggtggagccagcgccctgaaggagatatctgaaagcagacactgccaacctgaggaaggtaggttgttgttgaagtttaacttcccaaccccctcattcctcaggaaatctcctcacagagcctacaaagttctccttctcggggcctttctgaaaagggaaagctcccagaatggtctcggtgatggaaagataggctcagtgaccaccaaggattccaacattcagacatcatccactagacattaaccaagaatctcctggtgaacccatcagtgaaccaggcctgagaaagctatccacagtttgcctgggcttccttggtccagggagggtgcagatatggagcgtcagcctcggagatgggtgaccagccatcttcgttttccaagaaagccccaggaaaactgggacaarttggccaccctacaggagacct

SEQ ID NO: 157434 - DNA, 597 bp, Homo sapiens
atcctggcctggacattgactccctggggactttgggtgagtctcttcctttctccaagacccaatttcatttgttaaatgaggaggttggaacaaatacttgcttccatgtcttgcattctatgagttgggatcaagtgactgtcctaagttcatgaagctgcatggaagtcagatcctagaacagatcctgtgtctcctgatccctcaatctaatgttctttccacaatgctgggctgcatgagcagatgtcaagggtaagaggtaacattcattgagtggctaccacatgccaagtgctctctcttgtgtgtctgtactatatctagttagttctcccatcgtcatctgtgttagataagattttcaaatcattttacagataggaaacaaacagaaagattaagtcatttatccacaatcacaccattagtaaatgcagagctaggatttaaagtcagcccaattccagaacccattgtcttcatctctactctctacactacatagtagaataagaaggagtagttcagtgacataaargacatggaaccttaaaacagaaaatatggcagtctttcagaggtgaattcaca

SEQ ID NO: 157435 - DNA, 370 bp, Homo sapiens
aggtagagaagcagttattcactttataaaacaattctctataggattcttttgtcagtttcctagactaygtaaaatgtgattcaaattaaaatatttaaatcacatacccacatcttgacatgggcagctatttgtaaaatgaggcaaacccacactgggaaataccaaattaaaaaaaaatcagggaaaaaatattttcttctgggtggccctaaactgctttctttttccccattgcaaatgtatttttatgctgggttacatttccaaaacaggagtgttttttttctatcgttgaaatgaaacaaacaagtttgctttcagagctacagaaatgcccaactgttaggaaaaaaaaaacaaaaaa

SEQ ID NO: 157436 - DNA, 370 bp, Homo sapiens
aggtagagaagcagttattcactttataaaacaattctctataggattcttttgtcagtttcctagactacgtaaaatgtgattcaaattaaaatatttaaatcacatacccacatctygacatgggcagctatttgtaaaatgaggcaaacccacactgggaaataccaaattaaaaaaaaatcagggaaaaaatattttcttctgggtggccctaaactgctttctttttccccattgcaaatgtatttttatgctgggttacatttccaaaacaggagtgttttttttctatcgttgaaatgaaacaaacaagtttgctttcagagctacagaaatgcccaactgttaggaaaaaaaaaacaaaaaa

SEQ ID NO: 157437 - DNA, 453 bp, Homo sapiens
gaattcgtatttattcaaatgacatattaatggtgaggtggcattttaaaatattaatatttatagaactgtgttcctaccaatttttattaattacataaatgtcatagtaattatatacttgcaatcattactaggcaggtataatgcaattgtgctactattctactcctggactgaatattaagacaagactattccctgtcttatctcaggtagggctggagaccaccaccatatttatcagaagggcactaaacatctggattctatatttgctttctctcatcacagaggcagtaacaatttaccctaatggaaaatgaatttgccacatctggtcaacgtgcctctgttagtagagtaattgtgatttcaccaaaacagcttctgggcaagaaaattgtttcactgcatttaaaaaaaraaaagaaaagaaaagaaaagaaaagc

SEQ ID NO: 157438 - DNA, 511 bp, Homo sapiens
cattccttaaatagctacctttctagaagctggacatttctagggcccactaaataaaagaaagcttaccctagcaggctcagtattcctcactatagtctgggaatatggtttctacactggcacgcaagctttcatccttaaagccacaagcattactttatcccaacttgatcttgcaatataattattaattcctcttatttaaggtggagtcttgctctgtcgtccaggctggagtgcagtggcatgatctaggctcactgtaacctccgcctcctgggtttttaagcaactctcctgcctcagcctcccatgtagctgggattacaggcatgtgccaccacacccractaacttttttgtgtgtttttattaaagacagagtttgaccatgttggccaggctggtctggatctcctaacctcaagtgatctgcccacctcagccttcattccttctttcatgcatactttgtacatgaaggagttgcatcagcaacctagaattc

SEQ ID NO: 157439 - DNA, 553 bp, Homo sapiens
gcacacctatggttctagctatatgggaggctgagctgggagaatcacctgagcccagaaggctgaggctgcagtaarcaatgatcatactactgcactccagcctcagcagcagagcgaatctctgactcaaaaaaaaaaagaaaaaaaaaaaaaaagccatgccagacatggtggctcatgcctataatcctagcactttgggaggctgaggtgggtggctcacttgaggctaggaatttgagaccagtctggcacacatggtgaaaccctgtctctactaaaaatacaaaaattagctgggtgtggtagtgtgggcctgtagtcctggctacctgggaggctgaggcatgagaactgcttgaacccagagggtggaggttgccactgcactccagcctgggcgacagagcaagactctgtcttaaagaaaaaaaaaaaaaggaaaaaaaagaatacatatgaaattatttgtaatgaaaagcatacatgtttcagttcaaaaagatgaaattcaatggaattgataagatggtcattaaatagtgtttta

SEQ ID NO: 157440 - DNA, 589 bp, Homo sapiens
agtcaggtgtagtagtgcacacctatggttctagctatatgggaggctgagctgggagaatcacctgagcccagaaggctgaggctgcagtaagcaatgatcatactactgcactccagcctcagcagcagagcgaatctctgactcaaaaaaaaaaagmaaaaaaaaaaaaaagccatgccagacatggtggctcatgcctataatcctagcactttgggaggctgaggtgggtggctcacttgaggctaggaatttgagaccagtctggcacacatggtgaaaccctgtctctactaaaaatacaaaaattagctgggtgtggtagtgtgggcctgtagtcctggctacctgggaggctgaggcatgagaactgcttgaacccagagggtggaggttgccactgcactccagcctgggcgacagagcaagactctgtcttaaagaaaaaaaaaaaaaggaaaaaaaagaatacatatgaaattatttgtaatgaaaagcatacatgtttcagttcaaaaagatgaaattcaatggaattgataagatggtcattaaatagtgttttaaaagtcattctgattcaaat

SEQ ID NO: 157441 - DNA, 496 bp, Homo sapiens
atatacccaagaaatataaattgttttattataaagatacatgcacacgtatgttcaatgcagcattattcacagtagcaaagacatggaataaacctaaatgcccatcaactgtagactggataaagaaaatgtatgtatacaccatgaagtactatccagccatatgaaagaatgagatcatgtcatttgcagggacatggatggagctggaggctattatccttagcaaactaatgcaggaagagaaaaccaaataccacatgttctcacttataagtgggagctaaatgatgagarcacatgaacacatagagggaaacaacacacattggggcctatcagagggtgctgggtaggaggagggagagaatcaggaaaaataactggtgctaggtttaatacctgggtgatgaaataatccgtgcaaaaaaactctcatgacacaagattacctgtataacaaacccgcacatgtatccctgaacttaaaata

SEQ ID NO: 157442 - DNA, 589 bp, Homo sapiens
cacacagagtgtgagaaaattcaaacataaaagtaccttaaaaaatagttgtgggaattgagatgaggctgatagatccaagagagcaaaaacytaaacctaaggctcgctagttgaccaaggagaaccaaagaaagagaaattggacccctcatttgtgctggtgggaatgcataatggcaaaggtgctttggcaaacagactagcagttcctaaaaagattaacagagttaccctgtgactcagcaagtcactgttgttacagatgaaaagaaagaaaaacatgcccacacaaacattttcatgtgtatgttcatagacataaacaaaaatcagttaatcaactgataaatggttaaagtaaatgcaacatatcaatacaagaaaatattattcaataacaataaggaattaaatattaacatgaatgagccttgaaaacatgctaagtgtaaaagtagtcacagaagaccctgtattgcatgactccatttgcatgaaatatctacaatggggaaatttataaagacagaaagtagattcttgcttgcataaggaggagaaatagtggggaaaatagggggcagtt

SEQ ID NO: 157443 - DNA, 589 bp, Homo sapiens
cacacagagtgtgagaaaattcaaacataaaagtaccttaaaaaatagttgtgggaattgagatgaggctgatagatccaagagagcaaaaacctaaacctaaggctcgctagttgaccaaggagaaccaaagaaagagaaattggacccctcatttgtgctggtgggaatgcataatggcaaaggtgctttggcaaacagactagcagttcytaaaaagattaacagagttaccctgtgactcagcaagtcactgttgttacagatgaaaagaaagaaaaacatgcccacacaaacattttcatgtgtatgttcatagacataaacaaaaatcagttaatcaactgataaatggttaaagtaaatgcaacatatcaatacaagaaaatattattcaataacaataaggaattaaatattaacatgaatgagccttgaaaacatgctaagtgtaaaagtagtcacagaagaccctgtattgcatgactccatttgcatgaaatatctacaatggggaaatttataaagacagaaagtagattcttgcttgcataaggaggagaaatagtggggaaaatagggggcagtt

SEQ ID NO: 157444 - DNA, 412 bp, Homo sapiens
ggggacaatgcagcaaagctatttgctaaagcataacaaaagtgacttttgctccacttcccaataagttcctcaactccatctgagaccacctcagcctggtcatctctgcccacatcactatcagcattttggtcacaaccattcaagtctttaggaattcccaaattttccctcatcttcctgtcttcttgtgatccctccaaactgttccaacctctgcccattactcagttccaaagttgttgctgcattttcaggtatctttatagcaatattctactcctcagtaccaattttctatattagaccattcttccattgctataaagaaatacctgagactgggtaatttacaaagaaaagawgtttagttggctcatggttccgcaggatatacaggatcattgct

SEQ ID NO: 157445 - DNA, 534 bp, Homo sapiens
gggatgattaatgggtacaaaaatacagttagatagaatgaatacgatctagcatttggtagcacaatagggygactataattggcaataatttagtgtacatttaaaaataactaaaagggtggaattggaatgttcctaacacaaaagaataagttgttgagatgttggataacccaaatgccttgatttgatcattacaaatcgtatacctgtatcaaagcatcacatgtacctcatatatatagaactattatgtatccataaaaattaaaaaatgaaaataaatacattttaaaatttctcttttaataggatagctcatgataccccttctagtactgagaagcaaggtttatcattcatagttattttaaattctcagtgagttttatttattcaggtgtttattaactatttgcattttcctgtatgtgtgtgtgtatgtgtgtgtgtgtgtctgtgtttatttcatgtactttttccactaatttattaggagttttaatattttcttatcaatttatataagct

SEQ ID NO: 157446 - DNA, 534 bp, Homo sapiens
gggatgattaatgggtacaaaaatacagttagatagaatgaatacgatctagcatttggtagcacaatagggcgactataattggcaataatttagtgtacatttaaaaataactaaaagggtggaattggaatgttcctaacacaaaagaataagttgttgagatgttggataacccaaatgccttgatttgatcattacaaatcgtatacctgtatcaaagcatcacatgtacctcatatatatagaactattatgtatccataaaaattaaaaaatgaaaataaatacattttaaaatttctcttttaataggatagctcatgataccccttctagtactgagaagcaaggtttatcattcatagttattttaaattctcagtgagttttatttattcaggtgtttattaactatttgcawtttcctgtatgtgtgtgtgtatgtgtgtgtgtgtgtctgtgtttatttcatgtactttttccactaatttattaggagttttaatattttcttatcaatttatataagct

SEQ ID NO: 157447 - DNA, 530 bp, Homo sapiens
gtgagctgaaaacgtgccactgcactccagcctggatgacaaggtgagactgtcttgatatatgtgtgtatatatgcacatatacatatatatatacacatatgtatatggagagagaaactttctctcatgtatatgtatatgtatatgtatatgtatatgtatatgtatatgtatatgtatatgtggaatgctttatccaggtcctggcaatattagaaaatgcccttctccttggctatagtaaaraaagtgttttactttctttgatgctggccttgaattttgacagagaagtaaagtaaaatgctttgaaatctcttcttcctttctctctatccatggctatttgtttcaagctctaattgtgtgtgtgccatagatctgactttcgtttagctccattcatgtagatgaattgtagatgaaattcttccaggatctgacaatctgttattaatattcttctgttcctgtggggttcttccctttccatgttttttttctgatgagaggtaaagagatagcaa

SEQ ID NO: 157448 - DNA, 476 bp, Homo sapiens
gtgtgtgccatagatctgactttcgtttagctccattcatgtagatgaattgtagatgaaattcttccaggatctgacaatctgttattaatattcttctgttcctgtggggttcttccctttccatgttttttttctgatgagaggtaaagagatagcaaatcagatagtgatatttaaaagtcatcttaactcatagattccaagtttaatttttaaaaatgatttaagtgttgggaaggtattaattgtattcagtcataaattatattaaatatgaagctaatagtaattatttccatgggatagctaattataaagttggaattcatctyaagggattatctcatttatattttattatttattttttcttaaaatcatttggaattcctttcttgtatctttctgtaatttcatattatttcaacacatatttttcatattatttaaatttttttttctgaatgttttgt

SEQ ID NO: 157449 - DNA, 459 bp, Homo sapiens
gatacaacccttttataagatccatctgtgggtctccagaaaactgtgaaaatgcattgtgtatatatctctaggtaagagttattttgcaaccaaaacattaagagattctctaaaattaatctaatgaggaagaaaagcagaaaggctatcagcaaaaaaaacaaaacaaaacaaaacaaaacaaaacaaaamaaaaactgctgttggcagcaggaaaaggataaatggctcagagaagcgtgaaagagttaatttggtggcttgagcagggaaaggcaaaatgagcagaacttatcaagagccagctggaaaatagtgttggtggggaaggagaaaaagggaagaatttagactcataggggtcttataagggattgtagctgcaggtgcactgccactaagaaatggctggagatgtaattgagtttattactcattgtaaaatggaagttgaaa

SEQ ID NO: 157450 - DNA, 474 bp, Homo sapiens
acaacccttttataagatccatctgtgggtctccagaaaactgtgaaaatgcattgtgtatatatctctaggtaagagttattttgcaaccaaaacattaagagattctctaaaattaatctaatgaggaagaaaagcagaaaggctatcagcaaaaaaaacaaaacaaaacaaaacaaaacaaaacaaaacaaaaactgctgttggcagcaggaaaaggataaatggctcagagaagcgtgaaagagttaatttgrtggcttgagcagggaaaggcaaaatgagcagaacttatcaagagccagctggaaaatagtgttggtggggaaggagaaaaagggaagaatttagactcataggggtcttataagggattgtagctgcaggtgcactgccactaagaaatggctggagatgtaattgagtttattactcattgtaaaatggaagttgaaagtgtgataagttgaaaat

SEQ ID NO: 157451 - DNA, 489 bp, Homo sapiens
gaattccaaaagtctattagttctgtgtcctctcaggcaatgtttaaactattttcaaagtgaagatagggtggttggataaggatgcccagtaaaacacttgtgtgtggttttaacttctggaatctttgcttaaaaatgaatcttgacctctgtcagctgctctggctgtattctgactatgcaccctaccccatgtctgaaaggagaatcacagactgacagcataaaaacatctagaacagatcaaacccagcaaagcatgctgggagcaaacagtactgttctcacaggttcaaacaccaattatggctttttcctccccctgtaaaaatcaaagcacacayttctgtttaccttggtctgaaatcactggcctctgtttcaatccactcactctttctgggtagccccatactccctaaatactgatggctttgaatacctacccttagctctgatttctcctgatctccaggcctttataac

SEQ ID NO: 157452 - DNA, 489 bp, Homo sapiens
gaattccaaaagtctattagttctgtgtcctctcaggcaatgtttaaactattttcaaagtgaagatagggtggttggataaggatgcccagtaaaacacttgtgtgtggttttaacttctggaatctttgcttaaaaatgaatcttgacctctgtcagctgctctggctgtattctgactatgcaccctaccccatgtctgaaaggagaatcacagactgacagcataaaaacatctagaacagatcaaacccagcaaagcatgctgggagcaaacagtactgttctcacaggttcaaacaccaattatggctttttcctccccctgtaaaaatcaaagcacacacttctgtttaccttggtctgaaatcaytggcctctgtttcaatccactcactctttctgggtagccccatactccctaaatactgatggctttgaatacctacccttagctctgatttctcctgatctccaggcctttataac

SEQ ID NO: 157453 - DNA, 489 bp, Homo sapiens
gaattccaaaagtctattagttctgtgtcctctcaggcaatgtttaaactattttcaaagtgaagatagggtggttggataaggatgcccagtaraacacttgtgtgtggttttaacttctggaatctttgcttaaaaatgaatcttgacctctgtcagctgctctggctgtattctgactatgcaccctaccccatgtctgaaaggagaatcacagactgacagcataaaaacatctagaacagatcaaacccagcaaagcatgctgggagcaaacagtactgttctcacaggttcaaacaccaattatggctttttcctccccctgtaaaaatcaaagcacacacttctgtttaccttggtctgaaatcactggcctctgtttcaatccactcactctttctgggtagccccatactccctaaatactgatggctttgaatacctacccttagctctgatttctcctgatctccaggcctttataac

SEQ ID NO: 157454 - DNA, 489 bp, Homo sapiens
gaattccaaaagtctattagttctgtgtcctctcaggcaatgtttaaactattttcaaagtgaagatagggtggttggataaggatgcccagtaaaacacttgtgtgtggttttaacttctggaatctttgcttaaaaatgaatcttgacctctgtcagctgctctggctgtattctgactatgcaccctaccccatgtctgaaaggagaatcacagactgrcagcataaaaacatctagaacagatcaaacccagcaaagcatgctgggagcaaacagtactgttctcacaggttcaaacaccaattatggctttttcctccccctgtaaaaatcaaagcacacacttctgtttaccttggtctgaaatcactggcctctgtttcaatccactcactctttctgggtagccccatactccctaaatactgatggctttgaatacctacccttagctctgatttctcctgatctccaggcctttataac

SEQ ID NO: 157455 - DNA, 530 bp, Homo sapiens
aggtgtgcaatctgtatagaaaagagtttttatcagacttttagtctgtgtttctttgctttgcttatctgggagggagagtttctgggtctgtgcccatacaccttctggcagctgcaggaatccctccactccagtctgcttttagcttccctatcttagtgtgcctaaaggggaaagaatgtgcttattaaggcccactgttttactggggcccattgtataagtgtgaagtttggtgattacccaggagacatccccccaacaccccactaatgggttatttaaaacctgccctcatgttcagaaatttattctcctgcttgatcttgtctattattgagctttcaattgtattttttatttcattcactgaattcttcagttcaaagatttctgttttgttcttttatgtctrtctctttgttgaatttctcacttatcatgacttgttttcttgattttgttgaattgtctatttatgttctctagtatttcagttgtctattatgttctcttgtatttcactg

SEQ ID NO: 157456 - DNA, 488 bp, Homo sapiens
ctcagggtaagtggatgaataattcaaatgaggagagaatcttaattaatgtggctttgcactaagttttgaaatcaagaagtatgagtcctccgacgctgttatccttttttcgagattttttggttattctgtgttcttggcctttccacacgaattttaagatcaacatgtcaatttatgcaaaaaagccagcaggaattttggtatggattacgctgaatctgcatatcaatatggaagtgttgacatcttaacaattgtaaaccttccaatccatgaacatggaatgtctatttatttatgtcttctttaatttttcaatgatattttgtagttttcagtgtaaaaatcttgcacttcttttgttaaatttattcccmagcattttattcatttagatgtcattgataaagaaaattgttttggttttttttttagatagttcactattaatacatagatatacagttgattttgtatattaa

SEQ ID NO: 157457 - DNA, 341 bp, Homo sapiens
ttgaagtaggctgtatctcttgaagtaggccagtaacaaactagctgaaaaagaaataaatcaagcaatttcatttataagagctacaaaaaaattccctagaaataaatttaaccaaggaggggaaagacctctacaataaaaactacataaagctgatgaaagaaattgaagagaacccaaataaaaagacacttcatgctcatggattgaaaaaataaatattattawaatgaccatactatcaaaatctatcaacagattcaatgaaagtcctttaaaaatatcaatgctattcttcacagaaatagagaaaaataatcctaaaatttatattcagc

SEQ ID NO: 157458 - DNA, 481 bp, Homo sapiens
ttgcaacatataacatgttcagcttcagtgcaccctaatgtgttatatgatacttttaacactaaagaagactcaccaatagaaacgtgtactataggcaggccactcactgacatttttgtttgccctctgaaaaataatctaacttcagtagaacaaagagacaaaaagaagaaaaacaaataactgcaagattcccttctggcacacttaataagatgggcagggataagttactaaaattttatgggaggtcttttaagcaccatggcrtggtcattaactattggaaagtattagcaaccaaagatcatccaaatgcatagcaaactgtgtgtcatgccaaccatgatgaaacaaaacagaactgaatacataaagaacacccataaaaatggctaaccagctgacaaattgcagatgaaatttgtagttaaatataacctcagtaaaaattctgattttactcctttatctaaca

SEQ ID NO: 157459 - DNA, 561 bp, Homo sapiens
aaaacattatggagtattatacaattgtatataagctttaatgataaggactttaaaatatttatattcagctgcctgcttgtgtctatgcatcctctggggaatagtacaagttctccacattatttgttctcctcaggcattgggctttctttcttggatcaatctgagaactgctaagtggaaataaaaaaggttcttgctcatctaaacattcaacatactatcagggataatattagcaccaagcttttcatgtacaagaaaaacttgtcacttaagagagttgttcatacgaacagattactaattttagttacataacacaaaacttctgtagctggacatgtataaacatgagttttatagaatgagtctacagtattttcagaaccaactactcaatragatacacagtcagtcatacccacttacctaggaaaaattaaagattaacagacttaacattaaaattgacaatcaagtaaagctggaggaccagctcctgaaatggcaggataactaaccatttagataatgcagtccaaagtttgagtagta

SEQ ID NO: 157460 - DNA, 602 bp, Homo sapiens
tccccagaggttaacctggcagccggtttggcacccacaggagggctgacaggtagcaggatttgtctaagcaggctgcctgagagccaacaaggaaaactgaatgctctggattagttctggattatgttgtcagagtgaaggctgacggacaaactgcagaggaataaaatgcaatctgtttggggagagaggcagcgtgcatagctttcatttttcaagaaatgacaagaaaaatcattaataatttgtaaatccatgtccattaacttttctctttgttatcccaagacagtctttwcaacatgagtttgccactgtcctatatctcttctgcctagtgacagatggcaagatagatatgaaattggattcataaaatagtacccccatctccaagacagacagagactttattttcctaacatcacttttctcctcccaacacccagccccaggatgaaaagaaactttgacatcggtgagatagccaaatgacatgcatttgttttctgtcctctgtgataaatttttaagacaatggtattacttaatgaaattcaaagccaaaataaataaccatgataacattaatacattta

SEQ ID NO: 157461 - DNA, 490 bp, Homo sapiens
tatcagtttctaataaaaataatccattatttttatagcaatataaaaaagaatatcaagtttttgttttcttcaatacttgtcctaaagataagttctgctttactgtaaagtagcaattctttattatttttatattatagtatacaaaggaaatgataatatttctctgggtactggcttgacaaagaaagctgcccttgactgggagtccccactgcttccccaaggctgaagacattaacttttctgcacaactttaaaccwtggggcaacaggcccctgtgccacagcccctggatagaaagttctaaggtactgcatcctcctgctccccacccttttctaaaatctcacaacaaacatgtcatgagtttagctgtaaaattagagagactgtttctgaagaaatagaagcaataagcaacaatggaagtttatttctttattatgagtagtgaaatagcaataaaaataacttgatgaataa

SEQ ID NO: 157462 - DNA, 555 bp, Homo sapiens
ctcacaaacaattattcttcagacctatgtttctctttttcagtttccttttccttcttcttaccccttcccattccttccccgttttcttgccttcttactttttttttttttttttttttyccccaagacagtcttgctctgtcacccaggctggagtgcctggtgtgtttttagtagaaacagggtttcaccatggtggccaggctggtctcaaactcctgacctcatgatctgcctgccttggcctcccaaaatgctgggattactggtgtgagccactgctcccggcctccttcttactttttcataatatatatatgatgtgaagttggtcaaggcaaagtttcaaattgctattttgattgagaattaatacatttttaagccaaaatgaggattattggatcaactttttacttaacgctatatcttgtcaaaaaggaatcaagaaagattgttttttctctctcttatgtaacattccataatgtcagcaataagttcaataaccattagcgattattagaggatcattcaagaagaaattgacaa

SEQ ID NO: 157463 - DNA, 586 bp, Homo sapiens
atagtcataacggtttcacgtcattatttcttatttgacaggatgttattttcctaatctgtagtaacactcaacttggaaaataatgtcctctaatattactttattatctgtaaattacaagtcaagtcaaatcttttaaaagatcatggactaattgtcatttttttctttactggagacaaaaccaatgttttttatttgaaagctgttaacatcacccaattcccttgtttccattaaagaggcagaatcaaaaataattatatggttaaattgtttataatcatttcttttttaaaaaactcattaactctagcatcaatattcataatattctaataattctgttctgaagtagatttactaattagattatagycatgattcagctatactgcaatataaaacttcttcagttaaactaaatgttttgaatgtgttacttcaaataattattatttggttgatattactattcacttattggacaaaaactaaagttttcaagatataatgaggacaatatactgaaataaaaggaccaaaatgttataagcactacagttgaatataggtagcaggg

SEQ ID NO: 157464 - DNA, 642 bp, Homo sapiens
taactataccaatatttgggaacttattttgggccaatatgagaggcagcaagaactataatttcattacactgttaacatccacagaaaacaaacttatctgcttttatgtatattactcataatgacatatacatcttagaactgtagaattttgaagttggaggaaaatgtaaaggtcttacaacctgatccattactaatctattatatccctgacactttcacccacgagaagctcattatcacttgagaaagcacttcgattttctaaacagctttattcttatccagttctaactagtattgatctgatctgtctctatataagtttggcctgcttgttctagtttggtaccttgcaattgcccaaaatatgtaaaatctttrttgacaaggcaattcttcaaagcatgtaatttttctaagatatgaattctagcagaaaaattccagtttctccagtcatttgacaaataaaatgatctttaaacaacccatttctttaagaatgccaccaatattttactatttcacttaaaatattaatatttcacttaatattttacttaaagtatttacttggaattctacatttctacgttaagtgaatattttactttgaatgttgtagtgaccagc

SEQ ID NO: 157465 - DNA, 608 bp, Homo sapiens
ttctcctgtctacctctcttatgttggtttctcaggttcactctgaagctctcctccctgctgtccacctaagttgctgacaaggaatggactgtgttcatgggttcccggcaggatgtggtggcttacacttgtaatccaaacactttgggaggctgacggagaatggcttgagcgcaggagtttgaggttgcagtgagctaagattgcaccamtgcactccagcctgggtaacagagcgagaatatgtctcaaaaaataaaaaataaaaacaaaacaagaatgggttcccttgcctctggctgctggtttagtcacaggcaagaggagagtgaggtcacgctgctcattcccttcacgtcctccctgtctttttcaggtggatttcatcagacccagctctgtctctgggtttccaaaactgctcagtctattcaccccttaggcctagaggttttatgagccatggaggatgcatggctattgtgtctattgtgtgtatgcctgctttatcaatttcattaaaaatatatcttatttttgaaacataatataattcactagtggcctttaaaatttattatttgcatctcacaggaaaaataaca

SEQ ID NO: 157466 - DNA, 615 bp, Homo sapiens
gttgctttgcttagcatttgacaaggtagtgagcctgaatccctaagtgattacccaacccaggatctgccaatcccatgatagacatgtgaaaacctttgttatttaatacaactgaaattttaggtgtgtgagcaaaactaaccttatcctgaccgaaatgtagttcaattcgccttattttacaatgaaaaasttgaagggtatttggtgaattctccaatgtttcaaagctattaaagacagagctgacaaaaaccagtgtgtttttgtcactgtagaccactgtgtatccattttggcaccaaacaggacactctgcaaataagatctttctctttggactcttgtcaaagttggtgtacaaaaggtccataaaaacttacctgagaaaatgcgggatgtgctaaaaaggcaagaacaggaggtcatagtctaatattccagtcaatgagaaggaagatgaaacagaaacccctacaaggcacacaggaaatacaccctcattcattcttcagaaataagcatctaaaaatgacagaagagaaatataaactgtttatgtgacttccccattcaacactgaagagcagaggctttatatacaagaaacaa

SEQ ID NO: 157467 - DNA, 548 bp, Homo sapiens
gatttaaactggactttagaccaaatggacataacagacatttacagaaattctacccaaaaactgcagtatatactttcttttcatcaggatatagaacatttccctggattgaccatacgttagactgcaaaagaagccccaacaaatttttagaaatcaaaatcatgtcaagtatctgctcagacyataattgaataaaactaaaatttaataccaataactttggaaactacacaaatacatggaaattaaacaacatgttcctgaatgaccatagggtcaatgaagaagtgaagatggaaatcaaaaaatttcttgagacaaatgaaaagagaaataccatgccaaagtctgtggaatacagcaaaagtaatactaagagggaagtttatagcattaaatgcctacatcaaaaaaagtagaaagtttacaaattaacaatctaatagttcatgtcaaggaagtagaaaagcaggaacaaatgaaatccaatttagcagaagaaaacaaataataaagatcaaggcagaattaaatgaaataaa

SEQ ID NO: 157468 - DNA, 547 bp, Homo sapiens
atttaatcctcacaagtttgtgagagaggcattataaaatcattcttacaagtgaggaaactgaggtcgagagatctgaagaatgttacaaattctgtttataaatcacaaagccatgatttgaacccaagtctgtccaactccaaattctttcctcttccaatatacctatgtcttcactgtacacacagaggctatacaggaatattggtagaaaatatcaayactctggacaacaatttgatattttataatcttctgttcatagttattctatgctttaaataaaaatggccactatgaataaaatggtactaaatggtactacagaagaccataaaagtgctctttatccattgttttttactatacgaattggttcctgtactctggcttatgctataaaatgtatattaatagccatcctttcacaggactacagcaagctactggccacctttggaggagttttcctatgcctaacttcaactgatggtagttatatgttttagaataacattagtcatgtttcacagatggagaccat

SEQ ID NO: 157469 - DNA, 547 bp, Homo sapiens
atttaatcctcacaagtttgtgagagaggcattataaaatcattcttacaagtgaggaaactgaggtcgagagatctgaagaatgttacaaattctgtttataaatcacaaagccatgatttgaacccaagtctgtccaactccaaattctttcctcttccaatatacctatgtcttcactgtacacacagaggctatacaggaatattggtagaaaatatcaatactckggacaacaatttgatattttataatcttctgttcatagttattctatgctttaaataaaaatggccactatgaataaaatggtactaaatggtactacagaagaccataaaagtgctctttatccattgttttttactatacgaattggttcctgtactctggcttatgctataaaatgtatattaatagccatcctttcacaggactacagcaagctactggccacctttggaggagttttcctatgcctaacttcaactgatggtagttatatgttttagaataacattagtcatgtttcacagatggagaccat

SEQ ID NO: 157470 - DNA, 519 bp, Homo sapiens
caattgcattgttaggcaagccgaacaaaaggcagccactccgttctattgaaaatgaggacagcactaattaatttagaaagatgggggagtgaagcaactcttggtggtacttcagattcattgtaattgatgattcaaatttccataaaattttcccttaagaacaaaatacattataaactgcttgataatgctaatcttcataacatatgtttcttcatctcaagkggtaatttactcttaccatttatcacacctaaaaactcccaatgctataactaaaaccatattgttaaaaaggctgagataaatcatgcaggcagatggtggttttacaagccaaactataatcaggctttgagtcataccaaacaactttctgacactcccaggcatgacaggaaggcttaagtggcacttttctctgagagcctttctgtggcacaaattggaaggccccagaacacgaccagcttgtctgctcctgatgactgttaatgagatcccagaattcag

SEQ ID NO: 157471 - DNA, 519 bp, Homo sapiens
caattgcattgttaggcaagccgaacaaaaggcagccactccgttctattgaaaatgaggacagcactaattaatttagaaagatgggggagtgaagcaactcttggtggtacttcagattcattgtaattgatgattcaaatttccataaaattttcccttaagaacaaaatacattataaactgcttgataatgctaatcttcataacatatgtttcttcatctcaaggggtaatttactcttaccatttatcacacctaaaaactcycaatgctataactaaaaccatattgttaaaaaggctgagataaatcatgcaggcagatggtggttttacaagccaaactataatcaggctttgagtcataccaaacaactttctgacactcccaggcatgacaggaaggcttaagtggcacttttctctgagagcctttctgtggcacaaattggaaggccccagaacacgaccagcttgtctgctcctgatgactgttaatgagatcccagaattcag

SEQ ID NO: 157472 - DNA, 485 bp, Homo sapiens
atatatgccctttgtgttctgtgaccagagtgggtagggaaggaccattaggtgggagcagggctaggtgtctttgagctcagactctctccttgggtgggtcttgctgcagctgctgtgggaaatagaggtgagggttccaggtcaatgaagttatgtacctaggaggattatggctgcctctgctgagtcatgcaggttgttagggaagttggggaagctggcagtcacaggcctcacccagctccgacgcaatstgaagggccagtctcactcccgccatgccacccctaacagcactgagtctgtttccaggcagtggtcaagcaggactgagaacttaccccaggccacctgcctcccagctgcaaaggaaggtagggctttaattcttcccccacctgtggggtctgcctgccggattcacgccctccccgagttctggccaggaggcttctcaaccagttcaaattgttacaaagttc

SEQ ID NO: 157473 - DNA, 485 bp, Homo sapiens
atatatgccctttgtgttctgtgaccagagtgggtagggaaggaccattaggtgggagcagggctaggtgtctttgagctcagactctctccttgggtgggtcttgctgcagctgctgtgggaaatagaggtgagggttccaggtcaatgaagttatgtacctaggaggattatggctgcctctgctgagtcatgcaggttgttagggaagttggggaagctggcagtcacaggcctcacccagctccgacgcaatgtgaagggccagtctcactcccgccatgccacccctaacagcactgagtctgtttccaggcagtggtcaagcaggactgagaacttaccccaggccacctgcctcccagctgcaaaggaargtagggctttaattcttcccccacctgtggggtctgcctgccggattcacgccctccccgagttctggccaggaggcttctcaaccagttcaaattgttacaaagttc

SEQ ID NO: 157474 - DNA, 343 bp, Homo sapiens
ccctggtggaagtttaggaataccacggttcaattatgtacatttctgtctgtgagttatggagcaataagacttaaaacaagacttaggctgggcacagtggctgacgcctataatcccaacactttgggrgaccgaggtgggcggatcatctgaggtcgggagttcgagaccagcctgatcaacatggagaaaccccgtctctaccaaaaacacaaaatcagctgggcgtggtggcgcatgcctgtaatcccagctgctcagtaaggctgaggcaggagaattgcttgaacctcggatgtggaggttgcggtgagtcgagatggcgccactgcactccagc

SEQ ID NO: 157475 - DNA, 604 bp, Homo sapiens
tctttttataggtatattatcagcctgggtgacagagcaaaaccctatctcaaaaaaaaaaagcatattcattttgagcttcaaatcccagttaatgcaatcattataaatacatttatgtcaaacctgatgaaatctgaaaataaaatacaattaaacagagcatagcagaaatttacatcacagtgtgagataattttaccctaagtacttgcacttgaggtcaaagtcatttaggcgtctgttcctagtgttcctatagtttcctgaaattgacagcgattggagagcacagtaacatgctatctgttgactatctacagcattacctcatctaaaaacattcaacataaccatgcccagacttgaaagatctggctgcctgaactctttcacagctcctccttggaaactcataagtgacctaaagtcaaatttgacctaaagtcaaattttacaccaaacaggcttttcttttcgttctttgtgtttagttgttttttgttggtctgtttttcctatttgaaaattaaggaaattgaaccaaagacscacaagttctcttctagcaagaccagagtactaggtttgaatctaccctgcc

SEQ ID NO: 157476 - DNA, 490 bp, Homo sapiens
atgacgcacttgggaactaaaaaatgaacctttatagtcaatgagttttgcagcatacctaatatttcttgccaaatcactagtagactgaagcacagcaaattccatttaattgccttgataaaatacagataggctaacagcaccagtgatcttggggctacaggcagagatcttggggctamaagagatcttggggctaccagagatcttggggctacaggctgccccagcatcacttgggcttgctaggagagtttactcttccccaagagctccgatgggacactaggcactttgaatggatatactgtttgtggttttctttaactttttgaaaaaatttttccaaagagctcactaaaaatacactctgaggactgaagaggagagaaaacttttagagaaaatgatggcacctttctgtatgagatatttaccaaagaaaaacatagggcaaggatactttgtgtgaacaccatgtcttcca

SEQ ID NO: 157477 - DNA, 445 bp, Homo sapiens
tgcaggcatgcccccatactgacattacttcatattcagcaaggcccctggaattgtccggctggtgcacaagcacccatctgtatgtttccaccacagaatcatggacgcaaaacaccccagtcataccaaagccttctttagttcctgaatcctgcaccagaagtgcttgttggataaaattatccactgtggtttccggggtttgtgttggttcaaagtccattgtaaggagagactccatgcaataatcacaacagccactattcattggaggtctactattwgctacatcctgcactttacatgtataatttcttactctcgccacattttagtaagaagagtattattattatctttatattttaggagaggaaacaatgtcttaggcaatttaagtaaattgcccaagcgaataaagtggcacagcttgaattcaaaa

SEQ ID NO: 157478 - DNA, 445 bp, Homo sapiens
tgcaggcatgcccccatactgacattacttcatattcagcaaggcccctggaattgtccggctggtgcacaagcacccatctgtatgtttccaccacagaatcatggacgcaaaacaccccagtcataccaaagccttctttagttcctgaatcctgcaccagaagtgcttgttggataaaattatccactgtggtttccggggtttgtgttggttcaaagtccattgtaaggagagactccatgcaataatcacaacagccactattcattggaggtctactatttgctacatcctgcactttacatgtataatttcttactctcgccacattttagtaagaagagtattattattatctttatattttaggagaggaaacaatgtyttaggcaatttaagtaaattgcccaagcgaataaagtggcacagcttgaattcaaaa

SEQ ID NO: 157479 - DNA, 550 bp, Homo sapiens
tgaaaaccagtgcaaaagagaaaaatcttaaagtcagctagagtaaaaagatgtattacaaatacaggaacaaagataaaataattgaaaacagaccttatcagaaatcaggcagatgagaagataatggaaggcatctttaatgcactgaaggaaaagaactgtcaacctaaaattccacacccaacaaaaatatctttcaaaaatgacagcaaaataaaaacttcttcagacaaacaaagattgtctgaagttaatgcattcattgctgagttaattcatcagcagcagacctgcactacaagaagggaatttctttgcacaaaaggaaaacaataccaggttgaaatttgactctacatgaaggaatggaggacactaaaaataattaaatatatctgtcaatataaaagacactctaaaatatcatttcaaaaatttctttataaaataattgattctttaaagtaaaaataatgrcaatgtgtgatggggtttatagcatttgcagaagtaaaatgcattacatcaacagcacaaaggacagaag

SEQ ID NO: 157480 - DNA, 580 bp, Homo sapiens
acaaaccaatatgagccagcccccacatatggctgagtacatctcagcttggtaagtgtctattcacttcttaataacaatgcaggtcttcaagagatcttaaaatgagatagtgaggaaatagcctctacagaaactgaaggggccagtcttgccatttcatatagaccatttgacatcaccaaatatctcctatcactcaagtttttgtcyagtggatcttctgtagatatgaacttccagactcaatgtttcatacattgttgagaccatttaatcagaaactgaacacagtccagatcaaaacagataaatataggcaacatttccaaatgtggaattggcgaaggaatagttcttcagcctacaatattctctatagctttaagcaaaattaggtcctaacccatggtttccagaacaaaaccaatgacttcttagctgatttgcctcaactcatcgattgacctacctcttgtgaaatatgattcaagtgtttctttttagagccttatacctttttgggggttatttggcgttgagaaaaggaaattgtgagaaatctggaatccaaattagt

SEQ ID NO: 157481 - DNA, 580 bp, Homo sapiens
acaaaccaatatgagccagcccccacatatggctgagtacatctcagcttggtaagtgtctattcacttcttaataacaatgcaggtcttcaagagatcttaaaatgagatagtgaggaaatagcctctacagaaactgaaggggccagtcttgccatttcatatagaccatttgacatcaccaaatatctcctatcactcaagtttttgtccagtggatcttctgtagatatgaacttccagactcaatgtttcatacattgttgagaccatttaatcagaaactgaacacagtccagatcaaaacagataaatataggcaacatttccaaatgtggaattggcgaaggaatagttcttcagcctacaatattctctatagctttaagcaaaattaggtcctaacccatggtttccagaacaaaaccaatgacttcttagctgatttgcctcaaytcatcgattgacctacctcttgtgaaatatgattcaagtgtttctttttagagccttatacctttttgggggttatttggcgttgagaaaaggaaattgtgagaaatctggaatccaaattagt

SEQ ID NO: 157482 - DNA, 548 bp, Homo sapiens
caaggcaggtggattacttgaggccaggagttcaagaccagcatggccaatgatgaaaccctatctatactaaaaaaaaaaaaaaaaaaaaaaaaaaaattacccaggcatggtggcacatacctgtaatcccagctactcaggaggctgaggcataagaacggcttgaatctgaaaggtgaaggttgcagcaagccaaaatcatgccactgcactctarcctgggtgatggagtgagaccttgtctcaaaaaaaataaaataaaataaaataaaggaggaaggagagatgaaagaagggactgggaactgagagaatgtaattgtttgaaacagccactgggagactcctcaataaatcaaaacaattagctgtgcagtaatcttgtctcccccattatatgattattctggtagaggttaagcctgcatattccatattcattttaaaatctttcattatacctggcatgttatccctggatcagtatatgtttgtgcttcactgattctttccttataaacctgtgaatatattttcttatcttt

SEQ ID NO: 157483 - DNA, 580 bp, Homo sapiens
ttgttggccgtatggaggaggtaaggaaagagatagtggtagaaagtttattcaaaggataacatcagagaacttcccaaacctaaggaaagataaacattcaagtacaagaatgtgatagagcaccaagcagatttaacacaaagaagactacctcaaggcatttaataagcaaactcycaaaggtcaaagataaagaaactatcctaaaagcaacaagagaaaagaaacaaataacatgcaatggagctccaatacatctggcagcagattttcagtggaaaccttacaggctaagaaagagtagcatgacatattaaaagtgctgaaggaaaaaaaacttttaccctagaatagtacatctgatgaaaatattcttcaagcatgaagaaataaagactgtcccaaacaaacaagagctgaggaatttcatgaacaccatatctgtcatacaagaaatgctaaaaggaattatttaatttgaaagaaaatgatgctaaagaccaataagaaatcatctgaaggtacaaaattaactggtaacagtaagcacacagaaaaacacagaatttaacactgt

SEQ ID NO: 157484 - DNA, 617 bp, Homo sapiens
gggatgcttaatgggtacaaaagaaaacacaaagaatgaataagacctagtatttgatagcacaatagggtgattatagtcaataataacttaattgtacatttaaaaataactaaatagcataattggattttttataacacaaaggataaatgcttgaggggatactccattttccatgatgtgattattacacaytgcatgcctgtatcaaaacatctcatgtaccccataaatatatacacctactatgttactacagacaaaaaaaagtgataatttcaactgattctggaaaagcattcaataaaattcaacatcctttcataataaaatccataaaaaactgggtacagaaggaacatacctcaacatattaaaattcttatatgacagactcagagctagtgtcatactaaatggggaaaaatgaaagccttttctctaagatctgaaacacaacaaggatgcctacttttaccactgttattcaatatagtactgtaagtcctagatagagcaatcagatgagagaaagaaataaaaggcatccaaaatggaaaagaagaagtcgaattatccttgtctgcagatgacatgatcttatgttttggaaa

SEQ ID NO: 157485 - DNA, 617 bp, Homo sapiens
gggatgcttaatgggtacaaaagaaaacacaaagaatgaataagacctagtatttgatagcacaatagggtgattatagtcaataataacttaattgtacatttaaaaataactaaatagcataattggattttttataacacaaaggataaatgcttgaggggatactccattttccatgatgtgattattacacactgcatgcctgtatcaaaacatctcatgtaccccataaatatatacacctactatgttactacrgacaaaaaaaagtgataatttcaactgattctggaaaagcattcaataaaattcaacatcctttcataataaaatccataaaaaactgggtacagaaggaacatacctcaacatattaaaattcttatatgacagactcagagctagtgtcatactaaatggggaaaaatgaaagccttttctctaagatctgaaacacaacaaggatgcctacttttaccactgttattcaatatagtactgtaagtcctagatagagcaatcagatgagagaaagaaataaaaggcatccaaaatggaaaagaagaagtcgaattatccttgtctgcagatgacatgatcttatgttttggaaa

SEQ ID NO: 157486 - DNA, 619 bp, Homo sapiens
gtgaatttcacgtcttaatttcttcatctgtaatataatagtgctaaacaagaagaaagatctttaagttcttttttaagtctaatttctagatttttggaaagtgcttatgcttttatctgagtttaaaaatrcagataaatgtacatacgtatacacacacaaatatccatcttataaaaattccccaagctttttatttatatgttatacacgaaaaaataaatagaaaaataaaggtatatgctgttagtggttaccgctggatgaaggacttacaggtgattcaaacattttctaccagtacttcaaatgttctacaatgagattatagttactttagattttttaatgttatttttaaaaatagtcattgagacataaaagtccatcctaaatattaacatatatttgtctatgcatgtgcatacagaaatatcttttaggacaagcaactggcagcatcctatgactgtgcctcctcaccaaacatttattttcactaattgctcattatatttagaaaactgaagggacaaaatgaatagagtggggcacacactgtaagtcttacttgatgtgttgtgatgaggttattacaatatcgtggttggaaatt

SEQ ID NO: 157487 - DNA, 619 bp, Homo sapiens
gtgaatttcacgtcttaatttcttcatctgtaatataatagtgctaaacaagaagaaagatctttaagttcttttttaagtctaatttctagatttttggaaagtgcttatgcttttatctgagtttaaaaatgcagataaatgtacatacrtatacacacacaaatatccatcttataaaaattccccaagctttttatttatatgttatacacgaaaaaataaatagaaaaataaaggtatatgctgttagtggttaccgctggatgaaggacttacaggtgattcaaacattttctaccagtacttcaaatgttctacaatgagattatagttactttagattttttaatgttatttttaaaaatagtcattgagacataaaagtccatcctaaatattaacatatatttgtctatgcatgtgcatacagaaatatcttttaggacaagcaactggcagcatcctatgactgtgcctcctcaccaaacatttattttcactaattgctcattatatttagaaaactgaagggacaaaatgaatagagtggggcacacactgtaagtcttacttgatgtgttgtgatgaggttattacaatatcgtggttggaaatt

SEQ ID NO: 157488 - DNA, 590 bp, Homo sapiens
tgcctgcgtcacaatgggtattctaaataaaatcccttatcctagtagacttaccagaatctgaatcatttgatagagctgatcactctcatcatccttctgayctttaagtgtcagagagtcccagggcttagtttttggtcatcttcctcatctattttatctggtgaatttattcagtctcagggctgaaatactagctatatgctggtgatggccaaatttatatctctacctttgacctttttctgatacccagatgcatggctataatgtccttctccacacccctacttggagatctgaaaggtaactcaagctttacatgtttgaaacaggactcttgatttgaagccttacaccaaagccctcatgctctcactctatttcctataacacaaatggcatcttcattctaccagctacttgctcaaagaaaaaactttaagtctccttaatatgagtcatctttaacatctgtctctctctgatgccacacatataattcatcagcactgtttgtcagctcaaccttggaaatgcatttagattccagaacatgtctccccatttccattgctgtgccctta

SEQ ID NO: 157489 - DNA, 590 bp, Homo sapiens
tgcctgcgtcacaatgggtattctaaataaaatcccttatcctagtagacttaccagaatctgaatcatttgatagagctgatcactctcatcatccttctgacctttaagtgtcagagagtcccagggcttagtttttggtcatcttcctcatctattttatctggtgaatttattcagtctcagggctgaaatactagctatatgctggtgatggccaaatttatatctctacctttgacctttttctgatacccagatgcatggctataatgtccttctccacacccctacttggagatctgaaaggtaactcaagctttacatgtttgaaacaggactcttgatttgaagccttacaccaaagccctcatgctctcactctatttcctataacacaaatggcatcttcattctaccagctacttgctcaaagaaaaaactttaagtctccttaatatgagtcatctttaacatctgtctctctctgatgccacacatataattcatcagcactgtttgtcagctcaaccttggaaatgyatttagattccagaacatgtctccccatttccattgctgtgccctta

SEQ ID NO: 157490 - DNA, 581 bp, Homo sapiens
ccacatagttgtaatcagagttagaagttaaatctagctctgattccaaatcccatgtctccttttagtactatagatctataagccttccaaactgttagattgtacatagctatgtgaagtgtttgtaatttacaaaatgggaattaatatgctgccatcttctatgacctggatgaaatgttagccctcatgaagatgcgatgttaaaacaaatcctcctccttttatgcaagtatgttttccaaactgtgaaactattcattacaatatattaatttaaatacagctgcagtatcttcaacatatattaacttctacttttttttcaattgttgaaatacatgtcttagttttctgatagatattaggctcattaaaagtagagactaatatcaccaatctttatatatatcaygctcatttactacctaaagtcttgaccagcaggtgctaaaatgtgtttgttgcctgaattagtaaatgaataaattttatcttatcacaaattataatatgccataaattcaaatcatcaatatgtggctaataaatattagcatttaatcttaaagattaac

SEQ ID NO: 157491 - DNA, 590 bp, Homo sapiens
aacacttccaagtgtgtgttctactttgcaaagtgacactcatgtaacagagactgtgaatagcttggccaggcttctttagatcaacttattgaaaaaaaaraaaatcccacaatgcattcccagtgctgtaaccacattgttgatacagatctcactgactttgttctggtagctcctctaaatgtttagagacactgaaattacctttatctttcccaattgatattggcatgtcagatctcatttcaggaataagcttgacaactatgtggctatatctgtggattttttaaatttaattctttctttgtctctctacttttctttctcctttgttgggtcttttactgcagacttttaataatgctaaggaagagttcatttgctgctttccatttcttttttaattacttgaaattttacaccctgacacaaaaatttgtaccatcatttgaactcaatgtcttcatgcataatctgagaaaatttaagcaaacagaaaacaaacaaaaaaaaaacaatagaaataattcaatttttaaaatctctgcacagatttctttctacaaagaatattacatttaaag

SEQ ID NO: 157492 - DNA, 566 bp, Homo sapiens
gtcaactattctcatgagtcctgctgatggttacttaaaatgagctccaaggtgagctctgagaattaacaactgtagctgacaacgatgatgttattgatgtccttgatgccggcaggttaagctgatggggtgttgaggaaagtttgaccaaagacgttcaagagagtgcaaagaaaaggaattgcctctgtaagcatcagcaacttctgaggagtacttactctagagggaagaaaataaattaatagaaagagaaaatgtagagtggggaaatcgttttttaaaataagaaaaagarcatgtttccatgtctgtaagaagtcattcattagggaaacataaagaaagaggaataaatacaacaggagaagaagaatgagcaaaatgatagattaattggttggtctcttggacaatggggtggattgagttagcagagctgggtttaacaaaagtgggcttttaccaatataggtaattacataaaagatgtagggttttcagactgtgttcttgaaaagtggacataaggggagtagagaaaaggaaaaagtagtggaatc

SEQ ID NO: 157493 - DNA, 400 bp, Homo sapiens
tgatattggaatttataagacttctgtagtgaatgaagaaagaataagattacagagggcccgagaccaagaagggagtacctctaaagcactgcagcataggataaatcaacaaagaagagtgsataaaacatctaatgaaatacgaaaataatcaggatactgtggactaacggaagtcagcaaatagttttaacaggagagtaaacacagctgaaaagataattattgcattggaatgtatattaaaagacaagaagaaaaaagtaaacacagaagagagggaaagatacataaatactactatgaggaagtctaacatacatgttatcagaagcctagataccaatatatatctgtgattatattagatataaatagacaaaatacaaatatgtct

SEQ ID NO: 157494 - DNA, 400 bp, Homo sapiens
tgatattggaatttataagacttctgtagtgaatgaagaaagaataagattacagagggcccgagaccaagaagggagtacctctaaagcactgcagcataggataaatcaacaaagaagagtgcataaaacatctaatgaaatacgaaaataatcaggatactgtggactaacggaagtcagcaaatagttttaacaggagagtaaacacagctgaaaagataattattgcattggaatgtatattaaaagacaagaagamaaaagtaaacacagaagagagggaaagatacataaatactactatgaggaagtctaacatacatgttatcagaagcctagataccaatatatatctgtgattatattagatataaatagacaaaatacaaatatgtct

SEQ ID NO: 157495 - DNA, 454 bp, Homo sapiens
gacggcacttaaaagtgggcaagacagtgtagaaaaccaattaggaaagagcaggtatatataaaataggtgaacagtggggatcaatcagaggaaagtgcatgaaacaggaagacaagttctcattctggtctgaggatttgacttgtagctttgttttaaggctttaaactttggcctgggggtaaggtttcaccaaagacccacccctctctgcctcctgccattatcaatagctgtttgtattgttgtcatttcaattgtgatagtagtycacacttatcttcagttttactttctgaagttttagttacccatggtcaaccatgatccaaaaatagatgagtacaatacaataaaaaaattttaaagaaagctagagactacatttaaataattttattttagcatattgttataattatttagcattttattatagcatgttgttata

SEQ ID NO: 157496 - DNA, 619 bp, Homo sapiens
tctgggtttgccataaatggtctttattatgctgagatatgttccttctatacccagttcattgagagcttttattatgaaagaatgttaaattttatggaatgctttttcaatgtctattaaaatgatcrtatggcttttatttttcattctgttgacgtgatgtatcacatttattgaattgcatatgttgaaccatcattgtatcccttgaataaatcctacttgattatgatgatatttttaatttgttattgaattcagtttgctagtatttggttgagaatttttgcacctattttcatcagaggtattggcctgtagctttttttttaaatgtctctgtctggtttagtatcaaggaaaagttggaattatagaataaatttggaagtagtccctcctctttaaatttttggaatagcttgcataggattgatattagtctttcttaaaatgtttggtagaattcagcagtgaagttatcaagtcttggacttttatttgataggaggctttgtattactccttctatctcagtacttgtttttgttctagtcaagttttctatttcttcatggttgagttttggtagaatggatgtatctaggaatttatc

SEQ ID NO: 157497 - DNA, 570 bp, Homo sapiens
actaatcaaaattgtatcccagacagaaaaaaaggaagaaagggcaatgagggtgctgtaaatcttgcatcagcaaagtcaaaattctctcagaactttctagtagaattctgtaggagagtgtcctttttggtagaaaatgcttaacagagtatttaagtgtgatggggcatcaggccagtcaattcctccccaattcatgaaaaaaaattatttaaaccatacttytaacttctcttgaggtttgcaattgctttaaattttaaaggaaaacaataataaccgtgccatattaccctaggaattaaagatgcttctttgttttagctaccatttcagaattttctagcctgttaggggtatgttcttgctcatattaaatggataaagcagccacataaattcagtcattaatatacctcttcagccctgacaattttataactcccatgttctcagtagcatactgactaagactagatgccagcctactataaaatcaaattttatttcttcgatcctaaacttgttcaaaaaacacctgctcagagggcactcactttttactat

SEQ ID NO: 157498 - DNA, 570 bp, Homo sapiens
actaatcaaaattgtatcccagacagaaaaaaaggaagaaagggcaatgagggtgctgtaaatcttgcatcagcaaagtcaaaattctctcagaactttctagtagaattctgtaggagagtgtcctttttggtagaaaatgcttaacagagtatttaagtgtgatggggcatcaggccagtcaattcctccccaattcatgaaaaaaaattatttaaaccatacttttaacttctcttgaggtttgyaattgctttaaattttaaaggaaaacaataataaccgtgccatattaccctaggaattaaagatgcttctttgttttagctaccatttcagaattttctagcctgttaggggtatgttcttgctcatattaaatggataaagcagccacataaattcagtcattaatatacctcttcagccctgacaattttataactcccatgttctcagtagcatactgactaagactagatgccagcctactataaaatcaaattttatttcttcgatcctaaacttgttcaaaaaacacctgctcagagggcactcactttttactat

SEQ ID NO: 157499 - DNA, 402 bp, Homo sapiens
cattcagtgaactgctaattggtgtatttacatccacattctaagaaacagtttgattggggtggtgcccaagttctgagggtttggagatagatcttgcatgtctcttttcaggaattaatacagtacttcaaaatttcctcaaaaacgtcaccaaggagccacttaattacataaccataattttaaaaatgtgttaagacagaagtgggtcaactgtagaagaagtgagggaaaaatgcggasagaatgtctaaaagaacaaactcaagatctccattgttgaagcctctttagaataactttatccatttaatcggtgatacactgctaatgatagacttctctggcaaggctgttgctttcagccaatccattacccagaattcatatgcctgtgat

SEQ ID NO: 157500 - DNA, 532 bp, Homo sapiens
actgatggaatctgtggggagaggaaggaatcgatccaggatggctgctacttctctggcttgggaagcagccctgaaacaatggcaatgcagtgagaccccaggtagaggactgtcgaggagggcacagcctttgttccgaatgtgagatgtgtcagtttcctaggtcaggcaccagaggggacagtcaccagcctgttaggtaaatgaggaggcatttcagggggagacggaggtttgaggtgcatcattaaggaaagggagataaagccacaggcatccttgagaaaaacaggagtgacccagaataagatttgaagaacaagaaactttgcrggacaggagtcagagctgcaggcatgcacagtgagcaggaggtcacagatgctcaggactaagttggggcaggcgaagaggcacagagaaaagggaagaaaaggttagaggaagaaagaggccagatgagttagctaatgagtagtcgtccatggatgactcaaaaggagactctgattggacaatttcacacacc

SEQ ID NO: 157501 - DNA, 531 bp, Homo sapiens
gtgcctccctaaaaaagacctgttggcaggtctgctaggcaaagacatcaaacaactgtctttaaaaagatgctcaaagaactaaaggaagatgtagagaaagaaamgaaaatgatgtactaagaaaatggcaatatcaatgtagaaatagaaaatttaaagagaaatttaaaagaaatattggtgtgaaaagtacaatgccagaaataaaaaactcacagatttagatctgagaatgcagaaaaaagaatcagtgaacttgaagacagaagaataagaattatcaagtctgaagaacagaaagaaaaaatattgaagaaaaaggaaccaagtttaaaggacctgtcaggtaccatcaagcagatcaacatatctattgtgggaattctggaaaagagaaagaagacagaatatttgaagaaataatggctgaaaagtcttcaaatttggtgaacgacatgaacataagcatctaaatgctcaaaaaattccaagtaagatgaacttaaagagacccacacccagacatac

SEQ ID NO: 157502 - DNA, 546 bp, Homo sapiens
tctataaatttttcttaacatatttttcatctaagcaagtaaaatttatttttatctcttaagtctacttttagaaaatgaaagtgtgaaagaagctgagcagaaagtgaatatattctaaaacctactgttcataacaaaggaaagaaatccataccacaccttacacagccaacagcaatgaaaatagcacctttagtttgttattctggttccactcagattttctttgcytttttaaaaaaataaattttgcttttacctacaaaataggttttagtcttaacttgaaaaaaatggcactaaaaatcagcagcactgcattacagtgcttctgtcataagtaaatttttcagttgctcattaaattagcagtaagattataaataaaaaaatttgattccaatgaaaaccagtaaaatatgtttccatattgctaaagggattagaaattggtatagcttttccagaaagaaatttggcatgtgccctatgtcttactccataattcttcctatatgaatatatcctaatgaaatagtcaaa

SEQ ID NO: 157503 - DNA, 439 bp, Homo sapiens
gttgcttcttactttaacaattttatagcatagtgtgtgtgattggaaaggtgagttccttcaaagtttgctagcatttacttcttgctgtaaatttatctgggtcttgtatggccttccccccctccccctttctttccttttttgagttagggaatattattaactattggttcatcttactttggctctcaactttttcttgagtaagcacatatttttctagtaatttcactgttgtttattttttgcttttcaattttttttctttttagaggcagggtctttctccattgcccagggtggagtgcagtagcatgatcatggatcactgcaaccacaractcctgctctcaagtaattctcctgcctcagtctcccaagcaactgggactacgggtgcatgccaccatgccaggctaatttttaattttttttt

SEQ ID NO: 157504 - DNA, 490 bp, Homo sapiens
tcacattgatgtagtagcatagcttcattctcctctcctgttgctttctcttaaatacaatttttcaaccctttctcaagttattttaaaattggtaaaattatttaccccaaaaataatcatgttgggcttttaactgtcactgctttaaatatataaaaatctttgccaaggccaggagtggtgrcccacaccttaacccagcactttgggaggtcaaggcaggaggatcacttgggtccaggagtgtgagaccagcctagacaacatagcaagaccccatctataaaaaaataataataaatatccagatatggtagtacacacctgttgtcctgggtactcaggaggctgaggcaggaggatcacttgtgccaggagtttgagaccatcctgggcaacaaagtgaggccgtccctacaaaaaatttaaaaaatggtagcacacacctgtagtcccatctactcaggaggctgagaatggaggactg

SEQ ID NO: 157505 - DNA, 605 bp, Homo sapiens
cactcttatgtaacaatcatggtagtaacatctcatcaccctcaatggatcttgtttattagaagcaagtcacaggtccttgccatggtcaaggggaaaagattatataagggcacagatacccaggaagtggagatcactggaggctaccttatggtctgtctaccacaatgcctaaaatttcttttgggtgcataggcctattctattacgatagataaaagacttagaattcagaaaggtgtaactcatcaatgttaattttacttgtcagtgaacaagtaaaatgatatcacatctttttcttttataatctatacagaatgtaaagagacgaagaaggtattagattgatgaagtagaagagtttgccaacaaggtagaaacatgaaaagaagaacagactttttgaattcatgaattttatctaaaatgttctttgctttcataaactgcatagagatcagtagatgttgtgcttgatgtgttctgtgactgtgtaattattgtaactttactatgatttaaaaagaatgtaaagtcacwgcttcttccacttttcctttcctcttttcttctcccagaatattccttatttaatgtat

SEQ ID NO: 157506 - DNA, 535 bp, Homo sapiens
aactcaaccttaatattactatcttgcatgtttgtcttgccatttgttgagacctggaaacacaatttgtatcaacttgtttgtgcatcctttccataatcacacacattggttactggatattacagtgatagtgcaaatagtctgttagccactgtgcaaccatgggtcaatgccatatagcaggtcttatttggactgcttagtaacttgagactaaaaaaaaaatgtgtttttataaaataaaataaaaatgcacttttactacttaaatgtgtgtttttggagttcaagtaactatcctttaatttgaagatgtgttgctccaagggatgtcatcttactttttctggaaagcttggaagcttatattcgtgtactcctttttactattgtttagcactatggtgttggccgaactttayaaattaaccctgttttgctttttgttgttgtgtgattgctttatataccttcactgttctgtcattaagtaaaatttaagcctgccaaggcagaaactacctgattcaca

SEQ ID NO: 157507 - DNA, 427 bp, Homo sapiens
gtcttgctctgtcccccaggctggaatgaaatggcacaaccacagctcatggcagccttcacctcctgggctcaggtgattctcccaccgaagccacctgagttgctggaactacaggtgcatgccaccatgcctgactaattttttatatcttctgtagagacaggtttcgtcatgttgccaaaagtggtcttgaaaccctggactcaatcgatcttctcacctcagcctcccaacatgtgggaattacaggcatgagccaccatccgtggtcagaagtgggcgttaawttttttttttcaaaatgctgtgttctcaaaaatatctcagatttatatttaatcttctttttccttaatagcattatctgcctaatacttcagcctatatattaataaatagttaatccacatggagaaaggaagag

SEQ ID NO: 157508 - DNA, 512 bp, Homo sapiens
gaattcatcactgtttgctgacccccattcttatacaaattatgttcagattargtgtggtttttttagctattttaaactgctaaacaatagctaaatatatccttgtttttattccaatctctctaacagaggtaaattttcaacaaagttgccagacttttaaaaattacgtattctttaatccaaagagcctccataagaatattcaatttatgcaaaaacataacagcacacttgagagagtctgttattatatattcaaaccaacagagcaaatgtaagaaaaaccttggccctaacctgcaggcactccatttgtttggttcacttccatgagaaagacaggtgaccatctattccatcacaagttctgactagggatgtcaaggccattactgtttacttgaatgcaaaagcctatgatctatgtttaatctgcaggataaaataataaactctaggcaacataattttaaaacttctcataaccaaaccttatcaaaaggcct

SEQ ID NO: 157509 - DNA, 484 bp, Homo sapiens
agaattcaacttttttcatagtataaatagtatcaaaagtccctttgtagctatgttacacatggctctggccggacatggtggctcactcacacctataatcccagcactttgggaggccgaggcaggtggaccacttgaggtcaggtgttcaagaccagcctggccaacaagatgaaacccagttctactaaaaaaaatacaaaaattggccaggcttggtggaacgcgcctgtaaccccagctactcaggaggctgaggtaggagaattgcttgaatccgggaggtggaggttgcagtgaaccaagatcatgccactgcacaccagcctgggcgacagagcgaaactccgtctcaaaaaacaaaaacaaaaacaaacaaacaaaatatggcttatatgamctgacatacaagataaccttgaaaacattaacacatataaatccattatgctatctaaaagaacactttaaactacttcac

SEQ ID NO: 157510 - DNA, 365 bp, Homo sapiens
gcagaatacctatatcacttaagtttttctgcaagagaaaatcctccaaaactgcattagatatttgtgtctcatatgtctttggatttcatttttgtcagctaggtttggtggatggctgtggtgattggagatgggccacattctgcatcttgaagctactttggctgatttaggctggataaagcagtggcattctgactccattagtttctcattcttcttctgggaacagtgtactcaccagatgatgttctcayggtgaatggaaaagagcaagaaactccaatatggaaaccgtcttaaatctctgtgtaaagtctactaatttcctgttcactgaagcaaattacatgagtgaattc

SEQ ID NO: 157511 - DNA, 539 bp, Homo sapiens
gaaattcagtgagcagcactagatctcaaaatgtcattacaattaataaaatatagtatctcaaccacagctccaccaatctattccacgatttaaattttactgtttttataagcagaaatcaaggcttcttcatttataacaatctttaaaagatcaaagagtaaaacagtacttacaagtttatcaaacattgaagaacttttattcccatggtaacaaaactgaatctggtgcttctaaggaattccaccatttaatccctatccgtgaatatagttttggttayagaactataaccttcaaactccatcatcactcactcaagtgtgacagaagatctgaggtcttacctctgtttgacaatctggtcctaaaactctctctttagaaatataagcttgctcataaaatgtgctatttgctttgtctttcttactagggaggtttagttccattaaaatctaaattgtttccatagtgatcatagtgaaaagaggattagtttaagctcatccataaataattatttgcttaag

SEQ ID NO: 157512 - DNA, 484 bp, Homo sapiens
agggttttgtgcttataggggcttgtgcttagagtgactctatgcttggattaatgttctgcacttgctgtttggcttttcagacagagtatacttcagcattccctctgctgaagagggaatggtcttacactggtcttacactgattccatagggatttgctctcccctctcctacaggcttgtcagagacatgcacagagtcctataatgcccactatgcatgcctctagcagctttgaattccgctggatcatctggcacagtggccagagcagcytggaccagagcctatatcttctgtagagccctctttagttctgggctccatttgagaccagtagcctttagaaacatcgttcgtgagtcagagcaatattctcaaatgtggaatatgttgtctccaaaatcccagtaggcccccaaaacatagtgtctcttttgtagtgataggaaatatatagagagagcaaaatgccgttta

SEQ ID NO: 157513 - DNA, 543 bp, Homo sapiens
tatgtaccaccattaacaagtatcattattttaattggtcagaggagagggaaaatatgatcatcttaataaacagcaaaaaatttgatagtttttaacagagattttattacaatactatacacaggaagataggaaacaaatattctccctgaakaatatttttaaaagaatttatctcaaagctagagtcagtattacgtttattgttaaaacactagaaaacactccatttgcaaagacagcagttacgatcaggattacttaacactttgaatgttcaaaccatttcattatacaactgataccaaaaaagaattacaagtagtaaaatggagaagtaaaataatcattataagtcactatatgcagatgatataattttctatctgcaaagccaagagaatgagcaaagcaaatgtggtagtttagtaaggcagctggcttctaattcaacaaacgaagcaaattacttttttgcatacacgctaatcaggtactaaatattatacaaaaattaaaaacacttaatataggtactaa

SEQ ID NO: 157514 - DNA, 506 bp, Homo sapiens
aatatcactgctgaagacttyttaatgcattcatctaaaatgctatgtatatctgattcttgaaaattcaataatatattccctttaaaaagggaatgttaaaccagcaaccatccagatttgctaatggctgggtttaaagctctcttcataaaaatctctgtatttccccagacagctcagctgagcttcatccagatgctgtgtgccttatacacagtaggctgaagtcttttgtagctggtgagaaaggaaacactgaattctcatttgtaaacatgcaaataaggacatatttattttcattggtttgtgtgttttttttttttttttttgtcttatctacatacttcagtctgtcaaattgagttctggggaagtatcattacaaaaattggtatatgaaactttgtaagcactgagaatttttacatacttccgtgtttgggtggagaaaaatggggagatgatggtgaaagtttacagaacctcagttagacaagagg

SEQ ID NO: 157515 - DNA, 604 bp, Homo sapiens
ggttctgttgagacttcatggatactttgaaaagagagcagagctcacgtctccagtgagagctacaataaccccagagggtctcgcccaaaggacctcagcacttgcatcattcatgctgggttgaaaacactaggttttcattggaacaacagctcttagggaaaggcaatctttttcagaaaaagagcagcaaaaataataattcccacacactacatccagaaattagaataaaaactcagttcctcagagaagagcagtgtcttaatccatttcagtgtcaaagttacatttaggtgtatacagaacagattagtgtgtttcattttaacttttttatgcatcaaaatttatgtactaactgtatcaaatgtttgaatttatttattattaaaatttattatttatttattattaaaatttattattwattattaaaatttatttgaatatttctcccttcacttcttgtatcatatttttggatttccttgcattgggcttcacttttctctggtgcctttctgattagcttaataactaacctcctgaattttttttcaggtaaatcagggatttcttcttggtttggatccattgc

SEQ ID NO: 157516 - DNA, 604 bp, Homo sapiens
ggttctgttgagacttcatggatactttgaaaagagagcagagctcacgtctccagtgagagctacaataaccccagagggtctcgcccaaaggacctcagcacttgcatcattcatgctgggttgaaaacactaggttttcattggaacaacagctcttagggaaaggcaatctttttcagaaaaagagcagcaaaaataataattcccacacactacatccagaaattagaataaaaactcagttcctcagagaagagcagtgtcttaatccatttcagtgtcaaagttacatttaggtgtatacagaacagattagtgtgtttcattttaacttttttatgcatcaaaatttatgtactaactgtatcaaatgtttgaatttatttattattaaaatttattatttatttattattaaaatttattatttwttattaaaatttatttgaatatttctcccttcacttcttgtatcatatttttggatttccttgcattgggcttcacttttctctggtgcctttctgattagcttaataactaacctcctgaattttttttcaggtaaatcagggatttcttcttggtttggatccattgc

SEQ ID NO: 157517 - DNA, 578 bp, Homo sapiens
tgttatagtataattgtttctaggagaagatcttggagtcagtctgccaggacaggaagccagattttctgctttatatagctatgatctgagactccattttacgaattctctctacctcagtataattatgtataaaacgcagatgataataatactctgggtagtccttatgaggtgctagtatagtatatgtataactgctttcaattttacatgttcagtgcaggcaggaaccgaggattattagttattctttcgattctgtgttacttgatacttaaaagataccagtgaaaacttccacttttccttttttgttttgagaaaggatgttgctctgtcgcctaggctggagtgcagtggtagttcactwcagctttgtactcctgggctcaagagatcctcccacctcagcttctggagtagctgggactatgggcgtgcaccaacacagccagctaatttttcagtttttttgtagaaatggggtctccctatgttgcccagtatggtcttgaaaacatgggctcatacgatcttcccaccttggtctcccaaaatgcttggatacaggc

SEQ ID NO: 157518 - DNA, 578 bp, Homo sapiens
tgttatagtataattgtttctaggagaagatcttggagtcagtctgccaggacaggaagccagattttctgctttatatagctatgatctgagactccattttacgaattctctctacctcagtataattatgtataaaacgcagatgataataatactctgggtagtccttatgaggtgctagtatagtatatgtataactgctttcaattttacatgttcagtgcaggcaggaaccgaggattattagttattctttcgattctgtgttacttgatacttaaaagataccagtgaaaacttccacttttccttttttgttttgagaaaggatgttgctctgtcgcctaggctggagtgcagtggtagttcactacagctttgtactcctgggctcaagagatcctcccacctcagcttctggagtagctgggactatgggcgtgcaccaacacagccagctaatttttcagtttttttgtagaaatggggtctccctatgttgcccagtatggtcttgaaaacatgggctcataygatcttcccaccttggtctcccaaaatgcttggatacaggc

SEQ ID NO: 157519 - DNA, 494 bp, Homo sapiens
gctgagatcttgcgatccttctccatggagctgcatcttcttgagatgtttayacagagaacagattagcatcagaaaagatatcagggacagagtaaagggtatgaagctccatagggtagttacagtcaaatatgaaagatgtactgtattcctcaatttcatcttcccagtcatgtttccttcatattcttctgcccacatactctcatccatgtttgccacaagaagatgacaaaccaaaaatatcaaagtccccaacagtatcaccagaatgacactcctaactctcctctttaaatgaagaaaaagaaggttggagaaattggcaatcttgagcaaataaaatatgctgaggttagcagcaagccacatgctgaaatggttggttacaacccaggcattataagaagtaattcttaattctacactataaaaagctggattcaacacagttaaataccaatttaataataatgcccagagcaaaccaa

SEQ ID NO: 157520 - DNA, 439 bp, Homo sapiens
cagatatcgaacttataaactacaatatttaaggcagtgtggtactggcttgaagataaacggacaaatagaacataatggagagtgtagaaataaatccaaaaatatatagtcactttatttatgacacaaggcccactacaattcagcggggaaagaattttctttttaacaaatggtactgggttaactggacatcctatttggggtggggtaggggaggaagaaatctggaacttatttcayactgtatacaagattctagacagattataaaccaaaatgtgaaagctacaccaagattttcccttatattttcttcaagcttctaaaagaaaatacgagaaaatctttatgacctacagtaggcaaagactttttaatcagacacaaaaaagactacacataagagattgctaaatggaacttcatgaaaatt

SEQ ID NO: 157521 - DNA, 554 bp, Homo sapiens
ttcaatttctttgtctatccaatcaacaaagatgcaggtaaataaatagtttcgaaaacactcctggtggatagttgaatatctatccggaaggtcttctgacaaaatcattaaagtatatattctactgaactagagttccacatcaacaaatttatagttttgcaaggaggataaaggaaaggccaaatgccatctccacttgctggatcgggctcaccttccctccactcccactcaagaaagtgcacttaattaaatgaggataaggaagaaaacatttaacaaatgacatataaaagtaacagagctccctyagtataatccttgtaagcacaccaaatctagtttttgtattttttaaacaatgcagtcacaacaacagttccccacagaattaaagccccctcctcaaaatcagtaatgatgttttttacatattcctccccaagatacatattttcttttaaaaaattaaatacaatttaatatattgaattataccttagagttagaatcagcatttaattcaaaaaagttttacaaaagtgaaa

SEQ ID NO: 157522 - DNA, 566 bp, Homo sapiens
gtgctggtactacaggcatgaaccacagcacctggcccacaccttgataccttacttctcatcaatcacaggcaaatttctaagtaaggtgcttaatagttaaataaatgtgtaaagatcagttcattcttagatatctatacaatcttgaaaaacaattgagcaaaaataaagggaaaatattttgcaagtatctaaataaatcaagccacaaycaccaacaacaaaaactgaattatctacaaaggaacaaaaaccaagctgacagcagactttttctctgcaatacaactttgtgctcacaaatttgataattcagataaattgacccattccttgaaatacactgaatattaaataccaaaactcacacaatgagagctaggtaatatgattagccctatatctattagataaattgaattaattcttaataacattctgaaaaatacagcaccaggactagattattttgctagtgaattctacaaaacgtttaaggaataaatgacaccaattctctggaaacaatttatttttttcagcaaatagaagcagagggaaca

SEQ ID NO: 157523 - DNA, 566 bp, Homo sapiens
gtgctggtactacaggcatgaaccacagcacctggcccacaccttgataccttacttctcatcaatcacaggcaaatttctaagtaaggtgcttaatagttaaataaatgtgtaaagatcagttcattcttagatatctatacaatcttgaaaaacaattgagcaaaaataaagggaaaatattttgcaagtatctaaataaatcaagccacaaccaccaacaacaaaaactgaattatctacaaaggaacaaaaaccaagctgacagcagactttttctctgcaatacaactttgtgctcacaaatttgataattcagataaattgacccattccttgaaatacactgaatattaaataccaaaactcacacaatgagagctaggtaatatgattagccctatatctattagataaattgaattaattcttaataacattctgaaaaatacagcaccaggactagattattttgctagtgaattctrcaaaacgtttaaggaataaatgacaccaattctctggaaacaatttatttttttcagcaaatagaagcagagggaaca

SEQ ID NO: 157524 - DNA, 507 bp, Homo sapiens
aacaagcaattgctggagcacgtacttatgtcagccaatggcttattccttgatgtcaatgttttggctttatttggtgaactggtggttgagttgatccttacttgctattcagactacctctgatccttctgaagaccagaaccatctggatggctcatttgactttgctcagaaaggtccttaatctctaagtacatcagttcaagcacagactcagactgagatggagaaatgaaagatggcccactttgggaggcagaaatgggtagactgcttgagcccaggagtttgagaccagcctgggcgaaatggagaaacaccrtctctatgaaaaactgcaaaaaattagccaggcttcatggtgcacacccatagtcccagctattaggctgaggtgggaagatcacctgagcctggaaggtcgagtcttcagtgagccgtgattatgccactgcactccagcctgggtgacagaatgagaccctgtctcaaaaaaaaaaaaaa

SEQ ID NO: 157525 - DNA, 530 bp, Homo sapiens
attaaaaatttgttgaggtattctttgtgtaaaagaaaaaattatttgtaatgtgtaaggttgtatatatgtttatgtttcatatattatagataatttattatctatctatctatctatctatctatctatmtatatatatatagtgtttttttgagatggagtctcgctctgtcaccagactggagtgcagtggtgcaatcttggctcactgctacctctgcctcccaagttcaagctattcccctgcctcgcctcccgagtagctgggactacaggcgcacacccccagcccagctaatattttttttgtattttcgtagagatggagtttcaccatgttgcccaggatggtctcgatctcctgaccttgtgatcagcccgtctcggcctcccaaagtgctgggattataggcgtgagccaccgcgcccagtcaatttattatatattatttatggaatatgtatttttaattcctctcatccttacttattcttgtctgctagcaggtattttttccagttctcct

SEQ ID NO: 157526 - DNA, 530 bp, Homo sapiens
attaaaaatttgttgaggtattctttgtgtaaaagaaaaaattatttgtaatgtgtaaggttgtatatatgtttatgtttcatatattatagataatttattatctatctatctatctatctatctatctatatatatatatatagtktttttttgagatggagtctcgctctgtcaccagactggagtgcagtggtgcaatcttggctcactgctacctctgcctcccaagttcaagctattcccctgcctcgcctcccgagtagctgggactacaggcgcacacccccagcccagctaatattttttttgtattttcgtagagatggagtttcaccatgttgcccaggatggtctcgatctcctgaccttgtgatcagcccgtctcggcctcccaaagtgctgggattataggcgtgagccaccgcgcccagtcaatttattatatattatttatggaatatgtatttttaattcctctcatccttacttattcttgtctgctagcaggtattttttccagttctcct

SEQ ID NO: 157527 - DNA, 530 bp, Homo sapiens
attaaaaatttgttgaggtattctttgtgtaaaagaaaaaattatttgtaatgtgtaaggttgtatatatgtttatgtttcatatattatagataatttattatctatctatctatctatctatctatctatatatatatatatagtgtttttttgagatggagtctcgctctgtcaccagactggagtgcagtggtgcaatcttggctcactgctacctctgcctcccaagttcaagctattcccctgcctcgcctcccgagtagctgggactacaggcgcacaccmccagcccagctaatattttttttgtattttcgtagagatggagtttcaccatgttgcccaggatggtctcgatctcctgaccttgtgatcagcccgtctcggcctcccaaagtgctgggattataggcgtgagccaccgcgcccagtcaatttattatatattatttatggaatatgtatttttaattcctctcatccttacttattcttgtctgctagcaggtattttttccagttctcct

SEQ ID NO: 157528 - DNA, 530 bp, Homo sapiens
attaaaaatttgttgaggtattctttgtgtaaaagaaaaaattatttgtaatgtgtaaggttgtatatatgtttatgtttcatatattatagataatttattatctatctatctatctatctatctatctatatatatatatatagtgtttttttgagatggagtctcgctctgtcaccagactggagtgcagtggtgcaatcttggctcactgctacctctgcctcccaagttcaagctattcccctgcctcgcctcccgagtagctgggactacaggcgcacacccccagcccagctaatattttttttgtattttcrtagagatggagtttcaccatgttgcccaggatggtctcgatctcctgaccttgtgatcagcccgtctcggcctcccaaagtgctgggattataggcgtgagccaccgcgcccagtcaatttattatatattatttatggaatatgtatttttaattcctctcatccttacttattcttgtctgctagcaggtattttttccagttctcct

SEQ ID NO: 157529 - DNA, 568 bp, Homo sapiens
cctgatttcaaaatatattacaaagctactgcaattaaaactgtattgtattggcttaaagataaacacataaatcaatggaatagaatggagagtgcagaaataaacacacacacatatgattaattgatctttgacaaagatgctaagaatacacagtagtttcttcaacaaatgttaggaaaactggatattcacatgtgtatattacaccacacacaacattcaactcaaaatagattaatgacttacatgtaagacctggccagggttggaggctcacacctgtaatcccagcactttaggagggcaaggtggaaggatcacttgagttcaagagttcgaaatcagcccaggaaacacrgagaaaccctgtctccacaaaaaatagcctggtgtggtagtgcacacttgtagttacctgcagttacttgggaggctgagatgggaggatcacttgagcccaggaggttggggctgcagtgagctttgattgtgccactgcactgcagctgagtgacagaacaatatcttgtctttaaataaataaataaatgtaataccccaa

SEQ ID NO: 157530 - DNA, 503 bp, Homo sapiens
cacagagagaagtataatttagttttctctctttatgatttccctgtctggtactatgtcatagcttgccaaatgacagtcactgcaatagaggcacaggtaagatgacaggggagttggttaagaggagtctcataatcagtctggagatagaaaaggagcatcctgaaatcctggcatatgagttcttgcaacagatgcataggagtaattaatcaytcccgccactgtccataaaggactagaggtaagactagaacacaataaggtggagctgagcatggagcatagagggaggaagatggagataaagggattttgggggaagggacttcaaggtgcagcaggaagtaagtgtagtcacagggatgggagagccagatgtatggaggtgcctgtggatttgatgctttacctgatgtgaggaattcatgtgagggcatgacaagcctggaaaggcaagcttggctgcagcatagggagtgcaataagcctgataataa

SEQ ID NO: 157531 - DNA, 572 bp, Homo sapiens
taatttagttttctctctttatgatttccctgtctggtactatgtcatagcttgccaaatgacagtcactgcaatagaggcacaggtaagatgacaggggagttggttaagaggagtctcataatcagtctggagatagaaaaggagcatcctgaaatcctggcatatgagttcttgcaacagatgcataggagtaattaatcactcccgccactgtccataaaggactagaggtaagactagaacacaataaggtggagctgagcatggagcatagagggaggaagatggagataaagggattttgggggaagggacttcaaggtgcagcaggaagtaagtgtagtcacagggatgggagagccagatgtatggaggtgcctgtggatttgatgctttacctgatgtgaggaattcatgtgagggcatgacaagcctggaaaggcaagcttggctgcagcatagggagtgcaataagcctgataataaatttgggccttatacaaaaacagtatgaagcttcycaaagttttaagtgggaagacttatgatagatgaatgacaggaaaagg

SEQ ID NO: 157532 - DNA, 573 bp, Homo sapiens
tagcctgagattgagcactgatctggattcacctaactcatcttaaaagcaacacctgaaatgatcaaactgcattccagaagaaagcacactcatatttataaaaacataaaaatactcaacatccaatcagatgaaatttacaatgaaggacatccccaattaaaaattgtcagacatgtgaagaagcgggtaaatatgacccaaaatgaggagaaaaatcagaaaatcaataaagctgccagattctagaattaacagataaggatattaaaacagtaatcataatcatgttctatatgttcaaaawgtagagaagagatatcaaacacataaaaatgattcatatcaaaataatacagataaatattctggctgatatgaaaaacacaggatgagactactggcagcttagacatcacagaaataaaaaattagcatagttgaagacaaaacaaagatactccccaaaaatcaaacacacagtgaaaaattaacttttaaaaatcaagagtgcatcattgcagggaagagagtgttcagggggaaatttatagctgtaaacacaattga

SEQ ID NO: 157533 - DNA, 420 bp, Homo sapiens
agacaagtatgaggagtttgctttcagtcataaagcattcaaggacctgaaataagtccaggaagaccaccctttggtgtcccaggaggaaaatccttaattagtattgagttagagccagtaaaaataagttcccacatccaagagtataagctgagccaaatcaggaagagaaacctagactagaaggaaaaaaaattgtaataagatgggagaaatttargggataggacagaggagattgtctcagttgaactgatgggtccctggcttatatgtatttgctgtcagccatttggtttgggtttctggctgtgttggttcaacttaaacgtacaggttcagtacaagttgtgcaaagaaaaagcacagagaactcaatggtagctgagtcctcacaagagtgacagaacccagaat

SEQ ID NO: 157534 - DNA, 553 bp, Homo sapiens
ggttggtcctattccacattggttttcctgccaccatcttcaggcaaagtctgcaagcctccaagtctactaggatgtaggcaatgcattggggcagggcagcgggcagagcccagggcactgggcattcaaaggtgagttgttggccagtggctggccttgaagccccacactccatcttagcttggactcaccaaggcttatctcctttgtgagttgtcatgggcttgcagagacttactctggaagtatgcatgcatctgcatcttcatgccccatagttttttgttttgttttgttttgcagcttttgaaaagtttgaaaagtttttgagtttggttcactgaggcctggggatggtaatatttaaaatatcaccctgtctctctgctatagacaaatcctggaaaattcagtttagttgagagcttccttcttgtctcttttaggtgcaattttgactcagtcaaaatgtgtatgmgtgtgagtgacagctcttctaaacacagcatgccccaggacacaagggatgttctcaccttcagccacaatg

SEQ ID NO: 157535 - DNA, 499 bp, Homo sapiens
aagtaattattaggatccttgattatacctggatgaaaaattgggtgcaaagacatctatagattggaccagaatttcacaggggtcctttgatttggagcctgtggcttcctggtattccattgcagttcagcagcatggctttaagcccacagctcggcatagtggttagagactgaccagcataaatcccagctgtattacttcctggctgacgttggacatgctacttaatctctctgtgcttcagagctctcaactataaaataaataataaaataggaccgttataarttaaatgaattaatacttgtcaaatacttaggacagtgccttgtgattagtaagtgctataaacaagttaaccattattattactataactggaaagggcaccaaagccccagcttcatcaggggaaaataggatattgcccaatggctgggataaaagtaaatacatatataaccacataagtacataaaaaagaaggagacaa

SEQ ID NO: 157536 - DNA, 499 bp, Homo sapiens
aagtaattattaggatccttgattatacctggatgaaaaattgggtgcaaagacatctatagattggaccagaatttcacaggggtcctttgatttggagcctgtggcttcctggtattccattgcagttcagcagcatggctttaagcccacagctcggcatagtggttagagactgaccagcataaatcccagctgtattacttcctggctgacgttggacatgctacttaatctctctgtgcttcagagctctcaactataaaataaataataaaataggaccgttataaattaaatgaattaatacttgtcaaatacttaggacagtgccttgtgattagtaagtgctataaacaagttaaccattattattactataactggaaagggcaccaaagccccarcttcatcaggggaaaataggatattgcccaatggctgggataaaagtaaatacatatataaccacataagtacataaaaaagaaggagacaa

SEQ ID NO: 157537 - DNA, 438 bp, Homo sapiens
tttattgtgaacaatagtaacaaagcagcctcaattctctaatcctgcagagggttaaagaacacctattatcccctggagcttaatagagatgaaatattargatataagtataagtgcttaggaggaccaggaagatggttataaacacgttatacccaggtttaggtgaaaactacatgtaaactattgtgaggtccttgattggttagatgactaagatattagttatcttggaagaaaatctggattgataaatgtgagttgaattagatgcactaaacataaaaatagaagacagaaaattgtcctagtaataatcagcccatccttgcttagcacagctccagtattccaaagatttcagttgccacagttcagttcaatgacatcagtcccccaacaaccacagttctgatttcagttgctatagtatat

SEQ ID NO: 157538 - DNA, 606 bp, Homo sapiens
aatccttggttttaagattccctaactaaactccatgtaaaccaacatccttctgcgaaaacacttcattttcagacgaaattacaacattccagtgttcttttacatcagccccaattctgattaaactttgatgagactgcatttcaatggcaatcttgctttcatcggacttcatgatttctccagttttatagccccaaacttgaagaccttctctttctgtratgtatatctctaaatagctactttatccatttattaggtatcagtcctatattttcaatcacagagcttaatcttatttccaactttggggcacctaaatttagtctatttatgcctgactttgttaagttgatttgttgatgaccactcttctagagacacatggaaaatttgttaacaaacttatttttgaacaggatggttgtactgaatgattacatatggcaggagtctggggaaaatttttacttatctccattctagggacatctactgcaaattccataatagactctcattcctctattatctgagctatttgaattacctcaataaagctgtttcctcctctttcttcactcaggaaatacagagttc

SEQ ID NO: 157539 - DNA, 490 bp, Homo sapiens
gggcaaggacagagggtgtgaagatcctgcaaaggccaatgatgttaagagcccagagctgggtggtggctgagggagtggagaagaggcagaagttttaagagctattttgataggactcgggatattgactgccagtgaggactgagggagacaaatggatcaagaatgacttggaagcttctggccttggcaaatggacactggagtttagggaaggtaagagggagagcaggcttttgagagaggataacaaatttgattttgatcacatgaarcactttatttattacagcattgttttaactcccttataaccaagattatccatatttattgcaaaagcaacagtatcaaagaatgctttaaaatgcaattaaatttgtttaatatagataaactataagtaatgagattgttttcattataatataggtgtcacacatttctcctggtaactaagaaagataaatgggcagataaaacataa

SEQ ID NO: 157540 - DNA, 490 bp, Homo sapiens
gggcaaggacagagggtgtgaagatcctgcaaaggccaatgatgttaagagcccagagctgggtggtggctgagggagtggagaagaggcagaagttttaagagctattttgataggactcgggatattgactgccagtgaggactgagggagacaaatggatcaagaatgacttggaagcttctggccttggcaaatggacactggagtttagggaaggtaagagggagagcaggcttttgagagaggataacaaatttgattttgatcacatgaagcactttatttattacagcattgttttaactcccttataaccaagattatccatatttattgcaaaagcaacartatcaaagaatgctttaaaatgcaattaaatttgtttaatatagataaactataagtaatgagattgttttcattataatataggtgtcacacatttctcctggtaactaagaaagataaatgggcagataaaacataa

SEQ ID NO: 157541 - DNA, 490 bp, Homo sapiens
gggcaaggacagagggtgtgaagatcctgcaaaggccaatgatgttaagagcccagagctgggtggtggctgagggagtggagaagaggcagaagttttaagagctattttgataggactcgggatattgactgccagtgaggactgagggagacaaatggatcaagaatgacttggaagcttctggccttggcaaatggacactggagtttagggaaggtaagagggagagcaggcttttgagagaggataacaaatttgattttgatcacatgaagcactttatttattacagcattgttttaactcccttataaccaagattatccatatttattgcaaaagcaacagtatcaaagaatgctttaaaatgcaattaaatttgtttaatatagataaactataagtaatragattgttttcattataatataggtgtcacacatttctcctggtaactaagaaagataaatgggcagataaaacataa

SEQ ID NO: 157542 - DNA, 540 bp, Homo sapiens
ccttgtatgaagttttctggttttggcccctcatgtaacaaagatgtaattttggttattttcatttttctattcctccaagtgccttgccatttcttcctctaatctccagctatttcatgcaaaaatgatcaagacaacttttttttaaagattttttgagagtmtcttcttttagattacaagaagacaagaagtagcaatttagcctctaatttatctcataggtgaaattttacttctttcttttttctaagaagtaccgtcagaatataatcttaaaatttaatggttgtgaaacttgactatagaatttgctttctgctgatgctatgggggctcccttctaacccagaccaatttactctgaaaatggcaaatgctttcccctctccccaagaagatggaaaaataagttacattcacttgctaaagataaattaattaattaaaattgcctagtggcaataatgtgttgaattcaaatagttgaaacaagcaattgctggagcacgtacttatgtcagccaatggcttatt

SEQ ID NO: 157543 - DNA, 514 bp, Homo sapiens
tcataaacatccagccgagacataataaaagtttgggccagaataacagtagaggtatggtcagattcagtatatatcaaaattaggrtataggtaggaacataaagagatgagagcctgagccctgggagagtccactattagcagtccagagaagagcagaaagagcaaaaaggcttgaggagaggaaataaggtgggagaaggaaaaccagaagactagcatgttgaaagccaagtgaagacagtgcatcaagattggggaattaatctacaataagatgaggactgatcaaagattggttgattagtaatgtagagcttcttgcttttgaccagagtattttcaatagaatggtgacaaaagtgattggagggtgttcaagagagcatgggagtacaaaaattgtagttagcatgagatttgctttaaatagaagaggagaatgagatttcagctggtaagatcaagagaagttttttttttttatttaaagatgggtaaaataaaagaa

SEQ ID NO: 157544 - DNA, 474 bp, Homo sapiens
acaggttttcctgatgcatccttctctgctgccccctgtctgtcgaaccaccagagacactaccaatgggcygaatggggcaggcacaaagctttaggaagaagggctcttcatttcctcttaccttttcttaaagggcatgcctcagagaacatcagggaagcccataagactttgtgacttggtacttacatagttaaacagatgcagcaggttcaaactggctgcagaaatttgagccctctccgagtttgccctgctcagattcataggaaaagtgtagggtagttcagctctttctcttgctccccaggtaggaactccagctgaaaatctttttcacccagtgaagggtttagactcattggagtttactgctagaaatggcttgagatgtcatctgggctttcctcctcatgtgatattttactagcctggcttggcatctttggaggtggagactggttctatagg

SEQ ID NO: 157545 - DNA, 621 bp, Homo sapiens
cccggaacatttaagacaatgttgacaatataggacaccatccatttagcatatgactgtgtgggctgtttgcctgcactcaggccacttggacataaccataattacaggagtgattctttaagagaggctcagaagttggcatgaatacaccatccctagtttttccccaaaaccttcaacaacacttttatctatttttaaattgcagttattcatgccaaaataaaagctgtgcagaggagtggctgcaatgaggtcacaacggtggtggatgtaaaagagatcttcaagtcctcatcacccatccctcgaactcaagtcccgctcattacaaattcttcttgccagtgtccacacatcctgccccatcaagatgttctcatcatgtgttacgagtggcgytcaaggtaggcacaaagaggcagaaggaactgtatgcacactgttaggaagacctcaatctcagttagcagtcatggtttaaaaatataacaaaaatatgccaaagtctttttaaaaaaattagtttaacagatgcctctgtttgaatagcatatattctatcaattaattcttcatagaatgaaggaaaaatcaaaatatgagtatttgaataga

SEQ ID NO: 157546 - DNA, 587 bp, Homo sapiens
ttttctttgtaagccatcacaagccatagtggtaggtttgccctttggtacagaaggtgagttaaagctggtggaaaaggcttattgcattgcattcagagtaacctgtgtgcatactctagaagagtagggaaaataatgcttgttacaattcgacctaatatgtgcattgtaaaataaatgccatatttcaaacaaaacacgtaatttttttacagtatgttttattaccttttgatatctgttgttgcaatgttagtgatgttttaaaatgtgatcgaaaatataatgcttctaagaaggaacagtagtggaatgaatgtctaaaagatctttatgtgtttatggtctgcagaaggatttttgtgaygaaaggggattttttgaaaaatctagagaagtagcatatggaaaactataatgtgtcttttttacaatgacttcagctctgtttttagctagaaactctaaaaacaaaaataataataaagaaaaataaataaaaaggagaggcagacaatgtctggattcctgttttttggttacctgatttcatgatcatgatgcttcttgtcaacaccctctta

SEQ ID NO: 157547 - DNA, 521 bp, Homo sapiens
ggagcacgtacttatgtcagcmaatggcttattccttgatgtcaatgttttggctttatttggtgaactggtggttgagttgatccttacttgctattcagactacctctgatccttctgaagaccagaaccatctggatggctcatttgactttgctcagaaaggtccttaatctctaagtacatcagttcaagcacagactcagactgagatggagaaatgaaagatggcccactttgggaggcagaaatgggtagactgcttgagcccaggagtttgagaccagcctgggcgaaatggagaaacaccatctctatgaaaaactgcaaaaaattagccaggcttcatggtgcacacccatagtcccagctattaggctgaggtgggaagatcacctgagcctggaaggtcgagtcttcagtgagccgtgattatgccactgcactccagcctgggtgacagaatgagaccctgtctcaaaaaaaaaaaaaaaagactagcaaaacaaaaaaaagaattc

SEQ ID NO: 157548 - DNA, 507 bp, Homo sapiens
aacaagcaattgctggagcacgtacttatgtcagccaatggcttattccttgatgtcaatgttttggctttatttggtgaactggtggttgagttgatccttacttgctattcasactacctctgatccttctgaagaccagaaccatctggatggctcatttgactttgctcagaaaggtccttaatctctaagtacatcagttcaagcacagactcagactgagatggagaaatgaaagatggcccactttgggaggcagaaatgggtagactgcttgagcccaggagtttgagaccagcctgggcgaaatggagaaacaccatctctatgaaaaactgcaaaaaattagccaggcttcatggtgcacacccatagtcccagctattaggctgaggtgggaagatcacctgagcctggaaggtcgagtcttcagtgagccgtgattatgccactgcactccagcctgggtgacagaatgagaccctgtctcaaaaaaaaaaaaaa

SEQ ID NO: 157549 - DNA, 499 bp, Homo sapiens
ctataccttccaggttggcaactccccaggaaaaagagctctccttcctaaatgttccggcaaaagccccagagctgactcccattggtctggcttgaatcacatgtctattgctgagccaatcactgggaccaggaaaatgcagtactctgattggttagatttgagtcgaaccaaggaaggggtcaattgcacttggaatgagaatggggatagggtagtttcccaaakgaaaagagggtgtgttaccaaaaagcaggagaaatgggtcttgggaaggaagaaacaacagatttcctccaggaatgctctgagcctttctttcctggcctgtctgattcctgacagctttctggaaccttgtctcagtctggatttctttctgagagaaggaagagactcactccctttgaccctttacttttgtattgagaaccaaaaccagctctgactggctcttaacttcaaccacacggcatcaaataaaaaataatgtttg

SEQ ID NO: 157550 - DNA, 519 bp, Homo sapiens
aaggatgctgctaaggagtcataagaaatgcaaagccaggcacagtggctcacgcctgtaatccccgcacttccggaggctgaggcgggtggattacctgaggtcaggcgttcaagaccagcctgaccaacatggtgaaaccccatctctactaaaaatacaaaaattaatcgggcgtggtgacaggtgcctgtgatcctggctacttgggaggctgaggcaggagaatcttgaacctgggaggcggttgcagtgagtcaagattgtgccattgcactccagcctgggcaacaaaagtgaaactccgtcttaaggaagaaaggaaggaaggaaggaagagaaggaaggagggaggggaggaaggaagggaaaagaggaaggaaggaaaagaaagagagaggagaaagaaagaaagaaagagagagggagagagacaatcaagaaagaaagacaaaccctgggacgcygtgggaccgaggggtcgtgggaggtcagggaacgactgttagacgggcaagg

SEQ ID NO: 157551 - DNA, 519 bp, Homo sapiens
aaggatgctgctaaggagtcataagaaatgcaaagccaggcacagtggctcacgcctgtaatccccgcacttccggaggctgaggcgggtggattacctgaggtcaggcgttcaagaccagcctgaccaacatggtgaaaccccatctctactaaaaatacaaaaattaatcgggcgtggtgacaggtgcctgtgatcctggctacttgggaggctgaggcaggagaatcttgaacctgggaggcggttgcagtgagtcaagattgtgccattgcactccagcctgggcaacaaaagtgaaactccgtcttaaggaagaaaggaaggaaggaaggaagagaaggaaggagggaggggaggaaggaagggaaaagaggaaggaaggaaaagaaagagagaggagaaagaaagaaagaaagagagagggagagagacaatcaagaaagaaagacaaaccctgggacgctgtgggaccgaggggtcgtgggaggtcagggaasgactgttagacgggcaagg

SEQ ID NO: 157552 - DNA, 557 bp, Homo sapiens
taggtgaaacaagggcaaaaacaaggagactactttgaaagctaatgcagtgaactggaaaaatagaaaagtggtcatattctaatayattttaaaggaaaaacaggattttctgatggattacatttggggcatgaggctgtgacctgaaaaaccagatggtgtaacctgtcatttaccaggacaaggcagattacaggaagagcagttcaatgttattgttatggtagggaagggaaagcaagagttcctttttggacatgctcaagcagtacaagtggaaatgtcaagtagacagctggatacataattattggggagaccagaccccatgtgaagggctagcaagttcattcatctcaaaggcagatggatgtgggtactgatgcaaggagcttggcaaatctgcagtaggagcatgtggaaatgctcttctgattgtttctattttctcagtaacataaaaaaggaaggccatcagttagcagaagaattgctggaggtttgcaggagatgacaaaaataggacatattcatggaggaaagggaactaagta

SEQ ID NO: 157553 - DNA, 557 bp, Homo sapiens
taggtgaaacaagggcaaaaacaaggagactactttgaaagctaatgcagtgaactggaaaaatagaaaagtggtcatattctaatataytttaaaggaaaaacaggattttctgatggattacatttggggcatgaggctgtgacctgaaaaaccagatggtgtaacctgtcatttaccaggacaaggcagattacaggaagagcagttcaatgttattgttatggtagggaagggaaagcaagagttcctttttggacatgctcaagcagtacaagtggaaatgtcaagtagacagctggatacataattattggggagaccagaccccatgtgaagggctagcaagttcattcatctcaaaggcagatggatgtgggtactgatgcaaggagcttggcaaatctgcagtaggagcatgtggaaatgctcttctgattgtttctattttctcagtaacataaaaaaggaaggccatcagttagcagaagaattgctggaggtttgcaggagatgacaaaaataggacatattcatggaggaaagggaactaagta

SEQ ID NO: 157554 - DNA, 557 bp, Homo sapiens
taggtgaaacaagggcaaaaacaaggagactactttgaaagctaatgcagtgaactggaaaaatagaaaagtggtcatattctaatatattttaaaggaaaaacaggattttctsatggattacatttggggcatgaggctgtgacctgaaaaaccagatggtgtaacctgtcatttaccaggacaaggcagattacaggaagagcagttcaatgttattgttatggtagggaagggaaagcaagagttcctttttggacatgctcaagcagtacaagtggaaatgtcaagtagacagctggatacataattattggggagaccagaccccatgtgaagggctagcaagttcattcatctcaaaggcagatggatgtgggtactgatgcaaggagcttggcaaatctgcagtaggagcatgtggaaatgctcttctgattgtttctattttctcagtaacataaaaaaggaaggccatcagttagcagaagaattgctggaggtttgcaggagatgacaaaaataggacatattcatggaggaaagggaactaagta

SEQ ID NO: 157555 - DNA, 557 bp, Homo sapiens
taggtgaaacaagggcaaaaacaaggagactactttgaaagctaatgcagtgaactggaaaaatagaaaagtggtcatattctaatatattttaaaggaaaaacaggattttctgatggattacatttggggcatgaggctgtgacctgaaaaaccagatggtgtaacctgtcatttaccaggacaaggcagattacaggaagagcagttcaatgttattgttatggtagggaagggaaagcaagagttcctttttggacaygctcaagcagtacaagtggaaatgtcaagtagacagctggatacataattattggggagaccagaccccatgtgaagggctagcaagttcattcatctcaaaggcagatggatgtgggtactgatgcaaggagcttggcaaatctgcagtaggagcatgtggaaatgctcttctgattgtttctattttctcagtaacataaaaaaggaaggccatcagttagcagaagaattgctggaggtttgcaggagatgacaaaaataggacatattcatggaggaaagggaactaagta

SEQ ID NO: 157556 - DNA, 507 bp, Homo sapiens
gctggtcaaattttaaaataaaaataaaccctamaggaacatacaaatttggcaagggaaaaaacctaatgtttcgattggaatcaattctttgatagactactgagctgtaggattagaggtaatttattatatagagatattaggattggctcttctgtaaaaagctaatttactgacaacagatttgaatcaaagtaagggattcataggtaaaactatgaacttttctccctaatgcttcattccctgtgggtaattaatgaaagagaaactttgcttgagtgtttctgggcatcttgtctcctacaacaggtgtcaaatttctccaggtgaatgcttaccggtaagggattggataaggaatgttgcggtgaggatcgtgcaactggtggaacacttctgccagggctggttcctggcgcgcttcccccagcaaactggccaacagggaaaaaccgatatgaataattcaaaacagtactatgcttcagataaggagagtaa

SEQ ID NO: 157557 - DNA, 507 bp, Homo sapiens
gctggtcaaattttaaaataaaaataaaccctaaaggaacatacaaatttggcaagggaaaaaacctaatgtttcgattggaatcaattctttgatagactactgagctgtaggattagaggtaatttattatatagagatattaggattggctcttctgtaaaaagctaatttactgayaacagatttgaatcaaagtaagggattcataggtaaaactatgaacttttctccctaatgcttcattccctgtgggtaattaatgaaagagaaactttgcttgagtgtttctgggcatcttgtctcctacaacaggtgtcaaatttctccaggtgaatgcttaccggtaagggattggataaggaatgttgcggtgaggatcgtgcaactggtggaacacttctgccagggctggttcctggcgcgcttcccccagcaaactggccaacagggaaaaaccgatatgaataattcaaaacagtactatgcttcagataaggagagtaa

SEQ ID NO: 157558 - DNA, 440 bp, Homo sapiens
ggatattttgcagtgaaatcatccacctctcaagcaggggcctccttttctttggccagacttatctccactctgctgcatccacctttccttgactaaagccctaaattctcataaccatcacacaagtaatagacacacagtcaccagtcactagcccccctcccaacaatatttagaatctaatcacttmaatgaagcttcaatggaaaacatctcctcatggaaaatgcaaatcaagtaaaaagtacaggttctaagatgatcgcgtgaccacacagttgtcattggctagccatatcaacgtggatctactaaacataattaaagacaacattaccctcctccaaagtaaaactatatataaaaaaaccctctacgacttaagattttgttacaatgcagcccttttctctccttgctcatcccctccctgtccc

SEQ ID NO: 157559 - DNA, 631 bp, Homo sapiens
aatgtttttttttccctgttggtcactcattttcatgatcgttttccaattcttagatctgacttcatgcatgagaagtacagaaagtacacaagaataaagaataaaagtaggggagtcaggaatgttctattttaaaagcaactattagattcctcactgtctcccttcaattattcctgatctttactctttgagtcctccctgaaataacatgctattagattgatgcaaaagtaattgtcgtttttgccgttactttttttttttttttcttttttttagatggagtttcactcttgttgcccaggctggagtgcaatggtgcaatctcggctcactgcaacctctgcctcctgggttcaagcgattctcctgcctcagcctcccgagtagctgggattataggcatgygccaccacacccagctaattttgtatttttagtagagatggggtttctccatgttggtcaggctggcctcgaactcctgatcttaggtgatcctcccgccttggcctcccaaagtgctgggattacaggcatgagtctccacatccttgccattactttcaatagcaaaaaccgcaattactttttcaccaatctatataatgattagaaatatatc

SEQ ID NO: 157560 - DNA, 540 bp, Homo sapiens
tgccaggccggtaaactgaggtaaggtcaggraggttagcagcagaagggaaagcatgttcatgatcaaaacaatatctgagttgtatttatgattctgtagacatgtgaagagacatgcaaaggacagtcaccaccaaaatggtaatgattgtctcaagtttccttaaactcagctatattgcttaattaaaaaaaataaaaataggccaggcacggtggctcatgcctttaatcccagcactttgggaggccacggtgggtggatcacctgaggtgaggagtttgagaccagcctggccaacatggtgaaaccctgactctactaaaaatacaaaaaattagctgggcatggtggtgggaacctgtaatcccagctacttgggaggctgaggcaggagaatcacttgaacctgggaggcagaggttgcagtgatccgaggtcacgccattgcacccagcctaggcaacaagagcgaaactccgtctcaaaataaataaataaataaaaagtttgtgctgttaatttaatggggttggg

SEQ ID NO: 157561 - DNA, 540 bp, Homo sapiens
tgccaggccggtaaactgaggtaaggtcagggaggttagcagcagaagggaaagcatgttcatgatcaaaacaatatctgagttgtatttatgattctgtagacatgtgaagagacatgcaaaggacagtcaccaccaaaatggtaatgattgtctcaagtttccttaaactcagctatattgcttaattaaaaaaaataaaaataggccaggcacggtggctcatgcctttaatcccagcactttgggaggccacggtgggtggatcacctgaggtgaggagtttgagaccagcctggccaacawggtgaaaccctgactctactaaaaatacaaaaaattagctgggcatggtggtgggaacctgtaatcccagctacttgggaggctgaggcaggagaatcacttgaacctgggaggcagaggttgcagtgatccgaggtcacgccattgcacccagcctaggcaacaagagcgaaactccgtctcaaaataaataaataaataaaaagtttgtgctgttaatttaatggggttggg

SEQ ID NO: 157562 - DNA, 513 bp, Homo sapiens
ctggaggcccaagaaagccagtggggtagttttagcccaagcccggaagcctaagaaccaggacagctgatagcataagtcccagtctgagtctgaaggcccaagaaccaggagccctgattttcaagggcaagcagagatggatgtcccagtagagagaggaagttagtccttcttccaccattttgttctatccagaccctcaacagactggacgatgcccacccacattggtgagggtgatcttctttactcagtctactgattcaaatgccaatctctttcagaaacatgcttacaggcacacccagaaataatgttttaccagccatttgggcatcccttagtgcagtcaagttaacacataaaattcaccatcayactcaccctctccaagcttcttttatctctgaaatagaaatagtatttatataatgttagcatatcatctgggttcaataaatggtagcagttattatcaaaaccccctccaagatgagtgcctaaaaagat

SEQ ID NO: 157563 - DNA, 517 bp, Homo sapiens
tctccaaggtcatgtgaagggtaaataaaatccctgcaaaagaagagtgccccctccaaccctttctccctgaattgagcaggagctggttcttagggaaaggagctgagaattctgaaaggggagtggcggtgtgaccaggagcacagcacagagggcccaggtgccaggctccaccagggtggaggggcaacggtgcyctccctgatgccagcacacgcccgcctcccccaggcagccttcagatgtgatgtgacttgacatgcctgccactagagcctgggagttggtcatgagctcatggatttacaagctgacaggtgctgacatgtaagggcctgggccacgccagcaggacacattgagtataactcatctaaggtcggagagtcctcccagaacctcccctttctgattccccctggacacagagactccgtgggtgctcagggaatgccccggacgtacatattcaaggataaggatgagacgggactctgggcactccctgccctgg

SEQ ID NO: 157564 - DNA, 517 bp, Homo sapiens
tctccaaggtcatgtgaagggtaaataaaatccctgcaaaagaagagtgccccctccaaccctttctccctgaattgagcaggagctggttcttagggaaaggagctgagaattctgaaaggggagtggcggtgtgaccaggagcacagcacagagggcccaggtgccaggctccaccagggtggaggggcaacggtgccctccctgatgccagcacacgcccgcctcccccaggcagccttcagatgtgatgtgacttgacatgcctgccactagagcctgggagttggtcatgagctcatggatttacaagctgacaggtgctgacatgtaagggcctgggccacgccagcaggacacattgagtataactcatctaaggtcggagagtcctcccagaacctcccctttctgattccccctggacacagagactcmgtgggtgctcagggaatgccccggacgtacatattcaaggataaggatgagacgggactctgggcactccctgccctgg

SEQ ID NO: 157565 - DNA, 371 bp, Homo sapiens
ctgcaacaggatggcctagacttcagtacagcatggtagctgggttccaaaagagattgctctaggggacaagccccagtgtacatgacccagcccctgcttgtatcatgcctgctaatgtcccattgacacaaaaagccacatgctgatgatgtaagaggaggagactacacagtgagtggcycattgggcccattgtcgctgtctaaaacctcaaagtgcgcatttttttcacttacctctctagggagcataattctctgcagggaggacagctgtgagatcctgtgacctaaagactctctgaatcaatagaaacaagtataaaattgtgaaagtaagtaaaaaattgagttaaagaggattttaga

SEQ ID NO: 157566 - DNA, 371 bp, Homo sapiens
ctgcaacaggatggcctagacttcagtacagcatggtagctgggttccaaaagagattgctctaggggacaagccccagtgtacatgacccagcccctgcttgtatcatgcctgctaatgtcccattgacacaaaaagccacatgctgatgatgtaagaggaggagactacacagtgagtggcccattgggcccattgtcgctgtctaaaacctcaaagtgcgcatttttttcacttacctctctagggagcataattctctgcagggaggacagctgtgagatcctgtgacctaaagactctctgaatcaatagaaacaagtataaaattgtgaaagtaagtaaaamattgagttaaagaggattttaga

SEQ ID NO: 157567 - DNA, 565 bp, Homo sapiens
catgccaggacaaacagagctcagtgagcagggcctgggctgaatgctgctcccgctcagtccctcggtcaggcatttatatgatttggctatgtctccacccaaatctcatcttgaattgtagctcctatgattcccacgtgttgtggaaggaacctggtgggagataattgaatcataggggcggtttcccccacactgttctcatggtagtgaataagtctcacgagatctgatggttttagaaagggaaacccctttcacttgatccttcattctctcttgtctgccaccatgtaagacgtgcctttcaccttccaccgtggttgtgaggcctccccagccatgtggaaatgtgtgtccgttaaacmtctttttctttataaattactcagtcttgggtatgtctttatcagcagcatgaaaacgggctaataccgtaaattgggttcctggtcataatacttccagaatattatcaaagcctcactcttccaatccaatagtgccatctctggaaatggtcctccctactgctccacaaccaaattggggagcctgtgag

SEQ ID NO: 157568 - DNA, 528 bp, Homo sapiens
aacccctttcacttgatccttcattctctcttgtctgccaccatgtaagacgtgcctttcaccttccaccgtggttgtgaggcctccccagccatgtggaaatgtgtgtccgttaaacctctttttctttataaattactcagtcttgggtatgtctttatcagcagcatgaaaacgggctaataccgtaaattgggttcctggtcataatacttccagaatattatcaaagcctcactcttccamtccaatagtgccatctctggaaatggtcctccctactgctccacaaccaaattggggagcctgtgagtcattactcttccctctgtctttttcatctaaacagtcactaagtccacacagaaatgttccctcaatatatctggcatctgtctggtcctatccacacacgaccccaccttagtccaggctcccactgtctctcacatgaattatcacaacagcctctcacctccacagccagcttgcattcttgctccaagccattgtctatccaggagccaa

SEQ ID NO: 157569 - DNA, 371 bp, Homo sapiens
gctgagctaaagaacaaaacatgtttcttaccacagaactcctcagagtctttaagatgctgatgcaagkttgggcgcggtggctcatgcctataatcccagcactttgggaggccaaagtggaaggatcacttgagtccaggaactagagaccagcctgggctacatagcaagacctcatctatatgaaaaatttaaaaattagctgggtgcagtggtgcatgcctgtagtcccagctaccagggaggctgaggtgggaggatcgcttgaacctgggaggtcaaggatgcagtgagctgtgatcctaccactgtactccggcctgggtgacagaggaaggccctatctcaaaaagagaaagatgctgatg

SEQ ID NO: 157570 - DNA, 532 bp, Homo sapiens
tatattactacttaatggacgagctaaaccctgaggacatggcctcaatatagccagaatttcaaactgcagtcttatctcttcccacagtgcatttggatctctaactcccttctacccctttgatgagtttgtattaataacccctgcttaagtaaggagctgggccattgagagctggccaaggcctgttcccgagccccaggccatgattcgcttcactctggacttcagttccagagagagaggtcaatggcagggcatgggaacaggatcgatccccaagcttgttctgtccccagaacagaagtccctaaaaacactatgggtgggacagaagttaaggccagagagcagggaatcgcatctgctaagtgaggagagttttccartgaaaacaactccacaaggccatcggtcccctgggaagatttccttctgcttatgcacactcagttcctcctccctcctcctctgtctccttggggttggactagaagtcaaagcacttctgaccagcaatgtcctccaa

SEQ ID NO: 157571 - DNA, 580 bp, Homo sapiens
aagggaatttcccttgctacattcaaataactcataacctttacacacttgacatttgcacacttgattccaataactgcctataggaaacttgttataggagaaaagagaattccctagaggcaagtaaggaactgcctaatgcagttcttagctgacagtatttcaacaagtaatattgaacaaacaactmcagtgagcatgatttaacaagtccctagccacatcattgaagcatactttctacacaggtcctgagtcatcttacaccccgccctccctcatccccagacattcagattcacggattctgctttcatgtttcttaactctctctctctctctcttcctttccacccctactttcccagctcaagtattcataacctcttgcctagagaggctccctacctctggtctcctcccttccaagccaccccacactccatcagaactccactggttcaatcaatgagtatttattgagcccttactaggtgccctgcagacactacttactagggaccatagacactatgttgagccctcggaagtcaatcttgaacaaggcagacacgta

SEQ ID NO: 157572 - DNA, 580 bp, Homo sapiens
aagggaatttcccttgctacattcaaataactcataacctttacacacttgacatttgcacacttgattccaataactgcctataggaaacttgttataggagaaaagagaattccctagaggcaagtaaggaactgcctaatgcagttcttagctgacagtatttcaacaagtaatattgaacaaacaactacagtgagcatgatttaacaagtccctagccacatcattgaagcatactttctacacaggtcctgagtcatcttacaccccgccctccctcatccccagayattcagattcacggattctgctttcatgtttcttaactctctctctctctctcttcctttccacccctactttcccagctcaagtattcataacctcttgcctagagaggctccctacctctggtctcctcccttccaagccaccccacactccatcagaactccactggttcaatcaatgagtatttattgagcccttactaggtgccctgcagacactacttactagggaccatagacactatgttgagccctcggaagtcaatcttgaacaaggcagacacgta

SEQ ID NO: 157573 - DNA, 580 bp, Homo sapiens
aagggaatttcccttgctacattcaaataactcataacctttacacacttgacatttgcacacttgattccaataactgcctataggaaacttgttataggagaaaagagaattccctagaggcaagtaaggaactgcctaatgcagttcttagctgacagtatttcaacaagtaatattgaacaaacaactacagtgagcatgatttaacaagtccctagccacatcattgaagcatactttctacacaggtcctgagtcatcttacaccccgccctccctcatccccagacattcagattcacggattctgctttcatgtttcttaactctctctctctctctcttcctttccacccctactttcccagctcaagtattcataacctcttgcctagagaggctccctacctctggtctcctcccttccaagccaccccacactccatcagaactccactggttcaatcaatgagtatttattgagcccttactaggtgccctgcagacactacttactagggmccatagacactatgttgagccctcggaagtcaatcttgaacaaggcagacacgta

SEQ ID NO: 157574 - DNA, 553 bp, Homo sapiens
atcgtcgatgacttagtcaggttgagcaaaatgtcttcagagctaaaaaggtcaaggaaataaagagttcccaatattgatcggatcacctacataaatgctgatgttgcccccaaagaaaggaagagaatagggagtgaatgtggagaagagggggaggatctgaagcaaggggaacagtgtgtgcaaaggacagactctcactgtgaggagcagagagacattcatgaaggatggagaactgataccatggggtagataaaggtggagtggaacgcacagctatttttgtgaagactttgaaacacacgcgaaggaatttgtatcttattgtaaggaaagctattgaaggattttaagcaaagggtacacaatcatatttgtgtttttaaaaaatgctctgataaayaaactgtgttatatccagacaatggcatattattcagcattaaaagaaataagctaccaagccatgaaaagacattgaagaaacttaaatgcatattactaagtgaaaaaagccaatatgaaaatgctaaatactatatgattc

SEQ ID NO: 157575 - DNA, 579 bp, Homo sapiens
agtgtggagggaaatgggtctggctttagttctccctctctggtcctaaaagggaggtccaaaattaaattcacttggaaacrtgtgggctaaagttaacttttgcactctctggagaggtgttttctaaaaacatttaaagcaaaacattttcaaaatgggcctttatgacatctattaagtaatgcatttgtcagttagagctgtctcctatattcattaaagttgaaattttttttttttgagaaggagtctcactctgttgcccaggctggagtgtgcaatggcacaatcttgggtcactgcaacctccacctctcgggttcaagcgattcttctgcctgagcctcccaagtagctgggactgcaggcgcatgccaccacacccagctaatttttgtatttttagtagagacagggtttcacccatattagccaggctgactcgaactcctgacctcgtgattcacccgcctcagcctcccaaagtgctgggattacaggcgtgagccaccacagccagcctcaagttgaattttttaatcccctctttttagaatattctgctagcaataagtt

SEQ ID NO: 157576 - DNA, 579 bp, Homo sapiens
agtgtggagggaaatgggtctggctttagttctccctctctggtcctaaaagggaggtccaaaattaaattcacttggaaacgtgtgggctaaagttaacttttgcactctctggagaggtgttttctaaaaacatttaaagcaaaacattttcaaaatgggcctttatgacatctattaagtaatgcatttgtcarttagagctgtctcctatattcattaaagttgaaattttttttttttgagaaggagtctcactctgttgcccaggctggagtgtgcaatggcacaatcttgggtcactgcaacctccacctctcgggttcaagcgattcttctgcctgagcctcccaagtagctgggactgcaggcgcatgccaccacacccagctaatttttgtatttttagtagagacagggtttcacccatattagccaggctgactcgaactcctgacctcgtgattcacccgcctcagcctcccaaagtgctgggattacaggcgtgagccaccacagccagcctcaagttgaattttttaatcccctctttttagaatattctgctagcaataagtt

SEQ ID NO: 157577 - DNA, 516 bp, Homo sapiens
ccatattagccaggctgactcgaactcctgacctcgtgattcacccgcctcagcctcccaaagtgctgggattacaggcgtgagccaccacagccagcctcaagttgaattttktaatcccctctttttagaatattctgctagcaataagttcctgtactctgtggacaataatacattccttactttgtattcatgtgatgcttatccatgtcctgctttgtggcattcctttgtattgtcttgctgttgttgttgttgttgttcttcttcttccttcttctttttcttccttcttctttttcttccttttgagacttttgaacttactcaaaattaaacacaataatataatgagccgccatttagctattcccagcaccaactaccatcaattcacagccaattgtgtcctttctacattcccattaacctccctccctcctgtatcattttgaagcaaactccagacatcacgtcatttcatcttacatactttatgttctagagtatgta

SEQ ID NO: 157578 - DNA, 516 bp, Homo sapiens
ccatattagccaggctgactcgaactcctgacctcgtgattcacccgcctcagcctcccaaagtgctgggattacaggcgtgagccaccacagccagcctcaagttgaattttttaatcccctctttttagaatattctgctagcaataagttcctgtactctgtggacaataatacattccttactttgtattcatgtgatgcttatccatgtcctgctttgtggcattcctttgtattgtcttgctgttgttgttgttgttgttcttcttcttccttcttctttttcttccttcttctttttcttccttttgagacttttgaacttactcaaaattaaacacaataatataatgagmcgccatttagctattcccagcaccaactaccatcaattcacagccaattgtgtcctttctacattcccattaacctccctccctcctgtatcattttgaagcaaactccagacatcacgtcatttcatcttacatactttatgttctagagtatgta

SEQ ID NO: 157579 - DNA, 442 bp, Homo sapiens
ttaaaaaagaaccaaacagaaatctacagctgaagaattcaatgactaaataaaaagtacaattgagagctttgacaacagactagctcaagcaaatgamataatttctgaacttggagacaggtcatttgaaataacacaggcagacagaaggaaaaagaatgaagaaagcctacgagatttatggaacacaattaagtgaacaaatattcacattatacatattccagaggagaagagaatgaaaaagatatagggaatatatttaatgaactaatagctgaaaacctcccaggccttgggagagagatggacatttaagtccaggaagatcaaagaacctcaaatagattgaacccaaactggtcctctctgagtgatatggtgctccaattgtcaaaattcaaacaaagaattttaaaagcagcaggaaaaaaagtgt

SEQ ID NO: 157580 - DNA, 597 bp, Homo sapiens
aagctttgaatgttgcctggaaggagacattttgtaattcggggattttcccatctgacaccaccaaattataaacttcttgcgggaacatggtgtctttctacatggtggccctagagcccatcacagtaaytggcactcagtgcgtggttttgaatgaataaatggataaatgaacttatggaagagtgctacaggcttgagatgagaagggctgggctggggtagggtctgtgggtgtagaaatgaagtaaagaatacaagatacattgcaaagaaagaaattggttaggacttggtgccaacttgattgtggtggccagagagcctaaaggaattcaaactaaggcatggaaggacaatggcaatactgacagcaccaggacaaccaggatgggggctggaggggatcttattcttatatccagagtagaaagctctttgaggcatggtaccctgtgccctcccttacctgagctgttcttgttggtctccacctttctgctgctcctgaaactcgagccatttcaggatcaaggaaatgaaagttgaaagtaaaggaaaagaacattaaatttgtatttcagatcttgttcc

SEQ ID NO: 157581 - DNA, 479 bp, Homo sapiens
atcttaaaaacaacaacgatgcacattttcctcaaaataaaattcraagaacaaatgaaatggaactccagtggcgttctaggtcccaggaactcaggacttcttgccattccattgttaaaccctctgaactcttctgaggcggtcgccgtgggcatgggttttgttttccataagacattaagataagtgccacaaaattctctttgtttaaatctacttctgttctcatggtaacggagggtccatcagcaccaaaatatataaaggcaccaaggcagcgtgaagatgttactacgacaactggaatttagaggagacatttttaaaggcgtgtgggaggctttcacttcgctttcttcatgaaagcctgggcaggatgagtcaggcattttagaaaacaggggtacgggggtaccctggggtctaaggtctgggtggttccacagtcacagtgctggctgggacatgggatgaca

SEQ ID NO: 157582 - DNA, 414 bp, Homo sapiens
tggctgggtccatggggaagttgctattgtttcccgataataacacaggcaactagccaggtgtggtggctcatgtctgtaatcccagcattctgggaggcygaggtgggtggatcacctgaggctgggagttcgagactagcctgaccaacatggagaaactccgtctctactaaaaatacaaaattagctgggcaaggtggtgcatgcctgtaatcccagctactcaggaggccgaggcaggagaattgcttgaacctgggaggcggagtttgtagtgagccaagattgtgccattgcactccagcctgggcatgagacttcgtctcaaaataataattaataataataataataataacacgggtaaccatgaatatagcacttcttatgtgccaggtgttgttctaagca

SEQ ID NO: 157583 - DNA, 548 bp, Homo sapiens
gaattcagcatatacttcatttctcttagcaagggggaaataaaggatatgtcaacattatgggtggcttaaattttatgctttgtgcttttttgcagtttctaaattttctcccatgaatgtgtaaatgagtatcacttcaatagtcagaaatgattatattataaaaggtaatgaatttccattactgaggcattgattaggagctgtatgtttaatttgcttgtgttttttctttttggaggtggggtcttgctgttgcacaggctgtagtgtaggggctatgaatgcatgtgatcatakcacactgcagcctcaaactcctgtgcttaagtgatcctcttgcctcagcctctcaagtagctgggactacaggtgtgtgccaccatgcccattgaattttacatttttttttcagagacctatagaaggaggtcctttctacactggatggtaagttggaattgatggcccaaagatccaactcaaatattttttattttttttgtttatagagttggaacattagttggagtcagaagacctgg

SEQ ID NO: 157584 - DNA, 583 bp, Homo sapiens
ttggcatggctaaaattactgtctaattgaacaccttttaaagatgtatataagggccgggtgtggtggctcacgcctgtaatcccagcactttgggaggccaaggcaggcagatcacctgaggtcaggagttctagaccagcctggccaacatggtaaaaccccctctctagtacaaaatacaaaaattagacctgtaatcccagctactcggacggctgagacaggagaattgcttgaayccgggaggtggaggttgcagtgagccaagattgcaccatcgcacttcagcctgggggacaagagcgagatttcctctaaaaaaaaaaaagatatatataaaaagagggtcaggcgtggtggctcatgctggtaatcccagcactttgggaggccgatgcgggcagatcacttgaggccaaaagttggagaccagcctgggcaacatggtgaaaccccatctctgctaaaaatgcaaaaattagccaggcatggtggtgtgtgtaatcccagctactagggaggctgaggcaagagaatcaccctaacccgggaggtggaggttgcagtgatctgagatggt

SEQ ID NO: 157585 - DNA, 635 bp, Homo sapiens
ttcaacgtctctccaaaacttcaagggcaktatgggtatctgccgagatggtaaaatgtccagtgggcaggaaatatttcaccggatctcacttgccggggaaaaaagccagtgaacgcgacccacgcagctgactagatcgtgcgctcggcctcagattggtcgagcctgtttgggctgcggaaaaagcggaagcgcgcttttcaaagtcgtcccaccatcaatgaaggcaggccacttccggcgtagccatggcggctaacgctactaccaacccgtcgcagctgctgcccttaggtaatcgccgtcctttggggagcaggaacagggagctgacattcaggattgggggccgaggggctgttccgaggcaggccctggccgagtgtggggaaatgtataagaccaaatgcggttcgactctgagctccaagtcttcgcgacagcaggccgcacctgctctttaacgtggtcgggctcctccaggcaaggactttgacttctcaaaccagaccttcactggaaaaggtccacatttagtgaacgcgtcgtcggcctactttgttgtgagcccgcctctgcagtgttataggtagtaggcctacttctcagcctggcgtttacgatccccagat

SEQ ID NO: 157586 - DNA, 635 bp, Homo sapiens
ttcaacgtctctccaaaacttcaagggcatwatgggtatctgccgagatggtaaaatgtccagtgggcaggaaatatttcaccggatctcacttgccggggaaaaaagccagtgaacgcgacccacgcagctgactagatcgtgcgctcggcctcagattggtcgagcctgtttgggctgcggaaaaagcggaagcgcgcttttcaaagtcgtcccaccatcaatgaaggcaggccacttccggcgtagccatggcggctaacgctactaccaacccgtcgcagctgctgcccttaggtaatcgccgtcctttggggagcaggaacagggagctgacattcaggattgggggccgaggggctgttccgaggcaggccctggccgagtgtggggaaatgtataagaccaaatgcggttcgactctgagctccaagtcttcgcgacagcaggccgcacctgctctttaacgtggtcgggctcctccaggcaaggactttgacttctcaaaccagaccttcactggaaaaggtccacatttagtgaacgcgtcgtcggcctactttgttgtgagcccgcctctgcagtgttataggtagtaggcctacttctcagcctggcgtttacgatccccagat

SEQ ID NO: 157587 - DNA, 635 bp, Homo sapiens
ttcaacgtctctccaaaacttcaagggcattatgggtatctgccgagatggtaaaatgtccagtgggcaggaaatatttcaccggatctcacttgccggggaaaaaagccagtgaacgcgaccsacgcagctgactagatcgtgcgctcggcctcagattggtcgagcctgtttgggctgcggaaaaagcggaagcgcgcttttcaaagtcgtcccaccatcaatgaaggcaggccacttccggcgtagccatggcggctaacgctactaccaacccgtcgcagctgctgcccttaggtaatcgccgtcctttggggagcaggaacagggagctgacattcaggattgggggccgaggggctgttccgaggcaggccctggccgagtgtggggaaatgtataagaccaaatgcggttcgactctgagctccaagtcttcgcgacagcaggccgcacctgctctttaacgtggtcgggctcctccaggcaaggactttgacttctcaaaccagaccttcactggaaaaggtccacatttagtgaacgcgtcgtcggcctactttgttgtgagcccgcctctgcagtgttataggtagtaggcctacttctcagcctggcgtttacgatccccagat

SEQ ID NO: 157588 - DNA, 635 bp, Homo sapiens
ttcaacgtctctccaaaacttcaagggcattatgggtatctgccgagatggtaaaatgtccagtgggcaggaaatatttcaccggatctcacttgccggggaaaaaagccagtgaacgcgacccacgcagctgactagatcgtgcgctcggcctcagattggtcgagcctgtttgggctgcggaaaaagcggaagcgcgcttttcaaagtcgtcccaccatcaatgaaggcaggccacttccggcgtagccatggcggctaacgctactaccaacccgtcgcagctgctgccsttaggtaatcgccgtcctttggggagcaggaacagggagctgacattcaggattgggggccgaggggctgttccgaggcaggccctggccgagtgtggggaaatgtataagaccaaatgcggttcgactctgagctccaagtcttcgcgacagcaggccgcacctgctctttaacgtggtcgggctcctccaggcaaggactttgacttctcaaaccagaccttcactggaaaaggtccacatttagtgaacgcgtcgtcggcctactttgttgtgagcccgcctctgcagtgttataggtagtaggcctacttctcagcctggcgtttacgatccccagat

SEQ ID NO: 157589 - DNA, 315 bp, Homo sapiens
cggcctcccaaagtgctgggattacaggtgtgagccaccgcacctggcttgcttcctattttcaaccagtaaatagttgctactgataaawtgacagccaggagtctgtcaagaatgctcaagatatgttatataatacaacatgactgttcacagtgggggaaatcccaggaaataacttatgtgtacttcttgatttcaccatacaagacaagcacaaaagcaccatccatgcctctgagaacactggaccatgcacccttgaaaaaatctttgcctccttcatcaccaacaatcttcctccagcagtcaagc

SEQ ID NO: 157590 - DNA, 576 bp, Homo sapiens
atataaataacaagttgtatttattatatattgataatatattatataaatgtatattcatatgtataatatatattaaccactattctgcaccatggcctaactggatgcaacttcctcaactaaatgtgaggtttatatgtatacacatatatatatgtgtgtatatattttatatatatatattatgtataatgtttaaagaaaaatctatctgcaacctttgttaaagaacagtaatgcagactttatttaaggggactatagagacaggtatgggaattaccaaagtggggttttacagtaggggtgagaaactgggctcaactctgaatacaacaaggaaaagtgggaatttatagccaaggaacagagtcggaattccaacccaggctctgcagcacatgcccttaasctccgtgctgcaccacggcctaactggatgcaacttcctcaactaagtgtgaggtttataatgcctgcctttctctattcacaggatttcctgtccttagttatttgcttttattctgtctcattccaaattggatttgcagaggctctgagaaaccaaca

SEQ ID NO: 157591 - DNA, 574 bp, Homo sapiens
cataaatctcaggagctgtcagcagccaagtttcttgctatgtcacaaaaatcagtctgagtgggaaagagtattgttgatatgcaaagaggagcaaacatgagtgacaagggagagccctgagcactcacggttctatttctactatggcccagctgcatctttggatattccgttgagttggctaagaagagttgaccctttcttagatgctaagaaccaatcagttccatgttttctttaagctgatttgaattgtgtttctgtcactagcaacccaaaagtcctcagtgatacaaagataaattttaaactcttagggatatattgtggaggctccagcactggttcttcctaagacattgttgggaaaccatggtggactttatggtatctctttaacatccagcatactcttccaccattggagaatagctatgctgtgtgggcagttttctgtagctccagggaagggcctggattgttgaaggcaatgataattatcctawctcctttgcagtgattgtcagaaatggccatgtgactcaatttgaggaagtctgccaaggaattc

SEQ ID NO: 157592 - DNA, 591 bp, Homo sapiens
atttttgctgaggatatgtgaaggaagggcagaggagtggtggtgagctatcagagagatagctctggaagggttgttcaaggcagaattattggagtgaagggctcagcagaggctcttcactctgtttctgtttctgtgagatctgtaaaatatccatgactagtaaatttattgtggaatttgtctgtcttgagatatattaaagaaatcctgagtccttgggtgtgggatatagcagagactgcctctggagatccacatcattgggattccatgggggaatgtttgtggcaggaatttcagcataatgagcagaaactggccctcccacagagtctttcccctctcattaagaagagtgctcctcctttsttctgtgagcaggccaaatggatttgattatcaagggccaagttcatgggaaggggggaagggtaacgaataggttggggcactgttgctttgcctaaccttgttaaaagaagcccgattttgtttgggaggcaactcccagccccaggtaagaaatcaggattaaggtaattacagtatcctatttctctttgccagtgatttgtttagggaact

SEQ ID NO: 157593 - DNA, 591 bp, Homo sapiens
atttttgctgaggatatgtgaaggaagggcagaggagtggtggtgagctatcagagagatagctctggaagggttgttcaaggcagaattattggagtgaagggctcagcagaggctcttcactctgtttctgtttctgtgagatctgtaaaatatccatgactagtaaatttattgtggaatttgtctgtcttgagatatattaaagaaatcctgagtccttgggtgtgggatatagcagagactgcctctggagatccacatcattgggattccatgggggaatgtttgtggcaggaatttcagcataatgagcagaaactggccctcccacagagtctttcccctctcattaagaagagtgctcctcctttcttctgtgagcaggccaaatggatttgattatcaagggccaagttcatgggaagggggraagggtaacgaataggttggggcactgttgctttgcctaaccttgttaaaagaagcccgattttgtttgggaggcaactcccagccccaggtaagaaatcaggattaaggtaattacagtatcctatttctctttgccagtgatttgtttagggaact

SEQ ID NO: 157594 - DNA, 546 bp, Homo sapiens
tgccaggaaggtgtggctgagttcaggggctgaggagccccacctacgggcagatcaccaagtagcagccctgaagagagaatgacaattggtctcagcacagcctcctcctccaggaggttttcttactccttcaaatgtggttagggagaaaaatagagtttgaaatagttttatctcagggacaagtgagaagcagagatctgagagaaaaacagacctgggtttggatcctggatctgccaccactgtgtgacttggacaacttatttaacttcatcaagcctctttttcctcatctaagtaccctgatgggttgttttgaagaataattgggatgacacatatgaatgtattagtgttatgctaatggcaactctgttgttccagcctctgcctccgataaaatgcccctgtgatgggtggtgcgaagtcatctctcttcactccactatacctagtactcagctcatgcgcagtaaatgagaaaagtgaatgaatgcttgcatgcaygcataaataaataagtgaatgaatgaatgtggt

SEQ ID NO: 157595 - DNA, 423 bp, Homo sapiens
gaacttctcagaagagcacccatcatggttgagcagggagatgttgctgagcagctcagtgtgatgccccttcccagtgagaggggggccctgaggttcaaactgccccaggcctctctttgtttctctctgctatctgtccctggtgtggggatcttattcctccaagtgtggcccagcagcaaatgtgatggcagagggatcctctctgtttgtttgggtgcctggagcttgaacattcatggtgagcactggagacctgtttcctctgggaagcgggtagcctttctctggcttgtgcagcctctggctggggagaccagccaccctcaggcaggtccttgttgcagagctgctcttgggcttcctttcatcatggcgggtggcaggagcractgtgcctgctttgtctgctgctgtttc

SEQ ID NO: 157596 - DNA, 573 bp, Homo sapiens
gagcagcgagtggacgcacggtgacagtggggagaggcaagcggggcctgcgtgaccaagcactagtgcatgagtatgacgcgggcttcactgcctgttcatcttgtcccatctgatcctctgcacaacttcactctgagcaactatgattatccccactttagtcggttctgttggtgttctcattttttcagataaagagacccaaattcagagagattaggaacctgccccaattcaccctgttggtcgaaggcagagccagggctcaaatccaggtctgtctgatcccaaaggccatgctcttgaatgctaagccttggtgcctcctagggtagctgtttttgtcaggtgagggagcctgaccttgatggaggggatccccacgttccttcarcaactgccttgcaccactaggccaccttggccttgcgttatacagcttgggtcacagttgtatttgaacttagagcagaaggcagtgggggcttcagagctatgagtaactctttctagcttcctttcctctctgtcccccactctctgcctgcacggacctcttctgtaaagcgt

SEQ ID NO: 157597 - DNA, 590 bp, Homo sapiens
gaatgtcaatgcatttgtttgctttaaaataatatatatggcttttatgtataatttttatgattcctttatctaactgatttttaaaaattaacccaacagcaatggataaaagtacctctaccccggccgggcatggtggctcacacctgtaatccccagtactttgggaggccaaggcgggtggatcacgaggtcaggagttcgagaccagcctggccaacatggtaaaaccccatctccactaaaaatacaaaaatttagctgagcatggtggcacatgcctgtaatcccagctactcaggaggctgaggcaggagaactgcttgaacccacgaggcagaggttgcagtgagccaagatcatgccacggcactccagcctgggcggcagagcaagactccatcttgaaaaaaaaatacttctaccctatgaaacctgtgtcataacwtattaaatattttgctcccaagagctaggagtcagaatctctctctttttcattgccatatcctcagcatctaacagagtatggacatggtatataccaatattttgttgaatgtatccatcgtatttgaaataagctt

SEQ ID NO: 157598 - DNA, 532 bp, Homo sapiens
tatacgatgttatctacttttaagaacacatttcttttttttcaagttttccaatccttatacttattactaattttctttttacgtaccatgctggatagtatccctggtacaacactatgtcactagttttcattgattctatgctagtcttttttatgctgaaaacttcctaaaacaaagagtgtgtatatttactaatctctatattgacataagccctatgaaaactcaacaaatatttgttgaaagagtaaarctattaattaattttaattttaaatgttttacacgacaagaataacattgtaaagaaatctgatgattcagctaggaatatgttccactgaaagaaacagaaaacctaacaaaagtagcttacacaatatggatgttgtttaatatatcattcaacaagaaaatgaaagataagtacctgttggcattggttcagcagcagaaggatggtaggccagatatatctgctatttttatggcctttcccttatggtcacaagatgaccgctacagc

SEQ ID NO: 157599 - DNA, 571 bp, Homo sapiens
aaataggtataatgtagattatacaaatggagacagttataaaattgccttagaagtaaaattatactgtgcttatagctcttttataaccatttgaatgtgttacaaagtgttatcartgtgagtgtgttttgtgggcggttggagatggttggaaggatggttgataaggtaggtcagtgttttcattaagtgtgtgctgctgcttcagggcagaggctgaaaaacttagattttttttagttacatgatttactacatctcaggcaacctggatgacttggcatttactaaagcaattcactgctttgctggtgcttcagcacccttcagtctgacagccctgaagtcttgatttgtaattctccatatttcctatcatagcacttcttcaaaaacagcatatctggtcaccttgaaatgtcagttccttaataactccttttgtccactcttcctccaccttaccatacacagagttctttggaggattgccattagtttctttaaaacagaataactaaaattaagaatatttaatattattggccactttaagtgtctttataaa

SEQ ID NO: 157600 - DNA, 377 bp, Homo sapiens
tctagacccaggtattttcactagagacttctgctagaggtttaagmaatcattaacatcaattctatacaatctcttctggaaaagagaagaggaaacacttcccaattctttacctcaaactattattaccttgatactaaaaccaacaaagtaccaacagtatcaaaacaaagtaaacttcagactaatatcccttgcgaatataaacacaaaattcctaaacaaaattgcaaaaatagatttcaataatatattaattatataccatgaccaaatgaggttttcttccagggatgcaaggctgtttcaatattcaaatacatcatattacatgttaacaggcaaaataagaaaaatcacataatcatataaat

SEQ ID NO: 157601 - DNA, 377 bp, Homo sapiens
tctagacccaggtattttcactagagacttctgctagaggtttaagcaatcattaacatcaattctatacaatctcttctggaaaagagaagaggaaacacttcccaattctttacctcaaactaktattaccttgatactaaaaccaacaaagtaccaacagtatcaaaacaaagtaaacttcagactaatatcccttgcgaatataaacacaaaattcctaaacaaaattgcaaaaatagatttcaataatatattaattatataccatgaccaaatgaggttttcttccagggatgcaaggctgtttcaatattcaaatacatcatattacatgttaacaggcaaaataagaaaaatcacataatcatataaat

SEQ ID NO: 157602 - DNA, 265 bp, Homo sapiens
aaaccaacaaagtaccaacagtatcaaaacaaagtaaacttcagactratatcccttgcgaatataaacacaaaattcctaaacaaaattgcaaaaatagatttcaataatatattaattatataccatgaccaaatgaggttttcttccagggatgcaaggctgtttcaatattcaaatacatcatattacatgttaacaggcaaaataagaaaaatcacataatcatataaattggtacagaaaaaaaatttgaaagaattca

SEQ ID NO: 157603 - DNA, 411 bp, Homo sapiens
gaattcaaatgtagaaattcttcaaaaagaaatctctagacccaggtattttcactagagacttctgctagaggtttaagcaatcattaacatcaattctatacaatctcttctggaaaagagaagaggaaacacttcccaattctttacctcaaactattattaccttgatactaaaaccaacaaagtaccaacagtatcaaaacaaagtaaacttcagactaatatcccttgygaatataaacacaaaattcctaaacaaaattgcaaaaatagatttcaataatatattaattatataccatgaccaaatgaggttttcttccagggatgcaaggctgtttcaatattcaaatacatcatattacatgttaacaggcaaaataagaaaaatcacataatcatataaat

SEQ ID NO: 157604 - DNA, 265 bp, Homo sapiens
aaaccaacaaagtaccaacagtatcaaaacaaagtaaacttcagactaatatcccttgcgaatataaacacaaaattccyaaacaaaattgcaaaaatagatttcaataatatattaattatataccatgaccaaatgaggttttcttccagggatgcaaggctgtttcaatattcaaatacatcatattacatgttaacaggcaaaataagaaaaatcacataatcatataaattggtacagaaaaaaaatttgaaagaattca

SEQ ID NO: 157605 - DNA, 394 bp, Homo sapiens
aatattgcacatacacagaagaaaaccatacaaaagtgtacattttagattacattgcttgtaatcaaaaaattggaaataatatattaagatggggaaatacataaactttagaattcataaaatggttaaaattaaagaaatatatatatacagaaagttcaaaaatacaattttgaagaaaaaatcctacagtgacacattcagtatgagatcatttatgtggacttaaagcacataataaaacaatctctaaaaacagagattggatggatacacacaccaaattttaataaaggtataagttggactagaagcagaacaaaggtgattttaactgtatttmtaatattttaattattttaaaatagctgatgcaaaaatgacaaagatt

SEQ ID NO: 157606 - DNA, 650 bp, Homo sapiens
ccattcactatcacaagaacagtacaggaaagacccatccccatgattcagtcatctcccactgggtcccttccacaacacgtgggaattatgggagctacaagatgagatttgggtggggacacagagccaaaccatatcagtgataaaactctaaagcaaagcaggaaatcactttttgtaagagtccagattgaaatatctttgtggggagagggaggagatgtacagagaggggctggcagagtctcttttttgctctagctggcaggttcaagggtgttcaggttattttggaagcagtgcagagaagggagccagactagaaacagggaggtgatcawctgggtctcggttacatacagaaaacagcagagacagctgaaagatccttctctgtgttcacagccatcatctatgactagcatccagtgatagcaggaacactgatgccaacatttttcaaagtttgcagaaacgacttggctcctccacagagcattgtgagtcagttcagaagaaatcaatatccatcttctgttctcttcttgcctgccaaggggacctggaatccttaagcttttgctcctggtttcccacttcaatattcatccaaagagtctcctcctgcttgttttcattctttctgc

SEQ ID NO: 157607 - DNA, 406 bp, Homo sapiens
atttgtaaaataaaaataagaaataatacctagcttatggtttttgtaagaaataaatgaaataacatgtcaagtgtctagctagtctcatctcttattttattttattatttatttattgaaacagggtgttgctctgttgcctcggctggaatgcaatggggcaattatggcttgctgcagcctcaaactcctgggctcaagtgagcctcacacctcaacctcctgagcagctgagaccacaggcacatgccaccacacctggctaatttgtaaatttttttgtagagacagaatctcactatgttgcccaggctgtgtcctgaactcctgggcycaagggatcctcctgccttggcctcccaaagtgctaggattacaggcgtgagctactgtgcctggctct

SEQ ID NO: 157608 - DNA, 497 bp, Homo sapiens
gaaataaatgaggccaggtgcagtggcttacacctataattgcagtactttgggaggccaagtgagtggatcacttgaggccaaaaaaaaaaaaaaaaaaaagaaagaaatgacattcaaggaagaataatagtggatgaggtcagaatatagcatgtacatggttgaacaagccttaggttgtatagagttgcccaatgaccagaggatgctacagcaagcactcactagcgattcttccacctgtcatgccttctgtaacaatgctccacacagtactctttcacaatcatacacatgcacacasacacacacacacacacacacacagacacacacacacagtgaagtgaagttcttcctatagaagcttcatttaatgccctctaaagattggtctgctcaccaagcaggaagacatctggatgtcagtttctccagggactttgggaagcaggaggagtttagaagatagagaggaaaggtagaggcatggt

SEQ ID NO: 157609 - DNA, 431 bp, Homo sapiens
acactatccaaactgtctaagatataattaaaccactcaccatatcaagaattaggaaaaaggccaacttggataagaaaagaccatcaatatatgcccacaccaaaatgacacagatgttggaattatyaggtaaggattttaaagtagcaatcataaaaatgcttcaacaagcaattaggaacatgactgaaacaaatgaagcgatagataatttcagcaaagaaagagaaagccatagcaaagaacagaagatataaagaagaaccaaaaggaaatgttatgactaaacagtacaatcactgaaattttaaaactcattggatgggcacaagagtgaaatagagaggacagaggaaaaaaacttaatgaaccttaagacagaagaattgaaattacccaatctgaccaacagagagaaaatagactga

SEQ ID NO: 157610 - DNA, 445 bp, Homo sapiens
gaagtctcattaacacactatccaaactgtctaagatataattaaaccactcaccatatcaagaattaggaaaaaggccaacttggataagaaaagaccatcaatatatgcccacaccaaaatgacacagatgttggaattatcrggtaaggattttaaagtagcaatcataaaaatgcttcaacaagcaattaggaacatgactgaaacaaatgaagcgatagataatttcagcaaagaaagagaaagccatagcaaagaacagaagatataaagaagaaccaaaaggaaatgttatgactaaacagtacaatcactgaaattttaaaactcattggatgggcacaagagtgaaatagagaggacagaggaaaaaaacttaatgaaccttaagacagaagaattgaaattacccaatctgaccaacagagagaaaatagactga

SEQ ID NO: 157611 - DNA, 452 bp, Homo sapiens
actatccaaactgtctaagatataattaaaccactcaccatatcaagaattaggaaaaaggccaacttggataagaaaagaccatcaatatatgcccacaccaaaatgacacagatgttggaattatcaggtaaggattttaaagtagcaatcataaaaatgcttcaacaagcaattaggaacatgactgaaacaaatgaagmgatagataatttcagcaaagaaagagaaagccatagcaaagaacagaagatataaagaagaaccaaaaggaaatgttatgactaaacagtacaatcactgaaattttaaaactcattggatgggcacaagagtgaaatagagaggacagaggaaaaaaacttaatgaaccttaagacagaagaattgaaattacccaatctgaccaacagagagaaaatagactgaaaaacaatatgagtcccaggatg

SEQ ID NO: 157612 - DNA, 554 bp, Homo sapiens
ctgcatgggccttttcagtaacttgtcattggtcatgtattctaaaacttcatgtatcagctcaagtttctgcttgcaaaacagggggtgggccatgccctccaagggcactctggggactggaaatggcagaggcacctcaaggagttttcattatctccttcgaatgcctgcggactgtgctgacaaagtgtgttgtggaatctgtgccttagctgcttgaattgaactcaayacgcagcatccacagcaaagcgtgtgtgtttttgtctgatttgaaatagaaatatgtccattcactcttggtgggagattgtcaaacacaaggcactaaacatactgagcgcacaacgctggcttccatgaattatctattataccgtggctacattttggctacttaaggatgatttggggatatgttctcactctaattttttttgtatacccattggctgccagtatctgatcctggattgactatgcatgactccagcagtggttactgtggggcctgggcttcctgggccattcaattataggatcatgtatta

SEQ ID NO: 157613 - DNA, 554 bp, Homo sapiens
ctgcatgggccttttcagtaacttgtcattggtcatgtattctaaaacttcatgtatcagctcaagtttctgcttgcaaaacagggggtgggccatgccctccaagggcactctggggactggaaatggcagaggcacctcaaggagttttcattatctccttcgaatgcctgcggactgtgctgacaaagtgtgttgtggaatctgtgccttagctgcttgaattgaactcaacacgcagcatccacagcaragcgtgtgtgtttttgtctgatttgaaatagaaatatgtccattcactcttggtgggagattgtcaaacacaaggcactaaacatactgagcgcacaacgctggcttccatgaattatctattataccgtggctacattttggctacttaaggatgatttggggatatgttctcactctaattttttttgtatacccattggctgccagtatctgatcctggattgactatgcatgactccagcagtggttactgtggggcctgggcttcctgggccattcaattataggatcatgtatta

SEQ ID NO: 157614 - DNA, 554 bp, Homo sapiens
ctgcatgggccttttcagtaacttgtcattggtcatgtattctaaaacttcatgtatcagctcaagtttctgcttgcaaaacagggggtgggccatgccctccaagggcactctggggactggaaatggcagaggcacctcaaggagttttcattatctccttcgaatgcctgcggactgtgctgacaaagtgtgttgtggaatctgtgccttagctgcttgaattgaactcaacacgcagcatccacagcaaagcgtgtgtgtttttgtctgatttgaaatagaaatatktccattcactcttggtgggagattgtcaaacacaaggcactaaacatactgagcgcacaacgctggcttccatgaattatctattataccgtggctacattttggctacttaaggatgatttggggatatgttctcactctaattttttttgtatacccattggctgccagtatctgatcctggattgactatgcatgactccagcagtggttactgtggggcctgggcttcctgggccattcaattataggatcatgtatta

SEQ ID NO: 157615 - DNA, 418 bp, Homo sapiens
caagtctaatatagaaatatcctatactatggtatttatcttttatgtgtgtttttatttattcctgatttcttgggtttgaaattcttgttctcaagcatttgaatatcttactgattccatttttaatctctctatatttaaatcatttctcacgtgtatgacaggmaacagaaagttggactcacatgagccacctgtagagtgatcatgaaattattgtctgcatgagaatacttttgagggtgacagggacctctgttaataattttgctgagacaatagacataaactgggacagccaagggcagaccaaggtgcatggaactctcaacctacagggacacttctaggtcttccctcccccagcattcccacacaccatgaaatgcagagctgcatttctgggatttcctaa

SEQ ID NO: 157616 - DNA, 479 bp, Homo sapiens
gaaatgcttcctgatttcctcatggtgtgtggtctcctttgttgcagcaagtaacacaggcaaatttgttccactgcagatgtattccttsgcagttttgattgacaggcaatgataccaccaacagctacactgagacatttgatccaaaaatgatcaaaagccagtgaatacagaaaaaaagtgagaaacagcaataataattttcacacaccagacatgtgccagaaggtattttcacatttgcctttatctcacacatcaattctatgaaagcgttctcattagagtaattttatagctcaacacattaagctcagagagtataaaaggcttgctcaaggtaattttcatatcacatctacatttgcatatattgtatagcatttttagctatgaaatgctaaggctaaaattcaattttaggtttccccagctctcaaatctttccctctataacatgatacctccaaatacta

SEQ ID NO: 157617 - DNA, 353 bp, Homo sapiens
aaataaattgtcctgcataatgcagaggaatctaggatttggccagaagtggcttccagtgactggaagtgggggtggggtctcttgagcagtggaggaatgaaagcgagggggagcaagagacagtgccccacagaagggcagtgggcaggggccsgggaagaagcatagtcagcaagaaattccttgtggcagaaatgacaacatgatggcagtaactgtgacccagtgcttccagttgtcccaaacctcagtgcaagtctgtgacatgctgcgtcttgagttggcagtgtttggagggcttaaaggaaaacaggctgcctgcggtgcagggtgaggaggagagaacagcc

SEQ ID NO: 157618 - DNA, 515 bp, Homo sapiens
aaatttattgacaaagtttgtttataatatccccattacctgtttactctctgcagcttctgtaatttgccattccttatcttttacaccttctctcttatctcctgattaaggtttcaaataaccaactgatatggtttggctgtgtccycacccaaatctcatcttgaattcccacatgttgtgagagggaccctggtgggcagtaattgaatcatggaggcaggtctttcccatgctgttctcgtgatagtgaataagtctcatgagatctgatggttttataaggtggagtttccctgcacaagctctctgtctgctgacatccacgtaagatgtgacttcctcctccttgccttcggccatgattgtgaggcctccccagccatgtggaacttaagtccattatacctcttttgtaaattgcgcagtctcaagtatgtctttatcagcagtgtgaaaaaggactaatacaccaactttgactttgttgatctgttttctgtttcatcaat

SEQ ID NO: 157619 - DNA, 615 bp, Homo sapiens
caaatttattgacaaagtttgtttataatatccccattacctgtttactctctgcagcttctgtaatttgccattccttatcttttacaccttctctcttatctcctgattaaggtttcaaataaccaactgatatggtttggctgtgtcctcacccaaatctcatcttgaattcccacatgttgtgagagggaccctggtgggcagtaattgaatcatggaggcaggtctttcccatgctgttctcgtgatagtgaataagtctcatgagatctgatggttttataaggkggagtttccctgcacaagctctctgtctgctgacatccacgtaagatgtgacttcctcctccttgccttcggccatgattgtgaggcctccccagccatgtggaacttaagtccattatacctcttttgtaaattgcgcagtctcaagtatgtctttatcagcagtgtgaaaaaggactaatacaccaactttgactttgttgatctgttttctgtttcatcaatttctgctcattattcccttcaaattggggtgggggaactattctgttatttatattcctgatacagatatttattgatttttggcttaatgaatgcatt

SEQ ID NO: 157620 - DNA, 515 bp, Homo sapiens
aaatttattgacaaagtttgtttataatatccccattacctgtttactctctgcagcttctgtaatttgccattccttatcttttacaccttctctcttatctcctgattaaggtttcaaataaccaactgatatggtttggctgtgtcctcacccaaatctcatcttgaattcccacatgttgtgagagggaccctggtgggcagtaattgaatcatggaggcaggtctttcccatgctgttctcgtgatagtgaataagtctcatgagatctgatggttttataaggtggagtttccctgcacaagctctctgtctgctgacatccaygtaagatgtgacttcctcctccttgccttcggccatgattgtgaggcctccccagccatgtggaacttaagtccattatacctcttttgtaaattgcgcagtctcaagtatgtctttatcagcagtgtgaaaaaggactaatacaccaactttgactttgttgatctgttttctgtttcatcaat

SEQ ID NO: 157621 - DNA, 476 bp, Homo sapiens
ttaactatcagttctcgcttcacttcttcagctgctttctgactatacattgagtatactatttttgttctggcactttaaagaaaaataattgggaacaaaatttcaagattaaaatgatacaataacacatttggaagaaagcactgaattagactagaagacaatgaagaagaatccagtcaggaggaaattccccatggaagttcctgcgaaggggcatcagtgaggtcaaaagcagaaggcaggaggaggacaagttgtggagaagagggtgacctttaacacacccctacattcccaaacttggtctctttgtgtttgttcacttatttatttgtcttaaattcttcactamtctatcacatataagagtaaggtaccctgtgtgtgaacagggatgaactacaagaaatacaactacaggactactctgaagctgcaacagtcccaactttgatatcaacaataattca

SEQ ID NO: 157622 - DNA, 525 bp, Homo sapiens
caaaaaaaagttattatttgtacaattaagctctgctttctatcagcacctgcagtaatcactcatgaactcagtctgtactaaatyggtatttgttgtacaccaacaactattttaaatctttagaaagatagaaaatgatcagctttggcccttaccctttaagaaagataagtacaaaaccatgaagagctttaactataatcacttaaaagactttgtaattcattattttagggccactcaataataaaggctaaaattatcacagtggctatactccaacataacatgttacctgtcttgagcagatcagtgatgccataacacacatgtgtggtgtcaagaagagttttagtctcataattaaaataccaagggctgtatatgctaacaattgcaatgcatggtaaaccagctgaaagaaagaagaaaatgttttttactcctactgtttgtgaagtttaagaatactaagctggcaatatgcagaaaggggtatgttctccttagtaacaaaaaata

SEQ ID NO: 157623 - DNA, 598 bp, Homo sapiens
caaggggatggcactaacccattcatgagggatctgcccccatcatccagacacctcccaccaggcctcatctccaacactggggattacatttcatcatgagatttggagcggacaaacatccaaaccatatcagtaggatgtctgacattcatcatacgatgtctgagtgaagggaggtttaagggcttattttgtctccctggatagtaatggaaaatgtatatctgaaagagatgtctgaaaaagaaagtttaagtgggtggctagcacacttctggtttgctagtgggctttttgagctcagttctcatttgagtttggagatggatttgtaggggctctgggatttttcccctgtagtctgtctataggagcaaagyggaagattttgattgatgcttctttggggaaagctggacaaaaggatcacagatcaggggagatgacaggccaaagtgatgttccttggaatctaggctagaaacagaggagaaaaaaacagagtgagggaaaagggacgattcactttgcaagggctacaggggtggacggctggattccagttaaagcaggaagtggaagaaggcttcagtaa

SEQ ID NO: 157624 - DNA, 598 bp, Homo sapiens
caaggggatggcactaacccattcatgagggatctgcccccatcatccagacacctcccaccaggcctcatctccaacactggggattacatttcatcatgagatttggagcggacaaacatccaaaccatatcagtaggatgtctgacattcatcatacgatgtctgagtgaagggaggtttaagggcttattttgtctccctggatagtaatggaaaatgtatatctgaaagagatgtctgaaaaagaaagtttaagtgggtggctagcacacttctggtttgctagtgggctttttgagctcagttctcatttgagtttggagatggatttgtaggggctctgggatttttcccctgtagtctgtctataggagcaaagcggaagattttgattgatgcttctttggggaaagctggacaaaaggatcacagatcaggggagatgacaggccaaagtgatgttccttggaatctaggctagaaacagaggagaaaaaaacagagtgagggaaaagggacrattcactttgcaagggctacaggggtggacggctggattccagttaaagcaggaagtggaagaaggcttcagtaa

SEQ ID NO: 157625 - DNA, 595 bp, Homo sapiens
gaattctttgctgggtgaagccaagaaacttcctgggttaagccccaattttggggctcacctgccctgaatcatttagagccctcataaggaaatgagcacccagagaagtggcgaaatctaaatgcttttatattaagttgaataacgagaggcagttgtagaaaagtgactaaattatgtgtggatgctacaatatatatatacatacatatatatacacatacatatatatacacatacatatatacatacatatatacacatacatatatacatacatatatacacatacatatatacatacatatatacacatatatacatacatatatacacatatatatacacacacatatatatacatatayacacacacacacacacacacacacacacacacacacatatatatatatatatatatatatttgtttttttttttttttttttccgagatggagtcttgctctgtcacccaggctggagtgcagtggcgcgatcttggctcactgcaacctccgactcccaggttgaagcaattctcctgcctcagcttctcgagtagctggggttacaggcacctgccaaaaca

SEQ ID NO: 157626 - DNA, 595 bp, Homo sapiens
gaattctttgctgggtgaagccaagaaacttcctgggttaagccccaattttggggctcacctgccctgaatcatttagagccctcataaggaaatgagcacccagagaagtggcgaaatctaaatgcttttatattaagttgaataacgagaggcagttgtagaaaagtgactaaattatgtgtggatgctacaatatatatatacatacatatatatacacatacatatatatacacatacatatatacatacatatatacacatacatatatacatacatatatacacatacatatatacatacatatatacacatatatacatacatatatacacatatatatacacacacatatatatacatatacacacacacacacacacacacacacacacacacacayatatatatatatatatatatatatttgtttttttttttttttttttccgagatggagtcttgctctgtcacccaggctggagtgcagtggcgcgatcttggctcactgcaacctccgactcccaggttgaagcaattctcctgcctcagcttctcgagtagctggggttacaggcacctgccaaaaca

SEQ ID NO: 157627 - DNA, 595 bp, Homo sapiens
gaattctttgctgggtgaagccaagaaacttcctgggttaagccccaattttggggctcacctgccctgaatcatttagagccctcataaggaaatgagcacccagagaagtggcgaaatctaaatgcttttatattaagttgaataacgagaggcagttgtagaaaagtgactaaattatgtgtggatgctacaatatatatatacatacatatatatacacatacatatatatacacatacatatatacatacatatatacacatacatatatacatacatatatacacatacatatatacatacatatatacacatatatacatacatatatacacatatatatacacacacatatatatacatatacacacacacacacacacacacacacacacacacacacatatatatatatatatatatatatttktttttttttttttttttttccgagatggagtcttgctctgtcacccaggctggagtgcagtggcgcgatcttggctcactgcaacctccgactcccaggttgaagcaattctcctgcctcagcttctcgagtagctggggttacaggcacctgccaaaaca

SEQ ID NO: 157628 - DNA, 525 bp, Homo sapiens
accttcattcaataacacttcctggaagttgcacacaccagcattatttataatgytattggccaagacacacctagctgctagaaaaagttggaaaacatctttattctcagaagttaagtgtccagccaaaaacaggaggttctaacactgcagaagaaagggaaagtatattggtggacattatcagcctctcctacattggtttttgcatatctataagtttatatccataaacttagaaatgacatcaccattacccaatttctgagagtgaaggaaattaaagaagttttatagtatgaggagtgaatcagtctctctgtctgtctttcttctatcatacctttccaacaaagacccacattttgaaagacttaatccttggtgctctttactccttttttttcagttgaatctctcaataccagtatacaggaggtaataattgcaagaatcataagttgctctttttctcttcttacatgtgtttcctcatagcctactactgaaagcaatttgtaa

SEQ ID NO: 157629 - DNA, 551 bp, Homo sapiens
ctctaaactacccatggggagattccaaatcttgtaaaaaagaaactccttactatgtctttgaagcacctgagaggttacctttggcaaagctcaaaagccagaaatattggctacttgatgtggctaaagtcagataataaaagtttaaaaggatttattttttttaaagagcactatggttaaacatcagcttaattaaaattggataaacaagttacaggaatatttaaaaggcctttatgtttttctcttcttggatcttgtttttctggaaaaaggtttttttttttttttttttcagtcagctgaatcatttttctccctttttttttttttttttttctcagtcttgccactcttaatgcacacatgaraggtcctaagataacttctggtagtggtagcctgggactccttgggaaaaacagaggaggagccgcagaactcgttttggaaaaaaaaccctgttttcctcatgaaaccctggaaattaaaagcagatagattcctcccaatatctaagactctgttctgttttgcttcgagtt

SEQ ID NO: 157630 - DNA, 393 bp, Homo sapiens
ctctcgcctctgaagagagtattaaagcctaaactgcttggcccctctccaagtctcatacattgtatatggctcctaactccatatgtgcattaaataaatcttgtatgcccttttctccttttgtcatttcatgttcagtgaacattagagggcagaaagaatgctttcccttggccyctacactgccaaatgcatctggtggtttagaacaggctctgaggtctactcaggtgtctagggcttgaactggctcagggctcttctatatgaagcttaatctgcaggctttagattttttttttgccagccagcggagacttgctgccagctaccccttcattctggttatgcttgcctgaaggttaagatatgtaaaagaccgcagtcttg

SEQ ID NO: 157631 - DNA, 597 bp, Homo sapiens
gagtcatatgaattatattagatcaaacacatgatttcacagttaatttgcatagtaaatrttagctattatcattgtcattactgactagcaatacctctgtcaaaacttgtgatatttagacattaaacatattttttcagaacaaaaaaacacagctataccaccacttttctgaaagagactaaaaacaaagtaagacaatgagaaataagccctggaacctatagtagcaatcttagggaagctgggccagtgaataacctcagaagagagaacacaggaatctccgcatgggatttggggagaggtgaagttgagagaactgagcctgatcatagctacttagagacatactaatcccggtgactttcttttctctggaacagtgatttctcttctctggaacagtgatcaaggggagaatcaacatcggggagccactgtattcaacgtgagcatcattatcactggatctgcaaccagtcacatcaaacctgaagaagaatgttcagagcatgacagtaccaagcctttatttaacaccctttgaatactaagaataaccattccatcagccagcatggaaagagaatt

SEQ ID NO: 157632 - DNA, 597 bp, Homo sapiens
gagtcatatgaattatattagatcaaacacatgatttcacagttaatttgcatagtaaatattagctattatcattgtcattactgactagcaatacctctgtcaaaacttgtgatatttagacattaaacatattttttcagaacaaaaaaacacagctataccaccacttttctgaaagagactaaaaacaaagtaagacaatgagaaataagccctggaacctatagtagcaatcttagggaagctgggccagtgaataacctcagaagagagaacacaggaatctccgcatgggatttggggagaggtgaagttgagagaactgagcctgatcatagctacttagagacatactaatcccggtgactttcttttctctggaacagtgatttctcttctctggaacagtgatcaaggggagaatcaacatcggggagccactgtattcaaygtgagcatcattatcactggatctgcaaccagtcacatcaaacctgaagaagaatgttcagagcatgacagtaccaagcctttatttaacaccctttgaatactaagaataaccattccatcagccagcatggaaagagaatt

SEQ ID NO: 157633 - DNA, 571 bp, Homo sapiens
taataatccataaatatctacccagtagatcatttagcagatgagccataactatctatttaccctaaatcatggaagaatagtggttatattgactctagttaccctcttacatatgcatctccgtacttgttgctattcataatgatgcttctccagtttcagcactgttcctgccacagtttttatgtcctttgattttattacaatgtagctcagacccctgggcaaataactcttgckggatgtgatcagattaagagatcagtagcatatctccctacattagcaattctttaaaaacagtccctagatacttagcccaggggtgaatataaattcaataataattcttctagaaaaggctgaatgttttcacgataatttctgaatatagttggaccattttattgtagaaattactaggtgactttaactgataatgatgcttaattcttttcttttctctgcagcccagctaatcttaggacaaaagataattcctttcaaagaccagacagctgttgtccatctgatttatggacaggatgtttttgttttgtaaaaaaat

SEQ ID NO: 157634 - DNA, 571 bp, Homo sapiens
taataatccataaatatctacccagtagatcatttagcagatgagccataactatctatttaccctaaatcatggaagaatagtggttatattgactctagttaccctcttacatatgcatctccgtacttgttgctattcataatgatgcttctccagtttcagcactgttcctgccacagtttttatgtcctttgattttattacaatgtagctcagacccctgggcaaataactcttgctggatgtgatcagattaagagatcagtagcatatctccctacattagcaattctttaaaaacagtcyctagatacttagcccaggggtgaatataaattcaataataattcttctagaaaaggctgaatgttttcacgataatttctgaatatagttggaccattttattgtagaaattactaggtgactttaactgataatgatgcttaattcttttcttttctctgcagcccagctaatcttaggacaaaagataattcctttcaaagaccagacagctgttgtccatctgatttatggacaggatgtttttgttttgtaaaaaaat

SEQ ID NO: 157635 - DNA, 574 bp, Homo sapiens
tatcattaacctctggattcgtttccccatctgtaaaatggagtagatcattaattttattatcagtatgtgctcactgtatgtcaccaccattatagattgcataggtagcaattatactcaactaaatgcaccaagttgctgactttagttcaaaaaagaarttttacatttacattttcttgaaaacatgaattatgtttttttttcccccagcaatcaggccaagtggaagaaaacaggtaaagaatcttgatggtttcaactcaaaaatgaatttgagtcactcatgtactggtaaagttagagattaaattctgtgtgacactaaagagtggattacttttcactagagaagatgtaagctgttaaagttagaatatcacaaaggaatttgttgcgaataaactagctggaatacattcataaagatgagatttaataaaaaacataatttgtgcagaagagaaaggagaaaagcataagttgtacaaaaggggacctttactccagcaatgagatagagaaaaaagagagggaaagggagaggaaaaggaagaccagtaggtgggtg

SEQ ID NO: 157636 - DNA, 574 bp, Homo sapiens
tatcattaacctctggattcgtttccccatctgtaaaatggagtagatcattaattttattatcagtatgtgctcactgtatgtcaccaccattatagattgcataggtagcaattatactcaactaaatgcaccaagttgctgactttagttcaaaaaagaaattttacatttacattttcttgaaaacatgaattatgtttttttttcccccagcaatcaggccaagtggaagaaaacaggtaaagaatcttgatggtttcaactcaaaaatgaatttgagtcactcatgtactggtaaagttagagattaaattctgtgtgacactaaagagtggattacttttcactagagaagatgtaagctgttaaagttagaatatcacaaaggaatttgttgcgaataaactagctrgaatacattcataaagatgagatttaataaaaaacataatttgtgcagaagagaaaggagaaaagcataagttgtacaaaaggggacctttactccagcaatgagatagagaaaaaagagagggaaagggagaggaaaaggaagaccagtaggtgggtg

SEQ ID NO: 157637 - DNA, 435 bp, Homo sapiens
gaatgactactattgagcaagggctttctttttcaggttataaaatgttctaaaatttgttataygcacaattctatgaatatactaaaaatcattgaattgtacacttaggtagctgaattatatggtatgtgaattatatctcaataaagctgttattttaaaaaagctaagaaaaaaagatgcagagaggcatattcttttctcttgctatcccctctacctgaaatgatcttccctgtttatctgtgtggctcactgcctcattgccttcaaatgttacctttcagttacgcctgccttgataactaatctaaatgtcaaaaatttcttctttatacttactactaacatccaaatatttgacttattttcatatttattgtctacttccttatgaagtgaggaatttttgtttgtttgattgcttgctat

SEQ ID NO: 157638 - DNA, 435 bp, Homo sapiens
gaatgactactattgagcaagggctttctttttcaggttataaaatgttctaaaatttgttatacgcacaattctatgaatatactaaaaatcattgaattgtacacttargtagctgaattatatggtatgtgaattatatctcaataaagctgttattttaaaaaagctaagaaaaaaagatgcagagaggcatattcttttctcttgctatcccctctacctgaaatgatcttccctgtttatctgtgtggctcactgcctcattgccttcaaatgttacctttcagttacgcctgccttgataactaatctaaatgtcaaaaatttcttctttatacttactactaacatccaaatatttgacttattttcatatttattgtctacttccttatgaagtgaggaatttttgtttgtttgattgcttgctat

SEQ ID NO: 157639 - DNA, 541 bp, Homo sapiens
aatgcctgggagggaagaagacaatagtgagtttgagaaagaaataaccctaaaactyaaagtataataaaaaaaataaaataaaataaaataaaatggggaggcatgaataatccaccccttgtttagcatatcatcaagaaataaccataaaaatggacaaccagcagccctcgggctgctctgtctatggagtagccattattttattcctttactttctcaataaacttgctttcactttaaaaaaaaaaaaaaaaaaagaaagaaatatccacatcattgaagatgagaagggaccttttaagtacacaggaaataaacccaggatgattagaagagaaagagcaaaggtgaggagctcaagtggaggtttgagaggttagcagaacatggattggagggctttttacaacaagtttgaggattctgaattgatgaaatcgatgggagtttttaaagtgagagaacatcaaatttgcatgtttcaaaggtcaatcctgctgcaagatgaaagatagatggtaggaaatcatgggat

SEQ ID NO: 157640 - DNA, 588 bp, Homo sapiens
gtttggtctttctggtgaccagcccccatcctgatgccattagaggccccactttgggtcaccccattagcataaactcagctgtgtttgaaggggctccttatgaataacaaaagacattcctatcgctcatgaaattctagggttttaggagatctatgctaggaaccaaggctgaagaacaaatatgttttttagtataccacagtctgacttctggggagggtgaaatattactcagattgtcccttcgcaaaccatcagtaagctttcacagttgtttgctgttccatcagttgctaattgttttatgttttactacttaatttcacttttggctgcagagctttagtataatggctatgaaaatacttggaaaaatgtaaaagcaccttctggctacaaagttttattattacttgagttatgttgaagaacatttccccygtagagacactaaagaagcctgcttgtgtttgtgtcctcagtctcttacccaagcaagagtgttacctgaaagctaccttctaaagctgtttctctttaactacatgatttgcattcctgaagttgatgattacatatggt

SEQ ID NO: 157641 - DNA, 342 bp, Homo sapiens
gtacccagattcataaaaaaaacttcctctttatctatgaaaagactcagacagcaacaccataataatgagagacttcaacaccccactgacagtgttagagatcattgaggcagaaaactaacaaagaaactctgggcttatacttgacatttgatcagttagacctaatagacttctttagaatattccatyccaaaaccacatagtatacatttttgtcatctgcacacatggaacatattataagattgatcatatgctcagtcatatggtcaatttgggatgcagctaaagcagtgttaagaggaaagtttatagtgctttcaaacttcatcaaga

SEQ ID NO: 157642 - DNA, 342 bp, Homo sapiens
gtacccagattcataaaaaaaacttcctctttatctatgaaaagactcagacagcaacaccataataatgagagacttcaacaccccactgacagtgttagagatcattgaggcagaaaactaacaaagaaactctgggcttatacttgacatttgatcagttagacctaatagacttctttagaatattccatcccaaaaccacatagtatacatttttgtcatctgcacacatggaacatattataagattsatcatatgctcagtcatatggtcaatttgggatgcagctaaagcagtgttaagaggaaagtttatagtgctttcaaacttcatcaaga

SEQ ID NO: 157643 - DNA, 632 bp, Homo sapiens
aatagcctcttagctgttcttcctattaccatgtttaatatttatccacagcccattttctacacagcaaagttagcattttaaaatacaaatcaaaccgtgtcattacacttccttaaaatctccaatgatttccattgcrtttagagaacatccaaatccttactatggctgaaatgcctgtcgtggtctagcccctgccttcctctaggaccagatttctttctgttcttaaaacactctaaactccttcctataccagagcctttgcatttgctactccctctgcttacaatgcttttgctctgatccctcacaaggctagtgtcattttatcattcaggtcaccctcaatgtcacatcctcaggggagccttccctaatcaccctgtctcctggaatgctgccattttcacccaaggcattcttgctacattatcccattgcatatcctgtataatacttgagactctcagaactagtttattcaattatttattgtctgtcttccccaactagaagacaagtccctgagggtagggatttttttctatctcactcaacattgcatttcaatgttaaaataatgcctagcacagagtagttagctactcaataaacatttctggagt

SEQ ID NO: 157644 - DNA, 604 bp, Homo sapiens
tcctattaccatgtttaatatttatccacagcccattttctacacagcaaagttagcattttaaaatacaaatcaaaccgtgtcattacacttccttaaaatctccaatgatttccattgcatttagagaacatccaaatccttactatggctgaaatgcctgtcgtggtctagcccctgccttcctctaggaccagatttctttctgttcttaaaacactctaaactccttcctataccagagcctttgcatttgctactccctctgcttacaatgcttttgctctgatccctcacaaggctagtgtcattttatcattcaggtcaccctcaatgtcacatcctcaggggagccttccctaatcaccctgtctcctggaatgctgccattttcacccaaggcattcttgctacattatcccattgcatatcctgtataatacttgagactctcagaactrgtttattcaattatttattgtctgtcttccccaactagaagacaagtccctgagggtagggatttttttctatctcactcaacattgcatttcaatgttaaaataatgcctagcacagagtagttagctactcaataaacatt

SEQ ID NO: 157645 - DNA, 459 bp, Homo sapiens
tcatccctcttccttcatccttcaccttgccaattgctgactccaagtagggcagccagttctagaagtcatttgtcatttgtctattgtccttcaataaactctgtcagccagtgatgctaaagaagctctgctaatgaatggtcagcaatgtcagacccctgcctgctctgcagacaccagcaagacttgttgctcttctctaggaggtttgagtccatttccttttaccacaaaggccatgatgctttkcacagagcagaaactctacagacatcctgaaaacatacataactctatattccatttctcccgcaaaccacattatatgatgcatcagacctctgagagatgaagtcaactgacagatttccaaatcaataatataaatgatgaagaaatttatattatagaaatttacatttctagaaatcaaaattttaatctcaaaatataaaa

SEQ ID NO: 157646 - DNA, 599 bp, Homo sapiens
aagtcttaaaaagaaatgtcagttaaatccagtgcaaatctgacattctgaaagcttgttaacagctcatccagtgctgcctccaagatcagaaacctctgagaaaactaaaattcatcagtagccctgacatatcagaaggaagctaataatgttgggatgtactgctggtcaacagtcccctggtttctcttaaatcattcaaaatatgtcactatcagtcactcagccagccttggagagccacatgacagaactggctctgcttgcagctgttgattcaaacatgggtttcatggataagcaaaatgtgtgtttcaataatgtgaagctcttgttcaaaatgaaaagaaagccagaatttcatttgctgcaatgcttcactcactgcccctggatacctccaaacatttgatgtggcagagctgaattttttaaayatccagttttatacacatccttcatctcctttcacatgtcatcaggttttaacttccacatgaaaatgctttctcctgggacatgaagttgtcacacctttaattgccggtatgctggtttgcagagttgtttctgcagtactaataaactgccacagg

SEQ ID NO: 157647 - DNA, 283 bp, Homo sapiens
aggaaatcagaatatcaaagggatgcctgcacccccatgtttatkacagcactaatcacaatagcaaagatatgaaatcaacctaggtgttataaacagataataaatggataaagaaaatgtggtatatagacacaatggatactatttggccataaaaagaataaaatcatgtcatttgcagcaacatggttggaactcggggtcattatgttaagtaaaataagccaagcacacaaagacaaatatcaaatgttctcattcacattaagaactaaaaaag

SEQ ID NO: 157648 - DNA, 609 bp, Homo sapiens
gacaccctcagttccttcactttatcattacacattctatgcatgtaaaaaaatatcatatatatcccaacatatgtacaaacatatgtatcattaaaaaaagaaataaagataaaatataaatcattacaaaaactgtcaagaaaaaagtggacaaaatgggaaatgataaaaggaaagagcatactttagactaaatagacataggaagcctctctgaagagaaaacgttaagctggagtctaccaaaattataagagattgaacatgtaaaactttaagaggtgggcaggagtacttggacataatttyttagctgcaagcgtatatgcaaaggtcttgaagcagaaagccagtaaacttgttcaaagaactaaaaaaaaaaaaaaaaaaggtaagtggctaaagatgagtatgactctcattctacaaagctcttctaagacaggaaaaccagaaagatttttcctttctaacctaatccttaatttatataacccctcaaaatataaaacaaaaaaaactgtaagttatattaccagtacagaaacagttaaagataggtttgacaccaatggatatctatttatttaaaatagtaaattccaa

SEQ ID NO: 157649 - DNA, 504 bp, Homo sapiens
cataccaaatcttttcttaaaatgctttgatattgcaacaaagcaccatgttttcgccaatttgttgtcttgatgtatttctgccaacctgctctggatccaccgttttccacatagtcaatagaatgcctcatccatgatattttttagcaggtatattttcaatttgcttgccttagccatgcctcttcacagatctgttccagcagctctaccaagtgrgcagtgggtcatataatcctgccctttgggtgacccatcaaattacatgtaattagaagagaaaacaagatggagaaaactgctgctttgattcctgggatttccagctctggactccttatgagtcctggcattatgttctggcattatgtcctgccttgtatacccctagttaatacccctctttacttaacctgatttgaatagctttctgttgcttacaactaacaaccccaactgaggaaaattcgccaaaattcacccctttcttagtataacaca

SEQ ID NO: 157650 - DNA, 596 bp, Homo sapiens
gataagagagaacatttataaggataccaccccaatataaattggcctatgattgagtctgatgactagagamgactggatggaaggtgactacagggtctggtagaagatggaccaaccaaagggaagatcagagaaaacatggaattggggaaaagtttacttttagacttgttgagtttgagattgtatcaggattttaaatgtgctatgtctgttagactatagcacaagcgagaaaaaaagaaaagaaatattaatcttggatccaggaacagcaagatgatagctttatgcaatcaaatagatgaatcttcatgggaggaaattcatagaaaagatatcagaggttcagagaccgtgccttggggaatgccagtaattaataacagccagttatgcatttttataaaggtatagtcttgccattcattttctttgatcctcataagggctgggtggcatggatatgtaggtacgtttttatctattttatgaataccagaatcagttataaatcaccttgctacagagtaccagagataagattcaaaacttacgtttcctacctctaaattcagaattcttaatactgt

SEQ ID NO: 157651 - DNA, 585 bp, Homo sapiens
aacaaacaactcttaaatttcaatcttcattgcttaacacaataaaggcttattttttcccatgacatcatctaatgcagggtggtcgtggttgttaatttctctgtaactctgacaagctcagtgtagtgcttccagattgctctggggccatgcagctagcagttgaggcaggaagaaacatagcacagacagggcaggctctgtctcaattgacttggtgcgtaaatgatgcatcacttttgctcacaattattgtcaaaagctaggcacttgttcccttttcccttaaattcaagagtctgggcaatctggttttgtgagccatggagcatctctgccattatacactggaagaaaatacacaaaattattaacatctctagtgagatttttcatgattttattttcaacttcttgctattattttctgaattttctaaaataaatgtaaattaagttcataatgagaccaaaactataaaaattaaaaacgtggtactttatgcasgcaagctgctttcctccctcaggaggtgcagacagcttggggaactcactatagtgtacatttcaatataacct

SEQ ID NO: 157652 - DNA, 596 bp, Homo sapiens
atttcctttccttctccaaatttaaaattactgtattagagataaataggtgcaaagaaggaaaataattacaacacatactataatttggcatttcctttctaggaactcaaattaaacatataacctccgtctatgtatgtacatggatatttccggttagtgtgattgtatttataagcattctaatatttcaagacaaatgaaataaaagtagtatgtttgtggaaaaaccagtatgtttgtggaaaaacctaaggactcattctgagagattttggaaatattttgctgctaagaacaaagtatayctcaaatttaatgatgtcaactggctactgagaggtatgagctgtgtggtgattttgtaatttctttagcatgaagtaacaatggctaatttttaaagaaagtaaataatttttctaaaatttttcagtaatgaggaataaaatgttattttgcattttacacagggatttcacatatattattttaattaattgtgcccaaaagtttataaagtgaacagaaaagttattactattattattattattattattattattattattattcttattatgtctgtt

SEQ ID NO: 157653 - DNA, 596 bp, Homo sapiens
atttcctttccttctccaaatttaaaattactgtattagagataaataggtgcaaagaaggaaaataattacaacacatactataatttggcatttcctttctaggaactcaaattaaacatataacctccgtctatgtatgtacatggatatttccggttagtgtgattgtatttataagcattctaatatttcaagacaaatgaaataaaagtagtatgtttgtggaaaaaccagtatgtttgtggaaaaacctaaggactcattctgagagattttggaaatattttgctgctaagaacaaagtatacctcaaatttaatgatgtcaactggctactgagaggtatgagctgtgtggtgattttgtaatttctttagcatgaagtaacaatggctaatttttaaagaaagtaaataatttttctaaaatttttcagtaatgaggaataaaatgttattttgcattttacacagggatttcacatatattattttaattaattgtgcccaaaagtttrtaaagtgaacagaaaagttattactattattattattattattattattattattattattcttattatgtctgtt

SEQ ID NO: 157654 - DNA, 615 bp, Homo sapiens
ttatatagtgggtaattgtggaatacatataagtgaaatgaatgacagcaatatgatgaggacaggagtgtaaaattgctaatactctggtataaagttcctgtactactcatgaagtatcatagtgagagtaaacttaaatttcttataaatgcttattacaagccccagtaccctaaaatattttaaaagtataattaatatgcttaggraataaaatggaattgtatattatctgcaatcgaaactggaaagggtagaaaagagaagaaaaacaaaagaaatgaaagaactagtataataagtagaaaagctacaaacatggtaaatattaactatatcaataatacttttcaatgtgaatggtctatatgcaccaatacagaagctgagatcaacaaagatttaaagaaaagatcaaactctatgttgtctgcgagaaatccactttaaatataaagacaaagataggttaaaagtaaatgaatgaagaaagatatatcgtgacaacaccagccaaaataaagttggagtagtttattacactaagataaggaaggcttccaaataggtaatattatcaaggataaggagaggggcatacaattatcaagg

SEQ ID NO: 157655 - DNA, 506 bp, Homo sapiens
gacaaatccccacactgccttccaaaatggttgaactaatttacactcctactaacagtgtataagcattccattttctcctcaacctggccagcatgtgtaattttatgaatttttattaatagccattctgactgaggagagacagtgtatcattctggttttaatttgcatttatctaatgttcagtgatgttaagcttttttatcatatgcttgctagccatatgtatgccattttttgaaaagtatctgttcaggtcctttgcccaccttttcttgtttttttttttttttgtaaatttgtttaagtgccttayaaattctggatattagacctttgttagatacacactttgcaaacattttctcccattctgtaggttttctgttcactctgttgatagtttcctttgctgcatagaggctctttagtttaattagatcccatttgcctatttttggttttgttgcagttgcttttggcatgttcattatgaaatattt

SEQ ID NO: 157656 - DNA, 611 bp, Homo sapiens
aaaaaaaagtgcaaaatgtgtataaaaataccaaaaaaaggcaacagttatggactgcatgtttgtgccctccaygaaaaaatgtatatgtcgaaactctaatctccaatagaatgatgttcagaggtaagacctttgggagataattaggtttcaatgaggtcatgaggttggagccaccatgatgtgattagtggccttacaaggaaaaaataggctagagctatttttctgtccccactctctgtccccactatgtgaggttacagcaagaagatctgcataccagaatagagccttcagcaggaatccagtctacaaacaccttgatcctaactttccaggctgcagactgggaaagatgaattactattatttaagctacccagtctacaatattgttattatagcagtccaaactggttaagacagaaatcttaccttaaaaagataatttctgtactattttgaaatatttacttattttgaattttttttgttatttttaatcctttttctaaggatataaaatattacatttatatatctggtgaaatgccatattttgattgtgtattctgctttgcattacacttaacattatatcataa

SEQ ID NO: 157657 - DNA, 575 bp, Homo sapiens
ttagcacattttttaaaaatgcattttataaatgcacctattaatatatatgatagaggtgggctgcagattcatctcagtgcttcctagcagtaaaagcaaagaatgaaataaaaccagtgaaaacattcgtggtactcataagagttctttttaaacttaggtacagatagctttcttgataccagagatctgaaaagaacttcttccataaattttcattaaaatcatactatgagatgtaacaacccwcttccttagtgatacccctttaagaactttaagtagggttcctttgtttattccatgcaagctaatgtcacatgtgcgatacaattgatttaaatcaattttagaagaggctacatagtgtaagtatgcaacattctgatggtgtaatacaaagactataaaatacattcaatggcttttatagcctcagtcaatcctccttcattataatttctcaaaagcaagattttgataggaattgaacagcaaagaattcaaaattgtgttctctggctagaacttgcagtgcaaacattctgagctgctgattaagggcaaatgca

SEQ ID NO: 157658 - DNA, 575 bp, Homo sapiens
ttagcacattttttaaaaatgcattttataaatgcacctattaatatatatgatagaggtgggctgcagattcatctcagtgcttcctagcagtaaaagcaaagaatgaaataaaaccagtgaaaacattcgtggtactcataagagttctttttaaacttaggtacagatagctttcttgataccagagatctgaaaagaacttcttccataaattttcattaaaatcatactatgagatgtaacaaccctcttccttagtgatacccctttaagaactttaagtagggttcctttgtttattccatgcaagctaatgtcacatgtgygatacaattgatttaaatcaattttagaagaggctacatagtgtaagtatgcaacattctgatggtgtaatacaaagactataaaatacattcaatggcttttatagcctcagtcaatcctccttcattataatttctcaaaagcaagattttgataggaattgaacagcaaagaattcaaaattgtgttctctggctagaacttgcagtgcaaacattctgagctgctgattaagggcaaatgca

SEQ ID NO: 157659 - DNA, 579 bp, Homo sapiens
ccagagatctgaaaagaacttcttccataaattttcattaaaatcatactatgagatgtaacaaccctcttccttagtgatacccctttaagaactttaagtagggttcctttgtttattccatgcaagctaatgtcacatgtgcgatacaattgatttaaatcaattttagaagaggctacatagtgtaagtatgcaacattctgatggtgtaatacaaagactataaaatacattcaatggcttttatagcctcagtcaatcctccttcattataatttctcaaaagcaagattttgataggaattgaacagcaaagaattcaaaattgtgttctctggctagaacttgcagtgcaaacattctsagctgctgattaagggcaaatgcatattctttgacaatcagctgagtaggtttcttgtagtaactaaattgcctaatcaaggtttattgctgaatagatggtcagcacacctccacacagaggtgggtcaataaacccatattggcagagcaaagaatttcctcagacctcatcactgggtctgctccaacacactgacaaatatgcaatca

SEQ ID NO: 157660 - DNA, 580 bp, Homo sapiens
agggaggaagaaagggagtaagttggttgcatcaaaacaatttaacagagtttagaagcaatttttatttttctaagttaattcatcttccaacttagaataattaatgtctatcatttaccttcattaaaaaagggcaatgaggagctatagataaaatatacactatacttctatatactcttggaatactccaacaaaggtatggttttattctccattcgccrtatataacttttgtgtaattttataaatatgaagaaatgtatcaatggtgtttctatgttctcaatgtgggcaagtgtcactccagagttccttcatttacagatcttcatttttttacagtgctttttaaaaatgtgcataaatgtatatctttattttaataaaaatcattttctttaatgttttctatgagcaaacttaattgtaagacatcttactattttggtgctatacaggtcaatttatacaaaaaacctctcacaggaaacaaaaattgagatcatttttcatttgaaagaatcagaattttaattttgagtttctgtataacttaactgatgtcatgtgctag

SEQ ID NO: 157661 - DNA, 652 bp, Homo sapiens
gattatatttttaaagcaaagaaagaagaccacaaatattggtgtacaatgtgtcacatttctgaaactttttaataggagatttattgtctgttcaaatttgggaaaaaatgctaggaacttcaaagcttaaaatgctttgtagattcttgccgaaaggtaaccagaagataggtaacaaatactgaatattagatttagttgataaatgtttcttcaaataatgtaaagtgtttatcaaattcttttcatcctagctatgtaatgctaaatttgcaacrtttgaagttgtgggttcctagttactgaagcaaccagtctgtggtgctcagttttgtttacatttggcaaatggtgtcttcctgctttcaggaaaagaaggcttaagtaggcttatgactacctagacatcaaatggtttctacagacatcttccttcttaaatataagttagatatgtatgtaataattagaaagttgaactaaaatggtcagaacaaaatgcaggagatactagtccaatcaactcttacatatttgaaagctctcttgaggggttcacaaaatcaaaactgcaactgaattcccacttccttcacataacaccatcttggctataaaaacttagcttacttccagaaaaggatgttta

SEQ ID NO: 157662 - DNA, 584 bp, Homo sapiens
ttttggtactcaacacctggtgatactgtaataaaaacctaaaattcatggattattggttttatgacaaggcagtgagtagaaactggaaaggycccaagaaggctatttgttaaaatggaagggacttttaggaggctgttgatgagggattcaaggacagtggagaaaatgttattggaagctggagacagatgtctgttgtgatggtagtggcagaacgtttagtgaagttgttgtttgcagtcatggcaagtaaaaattgtatctaataaactggtggatcacataaagtgttgatgtgggatgtcaaaagtgcctattgtttattttagctgtatatgaaagatagggaaaagagccatatgagagaaatagaactgttaaaactttgaggggaatttaaaggatatgtagaggattcaggacagtcagttttttttttttttaagaaaggtatttctcatcctagtctcttccaacaaaatattatcaaagtaagaaatggtttcaaggcactgatctaatctatggcctctgaggccttaacaatggtacttacagctacaaggtactggccagtt

SEQ ID NO: 157663 - DNA, 259 bp, Homo sapiens
gccagtccaaagctttaaggaatgaatgagtacatcttttcctgccaaagcattttatcttcattgtatgttttcttcattaactccatttscattcacttaccagtcattcattccttgggttctttctcctcttcctctctgcccctgcattaagatgatatctctatgcctattgtattccatcaaaattttaagttacctctgctgcttcccattttgaatccttccattctcctaccaaagaggactttcagaa

SEQ ID NO: 157664 - DNA, 528 bp, Homo sapiens
tcatcttgaaaactttggctttccaaattctacaaattgcacatgcacacacacacacacacacacacacacacacacacacacacacacatatataaccctaacttttaaacagataattaaaagagggaaaaattgacactaaaataaaatgtcactcatatagtatagaaaattgcaaagcaaatcacaaaaatttattttaaaaaatactggactcctagtacaattaagtgtcccctgaggttcaggacaattggacctaggataaaaatgacttayaacagagttgttttagtacctttaacagtctacttaagcatggaaggaggtgacatgctcttacacactgtttcccacctttcgctaaacccatgaaacaaagttttaaaaaacttttagaaaaaaatgctacccactagactggcaaagtagtaagaatgcttaccaaagttcagagcagtaagaaagggaaaaggatttaacaaaatgtatcaggagcccaatcctattctctgtgtgagttta

SEQ ID NO: 157665 - DNA, 528 bp, Homo sapiens
tcatcttgaaaactttggctttccaaattctacaaattgcacatgcacacacacacacacacacacacacacacacacacacacacacacatatataaccctaacttttaaacagataattaaaagagggaaaaattgacactaaaataaaatgtcactcatatagtatagaaaattgcaaagcaaatcacaaaaatttattttaaaaaatactggactcctagtacaattaagtgtcccctgaggttcaggacaattggacctaggataaaaatgacttacaacagagttgttttagtacctttaacagtctacttaagcatggaaggaggtgacatgctcttacacactgtttcccacctttcgctaaacccatgaaacaaagttttaaaaaacttttagaaaaaaatgytacccactagactggcaaagtagtaagaatgcttaccaaagttcagagcagtaagaaagggaaaaggatttaacaaaatgtatcaggagcccaatcctattctctgtgtgagttta

SEQ ID NO: 157666 - DNA, 559 bp, Homo sapiens
attacaaacttatgtgactttaatgacctttaaaagataatgcaaacatgagaacattcctaagtacatgccatgaaaacttatatccaaatggatgttgcacttcaaagtcaccctgcaaagaagttattttatttcacaatagttcaacatagttgcagtgctcctagtttggaatttatatcagaaccagtgttcgaggagtgactctcatcctacaaagtacttaaataggccagaagtgtcacattactttgctttctttaaatttaattaaatctaacagaatacttaccaacatgggcttgtatgacaaccaatattagttatttctggagggtcctttcacagtattctctaatactaatactgaccacaagaacatgtagatcttggaaatgttatataggaaaaatatgcacaggaatcttcrcaaagagtgggattataaatactcaaaacccactcaccacatatgtgctgtgaaacaacccctccttctgctgtcagagaacaaactaaaagctctcctaagacaaaagaaccaaaagagcctgga

SEQ ID NO: 157667 - DNA, 611 bp, Homo sapiens
tcactacagccaaaaaggagaaacaacccaaatgtccatcaactgatgaatggataaacaaggtgtggtataaccaaacaatgtaatattattcagccataaaaaggaataaagtactgtttcatgctacagcatggaggaatcttaaaagcattacactaaacaaatgaagtcagacgcagaaagccacatattgtataatatcacttacatggaaattccaaaatagaaaaatccatraagaaagaaaataggttagtggttgccaaaagagatgagagaaggggaaaattaggactggctgctgaaggataagtgatgtttttggagtagaatggaaattagtgtttggaactggatagaaagatagcagcacaatatagtgaacatactaataactactagattgtgtactttaaaattatgaacttatgatgtgaattatatctcaatttaaaaaaagaagtaacagttcattttgtgctcctgcatcatagttatttgcctacattttaaacaataaaatagaagtcatgttgtccataggacctacataagagttactgaaaaaaagttcctatatgagcctgagccaggtggctacaatgata

SEQ ID NO: 157668 - DNA, 571 bp, Homo sapiens
gctaaaccctcattcaggtgcatctgccatacagggtcattctcaggctgtgcttaagttattgctgtcaggtatattgaccatacaaggctgtacagagatttttttctcttaaaaacaaaaattgctatccttaacctaataagctatctcttgacacaaatatgaattgctcaacaaatccctctacacaaacatgcatcctctatggttctcaaatacatataaagtctggagagatttccatttgtcacagctgtgtatgaaggatgtgctattggtatctaattagtagaagcgagggatgctgctcaacagcctacaccccccaaacatacataaatacacatgcacaccaaaaaatcatccagtccatatgtcatcagtcccaagcttgagaaaatctgatctaactgaagtcatgtaacaaatcaaatgtaaaagaaagtttgtagtaaaataascagtctgtcacacctgggaaaaatggacacaaggtgacttcgtttaaattttaaataactattctttcctagtatttatcttaaagacactgatataactatggtca

SEQ ID NO: 157669 - DNA, 619 bp, Homo sapiens
cttctgttcccctacatttcctgtaaattgatctagaggtttagtcagactcttgcttgattttttttttttttaacaagactacttcttaggctgtataatgttgttctcttaggaggcacataatgtctggttaggttatttttttcatgatgatagtagccattgatgattatgactagatccattaatttattgctttttgaagataaaaacttgtctgcatttctttaaatagggtctactctgtgccactcccaaaataataaaattgaagccacgctctctgctaccttatattgtccaggtaggagatcatagtaatgattatgacagctattattaagtgagctcttacggttttttatctaaatttctaacataaaggtaggcaacaaggaaagtccaacattctctaaatgcaccccaagggtaatctcacattattgcttttatttycccctcaatgtccttttagaataaagagcctagacacaggaatgagggaaagagatgctgacaattttgcagaatatccctttaatgtagttcaagtttcaaacatggagaaagtaaagaaaaacatatttgctattagaaagatatgagcaaaataaag

SEQ ID NO: 157670 - DNA, 629 bp, Homo sapiens
tgtcttagaattagctgttgaatttattatggaaaacaccttagtggaacaatgattgaaactgcatttgctatagatcaatttggacatgctaacagcattgaacatccatgaacatggaatatattccaattcatgaacatagagcrtatctccatttgtttgaattttcttttatttctctcagcactattttataggcatttatgtcttttgttatatttatttctaaatagtttgtggttttgatgttattgtaaatagaactgcttttgaatttcattttataattatttgatgctagtgtataaaaatacaattgatttctgtgtactaatcttgtgcaaccttgctaaattcactcattggtgttaatactcattttgtggatactttatgaattagcatataaataattatgtctcccacaagtagatccagttttacttctttttgaattgatacataacattcgtgtatatgtatggggtacagttttacttcttttcagcccagggctcttatttatttttcttcacttttattgtaatagctaggacctccagttcaatgttaaatagaagcagtgaataggaacattcttgccttgttcttgaccttatggagaa

SEQ ID NO: 157671 - DNA, 467 bp, Homo sapiens
ctcaaagaagctggcaaagcctggggctatcaggcccggggcagggtttccaattcacctattcccaatttcatttgaaacagcaaacacatttgccttggcatcactcaaaccgttctttctgcaatggaaggctgttttcctctcaagtctactctcckcaatgacaattaattagcttctctaaaggtgcatgatgaaaagcatgccctcggggaaaagcgatgctctagaggcaactgggttaaccaccagttcaagaacaaagtgtgtccttcttcctgttaccaaaccagagtcctggaaactcgcttttgtgccgtcagagcagctggacacaaatgcactggcggtgggcagaggtgtggctctacccactttcaaagtctgcactccaccctgcagcctttgggctgatgcaccttcaccctgggggcttcactggggtgggcctagaaggtcacatg

SEQ ID NO: 157672 - DNA, 552 bp, Homo sapiens
ccaagtaagatgctccagtctctctcttccgctgccctagcaactacatgttccagatggtgcatctacaagatggtggagcccaggtcaacctgggtccctgagttactatgtggagccaagtcctccaccaaccacagcaggtttgtaacatggtgataaataaatggtgtgtgtgtgagctgtggagatttgggggttaacttgttccagcagcataagctagcccattctgatgaatataatatagaaagaatacttgaaaagaagatggaatcttttgcattaaggtgcttctcagtagtttcctggatccaggcttccttcttcatattcattccaagcagctctcttagatctcgccttgcttcttctattggactttgttggcttccagtcacaatttatttctgatttactggcatctagatttaaaactctttttgaaagcagctggacctacrtgcattcatctcctttttctttttatgtctgtctctactgacagtcatcttcccatttcttcccctctgtccctgatccatgaccctt

SEQ ID NO: 157673 - DNA, 562 bp, Homo sapiens
gaattcgtagtacagaagcagtattacataggataccatcatggtggataagaattcaatacatccaagaatcatagtggcagcagaaatgtcatgcacaagaaagacaaatccatatcaagtaagtatctattctagtgaggaaaataatcttgtccttatccatgatggaagagatctaatatcatcaccctgttcattggtccaatgagcagcactgaagtggcttgrgaaagcagctggttgccattcacaaaaaaggtcatcttgccaagatgacttttgagcaccacctctataacagatgacatttagtgagcattcacatggaacacgaatatctccacacctgtgcccttacaaaagattgatctacatgcttcttctctaattcatagtcagtcctccctaagtccctgaacatagagccaaaccatccgccactacccgtgaatcagcttagatccataacttctggcctttctccttccaggtaaaatggacagctaagtgcactgctcaaagttctgaccattaagaagatatttcttcctaactgcct

SEQ ID NO: 157674 - DNA, 562 bp, Homo sapiens
gaattcgtagtacagaagcagtattacataggataccatcatggtggataagaattcaatacatccaagaatcatagtggcagcagaaatgtcatgcacaagaaagacaaatccatatcaagtaagtatctattctagtgaggaaaataatcttgtccttatccatgatggaagagatctaatatcatcaccctgttcattggtccaatgagcagcactgaagtggcttgggaaagcagctggttgccaktcacaaaaaaggtcatcttgccaagatgacttttgagcaccacctctataacagatgacatttagtgagcattcacatggaacacgaatatctccacacctgtgcccttacaaaagattgatctacatgcttcttctctaattcatagtcagtcctccctaagtccctgaacatagagccaaaccatccgccactacccgtgaatcagcttagatccataacttctggcctttctccttccaggtaaaatggacagctaagtgcactgctcaaagttctgaccattaagaagatatttcttcctaactgcct

SEQ ID NO: 157675 - DNA, 453 bp, Homo sapiens
aaacttattccgaatgtgtgggcatacacaggaatcaatcagccctttcctgcagctcttgtctgttcattttatatagttgcccagtttgacaagaaatccaggaaagggctgagaagtgttgtcagcataaagatgggagagaagtgatgtactaggctaataaaaggactcacaaaggtccctgaagtcataaatccttctcacgacttttaaaagctgtttcctttgtaggattgctgtgatggagrttagacagagtgccctttccatcttctcccctgcatgttggaaaccccaagctaagtgcgtgaaaggaagacaaaatgtaatacgactttctgccttaactattcttctcttccctccacgtgattatgttccagccttgcccatggagaaaggggctctgctgcccgggcctccccagccctctcctgcctgggctgacct

SEQ ID NO: 157676 - DNA, 438 bp, Homo sapiens
tataagctatgacttcttacgtcttcattgtttttgcttttctcccttcaaactttccaagatacactacctttattaccacgacgaacaactattgaatatattctstatactaggcatttatgtactttatttcatttaattctgattatagctcacatgatgtaggtattattagtcccattattaaagaaaaaaactaaaaaacaatttttcagagacagggtctcgctatatcatccaggctggtcttggacttctgggctcaagcaatttcacctcagcctccccagcctccttgggattacaagcaagcaccactatgccaccctcacctcccactctgaacttttctgccttttttttaaataaggtcaggacttaaggccaggtcagatttgactgactgccaagtttacattcctgtgtttacttaga

SEQ ID NO: 157677 - DNA, 550 bp, Homo sapiens
gtattaatgcatggctttgaagtcattagctatattcagaataagaggactatggaagaagaccatccttagtctcatttaataatagtaaattgatccaaattcaaaaatagcttyctgttgcagagaagtaaaattcttgtaaaggatttatttcaaagcagtgctaattaatccctggagctagacaagggtgtcgtttcacgctgttcctgagaaaaagcctctctcagggcaccagcatttccctcccagcctctcaggctccagggggccggcacagctgcactctggccaccacccctgggcagaacctgcagaagcttcctttctgttcctctcaagtagcttagcagacactcccaaaatggataaaaatgtaagcagacacaggataggatgtagggagaagagctcaggaattccagaactttacgaaactgaaaaattgtatgggctctgaataaagtgcatatatatatatacacacacatatatatacataaagtacatacatatatatatatatatatatatatatatatatata

SEQ ID NO: 157678 - DNA, 550 bp, Homo sapiens
gtattaatgcatggctttgaagtcattagctatattcagaataagaggactatggaagaagaccatccttagtctcatttaataatagtaaattgatccaaattcaaaaatagcttcctgttgcagagaagtaaaattcttgtaaaggatttatttcaaagcagtgctaattaatccctggagctagacaagggtgtcgtttcacgctgttcctgagaaaaagcctctctcagggcaccagcatttccctcccagcctctcaggctccagggggccggcacagctgcactctggccaccacccctgggcagaacctgcagaagcttcctttctgttcctctcaagtagcttagcagacactcccaaaatggataaaaatgtaagcagacacaggataggatgtagggagaagagctcaggaattccagaactttacgaaactgaaaaattgtatgggctctgaataaagtgcatatatatatatacacacacatatatatacataaagtacatayatatatatatatatatatatatatatatatatata

SEQ ID NO: 157679 - DNA, 458 bp, Homo sapiens
tcaaattaccaaagtcattttcacagaattagagaaacaattctcaaattcatatgaaaccaaaaaagagctgaaatagccaaagcaattctaagcaaaagaaaaaacgagaggcatcacattacctgacttcaaaatacactacaagtctatagtaatcaaaacaacatagtcctggtacaaaaatagacacatagatcaatagaacaaaacagagaacccagaaataaagcctcatatgtacaaccaactgatcttcgacagagtcaaaaaaaataaacaatggggaaaggacactccaataaatgtgctgggaaaactggctagccttaagcaaaaggtttaccayatacaaaatttaactctcttatcatatataaaaattaaccctacacaaaatccatatacaaaaattaactcaaggtggattaaagacttaaacataatacctgaaactg

SEQ ID NO: 157680 - DNA, 547 bp, Homo sapiens
tacctgttgagtacaatgttcactacttgggtgatgggttaactagaagcccaaagctcatcatcacacaatatatccatgaaacaaacctgcacatgtatcctctgaatccaaaatgtaaaaattactattactataatgttgagaaaaagaagccaccccaaataacagtacacatatattaaattccagaaaatacaatgaaatctatattgatgaaaagtggatcaatggttgtctggggattaaataaggtagggagaggatgtcwccaggttatacatatgctaaattatatttaaatgaaagttaaataatatactttgaatgtaggcagtttatgtatgtcaattacatttctataaagctgtttttaaaatataaaagaattgcataaaatataagtgctatgaatcagggtttttttttttttttggtctatcttaattgtggtatcccaagcatagacatataatgtatactcaattcaatatttctttaagccaaagtactagaaaaactggcatgtggttacagttgtcacata

SEQ ID NO: 157681 - DNA, 588 bp, Homo sapiens
gattattaaataatgaatattttaagatattgactcatatgtttcaaacatggaaattttaaacttgggtggcagagattactggctgtctgccaaatattcatgatcatcttccataaggtagagatgatattgagaaggggctgccctgttaaagcctcaggctctgctatatgatttgtgcrgactagtacaaaataaagatgataaaaatgcagacccctccttaaaaatatatgtattaagaatttcaagtggtaatagcagagcattaaaccaaacatggaacccttctaagtgtggggccctgtcctgcacaggtcacgtgaccataaagccatacctgctcagcccctgttgcatatggggtaggagttaaggaaaggatgtgattagttctcgccatcagaatgtgagcagaagtgatacgtatcacttccagccaagatgtttaagaagcaagtgtgccttctctatcctctgtcttctgccagttggatatccttgatcaaagtgatctcagatgccttgtagtgagcgtttcagagcctccatagtcgagtctcagaataactgcaacccacagag

SEQ ID NO: 157682 - DNA, 588 bp, Homo sapiens
gattattaaataatgaatattttaagatattgactcatatgtttcaaacatggaaattttaaacttgggtggcagagattactggctgtctgccaaatattcatgatcatcttccataaggtagagatgatattgagaaggggctgccctgttaaagcctcaggctctgctatatgatttgtgcagactagtacaaaataaagatgataaaaatgcagacccctccttaaaaatatatgtattaagaatttcaagtggtaatagcagagcattaaaccaaacatggaacccttctaagtgtggggccctgtcctgcacaggtcacgtgaccataaagccatacctgctcagcccctgttgcatatggggtaggagttaaggaaaggatgtgattagttctcrccatcagaatgtgagcagaagtgatacgtatcacttccagccaagatgtttaagaagcaagtgtgccttctctatcctctgtcttctgccagttggatatccttgatcaaagtgatctcagatgccttgtagtgagcgtttcagagcctccatagtcgagtctcagaataactgcaacccacagag

SEQ ID NO: 157683 - DNA, 605 bp, Homo sapiens
aaaatccagagagacaaaagagtttgccgttccactcatatcaagtctcaatctctaattctcctctctgttctaagctctgaataactttggacacatagtagatgctcaaagcacatttacccattcattattttaacaaacagtttctgagcaacacctatgtgccaggtattgggtactatggattcagcagtgaataaaatagatgaagtccctaccctcataaaacttacatttaaaaggaagactccatwaaataaatgaatgaatgaagggatgaatgtatcaggaggaaagtagacaataccaggtaactgtaaggaattttacttcccaaaaattgtcataatacatacaaaattgctatatcagttaaggctaacttatacatccattgtaggacttaactgcctttgagcagagaattcccctgtaaaggaatgtgtttcaaaccatcactcagtagacctgcaatcattcatggtggcaggggagtagtagaaagtgggagaattattcattctcttcttaacccaaaatgaaaagcttagagagatgccatttaaaagaaatccatttttgcccattaactagattgtatt

SEQ ID NO: 157684 - DNA, 564 bp, Homo sapiens
gacatatatattccaaaattcttcacatttactgttgactttttttgaggttcacaataaaatgccagctgggcatagtggctcatgcctgtaatcccagcactgaggtgcacagatcacttgagaccaggagttgaagaccagcctggccaaccgaacgaaaccctgtctctaccaagaaaaaaaaaaaaaaaaaaaaagccaatatgtcagttgatgacattaaggagtttaaagctatttcttacataacgtttatataggcatagtcagccttttgagtcaatagtatctctagcaaggactatttttatcctatatttaaaatattcatatttcctttatatattcatataacaatttcagtaacttgtggcttataatgagcagttatattttttgaagtaaaaaargtaattttaagcaccttcccaatgataaattagttcaagatctcaccttttctaagaaacaatgtcactggatggacacatctcaccctttagctatttttttttaatttcgcttttctattctattacctttcttctccgaaggttatta

SEQ ID NO: 157685 - DNA, 571 bp, Homo sapiens
tagaaggtgagataacatgaaatataaaatgtggctagacagctcttgttaaatattcagcacatttttcttttttttttttttttttgagacagagtcttgctttgttgcccaggctggagtgcagtggcatgatctcagctcactgcaaccaccacttcctggcttcaagtggttcttgtgcctcagcctcctgagtagctgggattacaggcatgtgccaccatgcccagctaattttgtatytttagtagagatggggtttcacgatgttggccaggcttgtcttaaactcttgacctcaagtgatcctcccaccttggcctcccaaagtgctgggattaccagacatgagccactgcccccagccaatattcagcacatttttgatagtcactcagtatatagcagggactcaacacctgtttgcaggatctattaatatcttacaatttgtatgaactcgatcatgtcagtcactgtgcaaagggctttatgcatactacctattttgaaaaactaataaaatttatataagtgaataatcaattcatttaatataaatatttca

SEQ ID NO: 157686 - DNA, 571 bp, Homo sapiens
tagaaggtgagataacatgaaatataaaatgtggctagacagctcttgttaaatattcagcacatttttcttttttttttttttttttgagacagagtcttgctttgttgcccaggctggagtgcagtggcatgatctcagctcactgcaaccaccacttcctggcttcaagtggttcttgtgcctcagcctcctgagtagctgggattacaggcatgtgccaccatgcccagctaattttgtatctttagtagagatggggtttcacsatgttggccaggcttgtcttaaactcttgacctcaagtgatcctcccaccttggcctcccaaagtgctgggattaccagacatgagccactgcccccagccaatattcagcacatttttgatagtcactcagtatatagcagggactcaacacctgtttgcaggatctattaatatcttacaatttgtatgaactcgatcatgtcagtcactgtgcaaagggctttatgcatactacctattttgaaaaactaataaaatttatataagtgaataatcaattcatttaatataaatatttca

SEQ ID NO: 157687 - DNA, 519 bp, Homo sapiens
ctgttgcttgctcctaagagatcaggtcacactggtgagtcccccaatttatttaaacatgttattttatttcaagtgctaattgtctctcataacaaacagagactcctctcagctgcaattattggcattacaatagacaatcaacaggaaagcttgaaagcacagaaagaagagttgccttggttacaaacctgaaatgcttttggtattacagttacagccatatttytaaatttcccgaaacacctcaagaggaaagtgttgcatttattttcttctttgtggcccaaccaagtcaattttaaccaacatggagacctggtcttatacaaatggttttacaaggtctcttcaataaatagccccacaaaatagggctttcatttaattagaacatttctatatacatgttcatggatttcagaataataataaggaatcagagggttttttgtgctaaagtagcatgttattatattttctccatccacaactataatatgcagccattactct

SEQ ID NO: 157688 - DNA, 552 bp, Homo sapiens
tttcttttcaacaaggagttactgtgggccaatcataggcaggtggccccgggcttgctgtcatttttctcttttatattgatttcatgttcaccaactcctataaatttctgcaaacaccttgcctctctatagaaacaccttgccattatgtcttccttttcttgccctcaacagaaaagtaaagtgcaacatacaatctcattcagggcctctagaaacatctgtgcctccaaaagttaaacacagcttataaatattatctgatatacagatcaattgcaggatagagagcagggttgtgcattaataaaagcatggagtttagagtcaaaagtccttcagaaaattctgccacttactcagtgtgtggccttggtctattcacttaacttctgagcttcargttttcatctactaaaagatgataataagatacctctcctccctccctccctcttgggattactgcagaaagaatttataaactaccaacttcacatgatttattactcttttttcatttattcattcaataaatatgcataatca

SEQ ID NO: 157689 - DNA, 450 bp, Homo sapiens
ctggatgaatttcttgacctggatgatgtagttacagagaggggaacatggagagaaaacatatgaaggaaactgagaggcaggaggggaggatggaaaggcatttccagaaaggcttggtccaacctatataacgaagaattgggagagagcatcaagagtatgtggagggaaaattgtgcagctaggacggatagagtttcatggtttgagtggaagaaggaagaaaggagactggaagaagtgtggttacgagttgtgagttatgaaccttgaaagtataaagacaatttgaattaagttaccagcctcacagggtcagaggagaaagrggcctcagaagtgatatggctcagcctcccattcaatgcaggaagcccttttaaggcattcctatcaaagggccacccaacctttacttggatgccttcagtaataggacatgtgcta

SEQ ID NO: 157690 - DNA, 569 bp, Homo sapiens
aggcctggcttctccggcccttagggttttgctttggtttggggataccctgggggacctcgacttgcctcagcggggtctgcatctctctgtgccgccttcccctgtaagggcagcttgggggagaatcgtgaggcattaatatttacccctgtgctaggcacagagtaaaggccccgtgactttctgtcagtggggactgctcccgggcgcggggtattcctgtgggagagttcagcttgcctgtggaagggaaatttgggttcggttctttctggcccttctgtagtgaatgtgtatgtttgaacatatgtatgtgagtrtgtgtgtataaaaagtctttccctgtttgaagacttttggaacagaatccggcaagagcaaaccgaggattgccctccctccagccctagtagaggttggcattgccaggattggccgtcacgcaaacctcccaccagcatacgtttatgttttgccaagccgattattaagcgccatcgcatgccttcctgttagtggggaagagactggtggatgacttgtggcggggcggggggtgaaatacg

SEQ ID NO: 157691 - DNA, 536 bp, Homo sapiens
gtccctccttgggagctgttccacttgtctccgtctagtcagccatcttgccttctccccctttgctcattttttaatggagctgttttttgcttattcagttaagttctttatagattctgtatattaggccttgtctgatgcacagtttgaaaatatttcctcccattctgtgggttgtctrtttactctgttggtagtttattttgctgtgcagaagctctttagtttaattaggtcccacttggaggttaactttttttgagagcccaaaactttgtctgtcctgtaactacatcacatttgcaaacattcattgattaattcagttatccttccatttatttatccccaccctttattatccttcataccatacacccatccatttaaaaattattccatcttcttgtccattgtacccatttatccatctgtcagccaatctagtaattggttctgttgtacatgaggtcatgaactgctgtcccacaaatggcactttatcaacccccacctgtagagaaggaattttg

SEQ ID NO: 157692 - DNA, 571 bp, Homo sapiens
tgctcagaatctcactgatctctgccatgccttgtcctcagatcaacagtgttcagtgtctgtattctgatgaatcactcgaccaccaagcagtgcctcagatggccatgttgcattgccctgagacagactgcccttacacagtgacattttccccgctaygtctcacagctttgaggcgtatgtcatggaatgtcacagagccaagtcagaactctgcttccccgccaaagcaaagcaaagcaaagggtgggcatagttccacacacaagtcatgcaaacaagaagaggagattttattcttaatatctatctattcaccgaccacccactctcagccttcccttgatttctcaggataatgcctattgaaactccaaccttattctgtgttattttaatctctgatgtgttcacattgtgaggaagagtctgagagaatgagaacagttctgtttttttcttttttttctaaccctttgggctaattttacatttataggaagtagaaactgatacaaataaaatacttttgctttgaattgacaggtgttgcttttatttttaagtg

SEQ ID NO: 157693 - DNA, 477 bp, Homo sapiens
ccaagactgggagagcataagtaacatgttcaggatcacagattagcaagtggttaaactaggcatctcaacacttgagtcttgtatttttacaacacttgagtcttgtatttttaaccataatcccatggttctcaacctggatgattttacgccctgatccctgccccaagggacatttgacagtatctgtagacattgttggttgtcacaagagaraattggatgctactggcttgtgatctggtgggtagaggccaaggatgctgctaaacatcccacaatgcacaggacagcctccacatcaaggaattatcctgccccaaatatcaacagtgtcgaagttaaaaaaaaaataaaaaatccctgccataaccccaaactactaaggtttttgtttgtttgtttgtttgtttctttggtggaggagagagggaggggatatgtactgtgaaaataacacttttttttctttta

SEQ ID NO: 157694 - DNA, 602 bp, Homo sapiens
gaataatgtttttgctggtggagagtgttgcctccatattgttggctgctgactgatcagagtagtggttgctgaagggtggcttggctgtggcaatttccaaagataagataacaatgaagtttgacacattgattgactcttcctttcacaaaagatttctytgtagtatgtgatgctgtttgatagcattttacccacagtagaacttattacaaaattggactcaatcctcttcaaccctgccactgctttatccactaggtttatgtaatattctacatcttttgttgtcatttcaacaatgttcgtagcatcttcaccaggagtagaatctatttcaagaaaccactttcttctctcatccataaaaagcaacaattcatccattcaagtttgatcatgagatggccccatcttcaggctccactcttaattctagttttcttgctatttccactatacctgcaatctagaacccctcaaagttatccatgagggttagaatcaactttgtccaaactcctattattatgtatattttaacctcctctcatgaatcacgaatgttcttaatggcatctagaatggtgaattctttc

SEQ ID NO: 157695 - DNA, 602 bp, Homo sapiens
gaataatgtttttgctggtggagagtgttgcctccatattgttggctgctgactgatcagagtagtggttgctgaagggtggcttggctgtggcaatttccaaagataagataacaatgaagtttgacacattgattgactcttcctttcacaaaagatttctttgtagtatgtgatgctgtttgatagcattttacccacagtagaacttattacaaaattggactcaatcctcttcaaccctgccactgctttatccactaggtttatgtaatattctacatcttttgttgtcatttcaacaatgttcgtagcatcttcaccaggagtagaatctatttcaagaaaccactttcttctctcatccataaaaagcaacaattcatccattcaagtttgatcatgagatggccccatcttcaggctccactcttaattctagttttcttgctatttccactatacctgcaatctagaacccctcaaagttatccatgagggttagaatcaactttgtccaaactcctattattatgtatattttaacctcctctcatgaatcacgartgttcttaatggcatctagaatggtgaattctttc

SEQ ID NO: 157696 - DNA, 415 bp, Homo sapiens
agaagtttttgctcattttttttgtttgtttttactttacaaaaaaataaaaaattttttgctctttgaataacttaacatgaggaatttggaaacaacctctcttgaaaatatattggtattcattcccaaataattcttctaagtaccacttgaccagaggatagggaaaggaggaaaaggtgagtgtatttatatccttgctagtttttgttatatattcagttgcagatctatattatatatcattttattatcagattttctagtgagaaatatatatgatggttttttaataatcattttaggtttggaggccatttcaattcaatatgtatgtgttttaygtgtttaattcgtatttactatatattaaaagaatttccaaatagctcagataagaaaactttggttt

SEQ ID NO: 157697 - DNA, 504 bp, Homo sapiens
aactactctaggctctcacttagtttctatgcgcaaaaggaggatgagtatcacagagataacagaaacattaatgttcatattcaattttcctaatctttcatcactaagtatttttgtttttggatgagactgaaaataaatgtaatagtatgaatcatcatctgacagaaaaaaagtcacayataaagaacctatttacacataattttaagagagaaaatctaccaaaataaaaccaattagaatgctagtaagagctgagagatggtttgtctggactagtttgtccaaagtttagaatgttaaggaagacaatacagaggcattttgatttgctggttttttattttctaagaactagtatatagctaataaaaaatgttgtccagtagatgtcctctatcaatgccatttaaattacttgtataaataacgacttaaaactgcttattctctctacaagtttaaaacttctcaaagtttcacctatataattaagta

SEQ ID NO: 157698 - DNA, 578 bp, Homo sapiens
ttgtcaatgtagatcccactgtcatctcggattacgggtgaattccctacctgcagcaccccaagcgaagtaacacattctaaacagaatttccaaatatcctatgtctcttgaaaagcataaarcacactgctgtacataactcatggaaactgttactagcgactctaatcatcatctactttttcagtatcttgtcatttccaggaatgtcccattcatttcctcattgcatatttcatctctctttgtacttccattccacaccgtaaggcatgtgagaaagcaggaaggtgctttctacacatcacactctttgtccctcaatatcaattcctctgaggagtacactttgatttagcccctttttaaagccataaacacttcccagatttcgctctatgtttcagactgtgcaatatagaaacttaaggaacccctctgggaattattagaatggaagaggggaaaagctgatcccacaagtcagtactgactttgtgggaaagagttgcagagggccaagctgggaatagccataagttaataattgtgtccctgtataatggtatgcaagt

SEQ ID NO: 157699 - DNA, 578 bp, Homo sapiens
ttgtcaatgtagatcccactgtcatctcggattacgggtgaattccctacctgcagcaccccaagcgaagtaacacattctaaacagaatttccaaatatcctatgtctcttgaaaagcataaaacacactgctgtacataactcatggaaactgttactagcgactctaatcatcatctactttttcagtatcttgtcatttccaggaatgtcccattcatttcctcattgcatatttcatctctctttgtacttccatyccacaccgtaaggcatgtgagaaagcaggaaggtgctttctacacatcacactctttgtccctcaatatcaattcctctgaggagtacactttgatttagcccctttttaaagccataaacacttcccagatttcgctctatgtttcagactgtgcaatatagaaacttaaggaacccctctgggaattattagaatggaagaggggaaaagctgatcccacaagtcagtactgactttgtgggaaagagttgcagagggccaagctgggaatagccataagttaataattgtgtccctgtataatggtatgcaagt

SEQ ID NO: 157700 - DNA, 607 bp, Homo sapiens
ctgcgtctctggagttgtgggttccatatrtcaataaattctccttttttgtattgggttgtttgaattcagtttctgaaaattttaattgaagtaaactcaatttatacatgaatttgaagaattaaactataatgtgcataagatacttagtacctggtatataataagtcaataaatgaagccacacattgtgtcgtgtgcacatgtgtgtttatgtatgtttctttctttagcacttgaaaattgctcaaagagttgagatacaaaaaatacccaaggtagtaagctatggctctgtccacagctacttgtaatcccaggacacttttaattctgtgtttaagaaacggatcacttttttggacttctcatgaatttctttggacaatactaccaccatcatttgcaacatcaaaattggaaaagagaaagaatgaaaagaagaaggaaggaaggaaggaagggatcagatattgatgagcttttaaaggaggtatgatgtcgtaaaactccaactctcctgattctgtaattcttccacactcaggagttaccttctccagggatcccatgcattccatttgccctttcaccttctctataa

SEQ ID NO: 157701 - DNA, 493 bp, Homo sapiens
ctactgaggtatctctgcctgaaaaccccatgcatggaaaggtgcccatgaaactgccaaaggggtttcagagattaggacagtataaagaaattgagctaacagtaataaaaataatgattaggtttgtctgtatccccacacaaatctcatcttgaattcccatgtrttgtgggagagacctggtgggaagtaattgaatcatgggggctggtctttcccatgctgttctcatgatagtaagtaagtctcatgagatctgatggttttataagggggagtttccctgcacaagccctctctgcctgctgccatccatgtaagatgtgacttgctcctccttgccttctgccatgatagtgaggcctccccagtcatatggaaatgtaagtctattaaacctctttcttttgtaaattgctcagtcttggatatgtctttatcagcagcatgagaacagactaatacaaataatgtatgtgcatgtatacat

SEQ ID NO: 157702 - DNA, 489 bp, Homo sapiens
tgagggatctgggttgtgtgcttcttatgagaatctaatgcctgatgatctgtcactgtctcccatcacctccagatgaaaccatgtagttgcaggaaaacaagctcagggctcccactgattctatgttatggtgagttgttttatttattatatattacaatgttatattaatagaaataaagtgcatagtaaatgcaatgcccttgaatcatcccgaaaccatccctccccaagagtctgtgaaaaaatcgtcttccatgaaatcagtccctggtgctaaaaaagttggggaccgctatttgagagagacactatgttcaacagagctcagytaacagcattagtgaaaaagatccctaggacaatacctgtggaaaacactgggccaaacaaagtgagagagatttgttttctgcagaacttctaagcaggattttaccaggctaacatacgtcgtaactctctgaggagaatcaggatgttttg

SEQ ID NO: 157703 - DNA, 489 bp, Homo sapiens
tgagggatctgggttgtgtgcttcttatgagaatctaatgcctgatgatctgtcactgtctcccatcacctccagatgaaaccatgtagttgcaggaaaacaagctcagggctcccactgattctatgttatggtgagttgttttatttattatatattacaatgttatattaatagaaataaagtgcatagtaaatgcaatgcccttgaatcatcccgaaaccatccctccccaagagtctgtgaaaaaatcgtcttccatgaaatcagtccctggtgctaaaaaagttggggaccgctatttgagagagacactatgttcaacagagctcagttaacagcattagtgaaaaagatccckaggacaatacctgtggaaaacactgggccaaacaaagtgagagagatttgttttctgcagaacttctaagcaggattttaccaggctaacatacgtcgtaactctctgaggagaatcaggatgttttg

SEQ ID NO: 157704 - DNA, 521 bp, Homo sapiens
tcacgtgtgaccttggagaagttatttaacctcgccaaagaggaatggtaaaacctctctatagaggatgtttctcatacagttgttgtagagagtaaattaggtatgacttaaaatagtgcctgaaatatagtaaatgttatacaagtgtaagctaatactattatgattataaccatcatcattattatcttacttcctccttgctctcagttcactctaatttgccttataacccatgactcatctctgtaaatagctgctgctaaggtcaccaataacctccatgtagctaaatctaatgaactatttaaatcctcatttactgayttctccatagcaatctatgctgttgatcagtggctttaaatatatatattctcttttgtgtcattttggcctctatgacacaacaattttctgttttctcttatctctctagctacagcttcatttctttagcaggtttttccatttttgcccaaacatttcatctgaagttacttaagatttcaggtatt

SEQ ID NO: 157705 - DNA, 457 bp, Homo sapiens
gttggcctggccctgggacccctgccttttccatgacagcagcgtctgctgaaagcacatcagagcccacacttgcaagttcaaagatgtctgtccccaaggtctcaaccagggatggcatcttcttcttggggcacttagcattttgagactctgggagagtcccctgtgggaactgggtgtactgacactgtggaaccaaggaagcaccacggctgcagagagaccctgggccagaccatccraatgaagcccaggcacagcagagggctctgaggaggcgcaggatgcaggagatgaaaggggaaaatgaaggggagccgcaggttcaaactgccccttcccaggagtgagctacagcttggccacttctgtctcataagaaggaggttgtgactttgggaggtggagggggattacagctgggattcctgttgcctgcctcctgcctctgggg

SEQ ID NO: 157706 - DNA, 310 bp, Homo sapiens
aaattctttagccataaattcttctacaactagggttttccagaatctgacctagtggccaagaagaaatgactggtatgtgtgttacaggatggagtcgggtatgtgtgtgtatgtgtgtgtktgtctgtgtttgtagctttgtaccaaagccaacaagaaagaactggaaggacaagactttccatagcatcttttaaatgatgcatcaaacccaggaaagaggggtaaccagtgtgacccagaatccactctcaagctataggtcctttcctccccctcttatttgttgggggtcaagggggagttg

SEQ ID NO: 157707 - DNA, 418 bp, Homo sapiens
acaactttgcatactggattgtcaaatattgattatttttctcctccaccctcactccccacagcttaaatgggaccccaggcactgccctagtcaggttgggggctagttggctacctaaggggaaggcctgaagaagcaatttggtttaagcytttgagctctaattctcaacactggctgcatttcagaatcaccagaggggctttaaagtatatatgtgaatgtgcagatcccacccccagcgtttctgtcttaattgaggcgtggtggtgcccagggcagcatctgccttgacagctcccgggtgggagtctctatcacatctgtcagtcagtgctccctgtgagttcagaagcctagaggtaaaggcctctcaactctagttgctcattacagcaccgagagagctttttaa

SEQ ID NO: 157708 - DNA, 424 bp, Homo sapiens
tgaaacaccgtggtgaaaaccctcctacctagwgcttcgccctcatcacgattatccatgtggtgagtctttaaaggccaggtgacggcccttccccctctcctgggaaatcacgccagcgctgatcctgctaggagaggggagaggggagagaatatgaatgagaccttgaaagcagaagcctcactttggggtcatatttggaaaagcccctgtcttcagcagccacagaaggtccccctgggacctcctcaagccaggagcaggctgtgagaggtttccctggaatgggggtctgggtgccccccacccccgtttccacctcccgcctgcaccgccgggagctccggaggagttcccggggacctagaaacagcggcgagagcgtgagaggggacgagctgggggtccgggccaaaaggag

SEQ ID NO: 157709 - DNA, 419 bp, Homo sapiens
tgaaaaccctcctacctagagcttcgccctcatcacgattatccatgtggtgagtctttaaaggccaggtgacggcccttccccctctcctgggaaatcacgccagcgctgatcctgctaggagaggggagaggggagagaatatgaatgagaccttgaaagcagaagcctcactttggggtcatatttggaaaagcccctgtcttcagcagccacagaagstccccctgggacctcctcaagccaggagcaggctgtgagaggtttccctggaatgggggtctgggtgccccccacccccgtttccacctcccgcctgcaccgccgggagctccggaggagttcccggggacctagaaacagcggcgagagcgtgagaggggacgagctgggggtccgggccaaaaggaggatggagg

SEQ ID NO: 157710 - DNA, 419 bp, Homo sapiens
tgaaaaccctcctacctagagcttcgccctcatcacgattatccatgtggtgagtctttaaaggccaggtgacggcccttccccctctcctgggaaatcacgccagcgctgatcctgctaggagaggggagaggggagagaatatgaatgagaccttgaaagcagaagcctcactttggggtcatatttggaaaagcccctgtcttcagcagccacagaaggtccccctgggacctcctcaagccaggagcaggctgtgagaggtttccctggaatgggggtctgggtgccccccacccccgtttccacctcccgcctgcaccgccgggagctccggaggagttcccggggacctagaaacagcggcgagagcgtgagaggggamgagctgggggtccgggccaaaaggaggatggagg

SEQ ID NO: 157711 - DNA, 476 bp, Homo sapiens
tgacatgttactcacatgttgttgacatgttgcccacagtgctccctatgccaggcaggtctgttttttttcttttttctttttttgagacagggtcttgtctgttgcccaggctggagtgcagtagcatgaacatggctcactayagcctcaacctcctcctcctgggctcaactgatcctctggcttcagtctcccaaatagctggaaccacaggtgcacactcccatgcctggctaattttgttgttgttgttgtttgttgttgttgttgttgttgttttgagatggagtttttctcttatccccaggctggaatgcaatggtacaatctcggctcactgcaacctctgcctcctgagttcaagtgattctcctgcctcagcctcccaagtagctggcattacaggtgcccgccaccatatccagctaattttttgtatttttggtagagatgggatttcaccatgttggtca

SEQ ID NO: 157712 - DNA, 573 bp, Homo sapiens
tctgatcaccactcagatcaccacttggccactttaggccaagaagagctgataacaccacttttaacaaaactgaactatacccattgcatctgcagctgctcatacaagctttgaaaagttaggccagatagaaaagccctccaggaaagaacttatttggaagaaatttcaggctggtgttactttataggaagggaaaaatgtcagaggaggaaacctgtgaacccatttaacacaactggcttcaggtgtaatgtttcaagtgaactgagagcrattgtggcaaggtctttgggtccaacatctaatgttaaaaaagaaaagagaaggaatgaaagtctgtctttcagcatgagcaaggctcttttaaaaataataaaacagtttgaggaggtggctatgacaagactgtgacacataatttagcaggtcttcaaagcaataacagagagggcaagctatggtgattaacagcagaagcagggaaagcaggaatggtgtgaggaggaaggaagcttgacagcacaaagcttaggggaatggggtggtgtaggagtgaaggatgaggtt

SEQ ID NO: 157713 - DNA, 458 bp, Homo sapiens
cattttctgccacctggataggtaaacgggcaagactgttcctcaggaaagaacagaccatttgactacaattgcccaggagaggtagagaaragacaccaagaggacagagatttggaggctctcagtgtcccagttgtaggatccttttctgaagctcagctgcctcccaggttcttagaactcatgatgtgctgccaacatgaaatcaataaaagcccctaacttgaatataagcttgcttaggtcaggttagattttcataattgcagcctgaagagccccaactaacatagttctgtaatataaaccctaaaactaaattaggtagtatttgtgatgtctagccctatgttccttaccaccaccacctctctttctctgtttgttgaataaatcagatttatagatgagaagactggagaaaaccatagggaacatctgatcacattccactt

SEQ ID NO: 157714 - DNA, 519 bp, Homo sapiens
acccacacaccagcgccatatgggcttttaaaattagaatcaaaggggagcaacatgctccaggatagacaatcacattcctgtttaaagaaaccagacgggagatgactacagactagcaagttgagggggatccttggaaggtgtgtcatatgctgtagaaaacttcccaagcccttcctgattttaaggcatttggctactgacactggttcgaatttactaagtacaaaaattttaaaaattaaaaaaatataaagcacttggcaagcaacttagaactttcacttccttagtttccagccgaaactttggcrtcactgtggtggagctaagtggccctgggtggagcgtcactcaaagggttcgctttggaagggcagtgggagaatgagcaagttgaaagagagggggtgtcttgaagcacatttgtagagcaagcacaatttcatttattatgcacaactgtatgcaaaactatctcaattgtataattacttattagattaattttagtgg

SEQ ID NO: 157715 - DNA, 566 bp, Homo sapiens
acttccttagtttccagccgaaactttggcgtcactgtggtggagctaagtggccctgggtggagcgtcactcaaagggttcgctttggaagggcagtgggagaatgagcaagttgaaagagagggggtgtcttgaagcacrtttgtagagcaagcacaatttcatttattatgcacaactgtatgcaaaactatctcaattgtataattacttattagattaattttagtgggtgttttggtgctggtgataggagctagggaagcccttgaagccaccgcttagcaatgccccccctcattcaaggcatatgaccttcctgagcctccattcctaacctataaaatggagataaaaacacccacttcatagaattttgtgaggactgagtgagtctgcatatccagggctaatacacagtagatgctcaattaatagtggttacttattaaccctaaattgagttaaaactacttatggctcctctttctccttcatgaagctgttattaaaatgttttctctaatacatatgaaaatgcccggactatcaaaccctggtttgg

SEQ ID NO: 157716 - DNA, 546 bp, Homo sapiens
aatctatttcttctctccaaatggttggccagtttccaacactatttttaaactaattcttgtcctctcctcattgctttgaaacgtcacattagcacatgtggttagagttaaggttaacacattctaagtttttacatatataattgaggggaagagggtggatcctcctgcttaaggaagttttaattatcccagttgctataatcatagaaaagcagaagcataacacaaagatacacactcaaaaactgaccacttctaaaattagtctgtactcaaatatcctcctgcatttaacactagaagaatctctgcctgctaccaacattttattggttaatccctcactgactgtaggaaattactgcaaatacaacacgaattggctgcagaggaaaactataaatcctgcaaattatgccaagtttaatgcagttaaagtgttactggagaactgtgcctgtcacacgcaaggccagtgagcagtgaaaatctggcagtcarttcagttgacaataaagaaaagaaaactgacaacaatga

SEQ ID NO: 157717 - DNA, 483 bp, Homo sapiens
ctctctccaatttgccaataaaacaaagaaggggaggtgatagctcaaaagaagacaatcttcatctttaaagcaagattcagtaacataatgaaatatttttttaaagaattgatgaattccaggcaagatttttagaaaatctttcaaarctaaaatgaataaagcataagttccagtaagtatgtggtcttattggcagcaatatacagagatctgcagtcttaagttagctgctttctcagaaactctgatcatgcaataaggcctgctgtaaacactgttcaaagaagctcgcacttcgcatctcatgactttgttttagcgccgaatgcagattggcacagatactatattgcagtcatactcagacattccttccctcgaccatcacttacaatacacattgcagctacagtgaccccatacgtgcaactcaacaggaatagaggattgagttattcacctgagaatcaattttac

SEQ ID NO: 157718 - DNA, 483 bp, Homo sapiens
ctctctccaatttgccaataaaacaaagaaggggaggtgatagctcaaaagaagacaatcttcatctttaaagcaagattcagtaacataatgaaatatttttttaaagaattgatgaattccaggcaagatttttagaaaatctttcaaaactaaaatgaataaagcataagttccagtaagtatgtggtcttatyggcagcaatatacagagatctgcagtcttaagttagctgctttctcagaaactctgatcatgcaataaggcctgctgtaaacactgttcaaagaagctcgcacttcgcatctcatgactttgttttagcgccgaatgcagattggcacagatactatattgcagtcatactcagacattccttccctcgaccatcacttacaatacacattgcagctacagtgaccccatacgtgcaactcaacaggaatagaggattgagttattcacctgagaatcaattttac

SEQ ID NO: 157719 - DNA, 520 bp, Homo sapiens
agttttgaaattggaggtaattaattcctcatgcgatgtgctgaaattcaacccagacatccctttttttttttaatttctttcagacagtttacagtccagtggaaagtaaaaccatgcaatcccttggtgtggtacagttttactatgtgtctctttttattattttgctcattttgatcactttttacgtgaacatgcatataatgaattcagctcctcttgtacatgagatttattttaccccaaggatctctcctctctccatcggtagtcaaattgttagtgcatttctccataaaagaaaagatctgcagactagagcatcgaaggtgaatgaygacattaatttgaaatttggatttatttttaactcagaaaaaatgctgctgttttgcaaatgaaactggagtttaaagtcaaataataaggtttaaactccatattgagggaatcataaacctccatattgccctgacctttgagggtcttgttcttaaactctcttctatagtgaagt

SEQ ID NO: 157720 - DNA, 542 bp, Homo sapiens
ctttccttttctttcccttcagcttggctttgatttagaccgagaagtttaccctctagtggtacatgccgtggtggatgaaggagacggtaggggcgatttctgtcctctttggctgtgcacaytgctcttttgtggcatattcctggcagcagctgtggccccagaacaacatgccttctttgtgggtgtttgtgactgtgagtcaggcagtctctgcatcctctcacatctgtgactccaagctcctgggctgatgtgaaaagtgtgggtttggctgggcacagtggctcacacgtataatcccagcagtttgggaggccgaggtgggtggatcacctgaggtcaggagttcgagaccagcctaggcaacatggggaaaccctgtctctactaaaaatacaaaaatcagctgggtatggcagtgtgcacctctaatctcaactacttgggaggctgaggcagcagaatcgtttgaacctgggaggcggaggttgcagtgagccgagattgtgccactgcactccagcctgggtgacaga

SEQ ID NO: 157721 - DNA, 518 bp, Homo sapiens
atggctaagaagaattccattaagggggagatgccagtgcacccactgggcactcattaattaggaaataaatgcataactaactaaatatggtttgcaatgccatatattgatagaaataggggtcggcaaactttatctgtaaggagccaaaaagtaaatgctctggaggccgggtggtctccacrgtaactgctcactggtgttgtgtagatggagcagccactgagacatgagcgtggctgtcttcccataaaacatgaccaatcatgaatctaaagagtctgtatgcttgggtgtgtaggagtcttgtgtttcactagaaaactgcatgatctagagcacacctttcagggttatcagaattcaaccctgtgcattaattttgcattcctatgcaattctttgtaaattataggcagcttacacaaactataggacagatgtgcaaattctgtacttgctgatagtggtttcattgacctcctctccgtccaatttcatgcttatttgcagtt

SEQ ID NO: 157722 - DNA, 518 bp, Homo sapiens
atggctaagaagaattccattaagggggagatgccagtgcacccactgggcactcattaattaggaaataaatgcataactaactaaatatggtttgcaatgccatatattgatagaaataggggtcggcaaactttatctgtaaggagccaaaaagtaaatgctctggaggccgggtggtctccacggtaactgctcactggtgttgtgtagatggagcagccactgagacatgagcgtggctgtcttcccataaaacatgaccaatcatgaatctaaagagtctgtatgcttgggtgtgtaggagtcttgtgtttcactagaaaactgcatgatctagagcacacctttcagggttatcagaattcaaccctgtgcattaattttgcattcctatgcaattctttgtaaattataggcagcttacamaaactataggacagatgtgcaaattctgtacttgctgatagtggtttcattgacctcctctccgtccaatttcatgcttatttgcagtt

SEQ ID NO: 157723 - DNA, 583 bp, Homo sapiens
cagctcttctttgtatgtctaatagaatttgactgtgagtccatgtggtccaggtctttttttttttcttttggtagttttttttattactgattcaattttgtaactcaatattggtctgtttgggtttccagtttcttcctaattcaagtttggaagattatgtgtttccaggaattcatccatttcttctagattttctagtttttgtgcatacaggtattcataatagtctctgaggaccttttgtatttctgtaggattgattgtaatgttatctttgttgtttctgattgtgcttaattggatctttttttctttgttaatttagctagcagtctatcaatcttgtttatcctttcaaaaaaaacaatttttggtttcattgattctttttatggttttggggtctcagtttcatttagttctgctctggttttagttatttcattttttttgctagctttggggttagtttgttctcatttttccagttcctctagawgtgatgttagatcattagtttgagatctgtctaactttttgaggtatatgtttaacactataaactttcctcttaata

SEQ ID NO: 157724 - DNA, 367 bp, Homo sapiens
tcaaacttgttagaccatggacttttgccatgattacttttaatatcttttgttttgttttgtttttgagacagagtctctttctgtcgctctgactggaagtgcagtggtgcgatctcagctcactgcaacctccacctcctgggttcaagagattctcctgtctcagccccctgaygtagctgggattacagtcttgtgctaccatgcccagctaacttttgtatttttagtagagacaagattttgccatgttggccaggccagtctcaaactcctgtcctcaagcaatccacctgcctcagcctcccaaagtgctgggattacaggcatgagccaccatgcctggccttaatatcattttttg

SEQ ID NO: 157725 - DNA, 511 bp, Homo sapiens
tgtgacgtgtgcattcgtctcacagagttgaacctatctaatgattgagcggttttgaaacactcattttgtagaacctgcaagtggatattgggagtactttgtggccttctttggaaaagggaatatcttcacataaaaactacaaagaagcattctgagaaacttctttgtgatgtgtgcattcatctcacagtgttggacgtttcttttgatagggcagttttgaaacactctttttctagaatctrcaagtggatatttggagcgctttgaggcctaatgtggaaaatcaaatatcttcacataaaaactacacagaggcattctgagaaacttcttttttgtgtgtgcattcaactcacatagttgaagtaatctttggatttagctgttttgaatctcctttttgcagaatctgcaagttgatacttggagccctgtttcaccctatagtggaaaagcaaatatcttcacataaacaaaccctacagagaagcattcagagaaa

SEQ ID NO: 157726 - DNA, 511 bp, Homo sapiens
tgtgacgtgtgcattcgtctcacagagttgaacctatctaatgattgagcggttttgaaacactcattttgtagaacctgcaagtggatattgggagtactttgtggccttctttggaaaagggaatatcttcacataaaaactacaaagaagcattctgagaaacttctttgtgatgtgtgcattcatctcacagtgttggacgtttcttttgatagggcagttttgaaacactctttttctagaatctacaagtggatatttrgagcgctttgaggcctaatgtggaaaatcaaatatcttcacataaaaactacacagaggcattctgagaaacttcttttttgtgtgtgcattcaactcacatagttgaagtaatctttggatttagctgttttgaatctcctttttgcagaatctgcaagttgatacttggagccctgtttcaccctatagtggaaaagcaaatatcttcacataaacaaaccctacagagaagcattcagagaaa

SEQ ID NO: 157727 - DNA, 457 bp, Homo sapiens
gttctgtgtagttttactttgaagatatttcattttccaaaacaggccccaaagctctccaaatatccacttggtgattctgcaaaaagagcgtttcaatactgctcmataaaaagaaaggttcagctctgtgtgaggattgcattcatcacaagaagtttctctgaatgcttctttgtagtttttatatgaagatagttccctttccaccacagggtgcaaagagctccaaatatccacttgcagattctacagaaaatgagatatgaaagtgctcaaggaaaagataagttcaactctgtgagttgaatgcacacctcacaaagaagaatctcaaaatgcttctgcatagtttatatgtgaagatatttccttttccaaataggcctccaagttctccagatatccactcgcagattctgcaaaaagagagactcaaaactgctgaatcaaaaca

SEQ ID NO: 157728 - DNA, 419 bp, Homo sapiens
tctgcaaaaagagcgtttcaatactgctccataaaaagaaaggttcarctctgtgtgaggattgcattcatcacaagaagtttctctgaatgcttctttgtagtttttatatgaagatagttccctttccaccacagggtgcaaagagctccaaatatccacttgcagattctacagaaaatgagatatgaaagtgctcaaggaaaagataagttcaactctgtgagttgaatgcacacctcacaaagaagaatctcaaaatgcttctgcatagtttatatgtgaagatatttccttttccaaataggcctccaagttctccagatatccactcgcagattctgcaaaaagagagactcaaaactgctgaatcaaaacatagtttcaactctgtgacttcattgcacacctcacaaaga

SEQ ID NO: 157729 - DNA, 419 bp, Homo sapiens
tctgcaaaaagagcgtttcaatactgctccataaaaagaaaggttcagctctgtgtgaggattgcattcatcacaagaagtttctctgaatgcttctttgtagtttttatatgaagatagttccctttccaccacagggtrcaaagagctccaaatatccacttgcagattctacagaaaatgagatatgaaagtgctcaaggaaaagataagttcaactctgtgagttgaatgcacacctcacaaagaagaatctcaaaatgcttctgcatagtttatatgtgaagatatttccttttccaaataggcctccaagttctccagatatccactcgcagattctgcaaaaagagagactcaaaactgctgaatcaaaacatagtttcaactctgtgacttcattgcacacctcacaaaga

SEQ ID NO: 157730 - DNA, 457 bp, Homo sapiens
gttctgtgtagttttactttgaagatatttcattttccaaaacaggccccaaagctctccaaatatccacttggtgattctgcaaaaagagcgtttcaatactgctccataaaaagaaaggttcagctctgtgtgaggattgcattcatcacaagaagtttctctgaatgcttctttgtagtttttatatgaagatagttccctttccaccacagggtgcaaagagctccaaatatccacttgcagattctacagaaaatgagatatgaaagtgctcaaggaaaagataagttcaactctgtgagttgmatgcacacctcacaaagaagaatctcaaaatgcttctgcatagtttatatgtgaagatatttccttttccaaataggcctccaagttctccagatatccactcgcagattctgcaaaaagagagactcaaaactgctgaatcaaaaca

SEQ ID NO: 157731 - DNA, 434 bp, Homo sapiens
attcatcacaaagaagtctttctgaatgcttctgtgtagcttttatatgaagatatttccttttacaccacagggtgcaaacagctccaaacttccacttgcagattctacaaaaagacgtattcaaaactgtacaatcaaaagatagtgtcaactctgcatgttcaatgcacacatcacaaaggactttctctgaatgcttctctgtagggtttgtttatgtgaagayatttgcttttccactatagggtgaaacagggctccaagtatcaacttgcagattctgcaaaaaggagattcaaaacagctaaatccaaagattacttcaactatgtgagttgaatgcacacacaaaaaagaagtttctcagaatgcctctgtgtagtttttatgtgaagatatttgattttccacattaggcctcaaagcgctcc

SEQ ID NO: 157732 - DNA, 434 bp, Homo sapiens
attcatcacaaagaagtctttctgaatgcttctgtgtagcttttatatgaagatatttccttttacaccacagggtgcaaacagctccaaacttccacttgcagattctacaaaaagacgtattcaaaactgtacaatcaaaagatagtgtcaactctgcatgttcaatgcacacatcacaaaggactttctctgaatgcttctctgtagggtttgtttatgtgaagacatttgcttttcsactatagggtgaaacagggctccaagtatcaacttgcagattctgcaaaaaggagattcaaaacagctaaatccaaagattacttcaactatgtgagttgaatgcacacacaaaaaagaagtttctcagaatgcctctgtgtagtttttatgtgaagatatttgattttccacattaggcctcaaagcgctcc

SEQ ID NO: 157733 - DNA, 434 bp, Homo sapiens
attcatcacaaagaagtctttctgaatgcttctgtgtagcttttatatgaagatatttccttttacaccacagggtgcaaacagctccaaacttccacttgcagattctacaaaaagacgtattcaaaactgtacaatcaaaagatagtgtcaactctgcatgttcaatgcacacatcacaaaggactttctctgaatgcttctctgtagggtttgtttatgtgaagacatttgcttttccactatagggtgaaacagggctccaagtatcaacttgcagattctgcaaaaaggagattcaaaacagctaaatccaaagattacttcaactatrtgagttgaatgcacacacaaaaaagaagtttctcagaatgcctctgtgtagtttttatgtgaagatatttgattttccacattaggcctcaaagcgctcc

SEQ ID NO: 157734 - DNA, 578 bp, Homo sapiens
gctctccaaatatccacttggtgattctgcaaaaagagcgtttcaatactgctccataaaaagaaasgttcagctctgtgtgaggaatgcattcatcacaagaagtttctctgaatgcttctttgtagtttttatatgaagatagttccctttccaccacagggtgcaaagagctccaaatatccacttgcagattctacagaaaatgagatatgaaagtgctcaaggaaaagataagttcaactctgtgagttgaatgcacacctcacaaagaagaatctcaaaatgcttctgcatagtttatatgtgaagatatttccttttccaaataggcctccaagttctccagatatccactcgcagattctgcaaaaagagagactcaaaactgctgaatcaaaacatagtttcaactctgtgacttcattgcacacctcacaaagatgtttctcagaatgcttctgtgcagttttcatataaagatatctccttctccaaaatagatctcaaggttctccaaatattcacttccagattctatggaaagattgtctcaaaactgctcaatcaaaccaaag

SEQ ID NO: 157735 - DNA, 578 bp, Homo sapiens
gctctccaaatatccacttggtgattctgcaaaaagagcgtttcaatactgctccataaaaagaaaggttcagctctgtgtgaggaatgcattcatcacaagaagtttctctgaatgcttctttgtagtttttatatgaagatagttccctttccaccacagggtgcaaagagctccaaatatccacttgcagattctacagaaaatgagataygaaagtgctcaaggaaaagataagttcaactctgtgagttgaatgcacacctcacaaagaagaatctcaaaatgcttctgcatagtttatatgtgaagatatttccttttccaaataggcctccaagttctccagatatccactcgcagattctgcaaaaagagagactcaaaactgctgaatcaaaacatagtttcaactctgtgacttcattgcacacctcacaaagatgtttctcagaatgcttctgtgcagttttcatataaagatatctccttctccaaaatagatctcaaggttctccaaatattcacttccagattctatggaaagattgtctcaaaactgctcaatcaaaccaaag

SEQ ID NO: 157736 - DNA, 578 bp, Homo sapiens
gctctccaaatatccacttggtgattctgcaaaaagagcgtttcaatactgctccataaaaagaaaggttcagctctgtgtgaggaatgcattcatcacaagaagtttctctgaatgcttctttgtagtttttatatgaagatagttccctttccaccacagggtgcaaagagctccaaatatccacttgcagattctacagaaaatgagatatgaaagtgctcaaggaaaagataagttcaactctgtgagttgmatgcacacctcacaaagaagaatctcaaaatgcttctgcatagtttatatgtgaagatatttccttttccaaataggcctccaagttctccagatatccactcgcagattctgcaaaaagagagactcaaaactgctgaatcaaaacatagtttcaactctgtgacttcattgcacacctcacaaagatgtttctcagaatgcttctgtgcagttttcatataaagatatctccttctccaaaatagatctcaaggttctccaaatattcacttccagattctatggaaagattgtctcaaaactgctcaatcaaaccaaag

SEQ ID NO: 157737 - DNA, 578 bp, Homo sapiens
gctctccaaatatccacttggtgattctgcaaaaagagcgtttcaatactgctccataaaaagaaaggttcagctctgtgtgaggaatgcattcatcacaagaagtttctctgaatgcttctttgtagtttttatatgaagatagttccctttccaccacagggtgcaaagagctccaaatatccacttgcagattctacagaaaatgagatatgaaagtgctcaaggaaaagataagttcaactctgtgagttgaatgcacacctcacaaagaagaatctcaaaatgcttctgcatagtttatatgtgaagatatttccttttccaaataggcctccaagttctccagatatccactcgcagattctgcaaaaagagagactcaaaactgctgaatcaaaacatagtttcaactctgtgacttcattgcacacctcacaaagatgtttctcagaatgcttctgtgcagttttyatataaagatatctccttctccaaaatagatctcaaggttctccaaatattcacttccagattctatggaaagattgtctcaaaactgctcaatcaaaccaaag

SEQ ID NO: 157738 - DNA, 506 bp, Homo sapiens
aaaatcattatgtgcagttgcttcaagttctgttgagacagtctggaactcaggttaatttgcagacactaactaagcttctgcaggaggttattatgcataacccatggtttccacagacaggcagttttgatgtggaaaattaggacagagcaagagaaggattaaaatggcctcatcaaaaaggtcttaaagttgatccttctgtttcctccacttgcagtttagtttctactgtccttctgccattgtctccttcttattctgctggacagcaggagtcatgttctgagcctaaaaatctgaaagaatctgctgttaaacagcaccaattgaaaataaaaataaaaaaaaaaaacagaaaagggaggataaaaattggcctatacctccccctccartagcagaaacatctgtaccgcctcctttggtagcaaaaatagggacaccaatacaaagaattttaggctctgctgccatagctggagagcccttaggatgttgtg

SEQ ID NO: 157739 - DNA, 444 bp, Homo sapiens
catcactctgcaatgtgagtgcaagcaatgactaatttagcagttgacaaatctaaaaagagccaagggtcaaattctaaaatgggaaaatgttayaactgtggaaaaactggacatttaaaaaggaatgccacaagatctgaggacagcaaggattttattatgtagttcctccaccccacagcagaaaaaaataccaggactctgtcctcgctgtaacaaacgaaatcactgggctaatcaatgctgctcaaaatttcatcaaaatagcacccccctgtcgggaaatgagaagggggcctggactcaggccccacaaataatgagggcattcccagtccaggccactaccctgtttcaggattgggtcccaggagaaccattgattccctcaccccaggaacaccaggaaatgcaagattagatctcctaatcagagaaaga

SEQ ID NO: 157740 - DNA, 287 bp, Homo sapiens
atctatcatgatcagggagcatggactccagkacccctaactccccctgacacagaacagttagactctcagaacaatgtcattaattataccgccccacaagaaggactccccttgacactacaaagatgtcactcaaccatagctgtctttataattcaagctcaagaatggttgagtcgctatggaaaagtcatgtacctattaagtcttggttgtattaatgtaattggtatgctaaccaaccattcccagtccaatcactccaattgtgctgactatatgga

SEQ ID NO: 157741 - DNA, 585 bp, Homo sapiens
ttattctaacatctttaaaaatatttttagttggttggagaccttcaaaacaaattcttttcatggatttattgtattttagagttggagttttttggtaaggttttctctttttcaatttgtatctytgaagggcagaaataccaattatatattataggctacccatctatacacatcctcagccttcttagtcttttgaatgaaagctaatttttttttttttttttgagtcgcagtttcactctgtcacccaggctggaatgcagtggcgtgatctctgctcactgcaacctctgcctcctgggttccagcgattctctcttctcagcctccaaagtatctgagattacaggcacgagccacgatgcccagataatttttgtattttttggtagagatggggtttgagcatgttggccaggctggtctcgaacccctgacctcaagtgattcactcgccttggcctcccaaagtattgggattacaggcatgcaccactgtacctggccatctttttggttggtggtgttctctatcatagcctaagctagattactttaaattaataaataatttaaaaa

SEQ ID NO: 157742 - DNA, 613 bp, Homo sapiens
gaattcaaataccaaatggcaaattttattatattcttatggctaggactttaatattaaaatgctgaaatttatctgagcctgtgcccctggaaaacaactatggttgagaaaccttgtgacatggtttggctgtgtccccacccaaatctcatcttgaattgtagttcccataatccccgtgtgttatgggaggggcctggttgcagataattgaatcatggggcaggtttcccccatggtattctcctgatagtaagytctcctgaggtctgatggttttatcagtggcttccccttttgcttgactcacattcttctccttcctgttgccatgtgacaaaggacatgtttgcttccccttctgccataattgtaagtttcctgaggcctccccactcctgtgaaactgtgagtcaattaaacctttcctttataaggtatttcttcataccagcatgagaatggcctaatgcaccttgccaccattttgtgtcctaagaaataagttattgcaaagaaccaattttccctatttgatttagataatacttgcaaatgactggcttatttacctataaaaaggccatacatagacacttgatattcttgt

SEQ ID NO: 157743 - DNA, 613 bp, Homo sapiens
gaattcaaataccaaatggcaaattttattatattcttatggctaggactttaatattaaaatgctgaaatttatctgagcctgtgcccctggaaaacaactatggttgagaaaccttgtgacatggtttggctgtgtccccacccaaatctcatcttgaattgtagttcccataatccccgtgtgttatgggaggggcctggttgcagataattgaatcatggggcaggtttcccccatggtattctcctgatagtaagctctcctgaggtctgatggttttatcagtggcttccccttttgcttgactcacattcttctccttcctgttgccatgtgacraaggacatgtttgcttccccttctgccataattgtaagtttcctgaggcctccccactcctgtgaaactgtgagtcaattaaacctttcctttataaggtatttcttcataccagcatgagaatggcctaatgcaccttgccaccattttgtgtcctaagaaataagttattgcaaagaaccaattttccctatttgatttagataatacttgcaaatgactggcttatttacctataaaaaggccatacatagacacttgatattcttgt

SEQ ID NO: 157744 - DNA, 571 bp, Homo sapiens
aatatttagtttcttctctcagaacagcttctaatctgatctgttctggatgtctctcatcctatgctctctttcttattccacttcggtttgaactggcaaaaccctgataacattttatttaagtcttgatgatttttgagagattttaacatgtttctgtggaggcatttccccctcaaacaatctctaaaaagctggctaccyccctcttttattgttacatgctatcagtctagggttcttgggataaaagacacagaaaacagctttagcaagcttaaggagttgctcccagagacaatagaaactgtgaaaggcattttattgctctcattttctgacttggcttgaagaaaaaccagatcccgattagactcaaagaaacaaacaaaaaacataaaccagaatttttgtggagacgattatactctgacctacctatgaatgaaactctcatcttaactatttagcctactagatgcaggactgtttctagcttgcctggattgtggatgctcttgagattttcactgccccatccagtggcaatagaagtaagaaagacaaa

SEQ ID NO: 157745 - DNA, 542 bp, Homo sapiens
atacatatatcttggtccataagtattagtctgtttccacactgctgataaagacatagtcaagactgggcaatttacaaaataaagaggtttaattggacttagagttccacatggctggggaagcctcacaatcatggcagaaggcaaggaagaacaagtcacatcttgtggatggcggcaggcacagagagagaacctgtgcagggtaactcttctttgtaaaaccatcagatcttgtgagacttattcacaatcacgagaacagctgagaaaacctgcccctatgattcaattacctcccactgggtycctcccacaacacgtggaatttaatatgagatttgggtggggacatagccaaaccatatcaccatatatatttaaatttctatcgagtatgtttttagaattagcatttctaggtcatacgatttgcatttatttactttatgaaataatgccaaatattatttgaaagtgcttttacaattttaaattcacaacagtagcaatgagatttccagttgcttaatggtatc

SEQ ID NO: 157746 - DNA, 566 bp, Homo sapiens
ataatgaattgatgtaagtttgattttgcctggaacttgacagatcttttagtkaccacttggcatgtctctcaatcaacatttttattccaacactttttcatattggtaaatctcagcaactaatctcattatctctttgcttctgcttcttatttcaatctcattcttttatattccaatttcaaaattatgtgagtaaagatcatttgggccttgtaaaaacagactaatattgttcagaatcctcggctttagggtgcatagactgcctcttatgtattaaatggcttgagtcaaatgcccacttctaatccaatcagttgtgattgcgaaggtcatcataaggaatgcatcagccatctgaagaattaactgacactagaacattgcatataaatgaatttctttatgagggtatgagtgctactcaatgtcatcaatttggtaagatatatccttaaatctggatataagcaacaggaagatgtataaaaaatacttaaacagaaggtaccatggtatagatagcatctaggaaactcatcagtgcttatccattaaca

SEQ ID NO: 157747 - DNA, 605 bp, Homo sapiens
caggcaaattaacaggagaaaaagtataaaaatatattatgtgcatgaaggaatctcaggaaagaaaggtaaatacccccaaaacccagtaagatcttgaaacctgtacacccactttataggaaagggatagtagaagcaggcaacttagaggagagaaaaagatkttttggaaagatgaatgagccctcagaagatcaagtaatgatctatgacagtctttctggtcctgctgctgacctccagactctgcttctgtgataggaattaatcttccctggttgatgagactcccagggaggggacttatgacaattgtggtccttttggagaatctatctttaggcaaataaggaaaattcagagaaggctccctcccttttcccaaatttgctgttctcggagtgctttcagtttgaattaatcagcataccaaaaaggcacagtttggtgcagcatttcttgcactccttcacttcaaagtcatgaacaaatttctcctatatttatttctctctattgttgttttgtaggtatatatttttaatttatagaaatgtattatttatttattactattttcatgagcttctctaattttagta

SEQ ID NO: 157748 - DNA, 559 bp, Homo sapiens
tctactaaaaatacaaaaattagctgggcatggtggtgagcgcctgtagtcccagctactcaggaggctgagacaggaaaattgcttgaacccgggaagcggaggttgcagtgagycgagatcgtgccactgcactccagcctgggcgacagagcgagactccgtctcagaaaacaacaacaacaacaacaacaacaaaaaacagctaggaggtgacaatgactcacatgtcaatatgtggaaataaagttgtaataatgaggataatgtaataatgagagtaatgactaaattttcggctttacagaaaaacacataaagaaaactaaggggaaaaagcctttagctgatccagaatttagtgagggcaatgtggagaagtaggagaaacggctactcaaatagattccagtccacttcccctcaagattgtgtcaattatgcccgtgagcctgggtctcttggcctgtaaaatgcagtcataaccacccgcccccgggaagacagaaactgcctgtccactttctgaacttttcatccccagtatcgacgtccagag

SEQ ID NO: 157749 - DNA, 559 bp, Homo sapiens
cccttggagggttggagtggggagatctttaggacctcagtcgaggccagccactgtgcttccctgctccgtgtccttcccccttcccaccttgggtctccaccatgtgtcaaaaccctaggtcttggcccataattcatggaaactgtgatgggagcatcctaaatatttcctctcgtcatgcagaaccctgcggctctcttcaagtggggggtatccacgtgtgacccatcgagcaatggttttccatctttttcaaactcttttgagaatctgattaaagctatagacctgagctctctggtaaggtaggctctagmcacatgcaactgctggactctggaaatgcggctgggctgaactaagatgtgctgcaagcataaaacacacagtggattttgaagtcttagtatgaaaaaaagtaaaatatctccttaataattttatatgttgattacatgttgaattgacaataccttagattattgggctaaatatatattaatttcacctgtatcattttacctctttttttgtggccactagaaagtttaataca

SEQ ID NO: 157750 - DNA, 559 bp, Homo sapiens
cccttggagggttggagtggggagatctttaggacctcagtcgaggccagccactgtgcttccctgctccgtgtccttcccccttcccaccttgggtctccaccatgtgtcaaaaccctaggtcttggcccataattcatggaaactgtgatgggagcatcctaaatatttcctctcgtcatgcagaaccctgcggctctcttcaagtggggggtatccacgtgtgacccatcgagcaatggttttccatctttttcaaactcttttgagaatctgattaaagctatagacctgagctctctggtaaggtaggctctagccacatgcaactgctggactctggaaatgcggctgggctgaactaagatgtgctgcaagcataaaacacacagtggattttgaagtcttagtatgaaaaaaagyaaaatatctccttaataattttatatgttgattacatgttgaattgacaataccttagattattgggctaaatatatattaatttcacctgtatcattttacctctttttttgtggccactagaaagtttaataca

SEQ ID NO: 157751 - DNA, 590 bp, Homo sapiens
agggaagagttgcatgcttttccaaagaagcaaaagtcctgggaaggtagaatagacgggggttgtgagctctggcctggaagtttgaattctaactctgtccctgctaactctgtgaccttgggcaagttagcctctctgagcctcaattccctcatgtagaaaatgggaggaaatgggagtactgtcttttgaagctgtgggaggataaataaagttacagtagtgtagggaccagccccacagggtcggtgggtctctccccgtgtgcggtgacgagagagtttagaaataaagacacaagacaaagagataaaagaaaaggcagctgggcccgggggaccactgccaccaatgcgcggagaccggtagtggccctgaatgtctggctgtgctgttgtttattggatacaaagcaaaaggggcagggtagagmgtgtgagtcatcttcaatgataggtaaggtcacgtgggtcacgtgtccactggacagggggcccttccctgcctggtagccgaggcagagagagagaggagacaaagagaaagacagcttacgccattatttctgcatatcagagactattagt

SEQ ID NO: 157752 - DNA, 531 bp, Homo sapiens
tccccatcctgggaggagcaactagcacctgaaacattacatttcaacacctgtaaactgggacagatgaaaagcgttggttattgtccatgcctaggggctagagagtggggactcaccctcgttctcctgctgggaatgggagaggcaaccatgctttcccagcgagtaaggctcagttgaaggaagggaaaggcaggcaggatggggcaggcccaggggatgttgcaaaacagccacaggaaatggaaatcatgtcatatgcaaatcaggataagaatttgcagatgggctcggcacttgggcttcaggttaattttttaaccaaaggttaaacactatccctaggaagagagagaggggaagtgattgggtaaggagcaccctggggcctttgactctgtcaccagtgtgattttttaaggctgggcagtggagtcataggtatccattttattattctctatacattttgtatatcgtatatattgcttwatacttttttaaagcaacctgaattcatgtctatca

SEQ ID NO: 157753 - DNA, 595 bp, Homo sapiens
gcattcatgtcacagaacaaagggaagcattctcagcaagtgaacaagagactagtgagacagctaaagaaaattttattggggtggggagtggattttagtagagtttttttttgtttttttcttttttcttcttttttttattctagaagaacaatacaagcatacaggaaatataacctgccttttaaaacaaagacaaatgcttcccatctttgattgccatctttgacccaaasaacacttgttttaagcaagagagtagatgctcctgttacaaagcttaggtggaattccaggcttccttggaccttccatctgcagcaaaaactttggaccaggaaacagcaatggaacatcaacacaatacatttgtgttgtggggttattgaaatactgaaataagtattcttttaagttacttaatctcttgcaaacaatcaaatgtaaaatgattaataggcttttacatttggatagagcattattttttaaagcacttttagtctgatctcatttgatatggagaacagctttctattagtctgcctcagctgccataacaaaataccatagactaggtggcataaacaaa

SEQ ID NO: 157754 - DNA, 573 bp, Homo sapiens
aggatatgtaattatttaggcatgaaacaaagagttgttttagaaattttactatcattaggaggaagcttaaaaagacaggaattccattgtcttgtaagaagtaagaaatatttattgattcccaaatggagctgaaaaaaaacctttcctcttttagaaagttgtgaatgacccagcgagagctctagtaagctttactgaaccaagctgctaatagttatttaatgttattcttcagtgtgaaagaatctccgtagattttccttttaatctctttgaattgcaggctcataaacctctctgatgagtcctgccagtgttttcttagatcccactgttgagasaatggagccacagaattctttcacctcttgttgtcagacaaatccaatagaacacaaggtcagaagggcctatacttctaaaggttgaaagattctttttcaagtaagcacatacattatttgattttaacattatatttctcaagaacctctctttataatgtactgacttctttatgtaaatagatttggaagtttttcttgtttccatatttggctaagcttg

SEQ ID NO: 157755 - DNA, 566 bp, Homo sapiens
cctgatatcagggtgattagggcagacgaataatgtctcaaaagtgtaagagaccataaaacaggggctggtggtggggggtttgtctttgaattgcgtaattttcatacagaagacacattctacagagagtcctttgttatctgtaggaatcttctaaccttgggatgggcagtcatttcctagtcttcaaagctccagatgtcaatatattatacacagaaactgaacaactggattagtccagcgaccttcttttctccctaatttaaaaagtaatatacctgaatcagtgacgtagaagatgagtcaatagaaacatctcatagtgaaatgcaataaatgagtagagaatgtaaaaaaagaaaaaaaagcaaaacatccaaaaattgtgtgacatttgaaaagtcttaacacatgtctactaggtatatcagagagaaaagraaaagaaaatataccagaaaaaaatagtagtaataattgtgagaaaaacacactcacccttccaaacccaaagaatggactcagagacacaaagaacagcggaagcgagacttttaatg

SEQ ID NO: 157756 - DNA, 302 bp, Homo sapiens
gatagcagaacaattggggcccactggccagatggcctgggaaaacagaatagccctagataggatattagctgaaaaagctggtgcttgtgttatgattaaaactcagtgttgtacctttatcccaaacaacactgsccccactgggagcacaacaagggccttacaaagacttaccaccttatccaatgagttagctaaaaattctgaagtcgataaccctttctcagggtggctagaaaggtggttcagtaaatggaaagaaataatagcctcaattcttacttctcttgcagccataa

SEQ ID NO: 157757 - DNA, 509 bp, Homo sapiens
agcagcaaagccaaggtatgttagaaaagtttgaagaggaagtactatgaaaattgaaaggggggaaattgtaggatataataaattcctcttcaaaggttttagcctataaattgttctgtacaatttacagaattctgtacaattctgtaaactgttaagtacaatgagttctgagatcctctccaaagaaccagtgtatcagtatgttcagctcccctcttcyttgttgttccttttaaagtttaacttcctcattcctcacatttccttgcccctagtttcagtaaacaaccccatcctagcctctatcacttgctctgaccttggtcactcttggtcaccagctctgaccttacttatccttggtcacctgctctgttcttagccatcctgagtcacctgttctgtaaccatccttcccaccaaactactccccctgctactcctgctcgtaccccttttctctttaaaatagccaatcagaattagtttagactgtgtggtcc

SEQ ID NO: 157758 - DNA, 616 bp, Homo sapiens
gctagaattataaaagacataatccatattttcttgcaaaatattatctaatctagaagatggggtagagaataagaacatttgcataaagattataaaatgacttcaactaatattattgcgtatatatatgtattgaaaggggatatatatataaagtagctataatatatatgttttatataatttgttttctggtgatataagggtgaatatgaaataagaraaagaatgattttagaaatgtacattaagaatcataaattgctcattcataagattctcatttttttaccacttctcaattccatctattcccctgccattatgattaattgtgcagacacactagattgacaattaattagctacattcttaggtttgtcagttgcacagacaagaaattaaacattgcttaagcaacactccgacaatgcaccagatcaaacaataaaacaaaagtatgtatcgactgctttggtatcaagttgaccaaataaaattgttaattagttgagtttttcacttatttgttaattggtttttcctttattacaaaattataattttataatatagttgtataatcaaataacatgaatcttttgagtattc

SEQ ID NO: 157759 - DNA, 616 bp, Homo sapiens
gctagaattataaaagacataatccatattttcttgcaaaatattatctaatctagaagatggggtagagaataagaacatttgcataaagattataaaatgacttcaactaatattattgcgtatatatatgtattgaaaggggatatatatataaagtagctataatatatatgttttatataatttgttttctggtgatataagggtgaatatgaaataagagaaagaatgattttagaaatgtacattaagaatcataaattgctcattcataarattctcatttttttaccacttctcaattccatctattcccctgccattatgattaattgtgcagacacactagattgacaattaattagctacattcttaggtttgtcagttgcacagacaagaaattaaacattgcttaagcaacactccgacaatgcaccagatcaaacaataaaacaaaagtatgtatcgactgctttggtatcaagttgaccaaataaaattgttaattagttgagtttttcacttatttgttaattggtttttcctttattacaaaattataattttataatatagttgtataatcaaataacatgaatcttttgagtattc

SEQ ID NO: 157760 - DNA, 281 bp, Homo sapiens
tgtactattgccacagcataagtaaatgatacagtggaatagagagaacaaaaagagagctacatgtgtatgaacaacaaagaaggtaatatattagtttgttgcaaaagtaattgaggtttacttttatggcaaaaaccacaattactttgcacaaacctaatagattagtgagaaacagttaaacatttgtttttgttgaaacaaaaaataacaattcmcaacttatagaaacatatatatgaagtgaaccatacaaatgcagttagctcctagttgat

SEQ ID NO: 157761 - DNA, 281 bp, Homo sapiens
tgtactattgccacagcataagtaaatgatacagtggaatagagagaacaaaaagagagctacatgtgtatgaacaacaaagaaggtaatatattagtttgttgcaaaagtaattgaggtttacttttatggcaaaaaccacaattactttgcacaaacctaatagattagtgagaaacagttaaacatttgtttttgttgaaacaaaaaataacaattcacracttatagaaacatatatatgaagtgaaccatacaaatgcagttagctcctagttgat

SEQ ID NO: 157762 - DNA, 294 bp, Homo sapiens
attctaaccataacagttgttgagctaccaaatcctgaatcattgctggtcatcatgtacatcrgtatcacaattttgaaaaatgttttggcattaactattatagttgaactcaaccatagagtctatatcatagaacaggggttagcaaactgtaacccacagcctttttttgaaaataaatgattttttggcacacaactttactcatttgtttatgtattgcctatggttactatgacactacaacaggaagtttgtgtagttgctacagagcatgtatcatgtaaagct

SEQ ID NO: 157763 - DNA, 545 bp, Homo sapiens
gctttaatattttgctttttactttttgtgtgtctgttgtgtgtttttcaatctgaagtaagcatgaggcttgcaaatattataacccattattttaaattgatgacaacgtatcaccgactgaataaagaaacatgcaataagaaagctaataaaaaytcaacacttctactttgtcccccactttttaatcttgtgttgtttccttgtatgtcttattgtactgtcttcatcttaaaaagttactgtagttattattttttattggctcatcatttgttatttctacttaagacaagagtaatttatgtaccaccattactttgtcatcatattctgtgtttttctgtgtgcttaatattaccagtgaatcttgcgccttcagatttcttcttgcttattaactgacctccatgtagcatttcttgtaaggtaggtctggtgttgatgaaatcccttagcttttgtttgtctgggaaggtctttatttctccttcttgtttgaaggatattttcaccagatatagcattctaaagtaaaaggg

SEQ ID NO: 157764 - DNA, 598 bp, Homo sapiens
gcaatgctagctgtaataaatagcaagatgataaatatcatgactaagtcaaaataaggctgttgtaccacaaatccttcctttttgttcctcttctttctatttttgttccattagtgatcttttatcttctttaagctgtatscatcatctctgtggagacaactacaaaagcaataaatttaagcttgatattttatattcttgactcatatttccacattttttcctataccttctcttagaactttatcaaccaactaaaactcactctacattgttgaatatattatttcccccacaaaacttgttttctacttttttccatgattccaacatttttttcaagtgactctgagtctgaaaataaatatcacatcagttattgaatacctgaagtgtgttacgtattatcttacattatttatatataaaaataatttcagatatgattgattattatctcaattttatatatgaacaatgaggaggttatggaacttgcaaaaggtcgtgcagctgtacgttgtgcacccaggttctaaatttcggcaatcttgctgcaaaggccactatgcaatattaacttagtataata

SEQ ID NO: 157765 - DNA, 494 bp, Homo sapiens
aagaaaaattctacctttcatatttttasttgcaattatatgggtaatagtgcagttaaaattcacccaaggtacagaaattcaataaagccatataagatcacaaagaggtttctagtgaaagatagaacttgacattgccttatcactgacctgtgatgaacatgagaattcacatgacattgatagcatggttgggttaactcatctgctttctgaaatcagacaattaaggactcagtcagctttgagcagcaaggtcactttcatgatcgatgactcaagaaacacttcttaaggagaaatagcatttataacccaatcgtcttcttcattggtatacagcccacttttctcctgcgtggtttgttgattgctttttaaagaaactaaagtaagcctacaaactaccctctcaaggtaaggcaaagagaagtttagaaatcaatgacatgaattttacttcctccaaaattgtttttgtcatcacgtta

SEQ ID NO: 157766 - DNA, 540 bp, Homo sapiens
agaaaacaagccctccctgtgtccatatcttctcactgttcagctcccacttataagtgagaacatgcagtgtttggttttctgttctgcgttagtttgctgaggataatggcttctagctccatccatggtaggaggagggacagcattaggaaaaatacttaatgcatgctgggcttaatagctaggcttaatacctagcaaacccaataaaaactcattagcagcaaactttaggtctgtttcactaaaattcacagcctattttctaaataagtcatggttttgtatccatgctcatggctgtcttcccagctagccaaatttatattctccctcattccctaacccaggttctgccttgtggaactggccaactttttatttaaatcttcataagtaatgccgtgtacctgagaaaaaaatatatatatatgtatatgtatatatgtgtatatatatgtatrtgtatatatgtatgtgtatatgtgtgtgtgtgtgtgggtgtgtgtgtagtgctccagaatgattcagatgccc

SEQ ID NO: 157767 - DNA, 570 bp, Homo sapiens
ggccctactgcaccatgatctatatccatgaagggtgaggtggctcaggctgttgattcaggcaagttgttgctccaaatacctgaatttctgcatgggggtggtacagagagagccctactgcaccgtgatctcaggatagcaggctggggcacccaccaatgacacacatagaccagttccaggtcatcaagctggccccagctataagtctcatcacccaggagaaactgcagctgtggcagctctcctcccaccccaagcttgcaacaggggaaagcacaattctagcacctwctgctaaggagctttccacagttctggctatggaggctcctactacactccagagaaagtgctcccatccccgaactgagactaaaatgcccacatggctaccctgttgggttgctaaagaatggctgactttgtatgcacccggattaaaagtggcgtcctactcttggtcccagggctgggaaaatgcctgcagctttttcctgtgtctttcccctacagcagctccaagcctctccccaagctagatccgaggattgggagaaacaaagt

SEQ ID NO: 157768 - DNA, 524 bp, Homo sapiens
gatcagctgagtcaccttgttggcatggggcagtatccaggcctcagcatccagctcctcctagatcttctttagcttctcagcggtgcaggtaccagctcttttgcagtcactcacatcatccaagcaggaaacttagaagcagtcagagctcaccatgagtcccaatgagagataaacacaggttctaatttatcctcatgggttgcagtttgttcttgatctcctgtgcttcatgcccttcttygctttacaacttctcacccaactgacttagaccagcactaggagtaacaaacttacataataacctatccagttcctggaattgcagaaagtaagtccctataataaatctcctttattactcagtgtggttctgcttctatgattgaatccttgctgataaacctgcatgacaaattgtactgaaatcagttacaaacatggcttagaaacatttcaaaatattggctgccattttctatcaaaatagtttctgttaagagcatgaatttctgaaa

SEQ ID NO: 157769 - DNA, 552 bp, Homo sapiens
ttattttcctcaaatttctttaccaaaacattatgaacggtgttcactcataattttagggggaagattaaataagatcatttattaatacctccattttatggacaaaatcccactttatagaagattaaataatcctattctatggaattaagtaatctcattttaaaatcccattttatgaaagatttttaaatcccatttttgaaagattaagataatttattaatatctctattttgtgaataaataaattgaatctgataaacgttaaatgatttgcccaacagcatgtgacaaataactagggagccaggaccctggcaacctgacttcaaattttcggttctaaagcaatgcccagattgtgtcccagtaaaatagycatcctgatagctccatcagaattgtttggattaatgagatttgaagcattttctaaattttcctgtattcataataacatagtgttttcaacacctgatacttttaagcctatatgaaattgctgatcttgagccatttgtgatctcaaaagtggtaatttcacaa

SEQ ID NO: 157770 - DNA, 611 bp, Homo sapiens
taaactcatataaaacaagcaaggccactggcctggaaaaggcctttcttctgtgtgtastcctcctccacgtctcctacagacaacagagttctttggatcaaagaatcaaagaatcctggagcaaccaagaaaagagttccttttgtttttgttcaaaacagttccggtaaaccagccccaggctgcaaatctccaaatcataaataattgctatggtgtgcagtgaaatgctagtgcctagggcagtcactaatgtcagagtaaggcaggactgacatctgcaaaagtgtaataataaacttatctaaggatccaaaatgtttgttgtggataccttactgagagaggaggattagcctagggaaaaagataagagctttgggatcagacacaaatgaatagaatgctgcctctcctgaaaataattatgtggccttgagcaaatcactcaacctccttgaattttaggctctacatatgcaaaatgggaataatgaaatctttcttgcagaattattctgaaattcagtgattttaagcctctaacacaggtagcacagagtaggcacttaatcattggtattgttactttcattttctcaccatcc

SEQ ID NO: 157771 - DNA, 559 bp, Homo sapiens
atgctgttgcaatactggcagcgcatcactaacttcgtatgaagaacactggcaccaaatttttctagatttcagatgttgagctctgtttttaagtctcaccctcaccacacacatttgggtacttagccagctggtcagctggtcaattcctatggatcaagatgagagcaagtagttattcttctgagagcttccgatgcctaaaaaagtaggaaaataaagccaaaatgaggaaaccaatgtataataaacctaaagagattgtcaaattgcaggagccagaagtagatattaaatgaaatctgcagcatagcacctgggcccctgactgatctccccttcactccaggcacatcatatgcttctgtacctaaaatctccagggctgcaaatgtggaactctacccagccagaggacctgaacatgcgccatcatyctctcgctggaatatcctctcccacttcccttcttctcatcagccactgtgcctaaatgatttcaacaaatccgtcaggtgccaactcaagtgtcagtttctcagagattttcccaaac

SEQ ID NO: 157772 - DNA, 553 bp, Homo sapiens
cacatgcagggagtacttggagattttaatcaggacttacagaatcagaaamagccaacaaatatagtccactggaggctgaatcgggagcccagagttttgggaaacactgatcaaccaaggacctggatgaaggtgtatctgacagcatatttcagtgacctactgaaactcagaacaactttatatctttccccagcttccagacacctccatggaataaactaccagcatttcaaactaaatatgtaccaaaagcaaacttaccatttccctttctgcctagactctcccgtatcatcctcaccctgagccttcccctcaactgacacatacacactccccaacaaccaagagtctattcttctttctgtcttccttatttgtaataatggacattataaaactatcacctaaggaatttattgtcatgtcattattttttattcctccctgtgtactgacatctggagactgatgcctgtaagagccaacctcccccaacatggcacctgccaagagtgaccaccagtcactgtgcttagctcacccc

SEQ ID NO: 157773 - DNA, 498 bp, Homo sapiens
tctctctattcattacacttcagaactatcatcactctagtgaattttaagaaagcacatgaacttattttaatttgtatttttcacatatatttctaatactgtgtatgaacattaaatagatccagcaacagaatcgcaaaagcacccataggttcttgagtatataaaaataattctcaaaggaaatctagaaacagcctgttattatcccagttttacagatgagcttacaaggttatgttacttgcccaagttcactcatgaaaatgatggttcttagcagttgctagtgggccagagtaaaatttctcctagagtaagattcatacrtttaaattttgcgatcagtgcagctgacataccctaatatgagcactacattaattcaagtttatagatccaattactgcaagaaaagaaaataacctaatgtgttaaactaagatcaaagatccccaactgtgttttcaagttgatttgaaccacaatgtttga

SEQ ID NO: 157774 - DNA, 544 bp, Homo sapiens
gatattccaaagagccagactcttaatcgggatacaaaactaggactgaagtgggttcttcctcagtccactcattcagtagaagctgcttcatcaacatggagtcaactgaactcaatttccccttctcaaaaaagcaatagaaaakaactataatacagcttctccttttcaggtatttgataactactaaggagacaagaacatatgcacaagaaaaaatgaaaaattactactgtgcaatgggaaagctcactaccctctgcaaaggctgaacatattattatatgttgcatcatgccatggtgtactaccccctcactaactctgtatataatcatcctttagaaaggcaatagctatttattacattaattaccacaatcataagggaacttttagagaatacgtagtcttttggtcatttctaaccatttcaactacagccatcatcctaaatagcctcaaattctcaagcagcatttgtttgctcaatgagaaaagtacagtgaccaaatctatgtggctgaactgtcagcaacaa

SEQ ID NO: 157775 - DNA, 544 bp, Homo sapiens
gatattccaaagagccagactcttaatcgggatacaaaactaggactgaagtgggttcttcctcagtccactcattcagtagaagctgcttcatcaacatggagtcaactgaactcaatttccccttctcaaaaaagcaatagaaaataactataatacagcttctccttttcaggtatttgataactactaaggagacaagaacatatgcacaagaaaaaatgaaaaattactactgtgcaatgggaaagctcactaccctctgcaaaggctgaacatattattatatgttgcatcatgccatggtgtactaccccctcactaactctgtatataatcatcctttagmaaggcaatagctatttattacattaattaccacaatcataagggaacttttagagaatacgtagtcttttggtcatttctaaccatttcaactacagccatcatcctaaatagcctcaaattctcaagcagcatttgtttgctcaatgagaaaagtacagtgaccaaatctatgtggctgaactgtcagcaacaa

SEQ ID NO: 157776 - DNA, 598 bp, Homo sapiens
actaatatccagaatctacaaggaactcaaatcagcaagaaaaraaatcaaagaatcccatcaaaaagtaggcaaagaacatgaatagacaattctcaaaagaagatatacaaatggccaacagacatatgaaaaaagtggtcaacatcactaatcattgggaaaatgcaaattaaaaccacactgagataccaccttactcctgcaagaatggccatcattttaaaaaattaaataaataaataaataaatgctggcatggatatggtaaaaagggaacacttttatactgccagtgggaatgtaaactagtataacctctatggaaaacaatatggagattccttaaagaactaaaagcagaactacaatttgatccagcaatcccactactgggtatctacccaaaggaaaataaatctttatatgaaaaagacacttgcacacatatgtttgtagcagcacaattcgtaactgcaaaaaatggaaccagtctgaatgccaaccaaccaacgagtggataaataaaatgtggtatatatacaccatgggatactactcagcctggaaaaggaatgaattaatggcatttgcagca

SEQ ID NO: 157777 - DNA, 598 bp, Homo sapiens
actaatatccagaatctacaaggaactcaaatcagcaagaaaagaaatcaaagaatcccatcaaaaagyaggcaaagaacatgaatagacaattctcaaaagaagatatacaaatggccaacagacatatgaaaaaagtggtcaacatcactaatcattgggaaaatgcaaattaaaaccacactgagataccaccttactcctgcaagaatggccatcattttaaaaaattaaataaataaataaataaatgctggcatggatatggtaaaaagggaacacttttatactgccagtgggaatgtaaactagtataacctctatggaaaacaatatggagattccttaaagaactaaaagcagaactacaatttgatccagcaatcccactactgggtatctacccaaaggaaaataaatctttatatgaaaaagacacttgcacacatatgtttgtagcagcacaattcgtaactgcaaaaaatggaaccagtctgaatgccaaccaaccaacgagtggataaataaaatgtggtatatatacaccatgggatactactcagcctggaaaaggaatgaattaatggcatttgcagca

SEQ ID NO: 157778 - DNA, 598 bp, Homo sapiens
actaatatccagaatctacaaggaactcaaatcagcaagaaaagaaatcaaagaatcccatcaaaaagtaggcaaagaacatgaatagacaattctcaaaagaagatatacaaatggccaacagacayatgaaaaaagtggtcaacatcactaatcattgggaaaatgcaaattaaaaccacactgagataccaccttactcctgcaagaatggccatcattttaaaaaattaaataaataaataaataaatgctggcatggatatggtaaaaagggaacacttttatactgccagtgggaatgtaaactagtataacctctatggaaaacaatatggagattccttaaagaactaaaagcagaactacaatttgatccagcaatcccactactgggtatctacccaaaggaaaataaatctttatatgaaaaagacacttgcacacatatgtttgtagcagcacaattcgtaactgcaaaaaatggaaccagtctgaatgccaaccaaccaacgagtggataaataaaatgtggtatatatacaccatgggatactactcagcctggaaaaggaatgaattaatggcatttgcagca

SEQ ID NO: 157779 - DNA, 598 bp, Homo sapiens
actaatatccagaatctacaaggaactcaaatcagcaagaaaagaaatcaaagaatcccatcaaaaagtaggcaaagaacatgaatagacaattctcaaaagaagatatacaaatggccaacagacatatgaaaaaagtggtcaacatcactaatcattgggaaaatgcaaattaaaaccacactgagataccaccttactcctgcaagaatggccatcattttaaaaaawtaaataaataaataaataaatgctggcatggatatggtaaaaagggaacacttttatactgccagtgggaatgtaaactagtataacctctatggaaaacaatatggagattccttaaagaactaaaagcagaactacaatttgatccagcaatcccactactgggtatctacccaaaggaaaataaatctttatatgaaaaagacacttgcacacatatgtttgtagcagcacaattcgtaactgcaaaaaatggaaccagtctgaatgccaaccaaccaacgagtggataaataaaatgtggtatatatacaccatgggatactactcagcctggaaaaggaatgaattaatggcatttgcagca

SEQ ID NO: 157780 - DNA, 569 bp, Homo sapiens
cctccctgtcctgtgtccagtcgactccaatgctaaagggaacctatgcctctcatattccacgtggcgtggctctcaccagtcctgcttcttcctcacaacttctctcctcgtggtcttcttatcctgtgtcttttcccttcttaatcacagtgttatagataaagggtccctcgcctcatgaaatccagtccccagctgatttgcttgcctggcatacaacttttaagtactctccactgcagtctrtaaagccaggacaataacactcaccctcacacctcaggattttgcacattaacttgttaatggtttggcaaacattagccccaccataaaggctgagataaaactctgtcttccctttctgttcttttttttttttttaactaaagctaaaaatcttcctgtgcattagaaagctgatattttctttatgataactgtaaaaatcagcaagttggatgcactggggaaaaaaaccaaattgcacatacctgtacttcactttttatctaaccaaacagtgcaatgttatggggacacagatgccttctctgtgtaagtga

SEQ ID NO: 157781 - DNA, 594 bp, Homo sapiens
tttgtaggttaaatttccaaagtaaaaaggaataaaaacaacagcaatgacagagcaaaccccttgacctcacattcccctctcacaatcataccacttctgggcctcctgtctaaaaaaatttcttgaaagagttgactacagacacaattttcgcatcttcaccttccattcaagcttttctccccacaactccgtggactcatgtcaaggttcttgaggtcattgaatttctattgaccttcatgttgccaaacaagaggtcattttctttcctcacttgactcatctctcagcgacattcgttagtttcttttcttggtctctgtctcatctttcatactcttggtgytcctcctctctattcacatctttttagtttcattttctgtcttctctttccaaaacctctaaactgtgacatgtatgagggttagcttcttagccccagttcgctctctcttttttttttttacactcttacttcatcagggactatggctttaaatactgtctctatgcctatgaccaccaaatcaacacctatggccctgacctcaccccaaagccccaaagtcatatatctaatgtctt

SEQ ID NO: 157782 - DNA, 531 bp, Homo sapiens
cacatccagaagatgtgcctgttaggttcatcagcacatctacacagtcccagtgtgagtgagagtggtgtgggtgtgagtgccccctgtgatgggatggcatcctgtccggggcaattttctgcctggcatcctgagctggagggataggctctggccacctgcaaccctgaactggaataattgggtaaatcatgatcttacttgtttttattaatcattcttaaatgtatgtatagttcacatttgtttcaatgtyagaagtgttttgggtctttatttagaagtctggtgatgtttttgcaaccagaaatatgccataggaatttcacttttgtttggatcaaatagcctgtggtcaaattggtttccttatagttattttgcttaaaggaacagtttccaagaacctgtagacaacattcagtgaggacatactgtagttggtacagtgtatcagatgcttccaagggaaaccatggttggacatacagattttggagttatctgaactgagtaaataagtgactg

SEQ ID NO: 157783 - DNA, 531 bp, Homo sapiens
cacatccagaagatgtgcctgttaggttcatcagcacatctacacagtcccagtgtgagtgagagtggtgtgggtgtgagtgccccctgtgatgggatggcatcctgtccggggcaattttctgcctggcatcctgagctggagggataggctctggccacctgcaaccctgaactggaataattgggtaaatcatgatcttacttgtttttattaatcattcttaaatgtatgtatagttcacatttgtttcaatgttagaagtgttttgggtctttatttagaagtytggtgatgtttttgcaaccagaaatatgccataggaatttcacttttgtttggatcaaatagcctgtggtcaaattggtttccttatagttattttgcttaaaggaacagtttccaagaacctgtagacaacattcagtgaggacatactgtagttggtacagtgtatcagatgcttccaagggaaaccatggttggacatacagattttggagttatctgaactgagtaaataagtgactg

SEQ ID NO: 157784 - DNA, 613 bp, Homo sapiens
taatgactaattctaaaaactacgttttcattgcaccttatcatattttaaactcaaaatactaatgtatttttatttttattcataaaaaataacttactttctctgtaataacaatgcaatttctgtttgaactttcatatattcttgtgccattttacaatgctgttcaaacactgccatagattctttggagtttgggcacggtgctagaggctgaaaataatcaggaatgttaaaacataattaaatcaaatttcaatatctagctaagatgagagtcaagacagagactgtgatatatttttatagcactaaagcaatgatcttttaaaaataagtgttaaaccatgccctrgaaaatctcagtgtccttttgtcagaattaactcagcatttaaatctattcttgctgttttaacagtctgttacagagaatcatgattgttggagttgtagtctctggtatgacatttcaggctgcaaacaggctcaaactaaatgatgtttatagccctcatactcatgagggggcactgaagtatattatttacattttcagtcactatgaacatgagaatgtatcacaaatgtattaaatagaaataagctt

SEQ ID NO: 157785 - DNA, 412 bp, Homo sapiens
ctttcctaagaacaaaagaattctcaccaataaccaaaatacagtctcacactaggcaaatttaacattggtacaaggcttttatctaatgcaaagtttatattcaaatgtttaggacagggttcagcaaacttcttcagtatcgggccagacagtaactattttaatcttttcaggtcagacattctctgttgcaactagtcaactttgtaacggtrgagtggaagcagctacagacaatgcataacacaaatgagtgtggttaggtcccaataaaactttatttacagaaacagatggtggtatggtctagaatttttattattttaaaaaattggtgctagattttattttagccttataaatctcataattcaagatgtattacagaattcagtcttggttttgaaaa

SEQ ID NO: 157786 - DNA, 412 bp, Homo sapiens
ctttcctaagaacaaaagaattctcaccaataaccaaaatacagtctcacactaggcaaatttaacattggtacaaggcttttatctaatgcaaagtttatattcaaatgtttaggacagggttcagcaaacttcttcagtatcgggccagacagtaactattttaatcttttcaggtcagacattctctgttgcaactagtcaactttgtaacggtagagtggaagcagctacagacaatgcataacacaaatgagtgtggttaggtcccaataaaactttatttacagaaacagatggtggtatggtctagaatttttattattttaaaaaattggtgctagattttattttagccttataaatctcataatkcaagatgtattacagaattcagtcttggttttgaaaa

SEQ ID NO: 157787 - DNA, 574 bp, Homo sapiens
atacacgcaagacactctgaggaagttcttaaatatttggagtgaattattctggaaaagactgaaattcttaccagaagtagtggaggcttgaggcccttataagttaggcctaattgtaaacatggcttattttgcattcacaggttggtgaaaccagggacaaagtgatgacatagatgaaagcaagcttttgactatttaagtgaaaagatgtaatgatgggaggcattatagcccataatggacagggccagaattttactcatcagcctggacctcttcacacagggcactatactcaactcagttttcttgcaattggttggttatgctcgctcctgcaaatgcaatttgtaaagcgccttgtgtccacagctcctcagtctgatggatgcctgacaggtgcatctcaaaggctgccctgagggacctgattgccccttcctgacccaggaaacyttggacccttacccaggaccccagcttggctcagtgatgggccattccctccaccgtcctctcctctcatgagtagttttgcttggagatcaccttcctgacagccatttcc

SEQ ID NO: 157788 - DNA, 589 bp, Homo sapiens
ccatgattggaagcttccagaagccctcgccaggagcagatcctggtaccatgtttcccatagagcctgcagacccgtaagccaaaatatacctcttttctytataaattacccagcttcaagtattcctatatagcaatgcaaacagactaacacatataatatttactttgtattggttatacaaagtaatttagagatgatttaaagtatatgggagaatgtgcatacaatatatgtaaatactgtcccattttacataagggacttaaacatctgctgattttggtatccacaggagttctggaaccaatcgccctcagataccaagggatgatcgtatgtatatccgttataggggagtgggtatgaaacaaaacagagataatcaaaatacctgttttatagtgctactgtgaacattgagtgcattactacatatacaatatttaaatcagagtttggcacaaggtgagtgctcaataaatgttagctatccttattattattacttatatataatacatgcaaatatatatgtgcattttatgacacaaagatacagacttgaaataatagtcctcatctt

SEQ ID NO: 157789 - DNA, 477 bp, Homo sapiens
ttcctgggtcagttggctaatggcacataccccgtctctctctaagtgggcaatgacaattccagttagtttttcttcaactgactgtttagacagaagaagagaaggaatgatgtaattataaatgtttaaaggccttataagcttctttgcttttccaagaaaataaacaaagttgagagttctcaagtgggatccttgaaatcaagatttacttcctggcttggggctaacttgctatggtttattgacattttttcagctctctgagcctcggtttctttatctagaaaagtagacggctggacttgatgagttttaatttgcctttcaggttctktgactcaagagaggctgtgttgagtactgggaccctgagctcagccctgcctaggctcaaatccaaaagtaccacgtccagctgtgtaaccctgggcaagtcatttcccctccatgtccagtgtctttaatatatgg

SEQ ID NO: 157790 - DNA, 615 bp, Homo sapiens
tatcataatgctatttttaaaactaagaaaagttttttatttgaagattatttttttaaaagcagaataaaaacttggcctagagtcctgaaaatttactttttataatactcaactcccagagcagatcttcatctcatttcacattcaatattagaatctcaccatttccatttaagcaagatttaataaaatgcatgctgattttacagttaaaatagtgggaaaaaaatagttgaaacagcggcagagttcccccttttgtcattttcattcttccttaaaaaggaatcaggcagagaatccacacatgggtgtacacatgtacacacacacacacaaacattttccttttgagtccctgacgctcatggtctaaggaaatttatttaacattttacatagctcaagaggtatctcttctcagtgtttgaattctactgaggagaacataagaatgctttttttttttttaaaaaaaaaatagatttagggagtacaagtgcaattttcttacacaggtatrttgtttagtggtgaagtctgggcttttagtgtatccatcctcttaacagcaaacactgtacccaagatgtatttttttaattcttgtct

SEQ ID NO: 157791 - DNA, 566 bp, Homo sapiens
ctgaaaattcccaaaaccagaatgcctcttctcctccaaaggatcacaactccttgccagcaagggaacaaaactggaaggagaatgagtttgatgaattgacagaagtagcttcagaaggtgcgtaataacaaactcctccaagctaaaggaccacgttctaacccaaggcaaggaagctaagaaccttgataaaaggttacaggaactaactagaataaccagctcagagaagaacataaatgacctgatggaactgaaaaacacagcaagagaacctcgtgaagcatacacaagtatcaatagccggaatcartcaagcggaagaaaggctatcagagattgaagatcaacttaaggaaataaagggtgaagacaacattagagaaaatagaatgaaaaggaatgaacaaagctatcaagaaatttggaactatgtgaaaagaccaaacttatgtttgattggtatacctgaaagtgatggggagaatggaaccaaggtggaaaatacgcttcaggatattatccaggagaacttccccagcccagcaagacaggccaacatt

SEQ ID NO: 157792 - DNA, 597 bp, Homo sapiens
gatgttaagtgaaataagccaggcacaggaaaacaaatactacatgatctcactcacatgtgaaaactaaaaaagttgatcttatagaattgagcaaggaattatggttaccagggactgaagtgatgggaagatgttgttaaagggtacagaatttcagtttgatgggcagaagtccaagagatctattgtacagcatgttgactataatattatattattgaaaaatgctgagagtggatgtaaagtgttatcatcacacaagtgataatcacatgaggtaatgcatttgttgattagctagatttcatcattccacaatgtatagacacttcaaaacaccacgytgtacacagtaaacacatacaattttatctgtcaatataaaaataaaattaaatatttttgaagatgcagaaaaaaaccctaagatttgactttcttttcaatgtctttgggaaatcctcccagtttccaaccaccttactttgcacagaatacttgctttagtcattaatagccttcttttaatcaaatgcaatgaaattgatattctaaaccctccgcgatctctcagaagcctatattgccattagc

SEQ ID NO: 157793 - DNA, 597 bp, Homo sapiens
gatgttaagtgaaataagccaggcacaggaaaacaaatactacatgatctcactcacatgtgaaaactaaaaaagttgatcttatagaattgagcaaggaattatggttaccagggactgaagtgatgggaagatgttgttaaagggtacagaatttcagtttgatgggcagaagtccaagagatctattgtacagcatgttgactataatattatattattgaaaaatgctgagagtggatgtaaagtgttatcatcacacaagtgataatcacatgaggtaatgcatttgttgattagctagatttcatcattccacaatgtatagacacttcaaaacaccacgttgtacacagtaaacacatacaattttatctgtcaatataaaaataaaattaaatatttttgaagatgcagaaaaaaaccctaagatttgacyttcttttcaatgtctttgggaaatcctcccagtttccaaccaccttactttgcacagaatacttgctttagtcattaatagccttcttttaatcaaatgcaatgaaattgatattctaaaccctccgcgatctctcagaagcctatattgccattagc

SEQ ID NO: 157794 - DNA, 578 bp, Homo sapiens
ttttgctgatgtcagtctcattaaataaataaaagatgattgaaatttacacaattacttaggaaaatatttgtgaaataaatggayctccttaccaggtgtaacacggtgtagcaatcacttctcctgagagatactcccaatctttccaaatacatgggcagctttcaggaacataacactttcctctgtgctctgccattcttccaaatgaagaataaaatgctatttagtatgaactacagttttcagttttaaaatatcagtaatcttagcatattaacactgtcatctatatttattagagctgtctaaggcactctatctaacctactgaggagatgaatccagtctttctcctcgctttttccacatagtaccttacatatcgcagtactaaatgccaggcaaatgactagatgtgatatgttgacctttttgctattcactaagtgcatgaaaggaagacagaagcctaaatttctaataaagtgagtcatcccgaaaaaaaatttatagaggaaatgagagtcccgttcttcaatatctgctacttaaaagagtctatagggcctaca

SEQ ID NO: 157795 - DNA, 614 bp, Homo sapiens
gaaattatcttctctagtcaatctgcacaagtcttcttacacaaattcttatgtctgcactgctgctcccaacatgctttttcttcattcaratttcagtctaagcctctcctttccatgagtcttctcctgtcatctactgtatgaattcaagtcagcatttattaaatgcaccactggttggatatttaggttattcttttgctgtatagttttgtttgcttttatttttattctttactaattgtctccagtgtgagcctattaaaggcagggatgcatagctgtccctttcctgctctcagcacatatcggaaatacagctccacaaaaatttattgatcatcccctatgaggtaggcactactctagctggtactgtaagacaaataagacatagttcatgtcttcatgaggtttgtagtttaacagaaaaaccaacgcataaacagattgattacaaaattattactcttattattattattattatttgagacagagtcttgctctgtcatccaggctggagtgcagtggcatgatctcagcccactgcaacttctacctcctgggttcaagtgattctcctgcctcagcctaccaagtagctggga

SEQ ID NO: 157796 - DNA, 475 bp, Homo sapiens
cttttcctaatgttaggctgactacctagcatttatagagtttgtatgtgtcatcaggccatcagctacagatagtgatgatgattatgtttatgggacctagtgattacctcaagtgatctagactttggaagggaagagagacaagcaagcagccacttacaataaaatgtgatagactcaaagacatacataaagactttggggagtctaaatgaggtgcagctcactcagctctggagaggggtgtactgaaatggtcaggagtgttttctgaaagaggtgggtgattatacaatgattgtctcattgagcatttaaggatgaggaattgctgggttgaaggggatggggaaagtgtttcatgcagatcaaggaggtgtcgaattttgcagcatatttagggggaaccagaactaaattggttytgctacagcagagagagggtaaaggagaatgtctggatgtaggtaag

SEQ ID NO: 157797 - DNA, 582 bp, Homo sapiens
cgcctactctccagctcccctctcagctgagagccatttccatcactaaataaaattccccacctccaccatccttcaagtgtccatgcaacgttattcttcttggatgccagacaagagcctgggacccaccaagtgtgtttacccaaaaaggctgtcacacaggccctttgctctcactgatggagggcagccgtcccacaccatgagacaatgggccccctgcgttgataatacactgcggtccatggactgcagagctaaaagagcaattgtaacatgctctcttgggcttcgcgggtcacagtcacccscacctgggcacctccatggggcccacatggagccacaccaagaatggcaaaaagtgttaggaattgttaatcaacccagctgtgtggattatttcattaatttgaacctactacccagtcctcaggaaatggaacaaatataggtagtgtatactgaaatcagctggtggaaatttgagaatgggggtggggtggggataaatatcaagtgaaatagcctagaacagttcagagcatggggtctcccctaggtgaactactaaaactg

SEQ ID NO: 157798 - DNA, 556 bp, Homo sapiens
attgtttccaggttttgcctgttaagatcatcagctaagaacattttcattcatgtttgttgctagacgtaagtacttcatttttttcatgatatacaaatatataagcaggctagttggttcatgaagtatactttttttttaggttttgcaaaaatttttttcataattattacattgaattatgttgtcacttacaatgtaacaaggtcccagttgttccatgtaatagcccataaatttattttgaacttttttagacagaagagaaagsgagcaaaagagaggagagagagagagagcaagagagagcgagacagagcaagcgagagagagagagaaactatagcaccagattacaatctatgaaagacacagggctctgtaaagcttaaactaagataagagaacatatctgggagcttacacgtactgtattagatacagtaaagaatacagattttctataaaataagatgagaattctacaaacatagtctcagtgtttcttacatgtgttaatgctccaccatccctatctcgtctgctagccagg

SEQ ID NO: 157799 - DNA, 476 bp, Homo sapiens
atgctaccataaacatttctgtggaggtttttatgtggacatattttcatttctattgggtatatatatatatatatgtaggtagaattggtagggtaaataataattcattatttaaccatttttgtaactaccagactgtttttaaagtgactgcacaattttacattcccatcagcaacacatagatgttctgatatrttcacaagtttgctaacacttgttattgtatatcagacattctgagtctagccttcaaaatgggtaaggagtagtatctcattataattttcatttgaacttctttgataattaatgattccaagcatcttttaatgtggtggccatttgtatatctccatttaagaaatttctattcaaatccttgaccattttttattgttttttaaaattattgagtctggtatgtgtgtatgtgagatactcacacacgcacacacacacacatataacat

SEQ ID NO: 157800 - DNA, 619 bp, Homo sapiens
gtattgcctacgttttcttctagggttattatgtcttctttaccagtggaagaggcctcttcatgccccatagaagtggaatctgacctctgaaggaattaactctgtatttcctgaggaaactataatgaccttacctcargcagttgccatgtgagacaatgctgagtttcctcaagaaccaccccatcacccatcttggcttctagatctataattaaactcaaattccaggaggtccataaagatgatatgcaaagtgtaatacattaggaggtgtattagagtccaaaataattactttcctaattgatacagacagaaatccagggaatatgcataagaatggatattaagagtgtgggataatgatggaagaaagataaagttggatcagagaaaagttattgatatgggctcaccaaccagagactcagtatttattattacagccaaggaagttagaaagtgctctcacagtgtgtttgttttgttggatgcaacaagatcaaaaggtagcccactgtgagccaattcgtttaatgttgaggaaaagattcaaaggcctaaggattgctagagtgaatttgtaatttaagacttacctacaacaggagga

SEQ ID NO: 157801 - DNA, 382 bp, Homo sapiens
gaattctgtgagctgcttcagcaaattaatcaaatccaaagagggtattgtgggagctccaacttgaagccagctgatcagaaattctagaggcctagacttgtgacaagtggggcaggtgtaggtcttggggactgtgccctcaccctgtgtgacttgacacartcttcaggtagatagtgacagaatttcactggaggatacctagcccatgtctactgtttggtgtgggaggaaagtcttccctaaaatagcatgtaacaattcagtacattaattgagttactttcttttctcattactatgtcatctgttagtattttgaagaaagtcagtgtaaactgtagaaacctttaacaaacagaaaaataaacaatttgaa

SEQ ID NO: 157802 - DNA, 563 bp, Homo sapiens
ttggacaataaattttaagaggaacaccaactttggagataaatataggaagtcaagacattagattttatctccttggagaaaatatagatcagccaaggaaaaaaatctaatgactgaatgttgatgtatactatacttaagaagtgagagaaagaatasaataatgaagaattcaagtagttatataaaaaaagaaacaatacagagtaaagtcagttagctaagtctaagattatggtatcttcattattataatatcatattggttataactgacaaatattttatttataattgtttttccatgttaataaacaaaattggtttagggcttgccactgcatataaactctctgtttataatagactgagaatggagtgagaaaatgtgcactttttaatccatgttggaaatttttaggaggaaagaaattatgttgcccttgatttttctttaatttttacagaaaatcttcaggcagatgtgcacagaagttaaaagtttagaagggcttaaactcttattatatacatacacaggtcaatttagcttttctaag

SEQ ID NO: 157803 - DNA, 431 bp, Homo sapiens
tctcctgttggctattttatgatgagatagagctgcctgagtctggtctggtatttataccatcaaaatacatgtatttgacacttatatgkcagacaccaatgtacagaaggaaccactcctaacagtttagattaacaatcacagtcacattctcttagtatatcaattagttcctggtgtttaagtttagtgtaaagctacctccttacaaatttaaattcagcctgaatgtttttctgtacatcatgaagtataacaagtggaagtggaaaccgaccacagcccataccagtgcaaatcactgagtttttgtcagtcaaatgcagccaattgtttgaactgtgttcaaataaggcaaaggccaacctgtaactaatccagctgtttcggtacctcacttctgattttgcatttcatttccctttttt

SEQ ID NO: 157804 - DNA, 420 bp, Homo sapiens
ctattttatgatgagatagagctgcctgagtctggtctggtatttataccatcaaaatacatgtatttgacacttatatggcagacaccaatgtacagaaggaaccactcctaacagtttagattaacaatcacagtcacattctcttagtatatcaattagttcctggtgtttaagtttagtgtaaagctacctccttacaaatttaaattcagcctgaatgtttttctgtacatcakgaagtataacaagtggaagtggaaaccgaccacagcccataccagtgcaaatcactgagtttttgtcagtcaaatgcagccaattgtttgaactgtgttcaaataaggcaaaggccaacctgtaactaatccagctgtttcggtacctcacttctgattttgcatttcatttccctttttt

SEQ ID NO: 157805 - DNA, 456 bp, Homo sapiens
ttttatgatgagatagagctgcctgagtctggtctggtatttataccatcaaaatacatgtatttgacacttatatggcagacaccaatgtacagaaggaaccactcctaacagtttagattaacaatcacagtcacattctcttagtatatcaattagttcctggtgtttaagtttagtgtaaagctacctccttacaaatttaaattcagcctgaatgtttttctgtacatcatgaagtataacaagtggaagtggaaaccgaccacagcccataccagtgcaaatcactgagtttttgtcagtcaaatgcagccaattgtttgaactgtgttcaaataaggcaaaggccaacctgtaactaatccagctgtttcggtacctcacttctgattttgyatttcatttccctttttttgtctatagatcttcttccaccacatggctgctctagag

SEQ ID NO: 157806 - DNA, 595 bp, Homo sapiens
cgcaatttggatatgccaaaaaagaatctgtgtagtgtttcccttagggaaaaggtggaagttccatatttaaggaaagaaaaaatatatgctgaggttgctaagatctacagtaagaacaaattttctacccattaaagtgaagaaggaaaaataaattcattctaattttgctgtcccatgttaaactgcaaaagttacagtaacaaggcataattagtgcttagttaagatgaaaaaagcattgcatttgtaggtggagggcatgaatagaaacgtgttttgactgatagcaatttggcttgtactgtccatagtttcaggaatccactgggagtcccggagcatatcacccgaagataaggagaaactgctctgctttattcttggtgtacaggtcacagtttcttgctttatttatgtggggtttcttttgtttttttggacattttagagaacatattgttgaaattcttaacactattcctctaaggtaccatctattagttgcttgtttattttytagtgactggctgaattattttagtgaggcctatttttagcccctagctcctgtaggttaagcctccagaat

SEQ ID NO: 157807 - DNA, 491 bp, Homo sapiens
tgactttcattctgcccttcgtaattcactcttcctggaatcccagccctagtacttacacttgaggctcctacaatagtacatgttctgtaactctcaaacacatgtgattctcacaaatgccatgcttcacaaattgtttgccccagatcgagcacaatataaacacctatctacctttctaatctcatatgaagcactaatctcatatgaagtcatatctcaaaaagtttacaaaataccaaatgagaagactataatcatagagaaacatgaaatcgtatctattgagtgagtgcttcaccatcccggtggtatgtatacaatactgcatacatgtagtatagtacaaacggaagcayagaaataggacagatctcttcggttcatttatattcccatttctgttcccaactaaggccaaataacttcttttttatggtgattgtattatctcatcaatacatggatagctgctatctgaagctatc

SEQ ID NO: 157808 - DNA, 470 bp, Homo sapiens
ctgatgactatgccttggatgattgtcttgtcttgtgtagtatctctcaggagttctctgaatttctggaacctgtatgttgacctctttaktatgattgggaacattttcatgggatgtatccttgaaaatatttttcaagttgttaactctcctttcttctatctcaggaaacccagtgagttataggttgctttatataattctgtatttctcagatgctttgttcattttttacaattttttttttttttttttttttttttttttttttgtctgggcgggttgatttgaaaaacgggatttgagctctgaacattttttcccccggattgatctagtctgttgtcaaggcttccaaatgtatttaaaaaatcctttcagtcaagttttcaattccagagtttcagttgggttctttcttaaaaaagcggggcgggctttcaaatcttgaatcattttgcctgctt

SEQ ID NO: 157809 - DNA, 470 bp, Homo sapiens
ctgatgactatgccttggatgattgtcttgtcttgtgtagtatctctcaggagttctctgaatttctggaacctgtatgttgacctctttattatgattgggaacattttcatgggatgtatccttgaaaatatttttcaagttgttaactctcctttcttctatctcaggaaacccagtgagttataggttgctttatataattctgtatttctcagatgctttgttcattttttacaattttttttttttttttttttttttttttttttttgtctgggcgggttgatttgaaaaacgggatttgagctctgaacattttttcccccggattgatctagtctgttgtcaaggcttccaaatgtatttaaaaaatcctttcagtcaagttttcaattccagagtttcagttkggttctttcttaaaaaagcggggcgggctttcaaatcttgaatcattttgcctgctt

SEQ ID NO: 157810 - DNA, 470 bp, Homo sapiens
ctgatgactatgccttggatgattgtcttgtcttgtgtagtatctctcaggagttctctgaatttctggaacctgtatgttgacctctttattatgattgggaacattttcatgggatgtatccttgaaaatatttttcaagttgttaactctcctttcttctatctcaggaaacccagtgagttataggttgctttatataattctgtatttctcagatgctttgttcattttttacaattttttttttttttttttttttttttttttttttgtctgggcgggttgatttgaaaaacgggatttgagctctgaacattttttcccccggattgatctagtctgttgtcaaggcttccaaatgtatttaaaaaatcctttcagtcaagttttcaattccagagtttcagttgggttctttcttaawaaagcggggcgggctttcaaatcttgaatcattttgcctgctt

SEQ ID NO: 157811 - DNA, 597 bp, Homo sapiens
cccaaatttgaaactatgtctttttatttaagaaatcgtctaaagcagtgatccgcattaacttttcagcaggttcgtaacttccagcttttaaatttcttstgtttctgctacttggaaaacctcagagtgaaaattttggcaagaaataattttcaatacaggcatcaactccttaatttgcaagagatcagaatcacatttttcacatataacttccagggacataattcaactaacatttacattacctagtacactattatttgtttgtaacaaaaaacaccctacaatgaagtggtacaaatacaaaagaattgtgtcagtctcttatataacagcccatggtggcagttggccaaggtatacagtcaatatggctagtcacaacagaaactctgattcctttcatcttgcttatctcccatttctcaggtgtgtaagtgactgtgttcctaccatcaagttcacatttcaacctgtaccaaagagggaggagaggaagtagaaagcaaacaattaccttataaatatctgcccttggagtacatacatcactgccattttaattttgtctcctgtaattaatagcatgcc

SEQ ID NO: 157812 - DNA, 393 bp, Homo sapiens
taacttgcactagtcaatattccattactccaattcattattaatatttttaatactaaaatttccatttgattaacttgtgactggatcctgactgatgaaatcttaaattatcagtgttttacartgacaaatatttgtttctttcttctgctatgtgtgcaatgtgggtcaatagtagctctgctctacagctttccatatgagaactaaggctaaaattgccacttaatctgaacactaatggtcatagtgtcagtgtttaaaaagtggaaaagcacaaagtgattatttaagcttctgcctagatttacttatattaattttgctcataatttgtcatcctaaacaagtcataggtctaaaactaatgtcaacagatttattaagtat

SEQ ID NO: 157813 - DNA, 558 bp, Homo sapiens
gttttttatgtgttgggcaagtccatcttactgccaactcattctttgtcaatattgtcttagattcttggttctttgaatgtccacttcaattttttgttcaacaaatagtgcagggaaagaaagtttttgtcatttagatttgattgttaactaattkgttatctcattaaagtgtcaggaaaatccccaaattgaaagtaaattgcaccaatctgaaaacagtttctattctaacaaaattttcaagtcagttcaaagggtcaatgatgtgataatgcctaagagtgttgggatacagcagacacttaaataccgatatttaacacaataaagctttctttgaagccaaagtgtttctactcagaagaaactctgaaggaaaatacaagttgaattggacagggatagtttagggaagggaatagggtgctcacttaaatacaggggaaagaaggacagaaggcagttcaaaaaatgtgattttcccccctattgctttgtgaacctgagagtaaagatagctctagggcaatgattcttactctctcctaaaag

SEQ ID NO: 157814 - DNA, 618 bp, Homo sapiens
gattggtctatattgaagtttatttcttgaccaagtatttctctttggttcacttctagaacttttgtggttgcaggtctttttttttttttttttttttttgaggagtgttgctctgtcacccaggctggagtgcagtggcgcaatcttggctcactgcaagctctgcctcctgggttcatgccattctcctgcttcagcctcccaagtagctgggaccacaggcacccgccaccacgtgtggctaatttcttgtatttttagtagagacggggtttcaccrtgttagccaggatggtctcaatctcctgacttcatgatctgcccacctcagactcccaaagtgctgggattacaggcgtgagccaccgcacccagcctgtagttgcaggtcttatgtttaattcttttatccattttgaattgatgtatgtatatggtgagagagcagcatctagtattattctgcatagtgatatccattttatttcagcaacattcattgaatacactgtcctatctgcaattttcttgacaccttcatcagaaaatatggatatcgttagctataatattctgttacattggtctgtgtgtttgtttttatacaaataccat

SEQ ID NO: 157815 - DNA, 609 bp, Homo sapiens
agggttggaatctttatttccattaagaatataccttcaaaacaaaatgaaactaattgacaattcaaagctttaagaggaaaaaagtggggccatgaaatccgaaatattctctctctcttttccatttctagttaccttcaccaacaccaactctgactctcccrtccacaggccatgaagacatagttctctctctctctttctctctgtatatctctctaagtatctacatctatacattaacatacagatataaatcatctcttgatattatatttctacattaccctatctttaagataatactattaatgtatcaaaatgtgtgaacaagtggttgaataaattatatttaaaatttgcaatgttcctcattttgcttgctttgagaatagggtaataagcttttggttttcttcaagctgttcaggaagaggtatgtatttgtaataacaaattttgccttctcaacctctatcctctataaagatgagtcattaaaatgcctcatagtcaataaggattggagtgggagggataagggcaaaaaactgtgattgaagagatatatcataatatttgggataaagaactaaatatgcacgg

SEQ ID NO: 157816 - DNA, 609 bp, Homo sapiens
agggttggaatctttatttccattaagaatataccttcaaaacaaaatgaaactaattgacaattcaaagctttaagaggaaaaaagtggggccatgaaatccgaaatattctctctctcttttccatttctagttaccttcaccaacaccaactctgactctcccatccacaggccatgaagacatagttctctctctctctttctctctgtatatctctctaagtatctacatctatacattaacatacagatataaatcatctcttgatattatatttctacattaccctatcttyaagataatactattaatgtatcaaaatgtgtgaacaagtggttgaataaattatatttaaaatttgcaatgttcctcattttgcttgctttgagaatagggtaataagcttttggttttcttcaagctgttcaggaagaggtatgtatttgtaataacaaattttgccttctcaacctctatcctctataaagatgagtcattaaaatgcctcatagtcaataaggattggagtgggagggataagggcaaaaaactgtgattgaagagatatatcataatatttgggataaagaactaaatatgcacgg

SEQ ID NO: 157817 - DNA, 609 bp, Homo sapiens
agggttggaatctttatttccattaagaatataccttcaaaacaaaatgaaactaattgacaattcaaagctttaagaggaaaaaagtggggccatgaaatccgaaatattctctctctcttttccatttctagttaccttcaccaacaccaactctgactctcccatccacaggccatgaagacatagttctctctctctctttctctctgtatatctctctaagtatctacatctatacattaacatacagatataaatcatctcttgatattatatttctacattaccctatctttaagataatactattaatgtatcaaaatgtgtgaacaagtggttgaataaattatatttaaaatttgcaatgttcctcattttgcttgctttgagaatagggtaataagcttttggttttcttcaagctgttcaggaagaggtatgtatttgtaataacaaattttgccttctcaacctctatcctctataaagatgagtcattaaaatgcctcatagtcaataaggattggagtgggagggataagggcaaaaaactgtgattgaagagatatatmataatatttgggataaagaactaaatatgcacgg

SEQ ID NO: 157818 - DNA, 553 bp, Homo sapiens
ttgttatgatgtaatttcccattgaatcctaggcattctggatattattttatgataatctggattctacttaatctttttcagcaagcagttgaattaaagcccaaaggcaaagtaggagtatatgttcagcttcctgctgggccctgctgacaccacgctagcaaaagyggggctcacacattgcctaattgcaacaagtggagtgagagtttagtttccccccttgccccactgacatcagtggaggggagtggggaaagcagcagagtgccaactagccctgccccccacaacctccttctactgcaatgccagtttggggtgaggcccagctccccacaggccctgctggacacaagttgggcagtttggaaaggtagtgctgaccagctctcacttaagccacctgatttagtcttcctgagtctcagcttgctggtggaccccactgacactaacctggtaggaaaatcagaacatggttggcttttgccgggggagagataaaagagctgctggtctcctacagagatacttccccagttgggaa

SEQ ID NO: 157819 - DNA, 553 bp, Homo sapiens
ttgttatgatgtaatttcccattgaatcctaggcattctggatattattttatgataatctggattctacttaatctttttcagcaagcagttgaattaaagcccaaaggcaaagtaggagtatatgttcagcttcctgctgggccctgctgacaccacgctagcaaaagcggggctcacacattgcctaattgcaacaagtggagtgagagtttagtttcyccccttgccccactgacatcagtggaggggagtggggaaagcagcagagtgccaactagccctgccccccacaacctccttctactgcaatgccagtttggggtgaggcccagctccccacaggccctgctggacacaagttgggcagtttggaaaggtagtgctgaccagctctcacttaagccacctgatttagtcttcctgagtctcagcttgctggtggaccccactgacactaacctggtaggaaaatcagaacatggttggcttttgccgggggagagataaaagagctgctggtctcctacagagatacttccccagttgggaa

SEQ ID NO: 157820 - DNA, 621 bp, Homo sapiens
cgtggactgggaggaatcaacctgggggcttcaggatacagcagactggccattcgtgggtggctaggcctggagtcatggcagacagacctcagggcagacgaagtgctctcacactgggtagcaagcaagacaggaggtgaggaccaagtggattgttttggggcagacaaagaatcttgaagakcatcaaaagatttctcagtccacagcaggacccttctgacagaggcagtggctgaagcgatacgtggcctctctgtgaagctaacatttccaaacccacgagagacttttccaagaagaattatagtcatccattcagagcagcaggagcttcagaagatctgggacttcaggtgtgagagtgacagacaggacactgaggagcagttgcatgaaaggggagaggtgggaggagatccatgtgtatacatttcagctttgttctctgacctcatctcccattagaaaattgagtcctttgcaatctaagggtagaatatgattacataaagtgaataaatatatcttttttggctgattttcatttttctgtttaaacattaatgtcagaaaagagtcccagaatgctaatcctctttcctcttccaaagtgtt

SEQ ID NO: 157821 - DNA, 558 bp, Homo sapiens
ggcagatgtcagagctcccagaagagttgcattggccttcttagatgcttttctaaatgtattcttcatttaaagcaaaatacaaaaagtayatattgaataaaattttttgttgatcagcatctttcaatttcattactgtatcatcaatttcattactgacatttttcaaatgtttctgtctcattactagggttttcatgtagacagtcatagtgagcaatcatttggtctttcaggccaaatgtcctgattttctacagggcatctgatttcctctttcattccattccacaaagaaagaaaaaaaactggctgagcatggtggctcatgcctgtaatcccagagctttgggaggccaaggtgggaggatcacttcagatcagtaatccaagaccagcttgagcaacatagcaacagcttatctccacaaaaatacaaaaatcagcaaggtgtagtggtatgtgcctgtgatcccagctactcagtaggctaaggtgggaggattgcttgagcccagggttctaggctgcagcgaagtatgatcaagccacaac

SEQ ID NO: 157822 - DNA, 422 bp, Homo sapiens
attttaaaatatttatgagaaaacaaattgaaaacaaagttaaaaaaaaaaacaaggaaaaacaactacatcacacatgacaaaggctaattttattaacaaagatctcttacaaataaatgtgagaaaacctaaccctcagaaaaatgggcaaagattgatcacaggaaaaaattatgtagatggccaataaacagatgggcacagataagcctgactgatgcctttggcctcaatcagcaactctatgtgtggtgtgagagggaggaacagggaccctcrttcctaacggcttaaattttaacctcctgtcttcaattttcagctgtttggctttggacagccagctaaccagttctgcgccttggtttggagagagtaataatagtatgtatatcctatgatggtttgagaattaaatg

SEQ ID NO: 157823 - DNA, 603 bp, Homo sapiens
gctttgtgaggcagagcatgctccacatccacagtatctaaatgaagattatgtatttgtctcttaggtatattaggaggaatcttgtctttggcagaagattattgtctcaaaagtccttctgaattcgaacacatgcggcacgtacaaaacagtgtcttagaataagtgcacaataaatagttgttaaatgaattgagctatcaaaattctgtgtccttgaaatagtataatgtgttccacattctatttgaagcatttgtgcataattttaatgcaatttcactctagtgagcagaattattttttggtgtgtaactctttccccaagcacrtttaatgttaatttagtaaagaaagcactttggcacctattggtatgaatatgtcaattgggaagaaataaatttttaaagcattccgtatgataatagagagacagaagaggccagtaatactatgcaaatgtgactttattcgtataaatctccacaaagcatatatttaaatccaccctcatagattagacaagacatgttagggaattgagaacagtttaataactcaacttttttttctcattactttatgctgatgagggtt

SEQ ID NO: 157824 - DNA, 586 bp, Homo sapiens
aaataataaagatcagagcagaaataaatgaaactgaaattaagaaaatgatacaaaatatcaatgaaacaaagttgttttttaaaaataaataaaatcaacaaaccttatgccttaactaagaaaaaaagagagaagacccaagtggaaaaaatcagagacaaaaaagagacatcacaattgatacctcagaaattcagaggattattagtggttactatgatcatgtatatatcaataaatttgaaaatttaaaagaaatagataaatttttagacatatacaacctaccaagattgaaccatgaagaaatctgaaacctgaacagataaatatagmgtaatgagatcgaagccataataaaaatctcccagcaaagaaaagcccactacctgatggcttccttgctgaattttatcaaacgcttaaagaagaactaatatttgttctactcaaactattccaaaaatggaggaggagggaatacttctaaactcattttatgaggccagtatcaccctcatacaaaaaccagacaaaaacacttcaaaaaaataaaactacaggccaatatccctgatgcaaa

SEQ ID NO: 157825 - DNA, 442 bp, Homo sapiens
atatgatcttataattggaaaaatctaaagacttaatcaaaaaagtattagaactgatcactttagtaaagatccaggatacagaatcaatatacaaaactcagtagcacttccatgtgccaacaataaaaaatctgaaaaagaagtcaagaaagtaatacatttacaatggctgcaagtaaaataatacacctatgaataagactaaccraaaaagtgaaagatctctacaatgaaaactataaaacattgatgcaagaaatggaagaggacacaaaaatggaaaggtattccatgttcatgaattggaagaatcaatattgttaaaatgtccacactacccagtgcaatctacagattcagtgaaatccctatcaaaataccaatgacattctccacagaaatagaaacaatagtcctaaaatgtatatagaaccacaaa

SEQ ID NO: 157826 - DNA, 437 bp, Homo sapiens
ctagtgcttaaagcttttgctagtaaaaattcattaaaaaataatgataacattaacattttttcacaacattcttatttgcttctgttaaacattgaatacaggatataatttgatattatttttgataattcagaaataacattatgagccttatttatctgatggtgttacattctgggaactcaagtatgtagctctcttcctgctggagaacttattttcctatctaaatcataactakgattttcattttttgctacactaattgtgaacctgatccaaaagctttctacttttattagtaataagtgactgttagttttccagcagagtggaaagaaacaagcagactaaataccttttgtgctcaagtacatactatatgatttttaagacagccatttccctgttcttggagaagtggacaagagcag

SEQ ID NO: 157827 - DNA, 624 bp, Homo sapiens
tggggtctacaggatggtggagggtgggagaagggagaagatgaggaaaaataaataatgggtactaggcttaacatctaagtgataaaataatctgtacaacaaatccccatgacacaagtytacctatataacaaacctgcacatatacccctgaacttaaagttaaattaataaaatacttgcaaaccaaattcaacagcacattaaaattatcataccccatgaccaagtgaaatatatccctataatgcaagtatggttcaacaaacaaaaatcaattaatgtgatatgtcacattaacagaatgaaagattaaagaaaaccacaatcatctcaatagatgcagaaaaagcattttacaaagttcaacaccctttcatgataaaaacttttaacaaattaggaatagaagaaatagacctcaacataataaatgccatatatgaaaagcccacagctgacatcacactcaatggtgaaaaattgaaagctttagttctaaggtctgaaacaaagtcattcttgacacttcaaattaacatagtactagaaatgttagaacatccaggcaaaaaataaataaataaataaaagacatccaaatcagaaaggaaaaactac

SEQ ID NO: 157828 - DNA, 352 bp, Homo sapiens
ctttcatcgattcacagcgttagaaaaatgcagcattgagaggcagcgcggaggtcaactggaccatcacccttaggttgtagggaagaaaactgagacctagaaaggtgaagcggttgtcccaaaggcttccagctgctcccagtactcaaggacttggagcacacttggggaaatgctcactgttgtattcccgttcctcactatccaggaggcctgaactctcaaactccgaatctgatttccactctcccaggaagkcttcggaaatcactgtaagttccttgcagattctcattgagcctctccccaggacccaccctttggccctgcgtgtctgcgactaggtatg

SEQ ID NO: 157829 - DNA, 416 bp, Homo sapiens
cctgggcaacatagtgggaatccacctctataaaaaaaaaaaaaaattagctgggcatggtagcatgtactcggggtcctagctacttgaaaggtggaggtgtgaggatcgcttgagcccacttaagtgagctgtgatcttgccactgcacttcaacctgggtgacagagtctgactaactcaaaaaaaaaaaggatcagggttgatgtgsctggagtagctgaggaaggtttggtggaagagggaacatgaagggtgggtgggatttgggtgagaggaaaggatcagcatgagtaaagtgtcaattgatcctcatcatctgttgccttctgtttctcctctctgcccttcccctaggaggcagacctccatgaaagtgtactaattcattaagcagagcaatgtattccaaagca

SEQ ID NO: 157830 - DNA, 501 bp, Homo sapiens
gtacgtggtactttatagctttcatgacaaattttaagagattacttcagccctgcattttaagtatagtaggtacttctgtccctgttctgtaggggaaactgaggctcagatgttaaaatgagctggctaaggtcacttaacatctgatgtaccacttattttttaattagatttttcttcttcctggtaattttaataattttacccacttgagttgtaatatatttgattatacaccataggttgtttcttctatttactggctaaaaaaatgtaaatttataaaaaactctcactatcttgcccaggctggcctccagtgcttgggcccttgtcattttggtggcaaacacttgtgaatgacttcctttacatgaatgtctttgttctaagyttcctattttctttaaacaaaataattatataaagccatctcagattaccataatttggagaaatctttatagcagtgcagctgaattatgtatttaatagata

SEQ ID NO: 157831 - DNA, 490 bp, Homo sapiens
atgggagttgcggggcaggggagaagggaacttggaatcttggcttttcttgcactattccatctcccaccacctcctttcggagagctctgggctgcttgatccccatgcactagcactgctagtgcctcgctacctgccctagcccttagaccactgctgccaacctgcccttctgtagagataacatcacattaatggagggaggtcgtgtactatcatccactcttgcscccagcagcagcatgggcacaggtgcagggagagttgttgggtcatatgccccacagtgtctcagagtagggcataacagtggcaatcctggtcctggctggcagcatcatgacaggcacctagtcagggatgagtcttttgcttactcccaacccagataccaagtacttcccattgtggaggttgcaataccctgggcatcgcccatccactgtgcctggagctaacagcctttgaaaaagagaaacttactact

SEQ ID NO: 157832 - DNA, 575 bp, Homo sapiens
tctcatccatatggctgaggattgctttttgatgtgttaacttccccattctttcaagctaatatgcaaatagagcagtttgttatgacttccaagaaggccatggctctagagatgatctggtggccaaaatctcttaaggtattttgatagctggttttaaaacatggtcatcattaaaaatgaaatatcttaaatttataattaaatacattttatgcaaaacaaaagtatttattatataaatacattttatgcaaaagtatttattatataattaaatacattttatgcaaaacaaaagtatttaatactcaaaatctatcatgttctaattattttccattatctaccytcttgatgttatgtagatctatttaatctatatgacaaaatactaacataatggagtgctgttgcatgtctttccccagaaatacatttaatataccatgctgtagcttgacattagctatggtaaaatatttgcactatggaaatccacaaaaagtataaatcagggcttgattcctgcccagaattctacctccagttatttcttaaataataattaa

SEQ ID NO: 157833 - DNA, 575 bp, Homo sapiens
tctcatccatatggctgaggattgctttttgatgtgttaacttccccattctttcaagctaatatgcaaatagagcagtttgttatgacttccaagaaggccatggctctagagatgatctggtggccaaaatctcttaaggtattttgatagctggttttaaaacatggtcatcattaaaaatgaaatatcttaaatttataattaaatacattttatgcaaaacaaaagtatttattatataaatacattttatgcaaaagtatttattatataattaaatacattttatgcaaaacaaaagtatttaatactcaaaatctatcatgttctaattattttccattatctaccttcttgatgttatgtagatctatttaatctatatgacaaaatactaacataatggagtgctgttgcatgtctttccccagaaatamatttaatataccatgctgtagcttgacattagctatggtaaaatatttgcactatggaaatccacaaaaagtataaatcagggcttgattcctgcccagaattctacctccagttatttcttaaataataattaa

SEQ ID NO: 157834 - DNA, 580 bp, Homo sapiens
gtcttgggatgaaataccaggacactaatttagtaattctcatccatatggctgaggattgctttttgatgtgttaacttccccattctttcaagctaatatgcaaatagagcagtttgttatgacttccaagaaggccatggctctagagatgatctggtggccaaaatctcttaaggtattttgatagctggttttaaaacatggtcatcattaaaaatgaaatatcttaaatttataattaaatacattttatgcaaaacaaaagtatttattatataaatacattttatgcaaaagtatttattatataattaaatacattttatgcaaaacaaaagtatttaatactcaaaatctatcatgttctaattattttccattatctaccttcttgatgttatgtagatctatttaatctatatgacaaaatactaacataatggagtgctgttgcatgtctttccccagaaatacatttaatataccatgctgtagcttgacattagctatggyaaaatatttgcactatggaaatccacaaaaagtataaatcagggcttgattcctgcccagaatt

SEQ ID NO: 157835 - DNA, 568 bp, Homo sapiens
attatcacattgcatctctaaaagtgataaattgggagccagtgccagggagaggccattttctgatggtccacacctgtttcactaaagtgctaattaaatgcaggtgccagggagaagcaacttcctgrgatgcacattaagagacaaaatggtgaagtatgacattctgggggcactccaccggaaaaagaaagcaagcctcagatggtcatgtgtacaacttcctaaacacactgcatatagtcacctcccaaaggtaagagggcactgtgtatgcgggcagtctaccctaagggaagaatcatggggaaaaggtgagccaataaagtcctaagatcatggctaaatgtcgcacttgaccttcaggtgcttgcttgggtctcttccaactgaactttactttctttcctgttctaaagcctttcttaataaactttcactcctgctctgaaacttgcctcggtctctccttttctgccttatgcccctcagtcaaattctttcttctgaggagtcaagaattgaagtcgctgcccacctgtacagattcaccacgggtaaatca

SEQ ID NO: 157836 - DNA, 631 bp, Homo sapiens
gagcaaatatctgggttatcatatcatattccagatattagaaagtaataagggtaatttcaaagtgagatggtagtcatgtgtgtgtgtgtgtgcatgtgtgtgtgtgtgagagagagagaaagaaaaaaaatcaatcatgttttagcacagagagatgggagcaacatatataatcctatatttttacatctttcctaggacaagctttttaaaataatttgctattactcaaatatagtttcccaaatttatgttaggttttggccacatttcttcatttagttttccatttatttaacaaatctttactgagttaattcaggacaatctaggtactgcaggrtgagttatatttaatgggtccaaataaaaattacaaagtttattgcattaagtgagatagaaaaagtctttcaagaatcatatcatttagcttttagttatatttatataataaaatataaagtagtttgtccatgaagagtacaatacaatggccaaagatgtttctatcacatgacaaatgtcccccgaaattcaagaaaatacatccaacaaataaagtaattaaaatttaatgcaaaaagttggtttctaaaaaactataagcctcagattcgtttttggc

SEQ ID NO: 157837 - DNA, 544 bp, Homo sapiens
ctctcccagattctaaccattctgtaagctctcccaagtctctaagactacaggtgcctgccaccayacttgactaatgtttgtatctttagtagagacagagtttcaccattctggccagactggtctcaaactcctggcctcaagtgatctgcccaccccagcctcccaaagtgctgggattacaggcatcaaccactgcacagggcctatttgaatgttttattatgcgtaatatattctcatctagaccttcatgttctaaacatttggaagatttaccatgtctagtgataagagattttatttttatatcaacaagtgttaaaagctatgtgttttaaaaggtaaaatcatgacttatatattagtacaaaatataagtgagtcaaagattttattttactgagtaactgataagggaaccagcaagatgataaaactgattcaagagattccaaagaatgcattttttgtgtgtctagataactgtatttaccataaagaatcaagaatgctgaaataaattgtcaaatatatgcaa

SEQ ID NO: 157838 - DNA, 544 bp, Homo sapiens
ctctcccagattctaaccattctgtaagctctcccaagtctctaagactacaggtgcctgccaccatacttgactaatgtttgtatctttagtagagacagagtttcaccattctggccagactggtctcaaactcctggcctcaagtgatctgcccaccccagcctcccaaagtgctgggattacaggcatcaaccactgcacagggcctatttgaatgttttattatgcgtaatatattctcatctagaccttcatgttctaaacatttggaagatttaccatgtctagtgataagagattttatttttatatcaacaagtgttaaaagctatgtgttttaaaaggtaaaatcatgacttatatattagtacaaaatatamgtgagtcaaagattttattttactgagtaactgataagggaaccagcaagatgataaaactgattcaagagattccaaagaatgcattttttgtgtgtctagataactgtatttaccataaagaatcaagaatgctgaaataaattgtcaaatatatgcaa

SEQ ID NO: 157839 - DNA, 634 bp, Homo sapiens
agtttttgtacgtgttaactgccatgatgaaatgtcctctaccatgtctacaaccataagtgatttcaagtcaaaaaagagtagtcttatagtggatacttcataattcatgtgacagtctaaccctcaaacctcctgttgctatatgtcttgatggaactcaactaatatgtttgttactctagtatataatacattattttaacattcttgtcataaattttatatatttttaaatgatggctgattagattctgtatatctccagaagatatggtgtcacaatatgtaaaatttttgtaacaacagtcaggaagctttcagcaattgacactttcctccctcccacacgccaccacataactgctcttggcccctcatatgtaattccagagaaaacaacctgctctatacttctgccrtaacacttaatcactccatgtcttagtccatttgtgctgctatgacaaaataccttaaagtagataatttataaagaacagaaatttatttctcacagttctggaggctgaaagtctaagaccaagggaccggcaggtttggtatctggtgagggtcctgtctctgcttccaagatggtaccttgttgatgtatcctctggaagagactaat

SEQ ID NO: 157840 - DNA, 577 bp, Homo sapiens
tgggaactgaatttgtctttgataaaatatattgctttcatatagatagcagaaaaagacaagcacctcaaacctagagagcatatccctttttcttgttgttgttaggagtggtgaagaataagaaagatgaggagaatggttaggctgaagaagtagatttgtcttgggaaaagcaggagttatggttgtcttcttagagtcaggtcagattttggaaactattacaagggagctgaaagtgtcagtcattttacagtggataaaactgaaacatcaaaagattaaaaatagcgtaccttttgttttaaaaataattttgtatcagtgtwtatacacactggacaaccatgagaggactctaatctaagacattaaaagtttgaaaggagaagaaaacagtcattttagaaagaaataatgaagtcataaggcgctaagtatatgaatagttctttgttaaattgagataagtaagaacaaatctacataaaaatagaagtacccaaagatgatatattagatacagtaattgaaagaaggagtggataacaaataatcaagtaagtgattaaaa

SEQ ID NO: 157841 - DNA, 495 bp, Homo sapiens
ttagaggagaaaaaaagtaatgagagaaacaaggagtaagagacagtacgggaattttggtaagcaaaataattggtgtattagtttgttttcatactgctataaagaactgctggagaccgggtaatttataagagaaagtgggtggagaggcctcaggaarcttacaatcctgaatcattgtggagggggaagcaagggacgtttttcataaggcagcaggaaggagaagtgccaagcaaagtggtaagagcacattataaaaccattagttcttgtaagaactcactcaggatcatgagaacaacataggggaaactgcccccatgattcaattacctccacctggtctctcctttgacatgaggtgattatggggattataattcaagatgagatttgggtggggacacaaagcctaaccatatcacttgaaatagaatatgctttttatcactataactatcacagccatcagcagtatacaaagtcagt

SEQ ID NO: 157842 - DNA, 646 bp, Homo sapiens
cacttatttgcaactttatttgctttcaaattttctctccttttctcaaaataatttaaaacctaaaatagctgagcacaaataggttcatcatgataatcctacgttcttttctaagaggcccccgagacagacgtgtttcagctgtgaaatgactgggggaggaagagctcagtggaagaagcttagcaaatttaggctcctagaaatggaggtaattgatgtttgctcagtgtaggcatcgttctgcaggagtaagaaacatgattcagtatgttgtatatcaacactattattatgctggaacagaaataagatggtcgttgattgcaaagatgaatccatatattttccctttattgaactagtaaagattatctcttctgtggaaataagctgaaatcacccagctgagaamaaacacagagtattttttccacagcttactacagaagaggatcagccaacatcacatgcatttggtagaaacccaaaggcagacaggatagggtaataatggggacaaagagaaggcttcagttaggcccagatttggaggttgttggcatattgaagctggaaatgggctacctaaaatcagagcatcctaggtgatttggcttcctttgtttgatcctgaattgga

SEQ ID NO: 157843 - DNA, 601 bp, Homo sapiens
cggtttacttcccacagtgggcaattagttgttgctatgttccttgtcttcctggcatcactctgccctaatccccatttgtcagttattaataaattatgatgtgctctctaattattttgattcagagcctttgaagaaaaaagcatgtaatcatgggaaaatagaagagataaaaaccctcagatattaaatcaatacacgtctggattttttccagttttacaaagtcacatctattgctaactcataagcttctgagatttacttttattgagcttttttctaaaatcagggattgtatatatgattacaaatgtttggttaccattattttaaaatataatatttatgagattaaaawgttttcataaaatttatttttcttattagaacttattaaattctgaaactatacaagcctaatcatgttatagatgccaaatatatcaatttataaaagttattgctgcttgacgtcaccgggtacatcatgacaatggtataagcatgtccagatgtcaaagaaataaaatcaaaagctagtgaggatttattaactcctatgcactacttcttgaaatcattgcatttactttgt

SEQ ID NO: 157844 - DNA, 601 bp, Homo sapiens
cggtttacttcccacagtgggcaattagttgttgctatgttccttgtcttcctggcatcactctgccctaatccccatttgtcagttattaataaattatgatgtgctctctaattattttgattcagagcctttgaagaaaaaagcatgtaatcatgggaaaatagaagagataaaaaccctcagatattaaatcaatacacgtctggattttttccagttttacaaagtcacatctattgctaactcataagcttctgagatttacttttattgagcttttttctaaaatcagggattgtatatatgattacaaatgtttggttaccattattttaaaatataatatttatgagattaaaatgttttcataaaatttatttttcttattagaacttattaaattctgaaactatacaagcctaatcatgttatagatgccaaatatatcaatttataaaagttattgctgcttgacgtcaccrggtacatcatgacaatggtataagcatgtccagatgtcaaagaaataaaatcaaaagctagtgaggatttattaactcctatgcactacttcttgaaatcattgcatttactttgt

SEQ ID NO: 157845 - DNA, 474 bp, Homo sapiens
atgactatgctgcagcatagactagaaatcacatgaggggatgcagaaagctactgtgctccaaagggaaaatactacattaagtttaagtattgggaaaaacgtgaagaaggaaaaaatggaactgaactttgacagttggaaattgttaggaagaaaatcctcagtgaaggaaccaatatgtgcaaacstatggaagcatggagaaatatcctggagatttcaggagaaaatttagtacatgtgaagatgaacagttggagttgatgcaggaaatgtgtgttagggctacatttaggaatctttatattattatttcattaaatattttgcagtagataggtaatgcaatagaaaagcatcttatatactgtaatttggctatagccatgtctagtagagtttaggaaaggagttacagagtggaggagcatcattttgaaggcacttatagtaatgtggaggaaaaatgtt

SEQ ID NO: 157846 - DNA, 617 bp, Homo sapiens
atagaaaacaatgcaaataagatggcataatgaaatcatactataggtctataagcagaggcttacttttaatcatttacaagtcttaaaatatatttctaagagaaatccagtgacaataattttccagtgaattatgaggcttctaaatgaaatgttcactgatagccttaagtggtatcatgtgtttattgatgagctaatggtttgggaaaggcagatggtatgaatgcaaataaaaataataagcctatatttagcagcaactcttgtgatgtggcctagtttagtgtttcacaaaatttaatgtgcctctggggatattgctaaattgcagaatctgtttcaatagatctgattggggaatgstattttacatttctaataagttcccaggccatgtctatgctgcttgtcagatatcatattctgagaaacaaggactagatcaacattccccaaatttgtttcacctaactttgagatgtcttatggcaaaggattgtattaccaggaacggcatattctcttctcttttggagatttgtgatggacgttagcaccaaaaaagtcacataataagttaaaaaaactcatttttttaattgtagaaaaaa

SEQ ID NO: 157847 - DNA, 409 bp, Homo sapiens
gaattccttatgataaacaatatttgcttaattctaaatatgttcagtgtcatcaagttgaatatcctcaatgtctaaaacccttgtgaagatagagatctgtcattgtttmtttttccctatacaatttgatagctctcattctcaaagtaatatgcatgttttcatatttaattcaacttttaaaaattacatccactggtagtctaacaataagttcttttcagattataagggttttttttttaaaacatttttgctttgtgattcatggggatttgtactttgttgaagggagaaagtaacttatccaagcaaacaaagacttccagtggtcagcttaatcaataaagtatttagggggatatccttcctcttccagacctatcagtgtcattattttcattac

SEQ ID NO: 157848 - DNA, 585 bp, Homo sapiens
cacaggttttcatgacaaaaatacttaatttgtgaatcctgccacccccacttcctagctgggcaatttcttaaaccttctgattatttggaacctgaggtgtttcatatgtgaaatgtgtataataatttttatcttgtagatttgtaatatggatgaatttagataattaaaaacagcctgcatggctatgactgacataatccataggctaatctaggccctccagccctccaagaaacctatgtcaacaggaaataattagatattraggaaaatttttctaagaaaaattgaggagggatgaagggaagccgggatagatgtcagactgtgacacaggtatgtccctaggtacagtagagatggaaggaaggaaggatgattggttgcaagctatggagtagaaatgccgttctaaaggagtcttattatccttgccatactccataattgcctggaagcaacgtgcataaagtaagctttatgcaggtgcacatgtgatgaagggctttacagcacagcagctagtgttgttggccaattactatctctgcagttgaagagcctagagacaaatgttta

SEQ ID NO: 157849 - DNA, 534 bp, Homo sapiens
tttcggtacgacctttgtatctcatatagtttcagagaaggggatgagccttatcccgttggaagaacagcagtaccactggaggaccctaaatgcgacaccagtgatgaaatggaagaatgaaagaggaagcactttcatgtgtgtatactggaagggttacgaaggactaggactaagcctttcaattagtccaagctattcatgatagaacagggattagatgaaaatcccactgccttcctggaaaggcaaagaggggccttggtaaagcacatgtctctaactcctgattcagttgagggacaactgatcctraaggataagttcattattcaagcagcccctgatatcaggaggaagctgcagaaacaggccatggcaccagatagtactttagagaacctcctgaaagtggccaccacagtcttttacaataggaatcagaaggaggcccaagagagggaaaggagacacaagaaaaagggagaggctctaacagctgccttgcaggctcacaaatcccaaaatccc

SEQ ID NO: 157850 - DNA, 495 bp, Homo sapiens
tagtgggtagcatttttcttaccttcataaacaaagagtagtatatctaaatcactacatgacaaattttagtagactgatttttagagaaatattatgtttacagcaaaattgagtggaaggtgcagagatctcccamgtactccttaccctacacatatgtagccttcccccaccccccaccaccccattaccagcatcaaccgccagaatgacacatttattaccgttgatgaacctgtatttctatcagccacggcccatagtttacattagagttcactgttggttgtgtacattttacagatttggacaaatgtgtccaccattatactattatacagagtggttttattgtcctaaaaattctgtgttcatctattagtactcaataaaatttttagctattgttttgttttacataaaatttacttattagtaagtcttcatgttaagtcctcattaattatggataaaataatctcagtagactga

SEQ ID NO: 157851 - DNA, 495 bp, Homo sapiens
tagtgggtagcatttttcttaccttcataaacaaagagtagtatatctaaatcactacatgacaaattttagtagactgatttttagagaaatattatgtttacagcaaaattgagtggaaggtgcagagatctcccaagtactccttaccctacacatatgtagccttcccccaccccccmccaccccattaccagcatcaaccgccagaatgacacatttattaccgttgatgaacctgtatttctatcagccacggcccatagtttacattagagttcactgttggttgtgtacattttacagatttggacaaatgtgtccaccattatactattatacagagtggttttattgtcctaaaaattctgtgttcatctattagtactcaataaaatttttagctattgttttgttttacataaaatttacttattagtaagtcttcatgttaagtcctcattaattatggataaaataatctcagtagactga

SEQ ID NO: 157852 - DNA, 495 bp, Homo sapiens
tagtgggtagcatttttcttaccttcataaacaaagagtagtatatctaaatcactacatgacaaattttagtagactgatttttagagaaatattatgtttacagcaaaattgagtggaaggtgcagagatctcccaagtactccttaccctacacatatgtagccttcccccaccccccacsaccccattaccagcatcaaccgccagaatgacacatttattaccgttgatgaacctgtatttctatcagccacggcccatagtttacattagagttcactgttggttgtgtacattttacagatttggacaaatgtgtccaccattatactattatacagagtggttttattgtcctaaaaattctgtgttcatctattagtactcaataaaatttttagctattgttttgttttacataaaatttacttattagtaagtcttcatgttaagtcctcattaattatggataaaataatctcagtagactga

SEQ ID NO: 157853 - DNA, 495 bp, Homo sapiens
tagtgggtagcatttttcttaccttcataaacaaagagtagtatatctaaatcactacatgacaaattttagtagactgatttttagagaaatattatgtttacagcaaaattgagtggaaggtgcagagatctcccaagtactccttaccctacacatatgtagccttcccccaccccccaccaccccattaccagcatcaaccgccagaatgacacatttattaccgttgatgaacctgtatttctatcagccacggcccatagtttacattagagttcactgttggtkgtgtacattttacagatttggacaaatgtgtccaccattatactattatacagagtggttttattgtcctaaaaattctgtgttcatctattagtactcaataaaatttttagctattgttttgttttacataaaatttacttattagtaagtcttcatgttaagtcctcattaattatggataaaataatctcagtagactga

SEQ ID NO: 157854 - DNA, 648 bp, Homo sapiens
tcttccttcaaaaaatagttataattacaaattawagtttttgcattagctacttgtgttttacttatatctttggggtcccaaaatactataaatatgttgaatattttagcattatagtttcacatttttcttattccttttttttctatttctttcctatctgctcctctatccccaaatgctctttagtttttgttttctttcaagccctaataacctcttatgtcttctcataatgattcttctccagcttatggcctcttgctagattgcctttattcaaacatttgtcttttaattcatttactctgaccagaagagtaaagttacattgggagacttaccagcattttcccattcagaaagtattggtctgtctatagtaactgctccaaattcctgggggtcataatcattaatacatttcttaccagtaattgggccagcagatcataactccaagaaagctggtttttggggcaactccaggccctttaaatttaactacatgccactttgttttctgtgctttcgactacatttttttcaactgtaagaacatttatcaaaacattatgttaagtaactcaagtaatcagttactttcttggtcaaaaaaatttttttaaaagttcatctgttcat

SEQ ID NO: 157855 - DNA, 549 bp, Homo sapiens
ttgaattttatagaaatattccaatctaagtgataaagtaacaactgagaaacttcagaatgaaagccttattgattcaaaaggaaaattaccatatgctttagggctgatgaacttgccacaattgcttagacataacaaagatattttctacattgttttccaactttatatgctgaaagataattaggaggtccgggtggagtgtatytaaatgactagaactttaagttgcaatatagattttctctttttaacaaaggaagaatataaattaatttggatcaaatttatttgccttctttgcaatcttggtgatcattttggaaagtaaattgaaaggaaagttaaatagccacatagttttcttttgcatctcaatttggttgagaatttctaaggaaggttaatatgactttagaatgaataaagagactgtcaaacaacaagtactctccctaaaaaagaggaaagaatgccttcctaaaatatttgtttcctattgtatatgtcaccaattggaaaatgccaatctcatctgcaagtgtg

SEQ ID NO: 157856 - DNA, 522 bp, Homo sapiens
attaaagcacgcccacatctttcactaaggaggcacaattaggaatcaaattcatgatcctcttgtttcaaaagcaatgtttactccaagacaagatattttgatgttagtaatatttaaagcaggtttccaaaaaaaatccattgaagtataggataaaaaagattcagagataaataaacttccaagatacatttctataataactggacattcaattcagaactatrtaaccatcagctcagataactgagttatctacaagccacagtgaatacagaaaatggagctactctccaagaccattgtcttagaacctgtggcaagatataacccaaaattcattttttaaattggcatatagcttttttagttcatataaacagaccacttaagtttggttttaatattgaaacatattatcatagaggctgtcctgaagcgttctttttctctcagatcagttcagaacctcatgaggctattttccaaataaatactccactagtgtttacagttcaa

SEQ ID NO: 157857 - DNA, 579 bp, Homo sapiens
gattcaagtctctatctggaaagcagacagaccaggccctaaggccctaacctgcctgtgccttaattttggacttcccagttcccagaattttgaaagaataaatttctgctctctataaattacccagtctatggtgttttgtcatagcagcataaaatgaactaagacacccccctctttagagatctttaatgggacaggtgtgaggctcaaatatgaaatgtactcaaacagaggaaatcatccatacattaaaagtaagagagaatatctacaagaatcagattaatcctgttattacatctcaggaattggcaccagctactgccatctccctgggtgattttcaaaggccaagagtttctgcccaatagccccatcgttagtcaaggaccttcatcgttcccatcccctatccatgtactgatcctkctttcccaacaagtccatcccccaaatcaaaatgtacttttccttttttacaaattaaccatacctagactgtttagataaattgtctgtgaattgtctgtaaaggtggaatgaagctcaatccttctggggttaagctactcc

SEQ ID NO: 157858 - DNA, 599 bp, Homo sapiens
caaattcagtactggatgtgattgaagggtattttaatgatgaaaagcagacatacattttaaatacaatatttcaaatttgtaaataacttagaagtacaaaccacttagaatagcattatggcattgttataagtggaagaaagtacgatttaattgggacagatgaagatgaagatttaatcctgtccatttttctaatgtttagattcataaaaatattcagtagtggataatgaattaaaattttgtttttcaaagcagctttttcagtctgcagagatgtatattgcctcactgggcattgccaggcattcattagtgagcaagtataaacttttcacctcccacctccatgggacaagaaaccattcataaacataggaggcacccacaaatgcaaaggtgaacatacctagtttttgctgcacatcagaaatcatgcaattttttgtcaaatttttggaagaaatcctgttagtttagaaaccctctggaagaaaaaatyaattggctttcgaactcataatgtatgtccattaaaaaaatgttttaaatatttatatcactgcctacaaaatacaaaaaaaaggcagctc

SEQ ID NO: 157859 - DNA, 563 bp, Homo sapiens
ttatatctgtttttacatcacaatcttttggtcatgcactttgaaagaatattttacctatgcatggcttgtggtattggtcataaggaaaatatatcagtttgctaagttatgcagctctttcagatgttaacacatttcattatgtaatataaaaaatcacactcattaatatcatcacggatcttgacagaaaagtcttgaagtatcaagaagctgttaagatcctggtggtgaatacaagtttttaaaaattccaatttttattcaaaaagctcaaattttatcacaggcaacaaacactatcagttgttttccttgaagtgacagattcttgttcatcttcaagaaaatgtctgccaaatatccatgtatgcaaaaccgtatttagtctgtcaggcattctttcaaataaaaagatacatagagcattgagtcagcttstcattctaacaatcacacaggtgcttttcctggggatatcacccatacttcagtggtggcagaagtgtgtaaaagcccattttatcacacagaatattacaaatacactaacttaagtg

SEQ ID NO: 157860 - DNA, 577 bp, Homo sapiens
acacttaatgtgagatctaccatcttaacaaattttacatgtgtaatacacattgttaattatagagataatgctctacagcagatctctagaatttattcatcttgcgtaattgacactttatgcccattaattagcaattcccatgttcccctccccctgcccctggcaagcactattctactctctgattctatgagtttgactctatgagatgccttatatattataatcatgcagtatttgttcttttgtgactggcttatttcacttggcataatatcctcaagatttctccatgttgtaacattttcagtatttctttcctttttaaggctaaataatataccacagtatttatacaccacactttctttatccattcatccttcagcrgacatttaggttgtttctacatcttggctattgtaaatagttctttaatgaacattggagtgctaatatatcctcaagattctgatttccattctttgagatatgtatgcagaagtgggtttgctggatcagatttattctatttttaatttttcgaagaatccctatattttccatattg

SEQ ID NO: 157861 - DNA, 551 bp, Homo sapiens
acaggcacatgccactgcatcacctctgattattttctttgacccaattttgatcaaaagtacattgtttagtttccacatatttatgaatttttcagttttcattcagctattgattcctgagttcacttaatttcttcaaaaaagatacttattatttcaatatattaaaatttgttaagacttgctttgtgacttagcatctgatctatcctagagaatactccatgtgcatttgagaagaatggatattctacttattatttaaatattttaaaatttgttaagacttgttttgtgacctaacatgtgatctatctcagagaatactccatgtgcacttgagaagaataggtattctacttctattgggcagaacattctgtatawgtctgtgaggtccatttggtctatagtgttgctcaaatcagctatttctttgttgatttgtctttgtttgatctgtctagttgttctatctgtggttgaaagtggggatattgaagtctcctagtattattttgttgctgtctatttcttccttcagttcc

SEQ ID NO: 157862 - DNA, 616 bp, Homo sapiens
atcaagaaatataaacgataatatttattataatttacagtaggaaaaatatgaaacaaacaaatgtacataagaatggaaattgtttaataaaatatattattttcataaaataaagtactgtgtttatatttaaaaataagatagggttgtatatgatgatatttaaaaatttttatgaattactatttaatagttaaaaattaaggtgcaatatggggtaattttatttaagattagtgtgattttatttaagaatacaaaaaggacattacatatatgggtttatgctaaaatattttcactgtctctgaggatgcttgtgaaattgttaactgtggtaatagttactgaaaatgattaggaaattagataagaagacatacttttcattgggtgcctctgttatactatgtgcctgataaatacctgctatacatgtattgtaaayattagatttgaacttgtagctgtctttggcaagtagcagatgttcaacaaccgcccatttcctttaccttacatgtatgtcaattcacagaatccattcaatacttcgacagacttttttttccaaaaatgtttatttcaacttagaaaatgcataaactgtgaa

SEQ ID NO: 157863 - DNA, 533 bp, Homo sapiens
ctgcatataagtttctatcttagattttttttttacccacgagcctggtctaagacagttatctcatacatgctaggcaacaggataaaacatgagcagaaaatagggtatagcaaaggaatttcaaagctaatgtcagaaaatagctgtagattctgaagtgagacttgacacttacaccaatgcggccttagataaactccttgagcctcagttttttttttcatctgcagaataagatcgatggggtagttaaataggaagtgctcagtggtgttagataatattattcactgcatgtgaaaatataatactgagaatatcaaaagaaaaaaaaagctaaaagtgcaatggctttgttttgcctaaaagactttgaaagaggtgatattgaaaaatgagtaggacagwgtcaaacaggaaagagttggaatatgccaagtagaagaatgaatatgagccaaatcatgaatgtgtgggaaattaaataatttgcttgggatgatgtataaatagaagtggcaggaactgga

SEQ ID NO: 157864 - DNA, 614 bp, Homo sapiens
gtagggactacagccagactgcagtggttagtgtcagtgcgaatgcaaggaaatgaaaatagtaatgcagagaattctttttaaaaattaaaggattaagagagagaaggttacatagggagatagacggagagttgagtaacactcagttgcacaggggaagtggcaggacatcccatatttactgggcaagcatcctaaggagctggggcaattaagagtatgacatgcaaccatgaaaaatgatggggttacctgtgtccatgtgtagtccacaataaattattttttttctgagcayacatctctcttccagtgagttatgtacatttgtaaatgctcccctgatacccaggtcactctctcatattttttaatagccttatagatagacacatgtgtgcacagacacatgaggctatcaggtaataagtatggtatgatatcaatatatttgctttttttgatatctgaattaaaattgagtccaagaggatcttaaataagccacaagccagttcccagcctggagtttgaatccacattacaaaattcagtgttttgtgccatgggtgaagttaattaacctctttgagcttctatttattacctaa

SEQ ID NO: 157865 - DNA, 535 bp, Homo sapiens
agcagcccaaactttctaatatagcaatctgtttagcaactcgagtaacatgaaactacctactattctctgcaaaaagcaattcagatcatcatgaaggaaatatgtgttctcatttgtggtactttggagtactgaggcaattcaggggccagtaatgacatatcttgactagtggattaatgcctttatgaatatgcccataatagaccaccacaaccatttaggtgtctgaattaattattaygacaaattagtgtctctactatttcttgaggttctgctatgtgcctggctgcattccaggtggtagaacttcatgaattcttttccttttagagattagattataatacatgaaacaaaaatgaaataaagaagtaaataatagactgataatctaagtatggacatagacataccagccatggcttgtgttcttcaagtgtaggttataagtaggggagacgctgcatggcccacagaatgtggcccagaagagcctgaagaagggacatttgaacagaatgcttaa

SEQ ID NO: 157866 - DNA, 531 bp, Homo sapiens
ttgtatattttctatttgtctgagtgttttaggatttattttgggttgagtttagatcaagtaaatattaagcaaactttgagactggtcttaaggcagcactttttcaaatctgctgttgattaatccatgtgcaaaattcaaataaaaattattttcagtgaaaattggttctactacagcaaacaattagtggctgcttttgccagaagaagcaagtgtggattctaacactgcacaaatacctttctacatcccaggtggtatttgcttaattcatttatcaccttcattagaaccataccttgtctcacagggtaatgtcaaaacttgaatgtstcttgttctactatccctcacatattcacaaaggcaaggtgttgacataaataattaagaactgattgaacataattaataacaattgttgtatgactcttctcaattaatatcttaaatctttcatcaactttaaaaaaatatgtaaagaaatagtaaaataaactgatttgactttttatctttccattg

SEQ ID NO: 157867 - DNA, 491 bp, Homo sapiens
gaattcagaggctgcagtgagctatgataacaccagcctgggtgaaaaaaaaaaaacaagcaaagaagaagaaaaagaaatcttctcctcacctcacattgattccaatagtgatatggtttggctctgtgtccccacccaaatctcatcttgtagctcctgtaattcccatgtgttgtgggagggggcccagtgggagatgattgaatcgtgggggcrggtctttcccatgctgttctcatgatagtgagtgtgtctcaggagatctgatggtttttaaaaacagggtttgcatgcacaagctctttttttttgcctgccaccatccacataagatgtgacttgctcctccttgccttccaccatgtttatgaggcctccccagccatgtggaactgtaagtccaattaaacctctttccctggtaaattgcctggtctccagtatgtctttatcagcagtgtgaaaacagacaaatacaattggtcacc

SEQ ID NO: 157868 - DNA, 476 bp, Homo sapiens
agcctgggtgaaaaaaaaaaaacaagcaaagaagaagaaaaagaaatcttctcctcacctcacattgattccaatagtgatatggtttggctctgtgtccccacccaaatctcatcttgtagctcctgtaattcccatgtgttgtgggagggggcccagtgggagatgattgaatcgtgggggcgggtctttcccatgctgttctmatgatagtgagtgtgtctcaggagatctgatggtttttaaaaacagggtttgcatgcacaagctctttttttttgcctgccaccatccacataagatgtgacttgctcctccttgccttccaccatgtttatgaggcctccccagccatgtggaactgtaagtccaattaaacctctttccctggtaaattgcctggtctccagtatgtctttatcagcagtgtgaaaacagacaaatacaattggtcaccttggacaatttactgaatt

SEQ ID NO: 157869 - DNA, 492 bp, Homo sapiens
ggaattcagaggctgcagtgagctatgataacaccagcctgggtgaaaaaaaaaaaacaagcaaagaagaagaaaaagaaatcttctcctcacctcacattgattccaatagtgatatggtttggctctgtgtccccacccaaatctcatcttgtagctcctgtaattcccatgtgttgtgggagggggcccagtgggagatgattgaatcgtgggggcgggtctttcccatgctgttctcatgatagtgagtgtgtctcaggagatctgatggtttttaaaaacagggtttgcatgcacaagctctttttttttgcctgccaccatccacataagatgtgacttgctcctccttgccttccaccatgwttatgaggcctccccagccatgtggaactgtaagtccaattaaacctctttccctggtaaattgcctggtctccagtatgtctttatcagcagtgtgaaaacagacaaatacaattggtcacc

SEQ ID NO: 157870 - DNA, 420 bp, Homo sapiens
gacaatttttctaatatattacatgtacagatgctcctcaacttatggaaaagtggtatcctgataaactcactataagttgaaaatatcataagtggaaaatacgttttatgcacsgaacttactgcacatcatagcttagcctagcctgccttagttctcagaacattcacattcgcctagagatgggaaaaatcaagtaacacaaaacctgttttataatacgtgttgaatatctcatgtatttattgaacactgcactgaaactgaaaaacacgatggttgggtgggtatgtgggcacttatagcacggtttctactgaaagggcagcgccttcaccccatcctaaagtcaaaaagccgtcaggtgaagccactgtaagccagaaaccatctgcagatctagtccaccctcagtat

SEQ ID NO: 157871 - DNA, 637 bp, Homo sapiens
acttaaatatgactcctacattttcacttgtgcagcaaagcatccagactgttttctctatgtgacctctttcgttcagtggggccatgacatcagcatagaatcactaaggaagggcacagccttgggatgatctgtacatcccactactcaattcaataggaaactgctgttagttagctaktagcagagatgagcaattctcttttcctgtccttgaggatagtatagtcaactttggaatctgctaaataaaatacaacatggtaagtgttatgttcaggaactcagagagtaaagaaaagagaaatctgaccagtgataacttcccgaagaatttggtgactgggctgagtcttaagtaaggaaatattgtacagggaaggagcaagcggcagagcattccagggagtgagaaatgcatgagcaaatgcatggttggcatgaaacaggtcaatgtcttgtggggactttctgctcctttactgctggaggtggacagtggtgacatgtgttacaactttgctaaaaccaaccagccatccaaccaaccaaccagccaaccaaccatcaccaccaccaacaaacccagaaaagccaggtcttcctaggactcaaaggatgattcaaagtattg

SEQ ID NO: 157872 - DNA, 620 bp, Homo sapiens
ttaaattatctttgatttcagatgacacaatcttataaatagaaaaccacagacatttcaccacaatgactattcaaagtgttgaaaaagagaaaacaacaaaagtaaaaagattccaccacaaaactgtaagaaatcaaaagcaaaattagtaaagctatatgatacaaaataaacatgcaaaaatcagtagtgcttctataaactaataacaaactattcaaaaaagaaatcaagaaaacaatcccatttataatagcataaaaatagaataaaacacttatgaataaatttaaccagggcagtaaaagacctgcacattgaacactacaaaagattgatgaaagaaatcaaaaaagacacagatggaaggaaagatgtcttgtgttcttggaytgggaaaattaataatgttaagatgcctacagtactcaaagcaatctgtaggttccatgcaatccttagcaaaatctcaatgacaattttatagaactagaaaaaaattcctagcattcacatggaatcacaaaagacctctaatcaccaaaacattctgagcaaaaagaacaaagctggaagcattatgctacctgatctcaaaacctactccaaggctgtaa

SEQ ID NO: 157873 - DNA, 553 bp, Homo sapiens
ctggtgttcctctgggtcttctacctgatgggctcttttccttgttcagcaacgtcctttaggtcccatgctagttctttttattcgtgttgttttcctttttgtgagtttttattttgctttaactcttcttcagggagaactcakttgtctaggactagtgcctgccaactgccgcgtggttacatgaaggagccttggatagacttgcttcccagtccttagctagagtacagcgtgatatggaagcgccgggctcagcctctgatttaagccgctctgcgcactgaggacaccgccccaaaccccatgactctacccagaatgcaagcaagatggtgccagggcgcactaaatccccagcatgcactgcgaccgcccttagtagcaagcgtaaactacaatccccaggatgcactgcaccagggctgcgcctgcctggcgtcacgggcgtgaattacaatccccagcatgcaccggagtagcgggcgtcatcaacaaccccctacgtgccgcgcgcggcctctagccctcacctgtgctctgcttgttc

SEQ ID NO: 157874 - DNA, 553 bp, Homo sapiens
ctggtgttcctctgggtcttctacctgatgggctcttttccttgttcagcaacgtcctttaggtcccatgctagttctttttattcgtgttgttttcctttttgtgagtttttattttgctttaactcttcttcagggagaactcagttgtctaggactagtgcctgccaactgccgcgtggttacatgaaggagccttggatagacttgcttcccagtccttagctagagtacagcgtgatatggaagcgccgggctcagcctctgatttaagccgctctgcgcactgaggacaccgccccaaaccccatgactctacccagaatgcaagcaagatggtgccagggcgcactaaatccccagcatgcactgcgaccgcccttagtagcaagcgtaaactacaatccccaggatgcactgcaccagggctgcgcctgcctggcgtcacgggcgtgaattacaatccccagcatgcaccggagtagcgggcgtsatcaacaaccccctacgtgccgcgcgcggcctctagccctcacctgtgctctgcttgttc

SEQ ID NO: 157875 - DNA, 527 bp, Homo sapiens
accagctgtcctgacataaacttcctcctgtgggcctcagtgttcttctttgcaagatgggaagattggaataaaaagttttcaaagatatttttgctgcaaaacttttttgtcaaaaaagaatatatttagaacttgagacataacccatgtgatagggtaatatttcaaatcctttcttttctttgtccttatggtgctgcttctttttcttcacctttcttgctctttctgcagtgtgtctctgggtctctggaggtgggataggggttgtctggggaatctaccgtcctaattatctgtaggtgattgttttgttgccctgtaggtcaaagggaaggtgattccaatgcttggcatttatcyggcggaatccctattcctcctatgccctcctcatctgtgaaatggtgatagtagtagcactacctcggaggatggttattaatgagaagcaaaagtgaacacaacacaggttaactacttatattttcatgcatattattatttgtatgtttagctgcatc

SEQ ID NO: 157876 - DNA, 562 bp, Homo sapiens
tctccactgagcttcttaccaagttctaggctaatgtcctattatattaaccaacctctgggttccagatcacgtcagaccttgagcctcttacttgttttcctgcctacaacctcagcttctccaaaactgaggtcaagtccttgattcacagccaaggaccttctggaggcgggtaccctgcccccaggctcaatattcatagctgtccctgctttcagccttcctcaactcaaatcaagtctggatgtggttttggggtgctcagaccccatgcttatcacctaccctggcatccagggaaagtccatgagaagcgcgtggcaagtgtggggcacagagcaggtgcccacaacatcccaaygggggatcacacggaggatcacacggaggatcacaccaccggtggtcacgagacagactgaggtaaagagcaggcgcccacaacatcccaagggaggatcacacggaggatcacaccgccggtggtcacgagacagactggggcacagagcaggcgcccacaacatcccaatggaggatcacacggaggatcacacca

SEQ ID NO: 157877 - DNA, 562 bp, Homo sapiens
tctccactgagcttcttaccaagttctaggctaatgtcctattatattaaccaacctctgggttccagatcacgtcagaccttgagcctcttacttgttttcctgcctacaacctcagcttctccaaaactgaggtcaagtccttgattcacagccaaggaccttctggaggcgggtaccctgcccccaggctcaatattcatagctgtccctgctttcagccttcctcaactcaaatcaagtctggatgtggttttggggtgctcagaccccatgcttatcacctaccctggcatccagggaaagtccatgagaagcgcgtggcaagtgtggggcacagagcaggtgcccacaacatcccaacggrggatcacacggaggatcacacggaggatcacaccaccggtggtcacgagacagactgaggtaaagagcaggcgcccacaacatcccaagggaggatcacacggaggatcacaccgccggtggtcacgagacagactggggcacagagcaggcgcccacaacatcccaatggaggatcacacggaggatcacacca

SEQ ID NO: 157878 - DNA, 562 bp, Homo sapiens
tctccactgagcttcttaccaagttctaggctaatgtcctattatattaaccaacctctgggttccagatcacgtcagaccttgagcctcttacttgttttcctgcctacaacctcagcttctccaaaactgaggtcaagtccttgattcacagccaaggaccttctggaggcgggtaccctgcccccaggctcaatattcatagctgtccctgctttcagccttcctcaactcaaatcaagtctggatgtggttttggggtgctcagaccccatgcttatcacctaccctggcatccagggaaagtccatgagaagcgcgtggcaagtgtggggcacagagcaggtgcccacaacatcccaacgggggatcacacggaggatcacacggaggatcacaccaccggtggtcacgagacagactgaggtaaagagcaggcgcccacaacatcccaagggaggatcacacggaggatcacaccgccrgtggtcacgagacagactggggcacagagcaggcgcccacaacatcccaatggaggatcacacggaggatcacacca

SEQ ID NO: 157879 - DNA, 537 bp, Homo sapiens
ttcctgacacaaacccctaagcccacctattgcacataggtaaaaatgagtcaccctcrcacagccccaaactcctcccaaagttccaccctctccagtatctttctgtgaggccccaaggaaattactagtgttctggtgtttctactttagtccagcacacttcctggacctccaccaccagtccctccaggataccaacttgaaggctcccggcggcccaggccctctgctgcccaacagaggctccctgagctggtgtcctgatgtcctgcttccccttccactgcactcatttctgtcctgcaggtagagaaatgcctacccttatctgccttctgcttttctggaaaagtccctcaacagagttccatgaaccccgggtgcttctcagttgtacttatcaccttgttcctcactggctcggcgcactccctgactgatagataaggttccaactgtgggttcgggccaaaaccacttcccagacctacaatgtgtcccgaacgtaggaaagtaccaagatcccttgaggtt

SEQ ID NO: 157880 - DNA, 598 bp, Homo sapiens
ccttttatcatataagtaacttcattttttttactgttgtgctgtaaagtctgttttaatctgatataagaatagctactcctgcttgcttttgattttaatttgcatggaatatctttttccactcgtttacctttagttaatatgagtccttatatgttgggtgagtctctttcaaacagtagatattttacctgtgatttttttaatccattctgccaatttgtgtcttttaagtggagcacttaggatatttgcattcaacattaataatgmgatgtagtgtattgttccagtcatcctgttaattgttacctagatactttgttttcttcactgtgtttttgttttacaggctttgtgaattttatgcattcaaaaggttctattctggtgcatatcaaccttttgtttcaaaatttagaactctttttatcattgcttgcagggctggtctgttattgacaaattctgtcagcacttgtttgtctgacaatgacatcatttctttttcattcatgaaacttagttttgatggatacaaaattcttaactcacagttattctgtttcaggaggctaaagatagggtcccaatc

SEQ ID NO: 157881 - DNA, 542 bp, Homo sapiens
agttttactagcatatggctgaaagataattgttccaagtcattttccttgaaaatacattttcattgtgtatttttggatatagttcgaagtattaattttgttcatcattttggttttctacttcagaaacatcgattatatgtatgttggaccttcttttctgtctgtaattcctctttatttacttctttatatcatttttattctcttgattgtttttctggttttctgtaatgctaattattaaatttttaatgtatttttgggggtctctaatttagtctttattatataattatgccttctatttcttttttcaagttcaatcaactcttgtttaatttcctactgtgtttttataatttgaggtcatagaatttttccctggttcayactgttttcttgttttttttgttgttgttgttttttgtttttttgttttgttttgttttgttttattgttattgttgttcatattccccagtacttgtttaaaaatatgtaattcatcttgaagcactgtgttacagtttttgggg

SEQ ID NO: 157882 - DNA, 335 bp, Homo sapiens
tgtctcaatccacgttccatatttttgcatttattagtgcatattttcttactgaggcgtgatttttcctgtcttctgcacatctttcacattcatctacatttttattgcagagttctttaaactcctccagcctgcatcctcrgatgtctaatacggtttatgtgagctctgttggcgtttgtctattttattctcgcttgtggtaaattgaagatttcagtgttgacattctctgtctccatggattctatatggtttcgtttgctctcaatgtgaactttatggatttttggagaggatgtgtgggagattcagaatcagtctgtcaacat

SEQ ID NO: 157883 - DNA, 554 bp, Homo sapiens
gcatgggggtgaccacacccatgattcaattacctcccaccaggtcacttccacaacacctggggattgtgggaactacaattcaagatgagatttggatggggacacagagccaaaccatatcactaatcttagtctcaattttcccatcatcagaataytgtcagcacttactctaataccccatgcgttcatgtcccttttgtaattcactctttctaaagaacattcttctctttggctacacagcctatctttccatctttttttttttaagtataacttatgtaaaaactttaaggcttctgtgtcttttctacattttcactggctctctaaggggtcatctcaggtgccaatgaaggcagtcttcagtctggattcctttcaaggatgtgaaaattatctcttcaaaatacattaggcaatgtctgcctactttggattttgtgacggcttgaaacaatgcagtccacattttaactgacaagtttagaggtgtcagtggtatttgagctttctgtgcctcaaaaactcaccatctcacactgttc

SEQ ID NO: 157884 - DNA, 554 bp, Homo sapiens
gcatgggggtgaccacacccatgattcaattacctcccaccaggtcacttccacaacacctggggattgtgggaactacaattcaagatgagatttggatggggacacagagccaaaccatatcactaatcttagtctcaattttcccatcatcagaatactgtcagcacttactctaataccccatgcgttcatgtcccttttgtaattcactctttctaaagaacattcttctctttggctacacagcytatctttccatctttttttttttaagtataacttatgtaaaaactttaaggcttctgtgtcttttctacattttcactggctctctaaggggtcatctcaggtgccaatgaaggcagtcttcagtctggattcctttcaaggatgtgaaaattatctcttcaaaatacattaggcaatgtctgcctactttggattttgtgacggcttgaaacaatgcagtccacattttaactgacaagtttagaggtgtcagtggtatttgagctttctgtgcctcaaaaactcaccatctcacactgttc

SEQ ID NO: 157885 - DNA, 275 bp, Homo sapiens
atgtaaaaactttaaggcttctgtgtcttttctacattttcactggctctctraggggtcatctcaggtgccaatgaaggcagtcttcagtctggattcctttcaaggatgtgaaaattatctcttcaaaatacattaggcaatgtctgcctactttggattttgtgacggcttgaaacaatgcagtccacattttaactgacaagtttagaggtgtcagtggtatttgagctttctgtgcctcaaaaactcaccatctcacactgttcattgtc

SEQ ID NO: 157886 - DNA, 554 bp, Homo sapiens
gcatgggggtgaccacacccatgattcaattacctcccaccaggtcacttccacaacacctggggattgtgggaactacaattcaagatgagatttggatggggacacagagccaaaccatatcactaatcttagtctcaattttcccatcatcagaatactgtcagcacttactctaataccccatgcgttcatgtcccttttgtaattcactctttctaaagaacattcttctctttggctacacagcctatctttccatctttttttttttaagtataacttatgtaaaaactttaaggcttctgtgtcttttctacattttcactggctctctaaggggtcatctcaggtgccaatgaaggcagtcttcagtctggattcctttcaaggatgtgaaaattatctcttcaaaatacattaggyaatgtctgcctactttggattttgtgacggcttgaaacaatgcagtccacattttaactgacaagtttagaggtgtcagtggtatttgagctttctgtgcctcaaaaactcaccatctcacactgttc

SEQ ID NO: 157887 - DNA, 571 bp, Homo sapiens
gttccagggcaccatggtttgggggagcacctggtcctagatgtcatctgttcacttcagcatccaatgagatgctgccatcctcttggggtgctccctcatccacacacacacacgccacctatgstcacacacttctgtacatgtgttctctttctgattggtggatctcttgactgcttctataccatagatggagacacaggatctggccttacatttctgtgtcacccaacattatgggagacttcatgactgtttctatggcatttatgcccaggctctctgcagccctctccctccacctcctcaccactctttccagacagaggtcatctctgctctcagatctcacaaagctttctcaggatttgcagaaaacccagagctgtggctgatagacaaaaagcaggcctttcctctctaggaacccctacctaacactagcgtgccctgctccacacagaggggctcttccagtcttggaaatgggagagaaggaacccttttcttctctttgcttcctggagtcctcttctgattccctaacagcattgatgtttataataaa

SEQ ID NO: 157888 - DNA, 571 bp, Homo sapiens
gttccagggcaccatggtttgggggagcacctggtcctagatgtcatctgttcacttcagcatccaatgagatgctgccatcctcttggggtgctccctcatccacacacacacacgccacctatgctcacacacttctgtacatgtgttctctttctgrttggtggatctcttgactgcttctataccatagatggagacacaggatctggccttacatttctgtgtcacccaacattatgggagacttcatgactgtttctatggcatttatgcccaggctctctgcagccctctccctccacctcctcaccactctttccagacagaggtcatctctgctctcagatctcacaaagctttctcaggatttgcagaaaacccagagctgtggctgatagacaaaaagcaggcctttcctctctaggaacccctacctaacactagcgtgccctgctccacacagaggggctcttccagtcttggaaatgggagagaaggaacccttttcttctctttgcttcctggagtcctcttctgattccctaacagcattgatgtttataataaa

SEQ ID NO: 157889 - DNA, 572 bp, Homo sapiens
agttccagggcaccatggtttgggggagcacctggtcctagatgtcatctgttcacttcagcatccaatgagatgctgccatcctcttggggtgctccctcatccacacacacacacgccacctatgctcacacacttctgtacatgtgttctctttctgattggtggatmtcttgactgcttctataccatagatggagacacaggatctggccttacatttctgtgtcacccaacattatgggagacttcatgactgtttctatggcatttatgcccaggctctctgcagccctctccctccacctcctcaccactctttccagacagaggtcatctctgctctcagatctcacaaagctttctcaggatttgcagaaaacccagagctgtggctgatagacaaaaagcaggcctttcctctctaggaacccctacctaacactagcgtgccctgctccacacagaggggctcttccagtcttggaaatgggagagaaggaacccttttcttctctttgcttcctggagtcctcttctgattccctaacagcattgatgtttataataaa

SEQ ID NO: 157890 - DNA, 560 bp, Homo sapiens
caccatggtttgggggagcacctggtcctagatgtcatctgttcacttcagcatccaatgagatgctgccatcctcttggggtgctccctcatccacacacacacacgccacctatgctcacacacttctgtacatgtgttctctttctgattggtggatctcttgactgcttctataccatagatggagacacaggatctggccttacatttctgtgycacccaacattatgggagacttcatgactgtttctatggcatttatgcccaggctctctgcagccctctccctccacctcctcaccactctttccagacagaggtcatctctgctctcagatctcacaaagctttctcaggatttgcagaaaacccagagctgtggctgatagacaaaaagcaggcctttcctctctaggaacccctacctaacactagcgtgccctgctccacacagaggggctcttccagtcttggaaatgggagagaaggaacccttttcttctctttgcttcctggagtcctcttctgattccctaacagcattgatgtttataata

SEQ ID NO: 157891 - DNA, 508 bp, Homo sapiens
gccatcctcttggggtgctccctcatccacacacacacacgccacctatgctcacacacttctgtacatgtgttctctttctgattggtggatctcttgactgcttctataccatagatggagacacaggatctggccttacatttctgtgtcacccaacattatgggagacttcatgactgtttctatggcatttatgcccaggctctctgcagccctctccctccacctcctcaccactctttccagacagagstcatctctgctctcagatctcacaaagctttctcaggatttgcagaaaacccagagctgtggctgatagacaaaaagcaggcctttcctctctaggaacccctacctaacactagcgtgccctgctccacacagaggggctcttccagtcttggaaatgggagagaaggaacccttttcttctctttgcttcctggagtcctcttctgattccctaacagcattgatgtttataataaactcaaggaagccg

SEQ ID NO: 157892 - DNA, 560 bp, Homo sapiens
caccatggtttgggggagcacctggtcctagatgtcatctgttcacttcagcatccaatgagatgctgccatcctcttggggtgctccctcatccacacacacacacgccacctatgctcacacacttctgtacatgtgttctctttctgattggtggatctcttgactgcttctataccatagatggagacacaggatctggccttacatttctgtgtcacccaacattatgggagacttcatgactgtttctatggcatttatgcccaggctctctgcagccctctccctccacctcctcaccactctttccagacagaggtcatctctgctctcagatctcacaaagctttctcaggatttgcagamaacccagagctgtggctgatagacaaaaagcaggcctttcctctctaggaacccctacctaacactagcgtgccctgctccacacagaggggctcttccagtcttggaaatgggagagaaggaacccttttcttctctttgcttcctggagtcctcttctgattccctaacagcattgatgtttataata

SEQ ID NO: 157893 - DNA, 535 bp, Homo sapiens
cctagatgtcatctgttcacttcagcatccaatgagatgctgccatcctcttggggtgctccctcatccacacacacacacgccacctatgctcacacacttctgtacatgtgttctctttctgattggtggatctcttgactgcttctataccatagatggagacacaggatctggccttacatttctgtgtcacccaacattatgggagacttcatgactgtttctatggcatttatgcccaggctctctgcagccctctccctccacctcctcaccactctttccagacagaggtcatctctgctctcagatctcacaaagctttctcaggatttgcagaaaacccagagctgtggctgatagacaaaaagcaggcctttcctctctaggaacccctacctaacactagcgtgccctgctccacacagaggggctcttccagtcttggaaaygggagagaaggaacccttttcttctctttgcttcctggagtcctcttctgattccctaacagcattgatgtttataataa

SEQ ID NO: 157894 - DNA, 539 bp, Homo sapiens
atctgagaattattacaattattttaaataaatttaaattttccatttgttgccataacagcatttagagacctgctagttttggggtgtttactagatctttgttgataagcttaatgatgaaggggagcattagggctttctgatgatgctttctagaaattttcgacayactttaaaatatgacattcatttctgcctgaagaccaaagtaggttttgcagaggcaaattgagagcatgtttaaaagattcatcttgtgcctaggtttaacatcctcccaggatgtcaactggaagatcatgccgttcctgacaattagaaggtaataacgaattttcaaccaactccacattcatcctgacacatccctttggcacatttttaaggtgaaacgtgtgactccataacgttttctttttaggcaagggcttctgtggtggtaatcatgacctaaagagcccgattctgcagtcttcagagagccaggattcctgcccaaagttagacaggcagcatttgaagcaaagtttacttct

SEQ ID NO: 157895 - DNA, 539 bp, Homo sapiens
atctgagaattattacaattattttaaataaatttaaattttccatttgttgccataacagcatttagagacctgctagttttggggtgtttactagatctttgttgataagcttaatgatgaaggggagcattagggctttctgatgatgctttctagaaattttcgacacactttaaaatatgacattcatttctgcctgaagaccaaagtaggttttgcagaggcaaattgagagcatgtttaaaagattcatcttgtgcctaggtttaacatcctcccaggatgtcaactggaagatcatgccrttcctgacaattagaaggtaataacgaattttcaaccaactccacattcatcctgacacatccctttggcacatttttaaggtgaaacgtgtgactccataacgttttctttttaggcaagggcttctgtggtggtaatcatgacctaaagagcccgattctgcagtcttcagagagccaggattcctgcccaaagttagacaggcagcatttgaagcaaagtttacttct

SEQ ID NO: 157896 - DNA, 539 bp, Homo sapiens
atctgagaattattacaattattttaaataaatttaaattttccatttgttgccataacagcatttagagacctgctagttttggggtgtttactagatctttgttgataagcttaatgatgaaggggagcattagggctttctgatgatgctttctagaaattttcgacacactttaaaatatgacattcatttctgcctgaagaccaaagtaggttttgcagaggcaaattgagagcatgtttaaaagattcatcttgtgcctaggtttaacatcctcccaggatgtcaactggaagatcatgccgytcctgacaattagaaggtaataacgaattttcaaccaactccacattcatcctgacacatccctttggcacatttttaaggtgaaacgtgtgactccataacgttttctttttaggcaagggcttctgtggtggtaatcatgacctaaagagcccgattctgcagtcttcagagagccaggattcctgcccaaagttagacaggcagcatttgaagcaaagtttacttct

SEQ ID NO: 157897 - DNA, 506 bp, Homo sapiens
catgacctcacttttctcttctttctttttttgtaggtagggggtcttgttttgccgcccaggctggggtgcagtagcgtgatgatggctcactgcagcctgggactcctgggctgaaatgatcctcccacctcagcctcccaagcaggtgggaccacaggcacgtaccaccacatccagctaatcttttatttattttttggagtgacgacatcacactgtgttgcccaggctggtctgcaattcctggcctcaagtgatcctcctgccttggcttcccaacatgctggaattacaggcgtgacccactgcatccagcatcacctcgcttctctatgttaacctgtggcagtctgatacccrctcccaggccgcccccaggtctgttcttggtgagccaagctgcctgaatgagtgatcatttgggtcatcaggaacttgaccatattgcctgtcagttttgtttcaacggcttttcatgtttcagttcttttgcaggccccctc

SEQ ID NO: 157898 - DNA, 573 bp, Homo sapiens
tcctgattaatatactgttattccttagtttgcagttattactctcatgtttacagtaaccacaatgttcctgtattcctcagccatcatacaactgcaggctgcactccaaattctcacaagcttaactggatataacttcacaataaaacccaggtataagaataaaaggtgtcttgcccaaatccctctgcagaaacagttyaaacatctgctatgctgatagttgctcaacaaaagtaattatcatactttcatattcaacaaacataaaaaaaattctgtgagaatttttacaattattaactttaattcttaaaatattctagtgaataaaccattattatgcccattaaaacatgaagaataaagaggataaataacttgcttgagttcatacatttagtatagagaagagaacataggatttgtaattaaattcttgcttttctactgttacaagttacctaaactctctaagattgaatctttcatccatgaagtgggaataatactggctactgcaggtagtcatggtgagaattcatgctattctatatgttcaaagcccaa

SEQ ID NO: 157899 - DNA, 573 bp, Homo sapiens
tcctgattaatatactgttattccttagtttgcagttattactctcatgtttacagtaaccacaatgttcctgtattcctcagccatcatacaactgcaggctgcactccaaattctcacaagcttaactggatataacttcacaataaaacccaggtataagaataaaaggtgtcttgcccaaatccctctgcagaaacagttcaaacatctgctatgctgatagttgctcaacaaaagtaattatcatactttcatattcaacaaacataaaaaaaattctgtgagaatttttacaattattaactttaattcttaaaatattctagtgaataaaccattattatgcccattaaaacaygaagaataaagaggataaataacttgcttgagttcatacatttagtatagagaagagaacataggatttgtaattaaattcttgcttttctactgttacaagttacctaaactctctaagattgaatctttcatccatgaagtgggaataatactggctactgcaggtagtcatggtgagaattcatgctattctatatgttcaaagcccaa

SEQ ID NO: 157900 - DNA, 573 bp, Homo sapiens
tcctgattaatatactgttattccttagtttgcagttattactctcatgtttacagtaaccacaatgttcctgtattcctcagccatcatacaactgcaggctgcactccaaattctcacaagcttaactggatataacttcacaataaaacccaggtataagaataaaaggtgtcttgcccaaatccctctgcagaaacagttcaaacatctgctatgctgatagttgctcaacaaaagtaattatcatactttcatattcaacaaacataaaaaaaattctgtgagaatttttacaattattaactttaattcttaaaatattctagtgaataaaccattattatgcccattaaaacatgaagaataaagaggataaataacttgcttgagttcatacatttagtatagagaagagaacataggatttgtaattaaattcttgcttttctactgttayaagttacctaaactctctaagattgaatctttcatccatgaagtgggaataatactggctactgcaggtagtcatggtgagaattcatgctattctatatgttcaaagcccaa

SEQ ID NO: 157901 - DNA, 573 bp, Homo sapiens
tcctgattaatatactgttattccttagtttgcagttattactctcatgtttacagtaaccacaatgttcctgtattcctcagccatcatacaactgcaggctgcactccaaattctcacaagcttaactggatataacttcacaataaaacccaggtataagaataaaaggtgtcttgcccaaatccctctgcagaaacagttcaaacatctgctatgctgatagttgctcaacaaaagtaattatcatactttcatattcaacaaacataaaaaaaattctgtgagaatttttacaattattaactttaattcttaaaatattctagtgaataaaccattattatgcccattaaaacatgaagaataaagaggataaataacttgcttgagttcatacatttagtatagagaagagaacataggatttgtaattaaattcttgcttttctactgttacaagttacstaaactctctaagattgaatctttcatccatgaagtgggaataatactggctactgcaggtagtcatggtgagaattcatgctattctatatgttcaaagcccaa

SEQ ID NO: 157902 - DNA, 504 bp, Homo sapiens
gaattcatgctattctatatgttcaaagcccaacacagtgyctgttttttagaaacttaacaccttttctttgtttctattttcctttgtctctctctcctaagatctttttgtctgccttgtgaaagacactgaattacatggatgtctctgaaataagaattaatatattttttcaaactctgattttttcaaagctgataatttattccaggtctcctgttttgcaggcttggtatttgttttctaaatccaaatttgaacatccttagaagcacattctttctagttttccactgaacccactcttccccgctatccacatttagtccgattcatacattcacgttaccttcctgtccctacaaggtttggaatttcagcccctgcagtgcatcctatgattccatcacttcaatgacttcagaacttttcggtttgggcacaatgatctaattttattttaaaactttggagaatgacacaaacaagagttattatttt

SEQ ID NO: 157903 - DNA, 503 bp, Homo sapiens
gaattcatgctattctatatgttcaaagcccaacacagtgtctgttttttagaaacttaacaccttttctttgtttctattttcctttgtctctctctcctaagatctttttgtctgccttgtgaaagacactgaattacatggatgtctctgaaataagaattaatatattttttcaaactctgattttttcaaagctgataatttattccaggtctcctgttttgcaggcttggtatttgttttctaaatccaaatttgaacatccttagaagcacattctttctagttttccactgaacccactcttccccgctatccacatttagtccgattcatacattcacgttaccttcctgtccctacaaggtttggaatttcagcccctgcagtgcatcctatgattccatcacttcaatgacttcagaacttttyggtttgggcacaatgatctaattttattttaaaactttggagaatgacacaaacaagagttattattt

SEQ ID NO: 157904 - DNA, 215 bp, Homo sapiens
tgttctgtaagtcatgtgtggtgtcttttttttctctttcttttctctggagtgccttcaaaataaacattgtaatttgagatgtggaccacataaaatggaccaaatgataagataatgggcaaaagcatttccaaagtgagaccagctgtcgaccttgtcttcrgaagggaggttctggcaaacttccattggcccccagcctagttttgttt

SEQ ID NO: 157905 - DNA, 511 bp, Homo sapiens
ccttggctggtggatcggctcacaagaggcttaaatagaggccccgttgctccctacaagaagtttggacacactgtgataaggcatttgaaagaaaacctttcgaatacagtgcraatctgtatcataaacaaaagaagcctttggtatgccctgtgtgcccctgcacagtgcactcagtacataactacacgctgttctgcaaaaaaatgaaacagctggaatttttaatatcatgtctgagatttcctgtgagaacatggtgtacacgttctcctaagttcaaggtgcgattttcctctaattgttttcaatagttccttccactgttagcatctttcagaaaaatatcagcacattgctttccctagagggaatagaagagaataagatcctatgatttaatctttaaaaagttgagaaacaaaagtcaaaaacatccaaatttaatgctgccttttctagcttatgcatgttacgttaatacctaaatgatgtccagaagtattta

SEQ ID NO: 157906 - DNA, 511 bp, Homo sapiens
ccttggctggtggatcggctcacaagaggcttaaatagaggccccgttgctccctacaagaagtttggacacactgtgataaggcatttgaaagaaaacctttcgaatacagtgcaaatctgtatcataaacaaaagaagcctttggtatgccctgtgtgcccctgcacagtgcactcagtacataactacacgctgttctgcaaaaaaatgaaacarctggaatttttaatatcatgtctgagatttcctgtgagaacatggtgtacacgttctcctaagttcaaggtgcgattttcctctaattgttttcaatagttccttccactgttagcatctttcagaaaaatatcagcacattgctttccctagagggaatagaagagaataagatcctatgatttaatctttaaaaagttgagaaacaaaagtcaaaaacatccaaatttaatgctgccttttctagcttatgcatgttacgttaatacctaaatgatgtccagaagtattta

SEQ ID NO: 157907 - DNA, 461 bp, Homo sapiens
aagcacgtgagcaaatgtaagttgttaaattacactcaccaaatttgaagtttgaaygctctctgtatatttgataaagttagagatttagtgttaattattttaggtgtaatagcagcatttattacatttctgatcgtgtttctggacaatttcagttccagattcagctgcacttttcctctaggtcttcattccctgaagaggttgatatgggcatctggtctcattcctgatgtattcctcagatcagagtagttgtcaggttgagggatgagaaaggcatttgtgtgagagagctgtgtggactttggcagatagggaaaaaacaagagtcctgaggtgccacgtgtcccatgcctttggctccccaccttttccaccctgctgtctgccctgaaaggccaccattgccttctggccttgcttgtctttggccagtgggaagtctcaacaggaaa

SEQ ID NO: 157908 - DNA, 461 bp, Homo sapiens
aagcacgtgagcaaatgtaagttgttaaattacactcaccaaatttgaagtttgaacgctctctgtatatttgataaagttagagatttagtgttaattattttaggtgtaatagcagcatttattacatttctgatcgtgtttctggacaattkcagttccagattcagctgcacttttcctctaggtcttcattccctgaagaggttgatatgggcatctggtctcattcctgatgtattcctcagatcagagtagttgtcaggttgagggatgagaaaggcatttgtgtgagagagctgtgtggactttggcagatagggaaaaaacaagagtcctgaggtgccacgtgtcccatgcctttggctccccaccttttccaccctgctgtctgccctgaaaggccaccattgccttctggccttgcttgtctttggccagtgggaagtctcaacaggaaa

SEQ ID NO: 157909 - DNA, 533 bp, Homo sapiens
atgtgtcttatatgtcataagtgtgtcatcaatatttgcaaaagcaagggatagaatgggtgctggagagacagtttaggaagccaagaatcaaggtgtagatgtttaaaaatttgtattattgattaaygtgataataaaaattgggatttaatttgtatatcttggctaatcgcaagttctttagaccacaggcctggccatacaagatcaagtctttcatgtgaaagtggaaatagcagaaggtccctgtcatcctgagattgctctcttttttttttccttttttttttttttttttggagacaaagtctgtctctgttgcccaggctggagtgcagtggtgcaagcacagctcactgcagcctctgcctcccaggttcaagtgattgtcctgcctcagcctcctgagtagctgggattacaggtgcccaccaccaagcccagctaattttgtatttttagtagagacagggtttcaccatgttggccaggctggtctcgaactcctggcctcaagtgatccacccgtc

SEQ ID NO: 157910 - DNA, 455 bp, Homo sapiens
actcgagaaatttcacattgataccactattttttaatacctagttgatatccaagtgttcttaattatgmtaataatctcccttttctctattgtgttttttgaatctaggagccaggcttttagttaccctgtcttcttagttccttttaacatgataaaaatagattaatctgccatgaaaaagtgaaaataccaaatcttggtgtgtgatgagaaatgaactcatggaacagtactagacttgtgtatcagcacaacaccttagtatagatttatctgtgcctatttcctgggccatattttataatttgattcatattgtcctttgggaatccctgatccaataggattaatgtccttatgagacagcctcaacagagcttgctctcattctccctctgccatgtaaggacacagtgagaggacagctgtctgcaagccaagagaagaaa

SEQ ID NO: 157911 - DNA, 455 bp, Homo sapiens
actcgagaaatttcacattgataccactattttttaatacctagttgatatccaagtgttcttaattatgctaataatctcccttttctctattgtgttttttgaatctaggagccaggcttttagttaccctgtcttcttagttccttttaacatgatamaaatagattaatctgccatgaaaaagtgaaaataccaaatcttggtgtgtgatgagaaatgaactcatggaacagtactagacttgtgtatcagcacaacaccttagtatagatttatctgtgcctatttcctgggccatattttataatttgattcatattgtcctttgggaatccctgatccaataggattaatgtccttatgagacagcctcaacagagcttgctctcattctccctctgccatgtaaggacacagtgagaggacagctgtctgcaagccaagagaagaaa

SEQ ID NO: 157912 - DNA, 455 bp, Homo sapiens
actcgagaaatttcacattgataccactattttttaatacctagttgatatccaagtgttcttaattatgctaataatctcccttttctctattgtgttttttgaatctaggagccaggcttttagttaccctgtcttcttagttccttttaacatgataaaaatagattaatctgccatgaaaaagtgaaaataccaaatcttggtgtgtgatgagaaatgaactcatggaacagtactagacttgtgtatcagcacaacaccttagtatagatttatctgtgcctatttcctgggccatattttataatttgattmatattgtcctttgggaatccctgatccaataggattaatgtccttatgagacagcctcaacagagcttgctctcattctccctctgccatgtaaggacacagtgagaggacagctgtctgcaagccaagagaagaaa

SEQ ID NO: 157913 - DNA, 278 bp, Homo sapiens
ttgccgttttatccccatccccttaaggctcaycatgtacagttgtgcaggttgtacacaaacatacatgatagtcctccatatgacagtgatgtgaaggaagggaagccatcaggagataggacttacttgtttctgaaacctcttgtgaccctttgtgtcccttactctgcccaacatataaaaaacactccatcaatatgtattatttctatacacacatatactacataaaatgggagcctttcccataccttttgtagcaagattattaaagt

SEQ ID NO: 157914 - DNA, 382 bp, Homo sapiens
ttggtcagagcgtaagagagtgtaatcaggtcctaataaatacattcaaaatgtaaaatcttaatacaaacctcagcactcactgtaagaagtgacaattaagctagagtgaatcccctgaccactctcagaagacacataatgcatttgagaccagcctggccaacatggcaaaaccacgtctctactaaaaatataaaaattagccaggtatggtggtgtgcacctgcaatcccagctacttgaaaggctgagktaggagaatcacttgaacaccagaggcagaggttgcagtgaactgagatcacaccattgcactccagcctgggcaacaagagcaagactgtgtctcaaaaaaaaaaaaaagaagaagaagacagat

SEQ ID NO: 157915 - DNA, 382 bp, Homo sapiens
ttggtcagagcgtaagagagtgtaatcaggtcctaataaatacattcaaaatgtaaaatcttaatacaaacctcagcactcactgtaagaagtgacaattaagctagagtgaatcccctgaccactctcagaagacacataatgcatttgagaccagcctggccaacatggcaaaaccacgtctctactaaaaatataaaaattagccaggtatggtggtgtgcacctgcaatcccagctacttgaaaggctgagtyaggagaatcacttgaacaccagaggcagaggttgcagtgaactgagatcacaccattgcactccagcctgggcaacaagagcaagactgtgtctcaaaaaaaaaaaaaagaagaagaagacagat

SEQ ID NO: 157916 - DNA, 529 bp, Homo sapiens
gaggaccactgatgtagaactttaaaaaaatgggatgcttggatccacgtccagagatgccagtctcattggctgagttacagtcctgctgtcccacataaagtttcttgggtcattctaccaatctctggggtgagagtcgctgctccactgtgtcttggtgaccagctgagtctctcttcctggttctccagcatgactcctaactagtgcttatgtttcttgcagagaaaccaaagatctgcccttaacaacagtccaatgagttaagaggaaataaagtgctttcaagaaaatgcctttttaagcayccatggcatccaggaggcccctatgctgtgtatggtttgatttgtgtgaattttagtttgcctattcttctcttctctttgtgaactctggcaggatgagaacaacttcacaaatgtgtaaggaaagttgttctcaagcggtctgggacggagtctttttgcttgatatacttcaaatctccttctgggaatatcatttattcctgataaaatgctta

SEQ ID NO: 157917 - DNA, 529 bp, Homo sapiens
gaggaccactgatgtagaactttaaaaaaatgggatgcttggatccacgtccagagatgccagtctcattggctgagttacagtcctgctgtcccacataaagtttcttgggtcattctaccaatctctggggtgagagtcgctgctccactgtgtcttggtgaccagctgagtctctcttcctggttctccagcatgactcctaactagtgcttatgtttcttgcagagaaaccaaagatctgcccttaacaacagtccaatgagttaagaggaaataaagtgctttcaagaaaatgcctttttaagcacccatggcatccaggaggcccctatgctgtgtatggtttgatttgtgtgaattttagtttgcctattcttctcttctctttgtgaactctggcaggatgagaacaacttcacaaatgtgtaaggaaagttgttctcaagcggtctgggacggagyctttttgcttgatatacttcaaatctccttctgggaatatcatttattcctgataaaatgctta

SEQ ID NO: 157918 - DNA, 511 bp, Homo sapiens
aaatggtatcagtgttaaagcatggaggcaaatgactaactgtggaatagtggctgcctctgggagagggagggaaggaaatggaatgtgagagctcctataatatgtagtgttttattctttaaaaagaatgatctaaagcaaaataggcaaaatagtacatgttaattctgaatggtgagtatatggagctgttatcctagtctctgtcctttttctatgtttgaaatagttcatatcttaatttttgtcagagattaaaatacatgaaatacaatgtacttacatttttaatcatcttagtctgttcattaatagcttcaagaggaacattggtggccccaatttgttgtgtgataccacctgcttcaccrtcttgtacatgtgtgtgacggagctatgagaagacagcaaatacagattggtatttgaacatggaaaagatagcagcaaaaataataagaaattagcaacttatttattgtaagcagaattgcttatatgtcctatt

SEQ ID NO: 157919 - DNA, 356 bp, Homo sapiens
gctgaggtccatttccttgctrgctgttggtgaagggtcactgtcagcaactgtggcttctctctggtccttgagtgtggtccctctatcttcaaagccagcaaggacatgccaaatccttctcatgctttgaatctctctgacctcctcatctgccaccagccaaagaaaactctgcttttaaaaaggatgtaattaagttaggcccacttggataatctcccttttgattaactctaagccaaatgattattagccttaattacatcttcaaaatctcttttgccagtagtaacacaacataatcatgggcggataatctcattaaagtcacaggcccagggattaaggtggaa

SEQ ID NO: 157920 - DNA, 576 bp, Homo sapiens
atgttcacaataccctcaccagaaggagactccacctcaagaaaccactttctttgcccacccataagaagcagcttctcatctgttcaagttttacttaagattgcagcaattcagctacatcttctggttccacttcaaattccagttctcttgctatttttctaccacatccgcagtgacttcctctactgaaatcttgaattcctcaaagtcatacatgagagttgaaatcagcttcttccaaactcctatcaaygtttatattttgtcctcttatggatcatgaacgttcttcataacatccagaagggtgaatcctttccaaaaggttttcaacttttgcccaaatccatcagaggaatctcgatctatggcagctatagccgtataaaatgtatttcttaagtaacaatacttgaaagttgaaaacactccttgatccatgagctgcagaatggatgctgtattagcaggcacgaaaacaacattaatctccttgtgtgtctccatcagagcttgggtaatcaggtacactgttagcaagcagtaatatattgaaagcaatctttttct

SEQ ID NO: 157921 - DNA, 576 bp, Homo sapiens
atgttcacaataccctcaccagaaggagactccacctcaagaaaccactttctttgcccacccataagaagcagcttctcatctgttcaagttttacttaagattgcagcaattcagctacatcttctggttccacttcaaattccagttctcttgctatttttctaccacatccgcagtgacttcctctactgaaatcttgaattcctcaaagtcatacatgagagttgaaatcagcttcttccaaactcctatcaatgtttatattttgtcctcttatggatcatgaaygttcttcataacatccagaagggtgaatcctttccaaaaggttttcaacttttgcccaaatccatcagaggaatctcgatctatggcagctatagccgtataaaatgtatttcttaagtaacaatacttgaaagttgaaaacactccttgatccatgagctgcagaatggatgctgtattagcaggcacgaaaacaacattaatctccttgtgtgtctccatcagagcttgggtaatcaggtacactgttagcaagcagtaatatattgaaagcaatctttttct

SEQ ID NO: 157922 - DNA, 456 bp, Homo sapiens
tcttaccttttgtactactggagatttgtgtgaagttaaatgcccccaatggggatgtcttgcctcttttttaacctctaagccaacccgaccaaggagtacctcaccccctacacctcctgaagctttcttaccttggtcccgaacaccagggaaatactttaccggctcctgcagcttctccttccttgggctgtgcacagagtcatcgctacagtttgtgaggatcctttaagctacactgctggccagttttgttttttttctttccccccacattgctgagagctgggttattcctcacaytgggtgggttctgatttctcacccctgaggccaccacaaggggcgggacgcatgcctcctcacgagagagaaccagagaccgtcccaggaggggaatgtaatcacgggtgagcccccaaagtgttatatataaagttttggtgccgcaaa

SEQ ID NO: 157923 - DNA, 582 bp, Homo sapiens
gaactctttgtcccacaggagagcagcggatccacgctagagaagacgcttgtatctcttcacggctcttctctgagaaatgaagccactccacgatacagtcagcaagaggaaaccgggaatggaagatggcaacaatccctgtcactggaacgctggcctctctggacaagccacccttttggaaccccaccccttacacccgtggccgtggcacagtgctgtatcctgcctgtgctctggcctctgctctctcctccctctggctctgcctcccctatttctcaggggcctggatgygtttcgctctggccgaatgccttcaacaaagatgacttcccagtccgtcaaggagacacttcctggaggtccgtgtcatgatcgtttctgtctccaaacctgtttctgcttaattgggcaggtatcatgacccaggagctcttggcttccatacgtgtctcaggcagggaagctttcttcttccccacgttttccctcatgggtgggtggattgcctagaatgagtgctacgagactgtgactggccttgtcttccaggacaggtggtgtcccatttcctct

SEQ ID NO: 157924 - DNA, 582 bp, Homo sapiens
gaactctttgtcccacaggagagcagcggatccacgctagagaagacgcttgtatctcttcacggctcttctctgagaaatgaagccactccacgatacagtcagcaagaggaaaccgggaatggaagatggcaacaatccctgtcactggaacgctggcctctctggacaagccacccttttggaaccccaccccttacacccgtggccgtggcacagtgctgtatcctgcctgtgctctggcctctgctctctcctccctctggctctgcctcccctatttctcaggggcctggatgtgtttcgctctggccgaatgccttcaacaaagatgacttcccagtccgtcaaggagacacttcctggaggtccgtgtcatgatcgtttctgtctccaaacctgtttctgcttaattgggcaggtatcatgacccaggagctcttggcttccatacgtgtctcaggcagggaagctttcttcttccccwcgttttccctcatgggtgggtggattgcctagaatgagtgctacgagactgtgactggccttgtcttccaggacaggtggtgtcccatttcctct

SEQ ID NO: 157925 - DNA, 582 bp, Homo sapiens
gaactctttgtcccacaggagagcagcggatccacgctagagaagacgcttgtatctcttcacggctcttctctgagaaatgaagccactccacgatacagtcagcaagaggaaaccgggaatggaagatggcaacaatccctgtcactggaacgctggcctctctggacaagccacccttttggaaccccaccccttacacccgtggccgtggcacagtgctgtatcctgcctgtgctctggcctctgctctctcctccctctggctctgcctcccctatttctcaggggcctggatgtgtttcgctctggccgaatgccttcaacaaagatgacttcccagtccgtcaaggagacacttcctggaggtccgtgtcatgatcgtttctgtctccaaacctgtttctgcttaattgggcaggtatcatgacccaggagctcttggcttccatacgtgtctcaggcagggaagctttcttcttccccacgtttyccctcatgggtgggtggattgcctagaatgagtgctacgagactgtgactggccttgtcttccaggacaggtggtgtcccatttcctct

SEQ ID NO: 157926 - DNA, 455 bp, Homo sapiens
aaaacctacctgtgcaactgagaaggccgctcaggccacggggacagggcaggaatgctctcaggagtgtcccctgaacctgaacttgatttcacgccatcaccttccacctcttaaccagcatctcctggacagtcagccgagtgtttccatgataccagccatacctgatgccaggagactcgctacacttggaagctcttcaaggkgggactttctgtcttgttcagtttttcattctcagtagtcaacacaggaccttatacttaaaggaaataagtataatgtcctaacaagtgtttctggaataaatgatcatggctgaaatgagcatttgaaatgacgatatatctagaaagaacagaaaatatacactggacgtattttaggtggctgagattattgaatgggaaaatagtgagatcttacaattgaatgggtatcataaatgcttc

SEQ ID NO: 157927 - DNA, 548 bp, Homo sapiens
cgttaatataattgttggttgcattgatttcaacttccccacacgatgcaatcggctttctgccgtatttcaatcacactaaccaagagagacatcagacattcagaatagactctggaccaaaaccgagggyaggggagaggtgggcgggccaggcacagctctgctgaagcactggtttgacatgtcgagttgaagtgtttctactcaaaacacctgtctccctgccaaggtgaaggctagatggtaaaaaagaaagttcccttttttctgataaactaggctgtctccataggaagtaccctgaaggcccccagctccgactccgagagcagagcccagactctcctactttgaacggacatgagctctatgcctcttggggtttctctgcctgcccagtcaccctggataacgtgcttgccctagattgtctcctaggccaagtcctctccaagttcttggccctttgtcctaaggttggatctcttcctctcgcttcccttgctccgagctgtgtctctggatacaccccctgcaaactacgc

SEQ ID NO: 157928 - DNA, 548 bp, Homo sapiens
cgttaatataattgttggttgcattgatttcaacttccccacacgatgcaatcggctttctgccgtatttcaatcacactaaccaagagagacatcagacattcagaatagactctggaccaaaaccgagggcaggggagaggtgggcgggccaggcacagctctgctgaagcactggtttgacatgtcgagttgaagtgtttctactcaaamcacctgtctccctgccaaggtgaaggctagatggtaaaaaagaaagttcccttttttctgataaactaggctgtctccataggaagtaccctgaaggcccccagctccgactccgagagcagagcccagactctcctactttgaacggacatgagctctatgcctcttggggtttctctgcctgcccagtcaccctggataacgtgcttgccctagattgtctcctaggccaagtcctctccaagttcttggccctttgtcctaaggttggatctcttcctctcgcttcccttgctccgagctgtgtctctggatacaccccctgcaaactacgc

SEQ ID NO: 157929 - DNA, 548 bp, Homo sapiens
cgttaatataattgttggttgcattgatttcaacttccccacacgatgcaatcggctttctgccgtatttcaatcacactaaccaagagagacatcagacattcagaatagactctggaccaaaaccgagggcaggggagaggtgggcgggccaggcacagctctgctgaagcactggtttgacatgtcgagttgaagtgtttctactcaaaacacctgtctccctgccaaggtgaaggctagatggtaaaaaagaaagttcccttttttctgataaactaggctgtctccataggaagtaccctgaaggcccccagctccgactccgagagcagagcccagactctcctactttgracggacatgagctctatgcctcttggggtttctctgcctgcccagtcaccctggataacgtgcttgccctagattgtctcctaggccaagtcctctccaagttcttggccctttgtcctaaggttggatctcttcctctcgcttcccttgctccgagctgtgtctctggatacaccccctgcaaactacgc

SEQ ID NO: 157930 - DNA, 559 bp, Homo sapiens
cataagaataccaaacattaattgagggttgttatatcaaaaagagtaagaacaactcctgagattcgaaagccatgggaagttgctgagctcaagtattcatctcatactagtcaaagttagggayagtagaagaggaggggttggattgaagtgtaggaacccatgttgctgcaatgattggaagctcctaattaacaggaactatggagtggaataaagtgaacttatcatggggaccctagtgttccctgtagtgctttctcctcctctctactggacactctttttcttctttgtctttttccattcaataaaagcaagccatttatatgattcaatagactgtggattgagaatcagaattttggagttgttagtaattaacaaagtaattatccaagcatttaatttcactggacatgatagcagttgaaatgatgatttcttgttattccttgattctacatttaaaacacattattgtcccattttatttcaaggaggaataaaataggagagagaaatataaagcaaagggaaatgaagaaagaagctt

SEQ ID NO: 157931 - DNA, 548 bp, Homo sapiens
ttaattccactagcataaataaaccaatttattacttcctattaattcaatatcaatctgtttgaattgaatgtgcatttattaatatagaagatacctttgcaaattactcaattaaaataaaaacaagcctaggtatatgactatctctatattttctaagctttccagatgcatacttgttttcccactggttgcataagaataccaaacattaattgagggttgttatatcaaaaagagtaagaacaactcctgagattcgaaagccatgggaagttgctgagctcaagtattcatctcatactagtcaaagttagggatagtagaagaggaggggttggattgaagtgtaggaacccatgttgctgyaatgattggaagctcctaattaacaggaactatggagtggaataaagtgaacttatcatggggaccctagtgttccctgtagtgctttctcctcctctctactggacactctttttcttctttgtctttttccattcaataaaagcaagccatttatatgattcaatagactgtgg

SEQ ID NO: 157932 - DNA, 304 bp, Homo sapiens
taagtcagtagaaatgttccagttttggaaacatggcatcatgcatgagatgggatttccaagactaggaatcagatttatttttcttaggcatgctgggactaagcatcctttcataacaccagtgtttgtggtattgggaatcccagtgayctcacattgcaatccttcattaccatcatgtgcaaagcagctttgaagatgtctctgctctgaattgcattgtcttcacagaaaagtgtggggaagatcccacttctgaggctgcaggacacacagaatgacctttcctctgccattccct

SEQ ID NO: 157933 - DNA, 304 bp, Homo sapiens
taagtcagtagaaatgttccagttttggaaacatggcatcatgcatgagatgggatttccaagactaggaatcagatttatttttcttaggcatgctgggactaagcatcctttcataacaccagtgtttgtggtattgggaatcccagtgatctcacaytgcaatccttcattaccatcatgtgcaaagcagctttgaagatgtctctgctctgaattgcattgtcttcacagaaaagtgtggggaagatcccacttctgaggctgcaggacacacagaatgacctttcctctgccattccct

SEQ ID NO: 157934 - DNA, 529 bp, Homo sapiens
attatggcattttcaactcctattgtcagcttctgacacaatatgaggtattaggacagtaactggggtgatgcccagtaagttccggccacaaatcctacaccaatattatggtatgcttctggaaagagaaagtacttggacctattggcaaatcccaccagtcacagagcaataaacagggaagactggaataccagccaatcagatcarcagataggattttaaaacaccaagagcgtatcactttgcatcttggaaaacagtgactatttaaattctgatcttgtattctctaacaaatgagaacaatgaatgttgcaccccaggacatgctcaggaccaaagcacagttcaaattctggaaggacatcaccatgatcctaaagtgggaggaaaaacctcctccccagtcgtcagcaaggacatcaccatgatcctaaagcgggaagaaaagcctcctccccagtcctcagcactggacatagccaacagcacaccggagtaggtagaaggcagcaaaatagct

SEQ ID NO: 157935 - DNA, 529 bp, Homo sapiens
attatggcattttcaactcctattgtcagcttctgacacaatatgaggtattaggacagtaactggggtgatgcccagtaagttccggccacaaatcctacaccaatattatggtatgcttctggaaagagaaagtacttggacctattggcaaatcccaccagtcacagagcaataaacagggaagactggaataccagccaatcagatcaacagataggattttaaaacaccaagagcgtatcactttgcatcttggaaaacagtgactatttaaattctgatcttgtattctctaacaaatgagaacaatgaatgttgcaccccaggacatgctcaggaccaaagcacagttcaaattctggaaggacatcaccatgatcctaaagtgggaggaaaarcctcctccccagtcgtcagcaaggacatcaccatgatcctaaagcgggaagaaaagcctcctccccagtcctcagcactggacatagccaacagcacaccggagtaggtagaaggcagcaaaatagct

SEQ ID NO: 157936 - DNA, 599 bp, Homo sapiens
tagaaatctgtgaggtattgttttgttttgttttgttttttgtacttgaaattgggttttactttctacagtttwtaattattttttctttctgctttttcactaggcttcatagatctcccttgcacatgtgcaattttgctgtgagccagaaatttgcatagttcattctttgaatttgggtctcatactttctgaggttggcttgttgccaaaactttccttttaaatttttagctgtttttaaggtctaaattctcatttctagcacttttaatcagggacttcatttttttctccattaataaaaattttaattttctactgatacataatggatgtacatattttggtagtacatgtgataatttaatgcattcatataatttgtaaaaatgaaactaatgtaattgagtatccaacaccttaaatatttgtctgtttcttatgctagaaacacctgaatgattatcttctaactattctgaactgtacagtagcttgttgtaaactattatttctgggcaaggccagctccacggctacacgatcagtgtggctgcagagacaggcacttggttttatgctctacttcaaag

SEQ ID NO: 157937 - DNA, 588 bp, Homo sapiens
ttttctttacagtcaatgggcactttatgaggaagcacaaatacaaagctgcttttcattcagggccccaagaaagtcaagactagttgtattagtccattctcatgctgctaataaacatgtactagagacagggtaatttagaaagwaaagagatttaatagactcatagttcctcaggactggggaggattctggaaacttactatcatgacaaaaggggaagcaaacacttccttcttcacatggtggcaggaaggggaagtgctgagcaaaaggggaaaagccccttacaaaaccatcagatctcatgaaaacgtactcactgtcacaagaagagtagcatgggggtaacaacgcccatgattcaattacctccaaccaggtcacttccacaacacctggggattgtgggaactacaattcaagatgagatttggatggggacacagagccaaaccatatcactaatcttagtctcaattttcccgtcatcagaatattgtcagcacttactttaataccccatgcgttcatgtcccttttgtaattcactctttctaaagaacattcttctctttggctaca

SEQ ID NO: 157938 - DNA, 498 bp, Homo sapiens
ttacctccaaccaggtcacttccacaacacctggggattgtgggaactacaatycaagatgagatttggatggggacacagagccaaaccatatcactaatcttagtctcaattttcccgtcatcagaatattgtcagcacttactttaataccccatgcgttcatgtcccttttgtaattcactctttctaaagaacattcttctctttggctacacagcttatctttccatcttttttttttttaagtataacttatgtaaaaactttaaggcttctgtgtcttttctacattttcactggctctctgaggggtcatctcaggtgccaacgaaggcagtcttcagtctggattcctttcaaggatgtgaaattatctcttcaaaatacattaggtaatgtctgcctactttggattttgtgacggcttgaaacaatgcagtccacattttaactgacaagtttagaggtgtcagtggtatttgagctttctgtgcc

SEQ ID NO: 157939 - DNA, 566 bp, Homo sapiens
tactcactgtcacaagaagagtagcatgggggtaacaacgcccatgattcaattacctccaaccaggtcacttccacaacacctggggattgtgggaactacaattcaagatgagatttggatggggacacagagccaaaccatatcactaatcttagtctcaattttcccrtcatcagaatattgtcagcacttactttaataccccatgcgttcatgtcccttttgtaattcactctttctaaagaacattcttctctttggctacacagcttatctttccatcttttttttttttaagtataacttatgtaaaaactttaaggcttctgtgtcttttctacattttcactggctctctgaggggtcatctcaggtgccaacgaaggcagtcttcagtctggattcctttcaaggatgtgaaattatctcttcaaaatacattaggtaatgtctgcctactttggattttgtgacggcttgaaacaatgcagtccacattttaactgacaagtttagaggtgtcagtggtatttgagctttctgtgcctcaaaaactcaccatc

SEQ ID NO: 157940 - DNA, 582 bp, Homo sapiens
agatctcatgaaaacgtactcactgtcacaagaagagtagcatgggggtaacaacgcccatgattcaattacctccaaccaggtcacttccacaacacctggggattgtgggaactacaattcaagatgagatttggatggggacacagagccaaaccatatcactaatcttagtctcaattttcccgtcatcagaatattgtcagcacttactytaataccccatgcgttcatgtcccttttgtaattcactctttctaaagaacattcttctctttggctacacagcttatctttccatcttttttttttttaagtataacttatgtaaaaactttaaggcttctgtgtcttttctacattttcactggctctctgaggggtcatctcaggtgccaacgaaggcagtcttcagtctggattcctttcaaggatgtgaaattatctcttcaaaatacattaggtaatgtctgcctactttggattttgtgacggcttgaaacaatgcagtccacattttaactgacaagtttagaggtgtcagtggtatttgagctttctgtgcctcaaaaactcaccatc

SEQ ID NO: 157941 - DNA, 571 bp, Homo sapiens
aacgtactcactgtcacaagaagagtagcatgggggtaacaacgcccatgattcaattacctccaaccaggtcacttccacaacacctggggattgtgggaactacaattcaagatgagatttggatggggacacagagccaaaccatatcactaatcttagtctcaattttcccgtcatcagaatattgtcagcacttactttaataccccatgcgttcatgtcccttttgtaattcactctttctaaagaacattcttctctttggctacacagcttatctttccatcttttttttttttaagtataacttatgtaaaaaytttaaggcttctgtgtcttttctacattttcactggctctctgaggggtcatctcaggtgccaacgaaggcagtcttcagtctggattcctttcaaggatgtgaaattatctcttcaaaatacattaggtaatgtctgcctactttggattttgtgacggcttgaaacaatgcagtccacattttaactgacaagtttagaggtgtcagtggtatttgagctttctgtgcctcaaaaactcaccatct

SEQ ID NO: 157942 - DNA, 573 bp, Homo sapiens
gtcacaagaagagtagcatgggggtaacaacgcccatgattcaattacctccaaccaggtcacttccacaacacctggggattgtgggaactacaattcaagatgagatttggatggggacacagagccaaaccatatcactaatcttagtctcaattttcccgtcatcagaatattgtcagcacttactttaataccccatgcgttcatgtcccttttgtaattcactctttctaaagaacattcttctctttggctacacagcttatctttccatcttttttttttttaagtataacttatgtaaaaactttaaggcttctgtgtcttttctacattttcactggctctctgaggggtcatctcaggtgccaacgaaggcagtcttcagtctggattcctttcaaggatgtgaaaktatctcttcaaaatacattaggtaatgtctgcctactttggattttgtgacggcttgaaacaatgcagtccacattttaactgacaagtttagaggtgtcagtggtatttgagctttctgtgcctcaaaaactcaccatctcacactgttcattg

SEQ ID NO: 157943 - DNA, 568 bp, Homo sapiens
gtcacaagaagagtagcatgggggtaacaacgcccatgattcaattacctccaaccaggtcacttccacaacacctggggattgtgggaactacaattcaagatgagatttggatggggacacagagccaaaccatatcactaatcttagtctcaattttcccgtcatcagaatattgtcagcacttactttaataccccatgcgttcatgtcccttttgtaattcactctttctaaagaacattcttctctttggctacacagcttatctttccatcttttttttttttaagtataacttatgtaaaaactttaaggcttctgtgtcttttctacattttcactggctctctgaggggtcatctcaggtgccaacgaaggcagtcttcagtctggattcctttcaaggatgtgaaattatctcttcaaaatacattaggtaatgtctgcctactttggattttgtgacrgcttgaaacaatgcagtccacattttaactgacaagtttagaggtgtcagtggtatttgagctttctgtgcctcaaaaactcaccatctcacactgtt

SEQ ID NO: 157944 - DNA, 636 bp, Homo sapiens
tctgggtactctctcaatatattgtgaatgcgagatggaaaaaattagtgttacatgtcagctttctaaaaccccaacataatcctatctcttttcaaatggtttcacttcttggccctttgaaagcaatataaacaatttcactgacttagtaagcagggctctaagaactgaagagaaaacacgccaatgctggatrgcatcaattctttgaaagaggaaggaggcaaatagacatgacacatccacaataaacagtcgctaaaatgtatgggaatgctccgtgctgcacctctctgcaggctttcaccttatttagctccaattttctaagactactacaaaaaaatgtacaagagaggccccctggacactagctagtaagagcaccaaatcacacatatttatggaaacctaattaataatagttgtctcttcaaacccctgctgtgagccatgtattgtcttaaccaccttctgctctgtatcattctactaaagcacctgcataagtaggtattacttagtaaggaaactggggcatagctagctggattaatacctggcaagaaataggaagtgaagatgggatttgctccttgtgtgtgtgggtggaaagcaaaggctctttccgca

SEQ ID NO: 157945 - DNA, 588 bp, Homo sapiens
acagatattttcacattaatataatttttagttatctcaaaatatcatttatgatcactagctcttcaaatttacaaagatcatctcagtcacagctgtttccctttacttaatgcattgggaaagaagcacatgcataactgcatcataacatccttaaaaatgaattcattagtgtttgagcataattggcttcctctataatcaaaggtgtgctagctgacgctttctgaaatgtttttcttagatgtgactttatcagactgcctatatggtccccttagacagtgcctaagggccatttccttgaacatggtggaattctcagcctcctgtctcagaagcagasatgcctaactggctgggatgcatttcaaggataagcaagagcaggagactggagtaactgccatatggtgggaggtgacaactggaaacaacagtggtattaaattgatccaaatgcagcctcagggcatgttagtaactaggaaatactaagagggaacagagtaagatggaacaactcagatcatcagtaagaaatgcctggccagggccaggtgtggtggctcatgcctgtaatcc

SEQ ID NO: 157946 - DNA, 579 bp, Homo sapiens
cgtgaactcgctgaggccccctttaacaatttagtaactccttttggcatggtgcactggcccaatggactaagtgtcctattgaagaatgcaatagaagmagacagcgagattggcctcaacagggttgcagaaagccctgtctcagcctggtcatgaattcaggtcaaccagtgccacttttatgaaaagaactgtagaagggaaatccttggaaacaaatacactgacaaatcagtccattgtgtgacttcttcagaacaaaacctgcacttggaactcagagaaaggagaaaatcacagcctttcacgtaaattatatctgagaaataaaacctttgaatttgaaagaaggctcactagataataccactgggaggatatcaggaattagtatttttttgaccacataagtgccaagcttcgagctatgtgctttgtatccaacatctcatctcatctgttggtaacactaccaacaattcagctcaaggaatcacattgtcagagctggaagggtcctcagagattatcaggtccaaactgttcatttgcatgtgaaaaacctgagaccatggc

SEQ ID NO: 157947 - DNA, 593 bp, Homo sapiens
ccaatgcaacagcaccttcaagcactaacttcgatagaccctcagcctctgggatgacctggcatttccctctatctacgtgaactcgctgaggccccctttaacaatttagtaactccttttggcatggtgcactggcccaatggactaagtgtcctattgaagaatgcaatagaagcagacagcgagattggcctcaacagggttgcagaaagccctgtctcagcctggtcatgaattcaggtcaaccagtgccacttttatgaaaagaactgtagaagggaaatccttggaaacaaatacactgacaaatcagtccattgtgtgacttcttcagaacaaaacctgcacttggaactcagagaaaggagaaaatcacagcctttcacgtaaattatatctgagaaataaaacctttgaatttgaaagaaggctcactagataataccactgggaggatatcaggaattagtatttttttgaccacataagtgccaagcttcragctatgtgctttgtatccaacatctcatctcatctgttggtaacactaccaacaattcagctcaaggaatcacattgtcagagctgga

SEQ ID NO: 157948 - DNA, 621 bp, Homo sapiens
aagcttcgagctatgtgctttgtatccaacatctcatctcatctgttggtaacactaccaacaattcagctcaargaatcacattgtcagagctggaagggtcctcagagattatcaggtccaaactgttcatttgcatgtgaaaaacctgagaccatggcaggacacagtggctcacacctgtaatcccagcactttgggaggcaaggagggcggatcatgaggtcaggagttcgagaccagcctgaccaatgtggtgaaaccccatctttcctaaaaacacaaaaattagctgggcatcccagctactcaggaggctgaggcaggagaatcttttgaacccgggaggcagatgttgcagtgagccgagatcacgtcacagcactccagcccagtgaaagagcaagactccatctcaaaaaaaaaaaaaaaaaaaaaaaaggaaaaacctgagactaagagaagataagtagcagaacagaactcaatgtcttcttgtgcttctctgacttaacgtctttccaatgcaccatgcagcctcccacatgagcaatcagatatgtacgtcactagaccctaagaaagtaagctcttcattaagctctttaaagttaaaatgca

SEQ ID NO: 157949 - DNA, 579 bp, Homo sapiens
taagttccagggcaccatggtttggrggagcaccttggcctaagatgtcatctggtcaccttcagatccaaatgagatgctgccaatcctcttggggtggtccctcatccacacaccacacacatgccacctaatggtcacacaacttctgtacaatgtgttctctttctggttggtggatatcttgactgcttctataccatagatggagacacaggatctggccttacatttctgtgccacccaaccattatgggagacttcatgactgtttctatggcatttatgcccaggctctctgcagccctctccctccacctcctcaccactctttccagacagaggtcatctctgctctcagatctcacaaagctttctcaggatttgcagacaacccagcagctgtggctgatagacaaaaagcaggcctttcctctctaggaacccctacctaacactagcgtgccctgctccacacagaggggctcttccagtcttggaaacgggagagaaggaacccttttcttctctttgcttcctggagtcctcttctgattccctaacagcattgatgtttat

SEQ ID NO: 157950 - DNA, 548 bp, Homo sapiens
gttccagggcaccatggtttgggggagcaccttggcctaagatgtcatctggtcaccttcagatccaaatgagatgctgccaatcctcttggggtggtccctcatccacacaccacacacatgccacctaatggtcacacaacttctgtacaatgtgttctctttctggttggtggatatcttgactgcttctataccatagatggagacacaggatctggccttacatttctgtgccacccaaccattatgggagacttcatgactgtttctatggcatttatgcccaggctctctgcagccctctccctccacctcctcaccactctttccagacagagstcatctctgctctcagatctcacaaagctttctcaggatttgcagacaacccagcagctgtggctgatagacaaaaagcaggcctttcctctctaggaacccctacctaacactagcgtgccctgctccacacagaggggctcttccagtcttggaaacgggagagaaggaacccttttcttctctttgcttcctggagtcctctt

SEQ ID NO: 157951 - DNA, 573 bp, Homo sapiens
catggtttgggggagcaccttggcctaagatgtcatctggtcaccttcagatccaaatgagatgctgccaatcctcttggggtggtccctcatccacacaccacacacatgccacctaatggtcacacaacttctgtacaatgtgttctctttctggttggtggatatcttgactgcttctataccatagatggagacacaggatctggccttacatttctgtgccacccaaccattatgggagacttcatgactgtttctatggcatttatgcccaggctctctgcagccctctccctccacctcctcaccactctttccagacagaggtcatctctgctctcagatctcacaaagctttctcaggayttgcagacaacccagcagctgtggctgatagacaaaaagcaggcctttcctctctaggaacccctacctaacactagcgtgccctgctccacacagaggggctcttccagtcttggaaacgggagagaaggaacccttttcttctctttgcttcctggagtcctcttctgattccctaacagcattgatgtttataataaactc

SEQ ID NO: 157952 - DNA, 548 bp, Homo sapiens
gttccagggcaccatggtttgggggagcaccttggcctaagatgtcatctggtcaccttcagatccaaatgagatgctgccaatcctcttggggtggtccctcatccacacaccacacacatgccacctaatggtcacacaacttctgtacaatgtgttctctttctggttggtggatatcttgactgcttctataccatagatggagacacaggatctggccttacatttctgtgccacccaaccattatgggagacttcatgactgtttctatggcatttatgcccaggctctctgcagccctctccctccacctcctcaccactctttccagacagaggtcatctctgctctcagatctcacaaagctttctcaggatttgcagamaacccagcagctgtggctgatagacaaaaagcaggcctttcctctctaggaacccctacctaacactagcgtgccctgctccacacagaggggctcttccagtcttggaaacgggagagaaggaacccttttcttctctttgcttcctggagtcctctt

SEQ ID NO: 157953 - DNA, 573 bp, Homo sapiens
catggtttgggggagcaccttggcctaagatgtcatctggtcaccttcagatccaaatgagatgctgccaatcctcttggggtggtccctcatccacacaccacacacatgccacctaatggtcacacaacttctgtacaatgtgttctctttctggttggtggatatcttgactgcttctataccatagatggagacacaggatctggccttacatttctgtgccacccaaccattatgggagacttcatgactgtttctatggcatttatgcccaggctctctgcagccctctccctccacctcctcaccactctttccagacagaggtcatctctgctctcagatctcacaaagctttctcaggatttgcagacaacccagcagctgtggctgatagacaaaaagcaggcctttcytctctaggaacccctacctaacactagcgtgccctgctccacacagaggggctcttccagtcttggaaacgggagagaaggaacccttttcttctctttgcttcctggagtcctcttctgattccctaacagcattgatgtttataataaactc

SEQ ID NO: 157954 - DNA, 572 bp, Homo sapiens
catggtttgggggagcaccttggcctaagatgtcatctggtcaccttcagatccaaatgagatgctgccaatcctcttggggtggtccctcatccacacaccacacacatgccacctaatggtcacacaacttctgtacaatgtgttctctttctggttggtggatatcttgactgcttctataccatagatggagacacaggatctggccttacatttctgtgccacccaaccattatgggagacttcatgactgtttctatggcatttatgcccaggctctctgcagccctctccctccacctcctcaccactctttccagacagaggtcatctctgctctcagatctcacaaagctttctcaggatttgcagacaacccagcagctgtggctgatagacaaaaagcaggcctttcctctctaggaacccctacctaacactagcgtgccctgctccacacagaggggctcttccagtcttggaaaygggagagaaggaacccttttcttctctttgcttcctggagtcctcttctgattccctaacagcattgatgtttataataaact

SEQ ID NO: 157955 - DNA, 559 bp, Homo sapiens
catggtttgggggagcaccttggcctaagatgtcatctggtcaccttcagatccaaatgagatgctgccaatcctcttggggtggtccctcatccacacaccacacacatgccacctaatggtcacacaacttctgtacaatgtgttctctttctggttggtggatatcttgactgcttctataccatagatggagacacaggatctggccttacatttctgtgccacccaaccattatgggagacttcatgactgtttctatggcatttatgcccaggctctctgcagccctctccctccacctcctcaccactctttccagacagaggtcatctctgctctcagatctcacaaagctttctcaggatttgcagacaacccagcagctgtggctgatagacaaaaagcaggcctttcctctctaggaacccctacctaacactagcgtgccctgctccacacagaggggctcttccagtcttggaaacgggagagaaggaacccttttcttctctttgcttcctggagtcctcttctgattccctaacrgcattgatg

SEQ ID NO: 157956 - DNA, 406 bp, Homo sapiens
aaagcagagtgaagtagttgcaacaacttaactatatggcctttaaagccaaaaatgtgagcaataaattattttttaatttttctactgttaattttatgtgtaggaaatggtctgctttgcttaaaacttgtggctcctctattcactgatcatatctttrattagctcacttttcccaaaatgtttttccatcttttgttttttatgctttcttatcctgcctaagccacaccctatctgtttttctgaacaagcttaagccctacttgctggatgacagctgtaaccaacggtgtgacttcctttcaaatctctaactgtgcttcactatctgtcccatgcacatgggctcttgactcctcactaagtatttgcacagcacctactgagtactgagccttat

SEQ ID NO: 157957 - DNA, 582 bp, Homo sapiens
aagcttcatgcagctgtgagatctccaagccacggtgcccagggccagtcagagctggcccctgacactcaggaacatgcagtcctgggcatcacccacttcagtagagctgtggagtctaggtcccctctcgccaagctggcaaaagctatgaccatatacaccacatttgcatataatttcaaggaactcacaggcccaaaagtttatccatggactctgggttcataatttctgctatggatgataatagaagccgtacgactggatgagatgaccctgggagagaatagaagagggaacgtyggactgagccccagggaagcccagggctaaaggaaccagcagagggaagaggagagaagaagacttcaaagcagaccaggaaagaagagctgacgtggtgaaagaacaactaaaaaaggaaaaaaggagccacgtcctagagggaaggtgcgtttgcatcagtggcattcggtccattatttccacataataagttggcgagctctttagaggcagggatccttcttcttttgtatccctgttatctcaaaattgatgctcatatcacaaacactc

SEQ ID NO: 157958 - DNA, 562 bp, Homo sapiens
cagtactaattagcataaagtcaatgttagccttagactttacaggtaagtctacagaatacagaaagaaaaaatataatgtcatatgtacttcttaaacagttgtatcagtggaaaaactgatgatgcattcatgttttcctcaatatttagtgaggagagcaaaaatgagtaataagaaggcaagaaaaaatatccactgtgtcactgtaacaggcactagatgatgaggtcatagaatgtattcatctttatttattcagaaattagctccatacctagcacataaacaytcccatctcaggtctcagttcgcttgtgcttctgtaacaaaatagctgagactgataagaacagaaacttgtttctcacagtccaggaggctgaaaagttcaaaaccatggttctggcagttttggcaccaagtgaggtcccagtttctgcttctaaaatggtaacttgaatgttgtgtccttacattagctagttcccttcagcccttttgtaatgcactaatcccatctatgagtacagagtcctcatggcctaattactcctaaag

SEQ ID NO: 157959 - DNA, 562 bp, Homo sapiens
cagtactaattagcataaagtcaatgttagccttagactttacaggtaagtctacagaatacagaaagaaaaaatataatgtcatatgtacttcttaaacagttgtatcagtggaaaaactgatgatgcattcatgttttcctcaatatttagtgaggagagcaaaaatgagtaataagaaggcaagaaaaaatatccactgtgtcactgtaacaggcactagatgatgaggtcatagaatgtattcatctttatttattcagaaattagctccatacctagcacataaacattcccatctcaggtctcagttcgcttgtgcttctgtaacaaaatagctgagactgataagaacagaaacttgtttctcacagtccaggaggctgaaaagttcaaaaccatggttctggcagktttggcaccaagtgaggtcccagtttctgcttctaaaatggtaacttgaatgttgtgtccttacattagctagttcccttcagcccttttgtaatgcactaatcccatctatgagtacagagtcctcatggcctaattactcctaaag

SEQ ID NO: 157960 - DNA, 626 bp, Homo sapiens
taatatttggagctggtgtttaagaaaaaccatgtttgatgttggaaaatgctatgtccggtataactatagatgtttggaaagcagctcagttatgctaaagataaagaaaggagagaaaaatgacagaaggggaggtttgaacaaaacaaaataatacctgaaaatgttgaatggatatgtaatatttgtgaatgtttatgttctctatttcaccattatttaaacatttatattttcaaagggagacaataattatattttgaaatcattttgtttttttatagagtgctgtattttttcttttcaatttcaatttggtgagcaaacaaaatcagtcagattattatacataattaggtttcctttttgagatttgttgaaactctttatcctttatgtatgtatttcaagtagtataataaaaaagaaatataaaatgattagatatacataaaagtattgtagattatgtttttcatattttctttcttttaatgtattttrcagatatacccattccagattatgatttcacaaactaagatgactctcagcagggaatcgttactgcatgtcgttttcatcaaagggagcttagtttatttgcctatctgaatattgac

SEQ ID NO: 157961 - DNA, 626 bp, Homo sapiens
taatatttggagctggtgtttaagaaaaaccatgtttgatgttggaaaatgctatgtccggtataactatagatgtttggaaagcagctcagttatgctaaagataaagaaaggagagaaaaatgacagaaggggaggtttgaacaaaacaaaataatacctgaaaatgttgaatggatatgtaatatttgtgaatgtttatgttctctatttcaccattatttaaacatttatattttcaaagggagacaataattatattttgaaatcattttgtttttttatagagtgctgtattttttcttttcaatttcaatttggtgagcaaacaaaatcagtcagattattatacataattaggtttcctttttgagatttgttgaaactctttatcctttatgtatgtatttcaagtagtataataaaaaagaaatataaaatgattagatatacataaaagtattgtagattatgtttttcatattttctttcttttaatgtattttgcagatatasccattccagattatgatttcacaaactaagatgactctcagcagggaatcgttactgcatgtcgttttcatcaaagggagcttagtttatttgcctatctgaatattgac

SEQ ID NO: 157962 - DNA, 321 bp, Homo sapiens
gtttttggggattcgtatcttttattcaggatagctaaatgyaatttatattagaccatatacagtaagttgtaaattatagaagttgtgcttatcaaaatcatattcagtgggcaatatggcctttaatataatgaagtttattgataaaaattaaaataaaataatgtggttttgtagtgctcttgtatgttaactaaaacaaattaataaaacctattgaaacccataatcatttagactatctacttacactttgggaggccaaggtgggcagatcacctgaggtcaggagttcaagacgagcctggccaacataat

SEQ ID NO: 157963 - DNA, 321 bp, Homo sapiens
gtttttggggattcgtatcttttattcaggatagctaaatgcaatttatattagaccatatacagtaagttgtaaattatagaagttgtgcttatcaaaatcatattcagtgggcaatatggcctttaatataatgaagtttaytgataaaaattaaaataaaataatgtggttttgtagtgctcttgtatgttaactaaaacaaattaataaaacctattgaaacccataatcatttagactatctacttacactttgggaggccaaggtgggcagatcacctgaggtcaggagttcaagacgagcctggccaacataat

SEQ ID NO: 157964 - DNA, 321 bp, Homo sapiens
gtttttggggattcgtatcttttattcaggatagctaaatgcaatttatattagaccatatacagtaagttgtaaattatagaagttgtgcttatcaaaatcatattcagtgggcaatatggcctttaatataatgaagtttattgataaaaattaaaataaaataatgtggttttgtagtgctcttgtatgtyaactaaaacaaattaataaaacctattgaaacccataatcatttagactatctacttacactttgggaggccaaggtgggcagatcacctgaggtcaggagttcaagacgagcctggccaacataat

SEQ ID NO: 157965 - DNA, 321 bp, Homo sapiens
gtttttggggattcgtatcttttattcaggatagctaaatgcaatttatattagaccatatacagtaagttgtaaattatagaagttgtgcttatcaaaatcatattcagtgggcaatatggcctttaatataatgaagtttattgataaaaattaaaataaaataatgtggttttgtagtgctcttgtatgttaactaaaacaaattaayaaaacctattgaaacccataatcatttagactatctacttacactttgggaggccaaggtgggcagatcacctgaggtcaggagttcaagacgagcctggccaacataat

SEQ ID NO: 157966 - DNA, 524 bp, Homo sapiens
acaatgaagtccaggctgaggaggtctcagatggagataaggaacttaatgggaactggagcaaaggtcactttagttaggcattagcaaaaaggttggctgcactgtgcgcctgccctagggatctgtggaattttgaacttgagartatctcaagttctggtgggtatctggtggaaaaaatttctaagcagcaaagcattcaggaggtaatctcactacttctaacaaactattttgatgtgtgtgagcaaagaaatgacctcaaactgaaacttatatttagaagggaagcagagtgtagaaacttgaaaaatttgcagcctggccatgtggtagaacaaaaagcccattttcaggaaagaaattcaagcaagctgcagaaacttgcttaactaaaaggaaggcaaatgctgatagccaagaaaatgagggataccctccagggcatttcagagacctttgtggcagctcctcccatcacaggctcagaggacaacgaaggaagaatgggacactactac

SEQ ID NO: 157967 - DNA, 287 bp, Homo sapiens
atagtcactgcactacaacctgggccacatagtgagaccctatttcttaacaaaaaaaagaaagaaataccttccatatttctgcaagtatgtgagttatctttgatgtagtgttaccttttcgcagtgaatgaagtgtaataacctcttgctcattttgtttacaaaaataaataaataaataaaagcagggacattctaagtggaatcaagttcyaagtaatccagacataatactatttatagaataattcaatttttatgatatatttcatgttttgctatcc

SEQ ID NO: 157968 - DNA, 287 bp, Homo sapiens
atagtcactgcactacaacctgggccacatagtgagaccctatttcttaacaaaaaaaagaaagaaataccttccatatttctgcaagtatgtgagttatctttgatgtagtgttaccttttcgcagtgaatgaagtgtaataacctcttgctcattttgtttacaaaaataaataaataaataaaagcagggacattctaagtggaatcaagttctaagtaatmcagacataatactatttatagaataattcaatttttatgatatatttcatgttttgctatcc

SEQ ID NO: 157969 - DNA, 287 bp, Homo sapiens
atagtcactgcactacaacctgggccacatagtgagaccctatttcttaacaaaaaaaagaaagaaataccttccatatttctgcaagtatgtgagttatctttgatgtagtgttaccttttcgcagtgaatgaagtgtaataacctcttgctcattttgtttacaaaaataaataaataaataaaagcagggacattctaagtggaatcaagttctaagtaatccagacwtaatactatttatagaataattcaatttttatgatatatttcatgttttgctatcc

SEQ ID NO: 157970 - DNA, 572 bp, Homo sapiens
gccttaaaagtcaaacaatgcaaagatgtgatatttagaatactagttacataataatggataatgacttagcttttaaaacaactgctttaaacatgacacatttaaagctaatttgtaactttcatatgtttctgaaacttttacagtcactaaataatttgagtaaagcaaatgggtttcagaccgattacaatttggaaagattgattataaattttkaataatatgtaacaaagaaaaatgtggtcacttgattatatacctcttccccaagatcaagtaaatactttatcagtagaaaaaagaaagaaaagcaaaaagaaaagaaaaagaaagcaacactgctatatagaacatttttttttctaaatggaatccagcagcaaaaaaaagataattgaagatactattaaaagatacaatttaatattaatattgaccacatttataaattcacatacttttataaaacatatgcacttctgagtataaagcacacataatacaaaaaagattattacattttaaattgttaaaatttccttgtttttccacacctgatgattact

SEQ ID NO: 157971 - DNA, 572 bp, Homo sapiens
gccttaaaagtcaaacaatgcaaagatgtgatatttagaatactagttacataataatggataatgacttagcttttaaaacaactgctttaaacatgacacatttaaagctaatttgtaactttcatatgtttctgaaacttttacagtcactaaataatttgagtaaagcaaatgggtttcagaccgattacaatttggaaagattgattataaattttgaataatatgtaacaaagaaaaatgtggtcacttgattatatacctcttccccaagatcaagtaaatactttatcagtagaaaaaagaaagaaaagcaaaaagaaaagaaaaagaaagcaacactgctatatagaacatttttttttctaaatggaatccagcagcaaaaaaaagataattgaagatactattaaaagatacaatttaatattaatattgaccacatttataaattcacatamttttataaaacatatgcacttctgagtataaagcacacataatacaaaaaagattattacattttaaattgttaaaatttccttgtttttccacacctgatgattact

SEQ ID NO: 157972 - DNA, 640 bp, Homo sapiens
caggcttcccattttgatactaattttaacctgattttatatatcaatattaaggagacaaaaaataaatgtgattttctccagctctatatccctccaaggagagctttggaactgaaatcctaatcgggggttacatttttaatatttttgtctcaaatgaatttggagtcctccatagtatttccaaagttgcagagcagaaaagaggttaccaataaaattgggtagttctcatcccaattacagaattaggccaagttatgagatatgcagcaaatatccactcagaaagattgaatatttaaatattttaatttatgaagtattarcctattgctcagttatagtattttggaaatttttctttaaaaaatgtatcaaacttgtggttagatgacattactgactcattttgcatctgatcaaaacaaataatgcataaaacaaagcaatgtaagttataaagcattttaaaattgaaataagagatctttatttctgttgcatatcaaatgggatttattgacttccttttctcaaaaatgtcatatagaaaacatttctaccctataaaaattactaataacattagcatcaatgacttacaagtagacacaagtaagatgaaacacagatt

SEQ ID NO: 157973 - DNA, 640 bp, Homo sapiens
caggcttcccattttgatactaattttaacctgattttatatatcaatattaaggagacaaaaaataaatgtgattttctccagctctatatccctccaaggagagctttggaactgaaatcctaatcgggggttacatttttaatatttttgtctcaaatgaatttggagtcctccatagtatttccaaagttgcagagcagaaaagaggttaccaataaaattgggtagttctcatcccaattacagaattaggccaagttatgagatatgcagcaaatatccactcagaaagattgaatatttaaatattttaatttatgaagtattaacctattgctcagttatagtattttggawatttttctttaaaaaatgtatcaaacttgtggttagatgacattactgactcattttgcatctgatcaaaacaaataatgcataaaacaaagcaatgtaagttataaagcattttaaaattgaaataagagatctttatttctgttgcatatcaaatgggatttattgacttccttttctcaaaaatgtcatatagaaaacatttctaccctataaaaattactaataacattagcatcaatgacttacaagtagacacaagtaagatgaaacacagatt

SEQ ID NO: 157974 - DNA, 553 bp, Homo sapiens
ttttttgttttttgagacagagtctcactcactctatcactcaggccagagtgcagcagcctgatcttggctcactgcaacctctgcttcctgggttcaagcgattctgctgcctcagtctcccaagtacctgagaatacaggtgcccacaaccatgcctggataatttttgtagttttagtagagatggggttttgccatgttggccaggctggtctcaactcctgacctaggtgatccgctcgtctgggtctccgaaagttctgggattacwggcatgagccactgttccctgccaaattaaaagtttttgtatgaaaaagatatacacaaagcaaagatacttttacagtatgaaagtgaattataattgagaaaaatatctgcaggccataatagaatagttctatttcaatagtttgcaaacaatttgttagttctgctgaataaaaaaatttccaacacttgttaaaatggttaaggatcactttatttaagattaaaatgataggtgtcaagatgattctaataggaagagagataaggttcaact

SEQ ID NO: 157975 - DNA, 553 bp, Homo sapiens
ttttttgttttttgagacagagtctcactcactctatcactcaggccagagtgcagcagcctgatcttggctcactgcaacctctgcttcctgggttcaagcgattctgctgcctcagtctcccaagtacctgagaatacaggtgcccacaaccatgcctggataatttttgtagttttagtagagatggggttttgccatgttggccaggctggtctcaactcctgacctaggtgatccgctcgtctgggtctccgaaagttctgggattacaggcatgagccactgttccctgccaaattaaaagtttttgtatgaaaaagatatacacaaagcaaagatacttttacagtatgaaagtgaattataattgagaaaaatatctgcaggccataatagaatagttctatttcaatagtttgcaaacaatttgttagttctgctraataaaaaaatttccaacacttgttaaaatggttaaggatcactttatttaagattaaaatgataggtgtcaagatgattctaataggaagagagataaggttcaact

SEQ ID NO: 157976 - DNA, 567 bp, Homo sapiens
ttcaaacaattactaaactgatttacttggacaaacatagaaaatattatctaagctatgtgtacctattttttatattcctagaaattagggggaacttttatttcctttgattgaatatgagtttctaacttaacaaaatatataatagtgagtcagtaaaatgaatacttttaccaaggatggaaagtgttctgaattatctaaaagacattttcattgcagttaacatttgcctgtgtagaacagattaatattaaaatctattttttcttttaacaaaatttagcaaatgaggaattttctattggttcatttcttctgacatttcttctatgttgacccttctcccacttcatgttgcaagatgtgagatcttacttcatttatcacattcatattcaaggcaaactaaatagaatcaggatgataggcttgtacatttatgcttttttacagaaacctttagagaagsgttcagctatattgtatctcacctataaaaggtggttcacatttccaaatggataaaggctagaaaaatcaagaaaaagagctgtcatgagt

SEQ ID NO: 157977 - DNA, 545 bp, Homo sapiens
catagagcaaatgaataataaatatttgttgaataatcttgcataagttaatccttaatttgtcaactgttgattcattttgctctgaaatcaatgacaataaaaaagaattgtacttctattttgtacttttttactcagagtaaatatttattgagatttaatttgtgccctgtaaactgctaaactcctaaatccattasgtctatttctcccatgaggtaaatatttgctcttcattgaggatatagccagcaaggcagaaactagtctaggacttacaaacaatctgattttattatgtggagcaggtaacatcagggtgaaaataactaagaaacaaagcaaggaatagtgatgaaagtattagcactagcagagaactaatcctttcctcatgatagtaaggtcaatgggagaaactaaagttccagagatccagtaatgagccatttcacagtagaattactgctggtgagaaatgggaccagggagaaatatgatctctgatgtaggtgtcattagaagcagagaaaacaaacaaa

SEQ ID NO: 157978 - DNA, 471 bp, Homo sapiens
tataacatctggctgctccgtgatggccattaaatccctgctaggaattaggaatccattcctgtttcagggtcctcttcatcaccttcaaattgtttatgtacagtgtacttttgaaggctatacactttatatttttaacatttaaaagacaaatattgatgctatttattcacagctaagtatatacrcatttaaatattaatccaatatatatgtatttggtgcacattacacgctgagtacttttctaggccctgaggctagagctgggcacaacggagacaagtccttgctttgtgaagcagaaaacagatgacttccagtaaagtgctaagttgtgcttgggaaaaataaaattagaaaagcagccagaaggtgtactggagatgacaagaaactgagaagagaggttgctgttatatagaaagggcggagaaggcttctagcaaaaagcagcattttaccagc

SEQ ID NO: 157979 - DNA, 455 bp, Homo sapiens
ctccgtgatggccattaaatccctgctaggaattaggaatccattcctgtttcagggtcctcttcatcaccttcaaattgtttatgtacagtgtacttttgaaggctatacactttatatttttaacatttaaaagacaaatattgatgctatttattcacagctaagtatatacgmatttaaatattaatccaatatatatgtatttggtgcacattacacgctgagtacttttctaggccctgaggctagagctgggcacaacggagacaagtccttgctttgtgaagcagaaaacagatgacttccagtaaagtgctaagttgtgcttgggaaaaataaaattagaaaagcagccagaaggtgtactggagatgacaagaaactgagaagagaggttgctgttatatagaaagggcggagaaggcttctagcaaaaagcagcattttaccag

SEQ ID NO: 157980 - DNA, 455 bp, Homo sapiens
ctccgtgatggccattaaatccctgctaggaattaggaatccattcctgtttcagggtcctcttcatcaccttcaaattgtttatgtacagtgtacttttgaaggctatacactttatatttttaacatttaaaagacaaatattgatgctatttattcacagctaagtatatacgcatttaaatattaatccaatatayatgtatttggtgcacattacacgctgagtacttttctaggccctgaggctagagctgggcacaacggagacaagtccttgctttgtgaagcagaaaacagatgacttccagtaaagtgctaagttgtgcttgggaaaaataaaattagaaaagcagccagaaggtgtactggagatgacaagaaactgagaagagaggttgctgttatatagaaagggcggagaaggcttctagcaaaaagcagcattttaccag

SEQ ID NO: 157981 - DNA, 455 bp, Homo sapiens
ctccgtgatggccattaaatccctgctaggaattaggaatccattcctgtttcagggtcctcttcatcaccttcaaattgtttatgtacagtgtacttttgaaggctatacactttatatttttaacatttaaaagacaaatattgatgctatttattcacagctaagtatatacgcatttaaatattaatccaatatatatgtatttggtgcacattacacgctgagtacttttctaggccctgaggctagagcygggcacaacggagacaagtccttgctttgtgaagcagaaaacagatgacttccagtaaagtgctaagttgtgcttgggaaaaataaaattagaaaagcagccagaaggtgtactggagatgacaagaaactgagaagagaggttgctgttatatagaaagggcggagaaggcttctagcaaaaagcagcattttaccag

SEQ ID NO: 157982 - DNA, 558 bp, Homo sapiens
agtaaattattatgcttggatgtgtatatgactttattaaaaaaactactccttaaactctaagaatttttaaatctaatataatggaatagagacatttagttgtttttcaaatggagaagagatttattgaaagacaaacatacccaagttttaacttttgctatttggctcattattttctcattttggttctcttcatttgcatttgaatgtgtttttcttcctcagaacatttctattttatattttacttktagtagcatgtagtgttcatataattgccccatatttttaatgttgaaacattctcttaataatctgttgaaccatccttcctcttctctcctgccacagcctacctgaaggggcctgctaacacatttggatggaatccttttgttctgtcacccacactctggtcccagcagtgccggtgggaagatacacgggaccatgactgcccacaggttgcccactcaagccactctctgtaattggcctaatgaaggtgttatgcaacactgtgacaaatgttaactttaggtaccctgccac

SEQ ID NO: 157983 - DNA, 595 bp, Homo sapiens
tttatgtcattatttttaaaacataatttgaataaatgtataatattccatgtatgctgttaccataacatatttaaaaattttagcaatattcaatatctcattttattatyatatttaaaaattaaagcctaatgatcacaatttttacataagctttcatttgattttactttcaaagattatggtcaagttctctcactatgtagactctttttcaatcatatatttctagtttcataaatgacacagcatgtttcttacttcaaaaatagcataaacttgaaattaaattagattcctatttaggtacatttgaataatttaaagtaaatgtcttaaattgcagagctagaaaaatgtttattttttatattttggtttgcttttggttcttttagttctttagtgagcttttttttttaaaaataaaacacttcacaaatattctctctcaaatatatgtacaaactaaatgtggtttgctttcagctacagttgacccttgaacacatgtgtacactacacaggtccacttatatgcacatttttttttcaaccaaactcaataaaaaatgtggtgttttctgtaggg

SEQ ID NO: 157984 - DNA, 595 bp, Homo sapiens
tttatgtcattatttttaaaacataatttgaataaatgtataatattccatgtatgctgttaccataacatatttaaaaattttagcaatattcaatatctcattttattatcatatttaaaaattaaagcctaatgatcacamtttttacataagctttcatttgattttactttcaaagattatggtcaagttctctcactatgtagactctttttcaatcatatatttctagtttcataaatgacacagcatgtttcttacttcaaaaatagcataaacttgaaattaaattagattcctatttaggtacatttgaataatttaaagtaaatgtcttaaattgcagagctagaaaaatgtttattttttatattttggtttgcttttggttcttttagttctttagtgagcttttttttttaaaaataaaacacttcacaaatattctctctcaaatatatgtacaaactaaatgtggtttgctttcagctacagttgacccttgaacacatgtgtacactacacaggtccacttatatgcacatttttttttcaaccaaactcaataaaaaatgtggtgttttctgtaggg

SEQ ID NO: 157985 - DNA, 595 bp, Homo sapiens
tttatgtcattatttttaaaacataatttgaataaatgtataatattccatgtatgctgttaccataacatatttaaaaattttagcaatattcaatatctcattttattatcatatttaaaaattaaagcctaatgatcacaatttttacataagctttcrtttgattttactttcaaagattatggtcaagttctctcactatgtagactctttttcaatcatatatttctagtttcataaatgacacagcatgtttcttacttcaaaaatagcataaacttgaaattaaattagattcctatttaggtacatttgaataatttaaagtaaatgtcttaaattgcagagctagaaaaatgtttattttttatattttggtttgcttttggttcttttagttctttagtgagcttttttttttaaaaataaaacacttcacaaatattctctctcaaatatatgtacaaactaaatgtggtttgctttcagctacagttgacccttgaacacatgtgtacactacacaggtccacttatatgcacatttttttttcaaccaaactcaataaaaaatgtggtgttttctgtaggg

SEQ ID NO: 157986 - DNA, 595 bp, Homo sapiens
tttatgtcattatttttaaaacataatttgaataaatgtataatattccatgtatgctgttaccataacatatttaaaaattttagcaatattcaatatctcattttattatcatatttaaaaattaaagcctaatgatcacaatttttacataagctttcatttgattttactttcaaagattatggtcaagttctctcactatgtagactctttttcaatcatatatttctagtttcataaatgacacagcatgtttcttacttcaaaaatagcataaacttgaaattaaattagattcctatttaggtacatttgaataatttaaagtaaatgtcttamattgcagagctagaaaaatgtttattttttatattttggtttgcttttggttcttttagttctttagtgagcttttttttttaaaaataaaacacttcacaaatattctctctcaaatatatgtacaaactaaatgtggtttgctttcagctacagttgacccttgaacacatgtgtacactacacaggtccacttatatgcacatttttttttcaaccaaactcaataaaaaatgtggtgttttctgtaggg

SEQ ID NO: 157987 - DNA, 558 bp, Homo sapiens
agtaaattattatgcttggatgtgtatatgactttattaaaaaaactactccttaaactctaagaatttttaaatctaatataatggaatagagacatttagttgtttttcaaatggagaagagatttattgaaagacaaacatacccaagttttaacttttgctatttggctcattattttctcattttggttctcttcatttgcatttgaatgtgtttttcttcctcagaacatttctattttatattttacttttagtagcatgtagtgttcatataattgccccatatttttaatgttgaaacattctcttaataatctgttgaaccatccttcctcttctctcctgccacagcctacctgaaggggcctgctaacacatttggatrgaatccttttgttctgtcacccacactctggtcccagcagtgccggtgggaagatacacgggaccatgactgcccacaggttgcccactcaagccactctctgtaattggcctaatgaaggtgttatgcaacactgtgacaaatgttaactttaggtaccctgccac

SEQ ID NO: 157988 - DNA, 558 bp, Homo sapiens
agtaaattattatgcttggatgtgtatatgactttattaaaaaaactactccttaaactctaagaatttttaaatctaatataatggaatagagacatttagttgtttttcaaatggagaagagatttattgaaagacaaacatacccaagttttaacttttgctatttggctcattattttctcattttggttctcttcatttgcatttgaatgtgtttttcttcctcagaacatttctattttatattttacttttagtagcatgtagtgttcatataattgccccatatttttaatgttgaaacattctcttaataatctgttgaaccatccttcctcttctctcctgccacagcctacctgaaggggcctgctaacacatttggatggaatccttttgttctgtcacccacactctggtcccagcagtgccggtgggaagatacaygggaccatgactgcccacaggttgcccactcaagccactctctgtaattggcctaatgaaggtgttatgcaacactgtgacaaatgttaactttaggtaccctgccac

SEQ ID NO: 157989 - DNA, 499 bp, Homo sapiens
atgatttagggtatctcatggaagaaatttctaagcagcaaagcattcaagatgtgacctgggtrctgttaaagtcactcagttttataaaggaagtagagcataaaagttcaaaaagtttgtggcttgacaatctgatagaaaagaaaatcccattttctgaggagaaatttaagtcagctgcagaaatttgtataagaaatgaggagatgaatgttaatccccaagacaatagggaaaatgtctctaaggcatgccagaggtcttcatggcagccccttccatcacaggcctggtgacctaggagaaaaaaaagtggttttgtgggccaggcccaaggtcatcatgctgtgagcagcctagggacttggcaccctgtgtcccagctgctccagccatggctgaaaggggccaatgtagactttaggctgtggcttcagagggtacaagccccaagccttggcagcttccacttgatgttgagcctgtgagtgcacag

SEQ ID NO: 157990 - DNA, 499 bp, Homo sapiens
atgatttagggtatctcatggaagaaatttctaagcagcaaagcattcaagatgtgacctgggtactgttaaagtcactcagttttataaaggaagtagagcataaaagttcaaaaagtttgtggcttgacaatctgatagaaaagaaaatcccattttctgaggagaaatttaagtcagctgcagaaatttgtataagaaatgaggagatgaatgttaatccccaagacaatagggaaaatgtctctaaggcatgccagaggtcttcatggcagccccttccatcacaggcctggtgacctaggagaaaaaaaagtggttttgtgggccaggcccaaggtcrtcatgctgtgagcagcctagggacttggcaccctgtgtcccagctgctccagccatggctgaaaggggccaatgtagactttaggctgtggcttcagagggtacaagccccaagccttggcagcttccacttgatgttgagcctgtgagtgcacag

SEQ ID NO: 157991 - DNA, 499 bp, Homo sapiens
atgatttagggtatctcatggaagaaatttctaagcagcaaagcattcaagatgtgacctgggtactgttaaagtcactcagttttataaaggaagtagagcataaaagttcaaaaagtttgtggcttgacaatctgatagaaaagaaaatcccattttctgaggagaaatttaagtcagctgcagaaatttgtataagaaatgaggagatgaatgttaatccccaagacaatagggaaaatgtctctaaggcatgccagaggtcttcatggcagccccttccatcacaggcctggtgacctaggagaaaaaaaagtggttttgtgggccaggcccaaggtcatcatgctgtgagcagcctagggacttggcamcctgtgtcccagctgctccagccatggctgaaaggggccaatgtagactttaggctgtggcttcagagggtacaagccccaagccttggcagcttccacttgatgttgagcctgtgagtgcacag

SEQ ID NO: 157992 - DNA, 549 bp, Homo sapiens
atgtatataattgacttttattcactcgacaaaatttcctaaaaatacatccaaatgattscgttaattaatattttgttcctttgatgactgaatagtatttcatggtttcttgtataaattcaccacaaattaaacattcacctgggcttattgaccttttcaactgtaacaaattaagctgttgtagacattcatgaacaagtttttgtgggaacacaagtttcattactccaaattaaacacccacaactgcaattgctgggatctatggtctatgcacatctggtttttattttactttgaaaaatttttaattattttcttaaaattttgtgggtacattgagtgcccacagaagctagtaaggatactggggcattggagaggaggtagagaaggttaatcagcagaaaaaaaaatgtggaaagaatgaataacatgtctgtatttttaaaaaactgtcaactatttttcagagtggctctattattttacttttccactagcaacgtatgagtgatcctattttttacatcctgaataact

SEQ ID NO: 157993 - DNA, 549 bp, Homo sapiens
atgtatataattgacttttattcactcgacaaaatttcctaaaaatacatccaaatgattccgttaattaatattttgttcctttgatgactgaatagtatttcatggtttcttgtataaattcaccacaaattaaacattcacctgggcttattgaccttttcaactgtaacaaattaagctgttgtagacattcatgaacaagtttttgtggsaacacaagtttcattactccaaattaaacacccacaactgcaattgctgggatctatggtctatgcacatctggtttttattttactttgaaaaatttttaattattttcttaaaattttgtgggtacattgagtgcccacagaagctagtaaggatactggggcattggagaggaggtagagaaggttaatcagcagaaaaaaaaatgtggaaagaatgaataacatgtctgtatttttaaaaaactgtcaactatttttcagagtggctctattattttacttttccactagcaacgtatgagtgatcctattttttacatcctgaataact

SEQ ID NO: 157994 - DNA, 549 bp, Homo sapiens
atgtatataattgacttttattcactcgacaaaatttcctaaaaatacatccaaatgattccgttaattaatattttgttcctttgatgactgaatagtatttcatggtttcttgtataaattcaccacaaattaaacattcacctgggcttattgaccttttcaactgtaacaaattaagctgttgtagacattcatgaacaagtttttgtgggaacacaagtttcattactccaaattaaacacccacaactgcaattgctgggatctatggtctatgcacatctggtttttattttactttgaaaaatttttaattattttcttaaaattttgtgggtacattgagtgcccacmgaagctagtaaggatactggggcattggagaggaggtagagaaggttaatcagcagaaaaaaaaatgtggaaagaatgaataacatgtctgtatttttaaaaaactgtcaactatttttcagagtggctctattattttacttttccactagcaacgtatgagtgatcctattttttacatcctgaataact

SEQ ID NO: 157995 - DNA, 562 bp, Homo sapiens
ttgagtcttctcttttggatctaaagatctatttgatgagaaagactgaagaaaaataaggataagggtatttcctccatgttttcatggcacaaaatctttgtttgctaactgtgataagcagaataatgcccccccaccccccacaagacwgtctctgtcctattctccatgtcaggaaggatatgctatgttatataagaatatatgatgttacaatgcaagaaagtattaaggttgcacatgacattaagcttactaaacagcagaacttaaaataagagatcatacttgattatctagggggggccaatttaatcacaaggatcctttaaatgtggaagagtgtggtagaaaatatttaaagatactacattgttaattgtactggaggaaagaaccaagagacaaggaatggggaaagcagacaagagacaagaaatgaagacagcccctagaagctggaaaaggcaagaacatgtattctcctttagagtccccagaaggaaagcagcgctgctgacaccttgattttagcctaatgaaaaccatttaagacttc

SEQ ID NO: 157996 - DNA, 481 bp, Homo sapiens
caagaacatgtattctcctttagagtccccagaaggaaagcagcgctgctgacaccttgattttagcctaatgaaaaccrtttaagacttctgacctttataattttaaaatgatagatttatgtttctaaactaccaaataaaaatattttgtctttagtttttaaaagtttaatcaaaatgtttcttgaaatgtgtttattccgtgtagggtatcttaggcttcttgaatctatacatttgtgtcttctgcaaatttgaggtttttttgaagcactatttcttcaagtattctttcagcctcattttacttcttttctggtacacgtaataaaaatgttggatctttgttgttgcctcacacatacctacatctgtgttcattttatgtatcagtctattttatttatgttgttcaaattggttaaattctactattctgccctcacattcactgattttaccttctcgcatctcaatg

SEQ ID NO: 157997 - DNA, 535 bp, Homo sapiens
gggcaggtacactgtgtactatttactagcttgtctgagttcagttaaacagaacacactcatatgcaacaaattacataaggcagatgtatcatttacagacaaacagcaagagacaacaggtacctatgtgagccggtccattatgagccagtagcccaaggctcaacaaagttgyctgaagtggatggagtgcatgtgaagtgcctgaggtggatgcagtgattgtgcatgccccacttgtaccacagttgagggaccccacaagacagcttgccctaggttacacacctcaggaccaatgggaaactatggcctaaagttttgaagaacattctctgtcaagggagagagtaacaaggcctaggctgtttcaggccattcttccctgtctcaggatattgcattctcagcatatactacagttgctcttgacaactgcaagcaagaaagaggggataattgggtcagtccaaggacacctggaaagttgacctgcagtctcctgctccaaccaagatatttcccttagaaa

SEQ ID NO: 157998 - DNA, 535 bp, Homo sapiens
gggcaggtacactgtgtactatttactagcttgtctgagttcagttaaacagaacacactcatatgcaacaaattacataaggcagatgtatcatttacagacaaacagcaagagacaacaggtacctatgtgagccggtccattatgagccagtagcccaaggctcaacaaagttgtctgaagtggatggagtgcatgtgaagtgcctgaggtggatgcagtgattgtgcatgccccacttgtaccacagttgagggaccccacaagacagcttgccctaggttacacacctcaggaccaatgggaaactatggcctaaagttttgaagaacattctctgtcaagggagagagtaacaaggcctaggctgtttcaggccrttcttccctgtctcaggatattgcattctcagcatatactacagttgctcttgacaactgcaagcaagaaagaggggataattgggtcagtccaaggacacctggaaagttgacctgcagtctcctgctccaaccaagatatttcccttagaaa

SEQ ID NO: 157999 - DNA, 380 bp, Homo sapiens
acctgtaagttttccaggcatgactttgcccacccygtatttgagtcaccccagattgcccacagataaagatgtagccctctggcacacacagaccccctgtgctagtattatttatgaggatgaaggtattggcactcactagctaagtctcattgatggcagtagttgcctgagttttcctcatacagtttaccccatacaatcctaaagcctctacgcagagggctagcactctccgatacttgttatcttcatcatcatgaacacacatctttgtaattaaaggagcctggtgcatcaaagcacctgcccaccaaagattcgttagttgtggtcatgacatttttccacaaagttatttaagttaaaagatagca

SEQ ID NO: 158000 - DNA, 381 bp, Homo sapiens
agcatccctagcacactcaatggggcaggacctgtaagttttccaggcatgactttgcccaccccgyatttgagtcaccccagattgcccacagataaagatgtagccctctggcacacacagaccccctgtgctagtattatttatgaggatgaaggtattggcactcactagctaagtctcattgatggcagtagttgcctgagttttcctcatacagtttaccccatacaatcctaaagcctctacgcagagggctagcactctccgatacttgttatcttcatcatcatgaacacacatctttgtaattaaaggagcctggtgcatcaaagcacctgcccaccaaagattcgttagttgtggtcatgacatttttcc

SEQ ID NO: 158001 - DNA, 380 bp, Homo sapiens
acctgtaagttttccaggcatgactttgcccaccccgtatttsagtcaccccagattgcccacagataaagatgtagccctctggcacacacagaccccctgtgctagtattatttatgaggatgaaggtattggcactcactagctaagtctcattgatggcagtagttgcctgagttttcctcatacagtttaccccatacaatcctaaagcctctacgcagagggctagcactctccgatacttgttatcttcatcatcatgaacacacatctttgtaattaaaggagcctggtgcatcaaagcacctgcccaccaaagattcgttagttgtggtcatgacatttttccacaaagttatttaagttaaaagatagca

SEQ ID NO: 158002 - DNA, 380 bp, Homo sapiens
acctgtaagttttccaggcatgactttgcccaccccgtatttgagtcaccccagattgcccacagataaagatrtagccctctggcacacacagaccccctgtgctagtattatttatgaggatgaaggtattggcactcactagctaagtctcattgatggcagtagttgcctgagttttcctcatacagtttaccccatacaatcctaaagcctctacgcagagggctagcactctccgatacttgttatcttcatcatcatgaacacacatctttgtaattaaaggagcctggtgcatcaaagcacctgcccaccaaagattcgttagttgtggtcatgacatttttccacaaagttatttaagttaaaagatagca

SEQ ID NO: 158003 - DNA, 347 bp, Homo sapiens
catgactttgcccaccccgtatttgagtcaccccagattgcccacagataaagatgtagccctctggcacacacagaccccctgtrctagtattatttatgaggatgaaggtattggcactcactagctaagtctcattgatggcagtagttgcctgagttttcctcatacagtttaccccatacaatcctaaagcctctacgcagagggctagcactctccgatacttgttatcttcatcatcatgaacacacatctttgtaattaaaggagcctggtgcatcaaagcacctgcccaccaaagattcgttagttgtggtcatgacatttttccacaaagttattta

SEQ ID NO: 158004 - DNA, 410 bp, Homo sapiens
cctatgaatggtaccaaagatctcataaaagacataaacccaaagtcagttacacatccagtcaggtctttggtaagtctggtatacagcattaggctcctgagtcaatggagcacttcattttgggggtgaattctaggagcatccctagcacactcaatggggcaggacctgtaagttttccaggcatgactttgcccaccccgtatttgagtcaccccagattgcccacagataaagatgtagccctctggcacacacagaccccctgtgctagtattatttatgaggatgaaggtattggcactcactagctaagtctcattgatggcagtagttgcctgagttttcctcatacaktttaccccatacaatcctaaagcctctacgcagagggctagcactctccg

SEQ ID NO: 158005 - DNA, 380 bp, Homo sapiens
acctgtaagttttccaggcatgactttgcccaccccgtatttgagtcaccccagattgcccacagataaagatgtagccctctggcacacacagaccccctgtgctagtattatttatgaggatgaaggtattggcactcactagctaagtctcattgatggcagtagttgcctgagttttcctcatacagtttaccccatacaatcctaaagcctctaygcagagggctagcactctccgatacttgttatcttcatcatcatgaacacacatctttgtaattaaaggagcctggtgcatcaaagcacctgcccaccaaagattcgttagttgtggtcatgacatttttccacaaagttatttaagttaaaagatagca

SEQ ID NO: 158006 - DNA, 404 bp, Homo sapiens
gaattctaggagcatccctagcacactcaatggggcaggacctgtaagttttccaggcatgactttgcccaccccgtatttgagtcaccccagattgcccacagataaagatgtagccctctggcacacacagaccccctgtgctagtattatttatgaggatgaaggtattggcactcactagctaagtctcattgatggcagtagttgcctgagttttcctcatacagtttaccccatacaatcctaaagcctctacgcagagggctagcactctccgatacttgttmtcttcatcatcatgaacacacatctttgtaattaaaggagcctggtgcatcaaagcacctgcccaccaaagattcgttagttgtggtcatgacatttttccacaaagttattta

SEQ ID NO: 158007 - DNA, 470 bp, Homo sapiens
atggatatcctctaacagtccaatccttccattgccactgtcctgatcagatggctaggcttttggcaatggcccataagtcactgaaaatatagcaagatatgcgacagaggtagcctgcatggccatcaccactgcatttagtttggcccattgggtagaawgcccatgtccagtctcagtcaaaagatagccatccagtggctgaatggtggtccagtgcatgttgtctggcagagctatcagtaaaccatgcctgtcaggcttctgagcccaagctaaaccatcatatcccctgtgacctgcacgtatacatccaggtggcctgaagcaagtgaagaatcacaaaagaagtgaaaatggctggttcctgccttaactgatgacattactttgtgaaattccttctcctggctcagaagctcccccactgagcaccttgtgacccccgcccctgcccgccggagaac

SEQ ID NO: 158008 - DNA, 520 bp, Homo sapiens
ggcctcccacattattccggatatcacacctgacccccatggctgtatctctctgatccacctgacattcactccgtttccccatatttcattctttcctgttcctcaccctgatcacacttggtttatcaatgacagttccaccaggcctaattgccactcaccagcaaaggcaggctatgctatagtrtcttccacatctatcattgaggctaccgctctgccccactcctctacatctcagcaagccaaattcattgccttaactcgagcgtcactcttgcaaagggactacacatcaatatttaaactgactctaaatatgccttccatatcctatgccaccataccattatatgggcagaaagaggtttcctcactgcgcaagggtcctccatcattaatgcctctttaataaaagctcttctcaaggccactttacttccaaaggaagctggagtcattcactgcaaaggccatcaaaaggcatcagatcccattgctcagggcaatgcttatg

SEQ ID NO: 158009 - DNA, 520 bp, Homo sapiens
ggcctcccacattattccggatatcacacctgacccccatggctgtatctctctgatccacctgacattcactccgtttccccatatttcattctttcctgttcctcaccctgatcacacttggtttatcaatgacagttccaccaggcctaattgccactcaccagcaaaggcaggctatgctatagtgtcttccacatctatcattgaggctaccgctctgccccactccyctacatctcagcaagccaaattcattgccttaactcgagcgtcactcttgcaaagggactacacatcaatatttaaactgactctaaatatgccttccatatcctatgccaccataccattatatgggcagaaagaggtttcctcactgcgcaagggtcctccatcattaatgcctctttaataaaagctcttctcaaggccactttacttccaaaggaagctggagtcattcactgcaaaggccatcaaaaggcatcagatcccattgctcagggcaatgcttatg

SEQ ID NO: 158010 - DNA, 169 bp, Homo sapiens
cctcttttgtccccaagcttgtgaggaaacaaaaaccttgagctcaccmcagggctgtgatgtgcagcactgcagtgacaagccaagctatgcagccagcatttcagtaggagggaagcctacacacacagaatactgacacggagcatggctgcaaatgtgagaaaat

SEQ ID NO: 158011 - DNA, 498 bp, Homo sapiens
atttcataaaatgattggaaatattcacagcagaatggactaagccaagaaaagaatctcagagattgaagactgattatttaagttaacacagccagaaaataaataaagaaaagaagaattttaaaaaatgaaaggtcaggcatggtggctcatgcctgtacctgtaatcccagcactttgggaggatactgagaccatcctggctaacatggtgaaaccctgtctctactaaaaatacaaaaaaaaaaaattcactgggcatggtggcaggtgcctgtagccccagctattcaggagtctgaggcaggagattggtaggaacctgggaggtggagcttgcattgagccgagatcatgccactgcactccagcctgggctacagagcaagactccatctcaaaaaaaaaaraaaaagaaaaaaaaaagaaaaagaaaaaaaccttggagaaataagggattctataaaaaatttccccaatttcactagagagatt

SEQ ID NO: 158012 - DNA, 321 bp, Homo sapiens
ttgaggttttacatttatgtctttaatccatcctgggttgatttttgtgtatggtgaaaggtaggggtccagttcaaatcttctgtgtatggtcagcaggttatcctggcaccatttgttgaataagatgtcctttccmcattgtttgtctttgtcagctttgttaaaaatcagatgattgtttatgtatgtctttatttctgtgctctcaaaactgttccattacactatgtgtctgttttagttactgtagccttgtagtatagtttgaagccagggagtgtgatgcccccagctttgttctttttgcttagaattact

SEQ ID NO: 158013 - DNA, 329 bp, Homo sapiens
agtttgaggttttacatttatgtctttaatccatcctgggttgatttttgtgtatggtgaaaggtaggggtccagttcaaatcttctgtgtatggtcagcaggttatcctggcaccatttgttgaataagatgtcctttccacattgtttgtctttgtcagctttgttaaaaatcagatgattgtttatgtatgkctttatttctgtgctctcaaaactgttccattacactatgtgtctgttttagttactgtagccttgtagtatagtttgaagccagggagtgtgatgcccccagctttgttctttttgcttagaattactttggc

SEQ ID NO: 158014 - DNA, 526 bp, Homo sapiens
ctttatatttgtttaactgagttgattcaatgaatccatctcacagctctaagtttttttcctcagtttagtcccttctgctgttaatacttccagttaaacaatgaaatgctcatagtgagtttctcagctcttagacgagtttgggtcattgtctttctttccttttgtgtgtgtgtgtgtgtgtgtgtgtgtgtgtgtgtgtgtgtgtgtgtgtgtgwgagatggagttttgctctgtcaccaaggcaccaaggctggaatgcagtggtgtgatctcggctcactgctacctctcaattcaagccagtctcctgcctcagtcacccgagtagctggaactacaggtgtgtgccaccatgcctggctaagttttgtatttttagtggagatggggtttcaccatgttggccagcctggtctcgaactcctgaactcaggtaacctggctgcctcggcctcccaaattgctgggattacaggtgtgaaccactgtgcctggcaagagtttgggtcttttaaaaaa

SEQ ID NO: 158015 - DNA, 526 bp, Homo sapiens
ctttatatttgtttaactgagttgattcaatgaatccatctcacagctctaagtttttttcctcagtttagtcccttctgctgttaatacttccagttaaacaatgaaatgctcatagtgagtttctcagctcttagacgagtttgggtcattgtctttctttccttttgtgtgtgtgtgtgtgtgtgtgtgtgtgtgtgtgtgtgtgtgtgtgtgtgtgagagatggagtyttgctctgtcaccaaggcaccaaggctggaatgcagtggtgtgatctcggctcactgctacctctcaattcaagccagtctcctgcctcagtcacccgagtagctggaactacaggtgtgtgccaccatgcctggctaagttttgtatttttagtggagatggggtttcaccatgttggccagcctggtctcgaactcctgaactcaggtaacctggctgcctcggcctcccaaattgctgggattacaggtgtgaaccactgtgcctggcaagagtttgggtcttttaaaaaa

SEQ ID NO: 158016 - DNA, 526 bp, Homo sapiens
ctttatatttgtttaactgagttgattcaatgaatccatctcacagctctaagtttttttcctcagtttagtcccttctgctgttaatacttccagttaaacaatgaaatgctcatagtgagtttctcagctcttagacgagtttgggtcattgtctttctttccttttgtgtgtgtgtgtgtgtgtgtgtgtgtgtgtgtgtgtgtgtgtgtgtgtgtgagagatggagttttgctctgtcaccaaggcaccaaggctggaatgcagtggtgtgatctcggctcactgctacctctcaattcaagccagtctcctgcctcagtcacccgagtagctggaactacaggtgtgtgccaccatgcctrgctaagttttgtatttttagtggagatggggtttcaccatgttggccagcctggtctcgaactcctgaactcaggtaacctggctgcctcggcctcccaaattgctgggattacaggtgtgaaccactgtgcctggcaagagtttgggtcttttaaaaaa

SEQ ID NO: 158017 - DNA, 592 bp, Homo sapiens
gtggtaagccttaggaaatgggtgtccctggctgtgcttcaccggaaccattcttatgtcaaactatctgggctctacacgtactggaatcctgtctttgctacttctccaagcaactctccttgctagctcgaatgtccatggggattgtgaagtctcgtaaagctaggattctggagctctttggaaagagtaagccactccatcgtatttaactcacccctyccctcacctctcagggtcaggaatgagtccttgtgctccacaatcccatgctgggttcccagctttctgatcctttagcccagtgtctccatcctctctccttccactctcaatgctttccttttgaagatctgctcagagtgtgctggttttcttgagagtcagctctttcagtggaggatcttcctggctctgtcttgctggccattttggctcttctgtcttttagggtttccttggtgagtatcaggtgttcataaattaaggatttatatgttgggtttaaaaatcaagattgtaaatcaagatatctttagtgtgatgaaaggaagtaaattataaaatgtatttaggttactatgttgct

SEQ ID NO: 158018 - DNA, 487 bp, Homo sapiens
aagatctgctcagagtgtgctggttttcttgagagtcagctctttcagtggaggatcttccyggctctgtcttgctggccattttggctcttctgtcttttagggtttccttggtgagtatcaggtgttcataaattaaggatttatatgttgggtttaaaaatcaagattgtaaatcaagatatctttagtgtgatgaaaggaagtaaattataaaatgtatttaggttactatgttgctcttaataagtagtccagctgccacattttaaagtgtcttttttttttcccctatggttgttttaaggatttctttttctctgtctctctctgtctttccggctcttgttttctctctttctctcacatcagatttattgttaagtgttaattcagtggttattttttccttgaaatttactgtgtttcttgaatggacacatgtatctttcatcattttggaaagtttaaaccattaagtattcac

SEQ ID NO: 158019 - DNA, 402 bp, Homo sapiens
atgacttcctatatagaatcattttctttatctttactagttatctctgtagattactttaagaacgatataaattaaattagtagcttcctgctgtgacagccagcctgtggactatacttcaaaatcacaacttttcccatttctactatttaacctggtttattcattttcaggacagcaatccacacatttttctggaagtggagggasaagggtcagtaatcgtttgctttaaacatactctgatatttcaggcctttaaaacaatagcacaggttttaggaagtggatttccaagaaaacttcccatttttgcctgacatttctactactgccttctcacttattcaccattgagtttcttctggatcaaacaaccttctcgaaaaatatcagata

SEQ ID NO: 158020 - DNA, 363 bp, Homo sapiens
agatactatacaacattttatttacatattttaattgaagtctactgaaaatacaccagaaaacctaacagatacacttaacataagggaaacattatcctacactgcttcactttttcaaagatgttattcctcctagttaatgacttactctaaaaagagtrttagaagtagctgaaaagaaaggctatgtttaaatatgtgaagagggcaagtttgaacatttaatatttattgcccacctcttagctttgttatgctctcaagtgactcttaagagaatttcacacttcgacaatattcagagaataagagacatgacattgttaaataccatcaacatgcctgctgctccgttttgaa

SEQ ID NO: 158021 - DNA, 492 bp, Homo sapiens
caacaaatagaaaaaaatctggtatattcacacaagaaaataccacctacctattgaaagagaccaactatttatatatgcaacagcatttatgratatcaaaaacattattttaactaatctgtacacaaaagtacatgttgtatggttccattcatatggatttctggaagacaaaaactattctattgtaaatagaatagttgttgtcttgggaatggagatgcagttaaatgagaaagaacatgagtggactttgtggtatgatggttactacaacataatagtaaacattactatattttaattatatatgtatatgcatttgtcaaaacttataaatattacttaaatttgttcaccctattttatgtaaattttatataaaaataaacaaaacagaaaaaaatcctagtctttttaggagtatgatcaaagttaatcacagattgtttatatgtgaatgaacacacaaaaaatatgtatgcactt

SEQ ID NO: 158022 - DNA, 492 bp, Homo sapiens
caacaaatagaaaaaaatctggtatattcacacaagaaaataccacctacctattgaaagagaccaactatttatatatgcaacagcatttatggatatcaaaaacattattttaactaatctgtacacaaaagtacatgttgtatggttccattcatatggatttctggaagacaaaaactattctattgtaaatagaatagttgttgtcttgggaatggagatgcagttaaatgagaaagaacatgagtggactttgtggtatgatggttactacaacataatagtaaacrttactatattttaattatatatgtatatgcatttgtcaaaacttataaatattacttaaatttgttcaccctattttatgtaaattttatataaaaataaacaaaacagaaaaaaatcctagtctttttaggagtatgatcaaagttaatcacagattgtttatatgtgaatgaacacacaaaaaatatgtatgcactt

SEQ ID NO: 158023 - DNA, 420 bp, Homo sapiens
aaggcccttgctcccccaacagctgccttgcctccaatactgtggtgaacacctgcagagaggcagacacccctatatccactaatactttgctgcaggtactgcagtttgctatccccagcacagtggactccaaatctcgaggagccacagtgtaagagatcgatcaggttgttgtgggaatcaggagactggagagattggtaggtgaaacagaaggatwtttattgagtgcactcagaaccagcagattaatatccaaagactggaccctgaacaaagacagcacttgccttttatgcacacttctaaaagggggtggtctaacttgaaacaagcttacagtggtgcaaagtataatgattcaaaagcaaggatacagaagaagaacaaaggcagtcaatcatactacgacaagtt

SEQ ID NO: 158024 - DNA, 524 bp, Homo sapiens
gctctctactcaggggtcaacaatgttaatttcccacaaattatgtttgctccaggcatttgtcttcaaatctgtactaaattaatacaaagttttctggcttagtgggactgtactctcattggcgatgctaagcagtgcagtcccctagctgcattctcaggcaaaataactgtgtctgaatacttttttcatktgtcgctcagccagagtgtgcaggatggacccaacacaagagaacaaagctggggcctaatacaagtcccccagagttagagcacacagtccagaagttgggagctgagtgttgtgccataaaatctcccagaaatgaagccagtcagctgaatctaccttataacacaaacaaatcttcgacatcatcaaataggatgaaagaaaacaaaataccgtccaaaggtaagcaatctcaaagactgaagttagataagtgcacaaagatgagaaagaatcagtgcaagaatactgaaaactcaaaaagccagagtaacttcctacctcca

SEQ ID NO: 158025 - DNA, 547 bp, Homo sapiens
atgggggtgcctgagacttgaatggcagacatgcacaggaggatggttggctagcggggaatgagtcctagactgcagctcccattagayattgtaatgcactggctgtttgccaattctggtatagggagagtatctttctctagtgaggcctgccaggtaaagccattgtcatggcctatggttaggcctgaaagattacacatagggtttctgcctggagttggactcctcaaatgccttttggattttctgtcaagtggtaaacattaagggaagattaaaacaactccaatttgacaagacaactaaggtcactgttcatgaagggtgggctcttgctgtggaaacttggataatttaggatactatagagaagtgtggaatgaataatataaaaagaatggtacaaataccatccacagttccatgatcagttataaaattaagtatgtaatacattcttgggttttcttctcttctgcattgtcatgtatataattgtttgtcttattatcttccatttttcccatcatttttagggtag

SEQ ID NO: 158026 - DNA, 547 bp, Homo sapiens
atgggggtgcctgagacttgaatggcagacatgcacaggaggatggttggctagcggggaatgagtcctagactgcagctcccattagacattgtaatgcactggctgtttgccaattctggtatagggagagtatctttctctagtgaggcctgccaggtaaagccattgtcatggcctatggttaggcctgaaagrttacacatagggtttctgcctggagttggactcctcaaatgccttttggattttctgtcaagtggtaaacattaagggaagattaaaacaactccaatttgacaagacaactaaggtcactgttcatgaagggtgggctcttgctgtggaaacttggataatttaggatactatagagaagtgtggaatgaataatataaaaagaatggtacaaataccatccacagttccatgatcagttataaaattaagtatgtaatacattcttgggttttcttctcttctgcattgtcatgtatataattgtttgtcttattatcttccatttttcccatcatttttagggtag

SEQ ID NO: 158027 - DNA, 550 bp, Homo sapiens
aagattacattttcttaaacaaatgttcactcctaaatgacaaattcaattataggaacaaatttaggtaggcataaaaagagaaaagtgaaaatacaattgaaaaattgaggctgggcatggtggctcacacctgtaatcccagcactttgggaggccgaggcgggtggatcacgaggtcaggagatcgagaccacggtgaaaccccgtctctactaaaaatacaaaaaattagctgggcacgatggcgggcgcctgtagtcccagctactcgggaggctgaggcaggagaatggcgtgaacccaggaggcggagcttgcaktgagccgagatcccaccactgcactccagcctgggcgacagagcgagactctgtctcaaaaaaacaaacaaaaaagaaaaattgaagcaactccacatgcattccagctttacagagtgaaagtgtacatgaaattttattgagacaataatttataatgtataattaactcaaggattaatattatttgacacaattttgagcatactaaaaggtaactggatttt

SEQ ID NO: 158028 - DNA, 579 bp, Homo sapiens
gtatttcagggcactcagggaattagcagcttctcagatagagcacgtaacgagctaccagtgtgtaaagtccccactattttaacaaggagacactaaaaccagaaagacatttccagtcrcccagatcccgaaaagtacataaaaatcacctcaggacatttagtggaacccatgaatagctttcagtaaaatgcacaattcatgtgtctataattttctaaaaatttggttctaaatacctcttaaatttcataaataatatacgttaattttttaaaatattagacaataagcatagagaaataaaaagttaacttgtaactttatacccagaggaaattactgttgatattttgttgcataatcagagacatttctattttgtacaatattgtgaaaaaaaaactgttcataatattttaaaataaattttctagtgaataatgtaactaacaagcacattattagcagcagcattgattaatggctgcagagcatcttttggtatgggtctactgaaatgtatttaaccaatcctcaaagttggttatttaatttatttttaatatttctgct

SEQ ID NO: 158029 - DNA, 579 bp, Homo sapiens
gtatttcagggcactcagggaattagcagcttctcagatagagcacgtaacgagctaccagtgtgtaaagtccccactattttaacaaggagacactaaaaccagaaagacatttccagtcacccagatcccgaaaagtacataaaaatcacctcaggacatttagtggaacccatgaatagctttcagtaaaatgcacaattcatgtgtctataattttctaaaaatttggttctaaatacctcttaaatttcataaataatataygttaattttttaaaatattagacaataagcatagagaaataaaaagttaacttgtaactttatacccagaggaaattactgttgatattttgttgcataatcagagacatttctattttgtacaatattgtgaaaaaaaaactgttcataatattttaaaataaattttctagtgaataatgtaactaacaagcacattattagcagcagcattgattaatggctgcagagcatcttttggtatgggtctactgaaatgtatttaaccaatcctcaaagttggttatttaatttatttttaatatttctgct

SEQ ID NO: 158030 - DNA, 579 bp, Homo sapiens
gtatttcagggcactcagggaattagcagcttctcagatagagcacgtaacgagctaccagtgtgtaaagtccccactattttaacaaggagacactaaaaccagaaagacatttccagtcacccagatcccgaaaagtacataaaaatcacctcaggacatttagtggaacccatgaatagctttcagtaaaatgcacaattcatgtgtctataattttctaaaaatttggttctaaatacctcttaaatttcataaataatatacgttaattttttaaaatattagacaataagcatagagaaataaaaagttaacttgtaactttatacccagaggaaattactgttgatattttgttgyataatcagagacatttctattttgtacaatattgtgaaaaaaaaactgttcataatattttaaaataaattttctagtgaataatgtaactaacaagcacattattagcagcagcattgattaatggctgcagagcatcttttggtatgggtctactgaaatgtatttaaccaatcctcaaagttggttatttaatttatttttaatatttctgct

SEQ ID NO: 158031 - DNA, 528 bp, Homo sapiens
ttattgtttgtgtgcatgtattttttaaattgggtaacagcaaaaatggtttgctttaccttaattgttttagggtagttccatttgggtgtggtttgtttttcctctttgtatccattttgcatggatttcagtatgaacttttctattggttctgccccctgaatgygctgttttcttattggacaattgtggagaaggattagtgcttttgttttgcttttgtctctgcaggatactcaggtttcacttttttattctgtccctcagggcctcccttcccaggggtgcccctcttttccttatgtctgactctcccgtaggtgaaacatggggcttaccgcttttggtcctgcacatttacaagcctcttccctgcctccagtcccgtgaagtatctgtaccctgcacctccttctgaggtgagattgtctgtgctttgtctgagtgcatcacttcactctattttttttttcatggaatcttgtggcattgggtgggcagtgggagctccagtggaattaaagg

SEQ ID NO: 158032 - DNA, 600 bp, Homo sapiens
ttattatcatttgattttctggttaatagtatgttaaagtattttaaagacaatcgactactcatcatttcaataagagaaaatctaaaaattacccatcttgtatgaaacaaagagaagaatcagagaaattaaatatacacttactattccttaaatgttatttttcttccttttatttctcttctatattcactgttggggcattatattgatttttgttttctttttgtaatttggaaagcagctatgttcactattatataaacaatgcttgagagttttcttatgttgctattaaagtttgtgttcaggtaaattacattatctaatgatttcatttcaaggtaaaacacaaacagttttatgtcttaaagagggccttggtctgataggaatgagaaccactctgccatgccctatgcgaacaattctaattgggtaaaatctaatactttgcaaactgtcccaagagagcttactgattttagggcagaagaaaaagtttctatgtagaactctatgtttgagaggaggagaggggctacagctaagtatagagaaaaaacaasgttccataatcaagaaagaaaaaggtgg

SEQ ID NO: 158033 - DNA, 550 bp, Homo sapiens
ttcatttcaaggtaaaacacaaacagttttatgtcttaaagagggccttggtctgataggaatgagaaccactctgccatgccctatgcgaacaattctaattgggtaaaatctaatactttgcaaactgtcccaagagagcttactgattttagggcagaagaaaaagtttctatgtagaactctatgtttgagaggaggagaggggctacagctaagtatagagaaaaaacaacgttccataatcaagaaagaaaaaggtggaatctgagtctgtctttttcgtctttacckctgtgtgtgtatgttctataccatcatgtctcatttttctttatgtcttaaagggcaatgtgtgcacacagcaggcatatatgtgttaattgattcatactccacacaatccccatttctcttgttcttatcccacccacaatggagttcaatagagctaacagtggaaaagataatgagtgggtctaaatttaatccccttttgtttaagctaatctccctctctaattaatggctgttcataccattattgctc

SEQ ID NO: 158034 - DNA, 509 bp, Homo sapiens
agccgttgaaacaaaactgacaggcaatatggtcaagttcctgatgacccaaatgatcactcattcaggcagtttggctcaccaagaacagacctgggggtggcctgggagcaggtatcagactgccacaggttaacatagagaagcgaggtgatgctggatgcagtgggtcacgcctgtaattccagcatgttgggaagccaaggcaggaggatcacttgaggccaggaattgcagaccagcctgggcaacacggtgtgatgtcgtcactccaaaaaataaataaaagattagctggatgtggtggtacgtgcctgtggtcccacctacttgggaggctgaggtgggaggatcatttcagcccagragtcccaggctgcagtgagccatcatcacgctactgcaccccagcctgggcggcaaaacaagaccccatacctacaaaaagagaaagaaaaaagagaaaagtgaggtcatgcagtgcaggggccttcctgcaatcctagatc

SEQ ID NO: 158035 - DNA, 649 bp, Homo sapiens
agtgccattttgtctgctccttacagtacaagtggttgacaaagagaagggaagatggagcccatcttgaacatgtctagtccctagttcctgccagtattcaccatgcaagctcccaggtggctagtctatgtctgcagctcaactttacaggctgctctttgatagaatatgatgtggggctgcttttcattgaaaacaaaggccttaccaaggactcccctaccctttctgtctgcctaagtgatttcttcttaactcctagatcactacgtagctaaaacaaatgatacctggaaacagttgaccagtcgttgtcatctttggatgtscctactagaaatgcacagcgctctgcccaccatatgatctttgtagttgttcccaccgggcctgaacctctctccccatcgccagcctgccctgctgtctgcatggctgactctcattcattccctctcaagcactgcttcccagagagtttctcagccgccctaccaaatgtgcagtccctatcacattaccctttttattttctccaccacacttcccaccatctacaattatcttgactgagcatttgctggcctgtccattgtctctctactcgtagtagaataaaaggtgattgaaggcaacaaacagccca

SEQ ID NO: 158036 - DNA, 649 bp, Homo sapiens
agtgccattttgtctgctccttacagtacaagtggttgacaaagagaagggaagatggagcccatcttgaacatgtctagtccctagttcctgccagtattcaccatgcaagctcccaggtggctagtctatgtctgcagctcaactttacaggctgctctttgatagaatatgatgtggggctgcttttcattgaaaacaaaggccttaccaaggactcccctaccctttctgtctgcctaagtgatttcttcttaactcctagatcactacgtagctaaaacaaatgatacctggaaacagttgaccagtcgttgtcatctttggatgtccctactagaaatgcacagcgctctgcccaccatatgatctttgtagttgttcccaccgggcctgaacctctctccccatcgccagcctgccctgctgtctgcatggctgactctcattcattccctctcaagcactgcttcccagagagtttcycagccgccctaccaaatgtgcagtccctatcacattaccctttttattttctccaccacacttcccaccatctacaattatcttgactgagcatttgctggcctgtccattgtctctctactcgtagtagaataaaaggtgattgaaggcaacaaacagccca

SEQ ID NO: 158037 - DNA, 401 bp, Homo sapiens
ctgtaaaattaaaatacagcaaatgtaaggcattaagactgaggatgtgatttttcaggtgcagcccgggctggctctgtggggactccagtctgtgttgtgttttcttgattgcaaggcccatagcgggtgaacttggggcatcacactattgaggttgtctcgtggatgtcactcagttgccacataaataatgaattcctggaggcagcagaatatgctcatactgyattatgcttgaacaagcctaggcagaggttggctttttcctcctaaatcacatgggaattaagcataattcctctggcttattttcccccacatgcaggggtaaagtttgcttaaaatactcagctagttaataaatacaaggctagttgttgttttcagaagttagatct

SEQ ID NO: 158038 - DNA, 354 bp, Homo sapiens
aaggcattaagactgaggatgtgatttttcaggtgcagcccgggctggctctgtggggactccagtctgtgttgtgttttcttgattgcaaggcccatagcgggtgaacttggggcatcacactattgaggttgtctcgtggatgtcactcagttgccacataaataatgaattcctggaggcagcagaatatgctcatactgtattatgcttgaacaagcctaggcagaggttggctttttcctcctaaatcacaygggaattaagcataattcctctggcttattttcccccacatgcaggggtaaagtttgcttaaaatactcagctagttaataaatacaaggctagttg

SEQ ID NO: 158039 - DNA, 342 bp, Homo sapiens
ggaattaaggaaggtgaagaggaagaaaaaaggactccatgaagaggagagggtctctaaaagctggaaacataagtgaggaggtgagaaccagtctgaagcacccacctgtkacctggtgggggcaggaaggtgttagaggagctagggagctgaccagacgggaggaacccttcccattcttcatggaggcagattatcgctggtctgcaactggcattcttagagttaggaatcactgtgtccatttttctagacttctctcattggtgatgatttgaccttttcctcttgcactaatgagcaaggtggaggaaagagatctctctctctcacacatat

SEQ ID NO: 158040 - DNA, 342 bp, Homo sapiens
ggaattaaggaaggtgaagaggaagaaaaaaggactccatgaagaggagagggtctctaaaagctggaaacataagtgaggaggtgagaaccagtctgaagcacccacctgtgamctggtgggggcaggaaggtgttagaggagctagggagctgaccagacgggaggaacccttcccattcttcatggaggcagattatcgctggtctgcaactggcattcttagagttaggaatcactgtgtccatttttctagacttctctcattggtgatgatttgaccttttcctcttgcactaatgagcaaggtggaggaaagagatctctctctctcacacatat

SEQ ID NO: 158041 - DNA, 342 bp, Homo sapiens
ggaattaaggaaggtgaagaggaagaaaaaaggactccatgaagaggagagggtctctaaaagctggaaacataagtgaggaggtgagaaccagtctgaagcacccacctgtgacctggtgggggcaggaaggtgttagaggagctagggagctgaccagacgggaggaacccttcccattcttcatggaggcagattatcgctggtctgcaactggcattcttagagttaggaatcactgtgtccatttttctagacttctctyattggtgatgatttgaccttttcctcttgcactaatgagcaaggtggaggaaagagatctctctctctcacacatat

SEQ ID NO: 158042 - DNA, 312 bp, Homo sapiens
gaaatcctcactcagatcttcctccttcctacctgtataacagtttgtggcttgccttgtctgttttgtgygtttcgttacgcgtatgtgagtatgtgcacgtgatttccagaaaggagaagcgcacgatactgcccgtgctctgtgactcctgagtgcacgcttcctctgcatttgggctcctaggtcggcctcgtcctgtggacgttgccccttgtttcgtgccatccacacattcctgatgccccgctgctctactctttctccagagtactttttccaaacatgtgatttgcacatttgttatgttta

SEQ ID NO: 158043 - DNA, 312 bp, Homo sapiens
gaaatcctcactcagatcttcctccttcctacctgtataacagtttgtggcttgccttgtctgttttgtgcgtttcgttacgcgtatgtgagtatgtgcacgtgatttccagaaaggagaagcgcacgatactgcccgtgctctgtgactcctgagtgcaygcttcctctgcatttgggctcctaggtcggcctcgtcctgtggacgttgccccttgtttcgtgccatccacacattcctgatgccccgctgctctactctttctccagagtactttttccaaacatgtgatttgcacatttgttatgttta

SEQ ID NO: 158044 - DNA, 312 bp, Homo sapiens
gaaatcctcactcagatcttcctccttcctacctgtataacagtttgtggcttgccttgtctgttttgtgcgtttcgttacgcgtatgtgagtatgtgcacgtgatttccagaaaggagaagcgcacgatactgcccgtgctctgtgactcctgagtgcacgcttcctctgcatttgggctcctaggtcggcctcgtcctgtggacgttgccccttgtttcgtgccatccacacattcctgatgccccsctgctctactctttctccagagtactttttccaaacatgtgatttgcacatttgttatgttta

SEQ ID NO: 158045 - DNA, 585 bp, Homo sapiens
taattagtcaatactaacaaatatgattaatattataaattattaatttctctaatttttattttcttccttctgcttgctttaggtttagtttgctattctttccagtgccttaatgtggaaggttatcttatctcatcctttcctttgtcttttcattttcgaaatagtgtctttttagcatcaggtgagctccccaggttggtagtactccatgtttattgctgtacaacaatgacaggtaatatgtcctgaagacaatggaaatttaacattcaaaatcctcctagattccaccttatgtgatatgtctcttcctttgattggtcctaatttctaccctttctctattataaaccatgagtacaatggcattcaawgacttttgtgagtctttttagtaaattcttgaaactgagggtgttcttgggaaacccctgaactggcaattggtgacaaaagtgcaaatcatcttatatggcctcttcctttgaactttgcagctggacccaaactctgcacaatttggggcagaagtctcgtgttgactttgcagcctaaattatcttgtagtttgtctaaccc

SEQ ID NO: 158046 - DNA, 585 bp, Homo sapiens
taattagtcaatactaacaaatatgattaatattataaattattaatttctctaatttttattttcttccttctgcttgctttaggtttagtttgctattctttccagtgccttaatgtggaaggttatcttatctcatcctttcctttgtcttttcattttcgaaatagtgtctttttagcatcaggtgagctccccaggttggtagtactccatgtttattgctgtacaacaatgacaggtaatatgtcctgaagacaatggaaatttaacattcaaaatcctcctagattccaccttatgtgatatgtctcttcctttgattggtcctaatttctaccctttctctattataaaccatgagtacaatggcattcaatgacttytgtgagtctttttagtaaattcttgaaactgagggtgttcttgggaaacccctgaactggcaattggtgacaaaagtgcaaatcatcttatatggcctcttcctttgaactttgcagctggacccaaactctgcacaatttggggcagaagtctcgtgttgactttgcagcctaaattatcttgtagtttgtctaaccc

SEQ ID NO: 158047 - DNA, 585 bp, Homo sapiens
taattagtcaatactaacaaatatgattaatattataaattattaatttctctaatttttattttcttccttctgcttgctttaggtttagtttgctattctttccagtgccttaatgtggaaggttatcttatctcatcctttcctttgtcttttcattttcgaaatagtgtctttttagcatcaggtgagctccccaggttggtagtactccatgtttattgctgtacaacaatgacaggtaatatgtcctgaagacaatggaaatttaacattcaaaatcctcctagattccaccttatgtgatatgtctcttcctttgattggtcctaatttctaccctttctctattataaaccatgagtacaatggcattcaatgacttttgtgagtctttttagtaaattcttgaaactgagggtgttcttgggaaacccctgaactggcaattggtgacaaaagtgcraatcatcttatatggcctcttcctttgaactttgcagctggacccaaactctgcacaatttggggcagaagtctcgtgttgactttgcagcctaaattatcttgtagtttgtctaaccc

SEQ ID NO: 158048 - DNA, 554 bp, Homo sapiens
ttctctgccctagggatagcaccactattgaaaacatatctttgtgacattctctatgccaggaactcccaacacattttccttgaaactgatgaaatgaataaaaataaaccaagaggtgtgctgtttgtttctgtttcctgctttctgcagcccttcttgatcatctaatattttcaaatacattgttgatcaccaaaaggagcataaggggtatattgatttgtagcagatgtattaatagcccagcccctattccttacctgtagctgctgggaagaaaaccactcttaacactctacaaggtctcatctccagaatttgcagctgtttctagctgaggactttctctagcagcatgggagcttgatactgggcaagtgggaagaaaaggtgaggrtaactaagaagaatctccctggattcagtgatgtaattctgaggcatgttccacatagcttcccatagaattaagccccgatatctaacacaggaacttgcctcttaacacgtgtggtactggcttttctatctttcctgttttattttgttct

SEQ ID NO: 158049 - DNA, 554 bp, Homo sapiens
ttctctgccctagggatagcaccactattgaaaacatatctttgtgacattctctatgccaggaactcccaacacattttccttgaaactgatgaaatgaataaaaataaaccaagaggtgtgctgtttgtttctgtttcctgctttctgcagcccttcttgatcatctaatattttcaaatacattgttgatcaccaaaaggagcataaggggtatattgatttgtagcagatgtattaatagcccagcccctattccttacctgtagctgctgggaagaaaaccactcttaacactctacaaggtctcatctccagaatttgcagctgtttctagctgaggactttctctagcagcatgggagcttgatactgggcaagtgggaagaaaaggtgaggataactaaraagaatctccctggattcagtgatgtaattctgaggcatgttccacatagcttcccatagaattaagccccgatatctaacacaggaacttgcctcttaacacgtgtggtactggcttttctatctttcctgttttattttgttct

SEQ ID NO: 158050 - DNA, 554 bp, Homo sapiens
ttctctgccctagggatagcaccactattgaaaacatatctttgtgacattctctatgccaggaactcccaacacattttccttgaaactgatgaaatgaataaaaataaaccaagaggtgtgctgtttgtttctgtttcctgctttctgcagcccttcttgatcatctaatattttcaaatacattgttgatcaccaaaaggagcataaggggtatattgatttgtagcagatgtattaatagcccagcccctattccttacctgtagctgctgggaagaaaaccactcttaacactctacaaggtctcatctccagaatttgcagctgtttctagctgaggactttctctagcagcatgggagcttgatactgggcaagtgggaagaaaaggtgaggataactaagaagaatctccctggattcagtgatgtaattctgaggcatgttccacatagcttcccatagaattaagcccmgatatctaacacaggaacttgcctcttaacacgtgtggtactggcttttctatctttcctgttttattttgttct

SEQ ID NO: 158051 - DNA, 580 bp, Homo sapiens
agtagaaatatcactgttagattacaaagcacatttgcttwcaaaaaattttttaaaaaatgaatatattgttaggagactaaaaaattcatgtagcaaatttgaaaagaagtttgtataaaaatgtagttattttaaattaaaaactcaaaaatgaattcatcagattagacatggccaaggtgagagttcataaatatttcagaatgcattacagaaaattttgaaaaatgtaaaatgtggacagaatgatgaagagacatggaagatacagtgagaaagtgtagcatgtgtttagagagcgttctcatagaacaagggaactgggaagggacaatatgtgttggtattttgtctgaaagttccctagacttttgtaagacactgatctgcatattcaaaaactccatgcatgctaagcaagctacaatggagatacacctacacctatgtatctcctagagaaatagtaaacacccatgaagggaaaaatatttcaattaccactagaaaaatgaaattacttttaatcataccgaaatctgaaaaaatgaaaggtaaaataaacaatattatttgt

SEQ ID NO: 158052 - DNA, 483 bp, Homo sapiens
gaattcatcagattagacatggccaaggtgagagttcataaatatttcagaatgcattacagaaaattttgaaaaatgtaaaatgtggacagaatgatgaagagacatggaagatacagtgagaaagtgtagcatgtgtttagagagcgttctcatagaacaagggaactgggaagggacaatatgtgttggtattttgtctgaaagttccctagacttttgtaagacactgatctgcatattcaaaaactccatgcatgctaagcaagctacaatggagatacacctacacctatgtatctcctagagaaatagtaaacacccatgaagggaaaaatatttcaattaccactagaaaaatgaaattacttttaatcatacygaaatctgaaaaaatgaaaggtaaaataaacaatattatttgttcagaataataatgccattctgaatttctaaacgaagaaaaatattcatcaacctgtg

SEQ ID NO: 158053 - DNA, 518 bp, Homo sapiens
tagacatggccaaggtgagagttcataaatatttcagaatgcattacagaaaattttgaaaaatgtaaaatgtggacagaatgatgaagagacatggaagatacagtgagaaagtgtagcatgtgtttagagagcgttctcatagaacaagggaactgggaagggacaatatgtgttggtattttgtctgaaagttccctagacttttgtaagacactgatctgcatattcaaaaactccatgcatgctaagcaagctacaatggagatacacctacacctatgtatctcctagagaaatagtaaacacccatgaagggaaaaatatttcaattaccactagaaaaatgaaattacttttaatcataccgaaatctgaaaaaatgaaaggtaaaataaacaatattatttgttcagaataataaygccattctgaatttctaaacgaagaaaaatattcatcaacctgtggctaaataacatatttagagaaaaaaacaaaacgccaccagcagaatt

SEQ ID NO: 158054 - DNA, 557 bp, Homo sapiens
tgcatgtgtaccctagaatttaaagcataataaataaatataaaaaaataaaaaaggaaatagatgttctgtaaaaatatacacawtttttacagacaaatacatttataagttgtttttatcttaaaaattggggatatttcatatttataactaattattgaaccttaagttttcttggccatttctaggctaacaaactacgaatcatgtaaactaagccaaagtagaatagacataaaagtcctgaacacttcaacttcctatccttcaagaagtatacctcgcaaagctcatttgagagaggaaaagctttcctccaccctctgttttacagcgctgaggcttctcatcacatttctatgacttgtagcttaaatccatgttacatggtaactggcattgttagtgcttctcttttaacacagtaggaattaatcaatttggtggtgtatttaattaattctatcactagaggattgtaaaatttacatatatgaatacctcactttagaggccacttaatttttttccaaggggatatttgactacatttc

SEQ ID NO: 158055 - DNA, 557 bp, Homo sapiens
tgcatgtgtaccctagaatttaaagcataataaataaatataaaaaaataaaaaaggaaatagatgttctgtaaaaatatacacattttttacagacaaatacatttataagttgtttttatcttaaaaatyggggatatttcatatttataactaattattgaaccttaagttttcttggccatttctaggctaacaaactacgaatcatgtaaactaagccaaagtagaatagacataaaagtcctgaacacttcaacttcctatccttcaagaagtatacctcgcaaagctcatttgagagaggaaaagctttcctccaccctctgttttacagcgctgaggcttctcatcacatttctatgacttgtagcttaaatccatgttacatggtaactggcattgttagtgcttctcttttaacacagtaggaattaatcaatttggtggtgtatttaattaattctatcactagaggattgtaaaatttacatatatgaatacctcactttagaggccacttaatttttttccaaggggatatttgactacatttc

SEQ ID NO: 158056 - DNA, 548 bp, Homo sapiens
acaaaaatcagtagcatttctatatattgatagtaaactagctgaaacaagaaattaagaaagcaatttcttttacaatagctacaaaaatgtacttagaaataaatttaaccaaggaagtaaaagatttcgacaacaaaaatgacaaatattaatgaaagaaattaaagaaaacacaaaaaaggaaagacatccacgtttatagattgaaataactaatattcttaaaatgacccactatcctatgtgatttacaaatttggtacaatcactagcttgtatttttaaaagcacctttgttgcatattcttaagatattcaatgacaatgcccggatttaagtttgaggtattattatatctattttatactgggcacaatataatgttatcagaggtaacggttttgattggtcctaggtcatacagtaatatatacattgtgatttatagacatgctatcttttaatactcaggcatttagaaagttcatttagacaaagttataaaarcttgccgtcctttctgcctatatcacctaaaaatcct

SEQ ID NO: 158057 - DNA, 503 bp, Homo sapiens
agatctagggcacaagcagggcaggctagggcagggcaatggcaagaccaggccatggcagggccagcccaggatagaacagggcacaggcagggcagggccagggccacggctggggcaggacaaggaccaggactggggtccaggccagggcaagggtatggccagggcagaggtagggccagagccagggtctgggcaggaccaaggcaggtctattgcagggccagggttcagaccagggccagagcagggctgggacagggccagggccagaaccaggaaagggcaatgtcaggacaagggccgtggcaggaccagcaatggggctggggccaggacagggacagggacagggtcagggctagggccagaatagcatgccarggtagagccaggccaaattagggccaggacaggttcaggaccagggctgggccagggtatggccttaagtagcgaagggccagggccagggtccatgccagtgccagcgctggtcc

SEQ ID NO: 158058 - DNA, 503 bp, Homo sapiens
agatctagggcacaagcagggcaggctagggcagggcaatggcaagaccaggccatggcagggccagcccaggatagaacagggcacaggcagggcagggccagggccacggctggggcaggacaaggaccaggactggggtccaggccagggcaagggtatggccagggcagaggtagggccagagccagggtctgggcaggaccaaggcaggtctattgcagggccagggttcagaccagggccagagcagggctgggacagggccagggccagaaccaggaaagggcaatgtcaggacaagggccgtggcaggaccagcaatggggctggggccaggacagggacagggacagggtcagggctagggccagaatagcatgccaaggtagagccaggccaaattagggccaggacaggktcaggaccagggctgggccagggtatggccttaagtagcgaagggccagggccagggtccatgccagtgccagcgctggtcc

SEQ ID NO: 158059 - DNA, 582 bp, Homo sapiens
actttgggcatctttgttcatctctgcatttgcacatttgttgaacaaacctactgagacacttgttttctttccatggtccatacattaggaatatagagttagcttcctagggaacattttaagacrtattcttagagaagaaaccaggaggcatcgttgtgcgacattggtccaggatcttgggtgtgtcctttggtcttttgtgggtcaggttagcaggaattgtgtcctgaggtgttggaactgcaaagtgcaggttccctcctgcccgcactgatgccttcagggaatggcctgtccgtttttctaagaagaacacttaactcagccttggctgacttcagctacctgtgctttctccagccaggctctgtgttttgtgcttttactctcaaaacaaccctattattatccgtgtcccacagatgaggatgctgagcccctgagaggctcagtaggtgcctgaaggcattccagccaagaggtggcagagccagggccagcctggcctgaggactctgaagcttccacaggcacagctccttcatgccagctctgtgtcgggattttctgtggtca

SEQ ID NO: 158060 - DNA, 582 bp, Homo sapiens
actttgggcatctttgttcatctctgcatttgcacatttgttgaacaaacctactgagacacttgttttctttccatggtccatacattaggaatatagagttagcttcctagggaacattttaagacgtattcttagagaagaaaccaggaggcatcgttgtgsgacattggtccaggatcttgggtgtgtcctttggtcttttgtgggtcaggttagcaggaattgtgtcctgaggtgttggaactgcaaagtgcaggttccctcctgcccgcactgatgccttcagggaatggcctgtccgtttttctaagaagaacacttaactcagccttggctgacttcagctacctgtgctttctccagccaggctctgtgttttgtgcttttactctcaaaacaaccctattattatccgtgtcccacagatgaggatgctgagcccctgagaggctcagtaggtgcctgaaggcattccagccaagaggtggcagagccagggccagcctggcctgaggactctgaagcttccacaggcacagctccttcatgccagctctgtgtcgggattttctgtggtca

SEQ ID NO: 158061 - DNA, 582 bp, Homo sapiens
actttgggcatctttgttcatctctgcatttgcacatttgttgaacaaacctactgagacacttgttttctttccatggtccatacattaggaatatagagttagcttcctagggaacattttaagacgtattcttagagaagaaaccaggaggcatcgttgtgcgacrttggtccaggatcttgggtgtgtcctttggtcttttgtgggtcaggttagcaggaattgtgtcctgaggtgttggaactgcaaagtgcaggttccctcctgcccgcactgatgccttcagggaatggcctgtccgtttttctaagaagaacacttaactcagccttggctgacttcagctacctgtgctttctccagccaggctctgtgttttgtgcttttactctcaaaacaaccctattattatccgtgtcccacagatgaggatgctgagcccctgagaggctcagtaggtgcctgaaggcattccagccaagaggtggcagagccagggccagcctggcctgaggactctgaagcttccacaggcacagctccttcatgccagctctgtgtcgggattttctgtggtca

SEQ ID NO: 158062 - DNA, 582 bp, Homo sapiens
actttgggcatctttgttcatctctgcatttgcacatttgttgaacaaacctactgagacacttgttttctttccatggtccatacattaggaatatagagttagcttcctagggaacattttaagacgtattcttagagaagaaaccaggaggcatcgttgtgcgacattggtccaggatcttgggtgtgtcctttggtcttttgtgggtcaggttagcaggaattgtgtcctgaggtgttggaactgcaaagtgcaggttccctcctgcccgcactgatgccttcagggaatggcctgtccgtttttctaagaagaacacttaactcagccttggctgacttcagctacctgtgctttctccagccaggctctgtgttttgtgcttttactctcaaaacaaccctattattatccgtgtmccacagatgaggatgctgagcccctgagaggctcagtaggtgcctgaaggcattccagccaagaggtggcagagccagggccagcctggcctgaggactctgaagcttccacaggcacagctccttcatgccagctctgtgtcgggattttctgtggtca

SEQ ID NO: 158063 - DNA, 514 bp, Homo sapiens
cagggccagcctggcctgaggactctgaagcttccacaggcacagctccttcatgccagctctgtgtcgggattttctgtggtcatcacagccatcttcctggtcggctaagttacagacagggtggaactaggatggccaagctggaagcagagctcattcctgagcagggcacccgggccctgyctatggtgctgggcaggctcctggtgtggagagtaggctcagatcctgctgtccctgtggctgtgggaggcttttctaggcaccctcctgactgctaacaccaggagggcctatgatatgggaccgctgccccatgacgtgtgccaggtttctgcacgcgactgctgggaaaggctggccctgggctgggtggacccgcactgcctgctggcccctgcacccagatggtgcagcccacacccctctgatgtccacccatgctcggctctgggacttccctccttccaccgtgtctgaccctggttgcccttgttctgccactggcttg

SEQ ID NO: 158064 - DNA, 614 bp, Homo sapiens
gttttcacagcatggacataacatgatttatttaacctgtcttctgttgttggacttcgttattttatactcaaacaatgccacaatgaataaccttcttcataagttaattaaatactcgatgaaaaatacagggtttttttcggtttataaaagtaatacttgctcactgaggaaaaaaaatctgtaaattacagaaaaacacaaaggaaatatatcctatgatccaaccagaaagaaaactacttttcctatgttgtgcgtagctctctagttttttctttctttatatcaattggattttttttttttttgagacagkgtctcactgtgtcacccaggccggagtgcagtggcatgatcacagctcactgaagcctcgacttcccaggcttaagtgatcctcctacctcactcagcctcccgagtagttgggaccacaggcatgtgccaccacatctggctatttttagtattttttgtagagatggggtttcgccatgctgctcaggcaggtctcaaactcctggcctcaagccatctgcttgtgttggcctcccaaagtgctggattacaggcatgcaccaccacccccggcctaattgaatttttat

SEQ ID NO: 158065 - DNA, 560 bp, Homo sapiens
tgttagcagtctgaaaatagttgctagcacctccatgcccacgccaatgtctccagcctccttcaagcaccttgctgtgtcttggaaccaytgggagccctcacaggaggcccttcgttcctgtatgcatgtggtgccacaagctgctttgggcccggaggaatcctacacatcccagaacacttcctcacctgaccctgtcacccatctctccccttctcatgtgctcagccccttctttgactcttgaattttgagtttttacagatgtttgggagctcttactctgacatgaatttataattgtaatggagactcagacaacgttgtagatcacagagtgaactatgctttttagtgttaaatgcaatagcttaagatagaatgttttacttgttacataaatgctggttttctttcagatttaaggacatatactttatttttttaagagatagggtcttctatgttgcccaggctggctttgaactcctgggatcaagtgatcctcctgcctcagccttcgaagtagttgggactacaggcccacgccaccgtgc

SEQ ID NO: 158066 - DNA, 560 bp, Homo sapiens
tgttagcagtctgaaaatagttgctagcacctccatgcccacgccaatgtctccagcctccttcaagcaccttgctgtgtcttggaaccactgggagccctcacaggaggcccttcgttcctgtatgcatgtggtgccacaagctgctttgggcccggaggaatcctacacatcycagaacacttcctcacctgaccctgtcacccatctctccccttctcatgtgctcagccccttctttgactcttgaattttgagtttttacagatgtttgggagctcttactctgacatgaatttataattgtaatggagactcagacaacgttgtagatcacagagtgaactatgctttttagtgttaaatgcaatagcttaagatagaatgttttacttgttacataaatgctggttttctttcagatttaaggacatatactttatttttttaagagatagggtcttctatgttgcccaggctggctttgaactcctgggatcaagtgatcctcctgcctcagccttcgaagtagttgggactacaggcccacgccaccgtgc

SEQ ID NO: 158067 - DNA, 638 bp, Homo sapiens
tgaactcctgggcataagcagtccacccaccatggcctcccaaagtgttgggtttacaagcgtgagccatcgtgcccggccatttccttctttttaaggttgaataatattctgttgtgtatgtatacaatgtgtatacatacacacattttctttgtccattcattcatccattgatggatgcacaggttaattccatatcttgactaccatttgtgtgttatagatttaattttkctcaccagaagatctgttgaaatcttaacccctggtacctctgattgtggccctatttggaaatggagtctttgtagatttaattaagatgtaaattacaatgaagtcatactggagtaggttgggcccttaacccattatgactggtgtctttataagaagaggaaaagagacacagatacaaaggaaagatggtcaagtgacaacagaggcaaagattggagtgatacagccacaagccaaggaatgctaggggttgccagcaaccagcagaaactggaagaggctggcgatgaccccccattggagccttcagagggaacttggctcttctgacatctagattttggactgctggcctcccaaactgtgagagaataaattttcattgttttgaagcc

SEQ ID NO: 158068 - DNA, 638 bp, Homo sapiens
tgaactcctgggcataagcagtccacccaccatggcctcccaaagtgttgggtttacaagcgtgagccatcgtgcccggccatttccttctttttaaggttgaataatattctgttgtgtatgtatacaatgtgtatacatacacacattttctttgtccattcattcatccattgatggatgcacaggttaattccatatcttgactaccatttgtgtgttatagatttaatttttctcaccagaagatctgttgaaatcttaacccctggtwcctctgattgtggccctatttggaaatggagtctttgtagatttaattaagatgtaaattacaatgaagtcatactggagtaggttgggcccttaacccattatgactggtgtctttataagaagaggaaaagagacacagatacaaaggaaagatggtcaagtgacaacagaggcaaagattggagtgatacagccacaagccaaggaatgctaggggttgccagcaaccagcagaaactggaagaggctggcgatgaccccccattggagccttcagagggaacttggctcttctgacatctagattttggactgctggcctcccaaactgtgagagaataaattttcattgttttgaagcc

SEQ ID NO: 158069 - DNA, 593 bp, Homo sapiens
tacgtttgcctccctattcctttcccttcttccctctccttttccatttatttaccttgagggctttcaaaggtttttctttgttccctatccagtccttttccaacttaggttttttgttgttgttgttgttgttgttttgttttgttttgttttgttttgttttgtttcagatggagtcttgctctgtcacccatgctggagtgcaatggcacaatctcggttgactgcaacctctgcctcttgggttcacaccattctcctgccycagcctcccaagtagcagggactacagatgcttgccaccacgccagactaatttttgtatttttagtaaagacggggtttcagcatgttggccaggctcatctcgaactcctgaccaaaggtgatccatctgcctcggcctcccaaagcgctgggattacaggtgtgagccactgtgcttggccgaacttatgggttttgtagagatagttaatagaatttagcctcaaaatgtctattctgtatgacaagtctttatagggcatgtaaattacacatctcaggcagtttatccatttgaatttaagttcttcttttctctccta

SEQ ID NO: 158070 - DNA, 593 bp, Homo sapiens
tacgtttgcctccctattcctttcccttcttccctctccttttccatttatttaccttgagggctttcaaaggtttttctttgttccctatccagtccttttccaacttaggttttttgttgttgttgttgttgttgttttgttttgttttgttttgttttgttttgtttcagatggagtcttgctctgtcacccatgctggagtgcaatggcacaatctcggttgactgcaacctctgcctcttgggttcacaccattctcctgcctcagcctcccaagtagcagggactacagatgcttgccaccacgccagactaatttttgtatttttagtaaagacggggtttcagcatgttggccaggctcatctcgaactcctgaccaaaggtgatccatctgcctcggcctcccaaagcgctgggattacaggtgtgagccactgtgcttggccgaacttatgggttttgtagagatagttaatagaatttagcctcaaaatgtctattctgtatgacaagtctttatagggcatgtaarttacacatctcaggcagtttatccatttgaatttaagttcttcttttctctccta

SEQ ID NO: 158071 - DNA, 348 bp, Homo sapiens
aaagagggaaaagtaatggagcaaaagaaatatttttcaaaataactgccaaaaatattctaaaagaagtgacagaaaatcaaacttcaaatataggaaactcagagaatgwcaaatagaacaaaaagaaataagaattacatcttgaaaaatctttaaaaaatcaagtctaaattttatatcttgctccaaatatttagagatataaataggttttcaacaagatatggagaaagccttatcatggaaacactaaaataaagctgtggaaggactacattgatattagacacaacagagttcggaacaagaaatagtatcagagatgagagataatagataatagaa

SEQ ID NO: 158072 - DNA, 348 bp, Homo sapiens
aaagagggaaaagtaatggagcaaaagaaatatttttcaaaataactgccaaaaatattctaaaagaagtgacagaaaatcaaacttcaaatataggaaactcagagaatgacaaatagaacaaaaagaaataagaattacatcttgaaaaatctttaaaaaatcaagtctaaattttatatcttgctccaaatatttagagatataaataggttttcawcaagatatggagaaagccttatcatggaaacactaaaataaagctgtggaaggactacattgatattagacacaacagagttcggaacaagaaatagtatcagagatgagagataatagataatagaa

SEQ ID NO: 158073 - DNA, 348 bp, Homo sapiens
aaagagggaaaagtaatggagcaaaagaaatatttttcaaaataactgccaaaaatattctaaaagaagtgacagaaaatcaaacttcaaatataggaaactcagagaatgacaaatagaacaaaaagaaataagaattacatcttgaaaaatctttaaaaaatcaagtctaaattttatatcttgctccaaatatttagagatataaataggttttcaacaagatatggagaaagccwtatcatggaaacactaaaataaagctgtggaaggactacattgatattagacacaacagagttcggaacaagaaatagtatcagagatgagagataatagataatagaa

SEQ ID NO: 158074 - DNA, 348 bp, Homo sapiens
aaagagggaaaagtaatggagcaaaagaaatatttttcaaaataactgccaaaaatattctaaaagaagtgacagaaaatcaaacttcaaatataggaaactcagagaatgacaaatagaacaaaaagaaataagaattacatcttgaaaaatctttaaaaaatcaagtctaaattttatatcttgctccaaatatttagagatataaataggttttcaacaagatatggagaaagccttatcatggaaacactaaaataaagctgtggaaggactacattgatattagacacaacagagttcggaacaagmaatagtatcagagatgagagataatagataatagaa

SEQ ID NO: 158075 - DNA, 629 bp, Homo sapiens
gtgcttgtatcacaatgtgcttgtatcacaagcacaggtgctaaaaaggaggggaaaacatcattactgatattttcaacgtatgttttaccctccatcaacatgaacttcaactttatatgatgcagattgaaggaaatcacccataattccatagaaagaaggcctgtgatattttatgggaaaataaatagagaaaatgctaacagaaaccctattaagcatgaagctttatggagcaaacacaaatccagtggtgaaagatacacactcgagttctgtttgttgtcttggaacaataygttttaggggcgactggcgggtgaggagaacatacgcgagttcaccaaaaagaaaagctgaatgaggcaatgcctcttcctgaccatatctcttactcagataactatataatttattgtccagtaaagggtatactgaaaaatcatattaaaagtcatggagtgaagttgtccagggaaatcaagacttaacagtctcactctgacaacaatgaacaggggggttccctcgagatagactaggacatgaccccacactggcaggtagtagtaccagaaaagaacccatggaaaatctttaccttatgctagaggtagggaccaggc

SEQ ID NO: 158076 - DNA, 629 bp, Homo sapiens
gtgcttgtatcacaatgtgcttgtatcacaagcacaggtgctaaaaaggaggggaaaacatcattactgatattttcaacgtatgttttaccctccatcaacatgaacttcaactttatatgatgcagattgaaggaaatcacccataattccatagaaagaaggcctgtgatattttatgggaaaataaatagagaaaatgctaacagaaaccctattaagcatgaagctttatggagcaaacacaaatccagtggtgaaagatacacactcgagttctgtttgttgtcttggaacaatacgttttaggggcgactggcgggtgaggagaacatacgcgagttcaccaaaaagaaaagctgaatgaggcaatgcctcttcctgaccatatctcttactcagataackatataatttattgtccagtaaagggtatactgaaaaatcatattaaaagtcatggagtgaagttgtccagggaaatcaagacttaacagtctcactctgacaacaatgaacaggggggttccctcgagatagactaggacatgaccccacactggcaggtagtagtaccagaaaagaacccatggaaaatctttaccttatgctagaggtagggaccaggc

SEQ ID NO: 158077 - DNA, 629 bp, Homo sapiens
gtgcttgtatcacaatgtgcttgtatcacaagcacaggtgctaaaaaggaggggaaaacatcattactgatattttcaacgtatgttttaccctccatcaacatgaacttcaactttatatgatgcagattgaaggaaatcacccataattccatagaaagaaggcctgtgatattttatgggaaaataaatagagaaaatgctaacagaaaccctattaagcatgaagctttatggagcaaacacaaatccagtggtgaaagatacacactcgagttctgtttgttgtcttggaacaatacgttttaggggcgactggcgggtgaggagaacatacgcgagttcaccaaaaagaaaagctgaatgaggcaatgcctcttcctgaccatatctcttactcagataactatataatttattgtccagtaaagggtataytgaaaaatcatattaaaagtcatggagtgaagttgtccagggaaatcaagacttaacagtctcactctgacaacaatgaacaggggggttccctcgagatagactaggacatgaccccacactggcaggtagtagtaccagaaaagaacccatggaaaatctttaccttatgctagaggtagggaccaggc

SEQ ID NO: 158078 - DNA, 434 bp, Homo sapiens
ggaatctgaacccagctaccatatgagagagttcaacttatgttcaatgtgaatgccatggcaatattacaaggtaagaattcgctccatacgtgcttgaggtaaataggagaaacctagaatttatgtaaacagtgagaagattggatgcsttttccgtcacatattttaatactagcagcatattatatatgtcaatccatcaggcattcagaaatacatgcttatgaaaattttttgcaccatcagacaaaagacaagggtagaagacatttgtaaccctataaacactagtaaattaaaaacagaaagacctttatgtcctaacatatctgtgttgtgaaaggctgccctgtgaaatacgggatttcttaaacatattttaaaaatcataggtgtcaatattttttagaaatccatttaaattttctctt

SEQ ID NO: 158079 - DNA, 434 bp, Homo sapiens
ggaatctgaacccagctaccatatgagagagttcaacttatgttcaatgtgaatgccatggcaatattacaaggtaagaattcgctccatacgtgcttgaggtaaataggagaaacctagaatttatgtaaacagtgagaagattggatgcgttttccgtcacatattttaatactagcagcatattatatatgtcaatccatcaggcattcagaaatacatgcttatgaaaattttttgcaccatcagacaaaagacaagggtagaagacatttgtaaccctataaacactagtaaattaaaaacagaaagacctttatgtcctaacatatctgygttgtgaaaggctgccctgtgaaatacgggatttcttaaacatattttaaaaatcataggtgtcaatattttttagaaatccatttaaattttctctt

SEQ ID NO: 158080 - DNA, 432 bp, Homo sapiens
cagtactgctcagttttagttgctaagtttaaaagtgtattttaaaagcaagttagtttagtgcactcttgcttctttcttgactgcttgtatatatgtatattcctttaaatgaatcttggaatttatttaaaaattttaaattatactaatgaaactgtatattgttgtgaattcataggtgaatttggaaagaatttgtctttatgatactaaatccttttaatccaagaatcatatgtgcctttatatttattccagtcwatatttatatcagagtaaatatatagaaatgtagatacatacagctgtagttacagatacaaatatagatataacatgttaaatctatatctatcccatataacatatatacatgttatatgtgtgtgtgtatatatatatgtttatgttattaaagagctcccttaa

SEQ ID NO: 158081 - DNA, 536 bp, Homo sapiens
ctgctcccagtgaggttccacctatgtaataagtccactcttgctagccagggtcgttttctcacataacctttttttttttttttccctgtgatccaagaccccattctttctgtaaacttcatgtggtagataagcttctgcacgcatcstgtgtctgggtcttcgttctaagggctccagtgtacacacattgcagaaacctgtatgccttttctactatgtatctgcctcctattagtgattttcagggaaacttcagaaggcaaaagggacattctcctttagcccattctcagacaaaatcccccaacatttaactgattcctaatagcttaaaatcactttgaaaaatccatatatttataaccttttcttccctctatgatttctggtcagcttgggttttgtttttcattccatttacttcatcctcgaaaagatctattttatgtctatttattctcatttatggacatggagaaaagaaaataactttcatgtgagaaatgcaagtccttttaaataatcaggcc

SEQ ID NO: 158082 - DNA, 536 bp, Homo sapiens
ctgctcccagtgaggttccacctatgtaataagtccactcttgctagccagggtcgttttctcacataacctttttttttttttttccctgtgatccaagaccccattctttctgtaaacttcatgtggtagataagcttctgcacgcatcctgtgtctgggtcttcgttctaagggctccagtgtacacacattgcagaaacctgtatgccttttctactatgtatctgcctcctattagtgattttcagggaaacttcagaaggcaaaagggacattctcctttagcccattctcagacaaaatcccccaacatttaactgattcctaatagcttaaaatmactttgaaaaatccatatatttataaccttttcttccctctatgatttctggtcagcttgggttttgtttttcattccatttacttcatcctcgaaaagatctattttatgtctatttattctcatttatggacatggagaaaagaaaataactttcatgtgagaaatgcaagtccttttaaataatcaggcc

SEQ ID NO: 158083 - DNA, 326 bp, Homo sapiens
tgttatccaaaacaaatatttttctttgtttttaaacatctacttccatctacttatctacttatttttacttttatttgtaacttaattccatsaaggagagagagtgcattttctgttatgctaaatttttgaagaatgtattgattttttctgacctgatatatggatgatatgtagatagtacatgtttgtattatcaaatttcaggacgataataaaataaatacttataatatttatattgtcactgtatattagttattttctttcttcactacaggagtttttcaacctataggctatttttcaattctaggttatcc

SEQ ID NO: 158084 - DNA, 326 bp, Homo sapiens
tgttatccaaaacaaatatttttctttgtttttaaacatctacttccatctacttatctacttatttttacttttatttgtaacttaattccatgaaggagagagagtgcattttctgttatgctaaatttttgaagaatgtattgattttttmtgacctgatatatggatgatatgtagatagtacatgtttgtattatcaaatttcaggacgataataaaataaatacttataatatttatattgtcactgtatattagttattttctttcttcactacaggagtttttcaacctataggctatttttcaattctaggttatcc

SEQ ID NO: 158085 - DNA, 629 bp, Homo sapiens
gagcattccatctttctgatgttcccacattcctagcagcatggccccttcctccatcactccagtttccctgtccattgtcccaggtcctctctggctgttaccttcctccctccctattgtaaggacccttgtgattatgatggtctcacccagataattcaggatactctcctgacctcaaaattctcaaccacgtctgccaagttatttttgacttgttcataagtaatgatcatagattccagatattaggacaatgatgtctttagtgggtgtattattcattccacaaacaactctcatcatccacacaatggccttcccctaaggtagaataaaaatatcacaaggcagatttatgaggcgatcgacctagaaaaaacctgagactckaggactgtctgatgtgtggatgtcaaatcctgggagattctgagcctctgctctatgtggactctatgttgtgtagccatttgtggaaggcttctgtgattttgtgacctagagaaaatgaatctctgctaaaatcaaatctaagaaagattggcaaagggaatttaaagatttcctaaatttttggaatttccctaggcattaaaacatgagaagtggcaataattcaaacc

SEQ ID NO: 158086 - DNA, 590 bp, Homo sapiens
aataataagcaactccatctctccccacttcatccttctcagccctcgatcctctgtgatctggctcatgttcctgctgccttactgaggctgctttagtaagggtactagtaagcttccaactggcaactccaaatgactattttcagtatacaacttacttggagtctacttagcatcttcagttattgaacttcctcctttaactcacttccaaaatactactctctcctccttccttctctatttctttgttggctcttcttcctctgccttctcttcaaatatttctacttcctctcactccttcyagttctcttttctgtttccacaatacttgttctatcaactactcctttcacttcgttcacaataatactgatgattcccaagcatatatctctcatcatgcgtccccctcacatatctgctctttaattcttctttttaattcatttgataccttctaaaagtctctcacaattcagatagtccttcaagccaggaacatgggagtcattctcaaattatctttctcactcaccccctgtcccatctccaaatttttatataagcttcagatttcatgg

SEQ ID NO: 158087 - DNA, 556 bp, Homo sapiens
tagtaagcttccaactggcaactccaaatgactattttcagtatacaacttacttggagtctacttagcatcttcagttattgaacttcctcctttaactcacttccaaaatactactctctcctccttccttctctatttctttgttggctcttcttcctctgccttctcttcaaatatttctacttcctctcactccttccagttctcttttctgtttccacaatacttgttctatcaactactcctttcacttcrttcacaataatactgatgattcccaagcatatatctctcatcatgcgtccccctcacatatctgctctttaattcttctttttaattcatttgataccttctaaaagtctctcacaattcagatagtccttcaagccaggaacatgggagtcattctcaaattatctttctcactcaccccctgtcccatctccaaatttttatataagcttcagatttcatggactgtacttaaaaattttttatagttgatgtgtctctatttcagcagctactgtgttatcatttctcatcttag

SEQ ID NO: 158088 - DNA, 601 bp, Homo sapiens
tatagaggacaactggtaatatctgtcaagtttataaatgcatataccctttaactcagcaattttagaatgttatccttgaaatatatatttgtacatacatgaaattatataatacattactgataaaacacagacaagaatatgtatacaacccaaatgaccacctaaaggagactggttaaataaatgagtataattgaaagaaaattaggacctgaactaagacctttgagaaaagagtaaaagactatgagaataatgtcaatcttttacctttttttctctagaaaactaagacattagaaacaaaaagtcttaaaacacattcctacataaaaaaaagaattccttctgtaaaacgacctcagtcgaaaacataataattggtataaattcttactcttttaaaataaagattaaattccagctaaaaattctccagatatggcagtatattgctctttgaattgaactgaggaarggcgagggtgagagacataaaagatgaaaacagtgaaaggaagaaataaagggaagggaaaaagtaaaaagaaaaagaggaaaataggtcggacacaggggctcacacctgtaatcc

SEQ ID NO: 158089 - DNA, 483 bp, Homo sapiens
ccaatccctaactacattttcaatgttttgcaagtggagtccatgtgttcttgatttacatgaagctcaaaataatggttatagtaactagtacttcataattaagcaaaaagctcttattgaaaaatgacagaactatacatagggatgacaacatggagagatatttcgtgagatcacaaacttatggtatagcagaagtagaacgctgagtagagactctgtgttcccaatcattatttctaccaccagctttctattttgatgktaataatgttcttatgtgggaaaccctacatatttgccaatgtttagttcattgacaaagaaatagaaagagcttcaagaacactcgaatctttaaaaaataaaatacctataattggccatacgaaataattggtacttgacatatactgagatcgttttattttgtgctagataaatgaagtcatagaacagaatgtgctttaaatattatga

SEQ ID NO: 158090 - DNA, 591 bp, Homo sapiens
gatgccttactcagcactactcaatggctggcagcagccataaccataaaggccagagttggggaattacagaagaacccttgatcaggatgggcagaagaaagacagcccaccacagagattcattgrcaatagcctcaagcaacatgcaacagatagcttagagaacttgataattagcagcgacaaaaagattgatttgtcatcagagactgatttgtgaggaaaggacacagtcaatgttctttttgacacccatagctaaagccaccagtcaaagagagtctttgcatatgacaaagaacatggggaaaaggtcatccttttagtttcttcatgtattttaataacaaattcagcatcagcacccccaccactagagtgtaagctctttgaaaggctgaaccatttgatcttcagcaccaaacataatatctagcacccaatagccatttaaatatattggcttgatatttgagtgggaaaaataataatatactcacagccaatgaaccacaactaacccaagatggcctatggcctctaggctttggcaccagaaaggcctcggttgaaatctagactctgcca

SEQ ID NO: 158091 - DNA, 584 bp, Homo sapiens
ataaattcctggacacatataccctcccaatactaaaccaggaagaagttgaatccctgaatagaccaataacaggctctgaatttgaggcaataattaatagcctaccaaccaaaaaaagtccaggaccagatggattcacagctgaattctaccagaggtacaaggaggagctgttaccattccttctgaaactattccaatcaacagaaaaagagggtatccttcctgactcatttcatgaggccagcatcatcttgataccaaagcctggcagagataaaacaaaaaaagagaattttagaccaatatccctgatgaacattggtgcaaaaatyctcaataaaatactggcaaactgaatccagcagcacatcaaaaagcttatccaccacggtcaagttggcttcatccctgggatgcaaggctggttcaacatacacaaatcaataaatgtaatccattatataaacagaaccaaagacaaaaaccacatgattatctcaatagatgcagaaaaggccttcaacaaaattcaacagcccttcatgctaaaaactctcaataaactaggtattgatggg

SEQ ID NO: 158092 - DNA, 623 bp, Homo sapiens
tattgtgcaaaatgtttataatctctttttacttaaaaacatattatgcacatgttcccacatgttaaatatttttcttcagtgattctaatttccatacagtagtctctactttttacatccaacatcttattattgagcatttagcttattttcaattatatctcccatgagtaaggctttgatgtgcacacttagacatgagacctgggcccagggtgaataaatatattggttagtttttgatactgctaaattgctgtccagaagggttacattaataaccttcccatgagcagtgtattagttgtaaacactcattatcattgaagaatcattattatttttacccaaatcaacaagcaaaaacagcttgttattgtttttatttacattccttagtgtggtgaaacatgacttcatatatttaacagccattcagatttccttgaaaaattgcatgttcatatccttcrtcgtgtttttaatttgtttttcattttattattgatttgtatgggctttgtactttactgaggctgttataaatgttgcaaatattgtatttctggagtttcttgtcagccctttctagaattatgtttcttcctccctctcatatc

SEQ ID NO: 158093 - DNA, 610 bp, Homo sapiens
ccaggggacatttacagtcaatgtcatctacagaaagttgctgtctttgctatagtgaagggcaaatcatctcccaattgcgctgcttttcaagattccatgaggagctctactcttgaaaatttctgaatcaaaatagaatcttaaggagtctaattctaaatacaaacttcatgtgtaagattctcgccatggctgtatggcagstttttaaagaaagtatgagaatggtgtattttatccaagtgcttgttgctgttttgctcactggtgtcctaagcacctagaaaagtccttggcagtttttaggtgcacaataagtatttaattttattattcctaaattattggttcgatgattgggtgtatacaagtgcatatgtggatatgtgcatttgaatggagagaaagaaaaagtacatgcttactctctgtgctataatgtctcaaatattaaatcatgacatatgataataatggtcatttttaagttacaaagttctttcaccattcattcattcagttgttatttattgggtgccaaattatgtaccaggcagtgtggtgggataccagggatacagacatgcgcctgcctgtatatgtttac

SEQ ID NO: 158094 - DNA, 569 bp, Homo sapiens
ggctgcttttactattccaggaagcaacactcccaacaatgatgccttctgtgtgtccagcacattgtaatttgcaaggtactttcaaatccatcttctaattcacattctacattcttagccaaaccttagcagagattttgtcacatttgattcggtgattcaaaatgttcaacagtttcttcctgtccccaggatttgggagtgaagagaatgttggatatgcaccttggaaaatgcatgatagtaaatgtctgtccaggtgactagttggcatgaaagtgggggttgggagaagagatggccaacccaggaaacacagagtataccgatccattcaaaggataactatcttaagctccatctctgtcacatagaaaaatcagctggccatggccactgtgtgtgcsacactctgtgtgccatgtcttcatgatgggctgctttacattcggtgattaactagactcagttttgttttaatctaagtactgattaaaagaaagctactgaagatacatattacaactatggtacactaacttcaacatgaaaattataatattttc

SEQ ID NO: 158095 - DNA, 563 bp, Homo sapiens
attctcattattctggaagtattacagtccacaattgaaaacctccaaggaaggaatgccaggtgccagaaatgacagagaaatctagggacactaagattgtttaattacacacacaggatttttaatggattcattccacttgaggaatgygaaagtattttaaatttttaaactaagaataaaaccttaaatactattattcagtgaaagaaggaagattaagaacttgaaaattatctacaatataattaaaatagaaccgatagtaatgaaaagtctgcaaatacatagaatgaatattccagatcagaggctatgactgaggaagatgggatatcagtcctattcctcaggaaaacagggcagaagaaagatgtcctgttctggccttcctcatccagagaaaggataagctcttgcaaccagaatgattggggagtttaagggttgatttatgagggtacattaaaataattaaatgtgtataatctacttaaatgatgactgacaggggacaaaataaatgtctactaaactttgaaggtgtaaacactaagaat

SEQ ID NO: 158096 - DNA, 487 bp, Homo sapiens
cctgtggggttatatagaataggcttttagaattgaagaggttttaaacatcacatagttcaaatactccawtttacagaggagattctactgattctttgtggcccagttcaattgccacatccacatttaaagatgagaaaacagtgcctcagaaaggataagtagcttgaccaagatcacacagccagtaaattatagcccctggattctaacctacatggtctaattctaaagccgctatcctcataagatactttgcgaatgcttactgaattagggtaacaatggaaagaaatcaagataccataagttcctaagatgtgactgctttgatataggtggttatggatggagccattagaccccagatcttctgagccctgacagcttccacgtcaacacactgtctgggagaaggcaaactaaaataaaaaatgaaattttcagtctaatatatttcaatctaatctctaattttgcagtc

SEQ ID NO: 158097 - DNA, 576 bp, Homo sapiens
gcatttccttcctgacagttgtttagagattaaaacaatgttgtatttcagttgtataatttctggtgatagatataattatctactcttctggtacaggggattaaaagtggtcccaccataaactgctgagcagtagattcactctttctgccgtcctgcatagcacacaatattacattgttcatagtaggcactaaataagtctttgcttattattaaagaagagaaaataaatgacttttmtgatgcctattttcataattctagtcaaaaatagcagagatacatctgtttgttttccttctattattttttataacagggagagctctatcagcaaattgatggcttaggagtttggctgttcctaacacacatttcttaaagcctggtatggaaccagaagatgaatagttgttgctatgattaaggattaagactttatatcagaaagaatccctgaggtccagtttttacaagaatcttgttagtactgtaataagagtgaaagaagaaaaacatggaaaccattttcaataatcttgcccagtacactgagatatgaatagtaaa

SEQ ID NO: 158098 - DNA, 574 bp, Homo sapiens
gtatgaattcttagcatcactcacttggggtacacaagaaacataattttcattagtttctttaataaaataatttgaacctacaacctacctagtggtcagaacatcatctacacactctcaggaaaggtccgatgcagcatgtgttagtcactcaggtacaaaatgtaatcatattcaccttctccaatttattccccctttctacccaggaaagatcctaagcccaggatcttactgaggtgccaacctggtgacagtagggagtggctagctggttctccatctggacctggcagggcccctgctggcctcctacactcagtgtaaattcatttagtcagatttcaacacactccaaatggagactgagcaaattcccagtttggatttgtccccatttgactcctggcttaggtaaccttggaaagtaatgtctgtcctcccatcattctyggtggaaactgtccatccacacagctgacatctgacacagagctccttgtccccacaactggaccctgtgcaagcccatgcatctttccttctcaactagctttcacttcctgctgaa

SEQ ID NO: 158099 - DNA, 436 bp, Homo sapiens
gtagtgctgcttaattacctaacagaacaggaaggagagaaatctctgtgactattgcctttggctctgtgcagaaggaaatgtggtctgagttatggaggtgggtcagagtttaaaagtcaaaaaggatggagaaaaacatagtgtgaataaaggcatagaagcaattatagagtgattgaggccagtgaaatgtctcatttcactgaggtatgaaaatccaaattggtgaatagtgggagtaaatctggacaggtaatttgggccaaatcaggtagtgtatctggcagagaaggttgaatttgtcatagtgaattagtggaaagttttggagcagaaaagagaagagataggtgagattaattgggagggggtgtgctggaagtcttgaatgaaagaacaatgrgagacaaagagatcaaggagaaacttaagt

SEQ ID NO: 158100 - DNA, 611 bp, Homo sapiens
tgaagagctcattaaaatgaaccttctgtacttctcagtgctaatgcttattggtgagacataaatatcctagaaagttctaggggaaaaagagtgacatcttaagatcgtaaggaataaaaaataaaaaataaaaaaaggatcattataagtggaaatctaaattcaatagaatggcatgactagaataaaaagtatcagctgtctggaattgaaaactgtccttgtgggaggggwagtcagagtttactcaaagagaaagcactgaagagttcatcaggaagttaattcttatcttgcgagaaggaaaacaagaggattttaagtatgcatcgtggcaccagataacttcccgagaggtacttcaaggcaagctacaaaaggcattcttagcttggaaggtgatagccccacttagggagaaacaggcaaagcttatgactatatacagcgacttcttaccactcagctaggccacccacaagacagcccaggtcagaggccccgctgcaaagaggagagcttctctggacccaccaactctgatagaaaataaaaggcagtttttgttggtgtattcgtgtttggtcctcatttgaagtggaacactt

SEQ ID NO: 158101 - DNA, 611 bp, Homo sapiens
tgaagagctcattaaaatgaaccttctgtacttctcagtgctaatgcttattggtgagacataaatatcctagaaagttctaggggaaaaagagtgacatcttaagatcgtaaggaataaaaaataaaaaataaaaaaaggatcattataagtggaaatctaaattcaatagaatggcatgactagaataaaaagtatcagctgtctggaattgaaaactgtccttgtgggaggggtagtcagagtttactcaaagagaaagcactgaagagttcatcaggaagttaattcttatcttgcgagaaggaaaacaagaggattttaagtatgcatcgtggcaccagataacttcccgagaggtacttcaaggcaagctacaaaaggcattcttagcttggaaggtgatagccccacttagggagaaacaggcaaagcttatgactatatacagcgacttcttaccactcagctaggccacccacaagacagcccaggtcagaggccccgctgcaaagaggagagcttctctggacccaccaactctgayagaaaataaaaggcagtttttgttggtgtattcgtgtttggtcctcatttgaagtggaacactt

SEQ ID NO: 158102 - DNA, 534 bp, Homo sapiens
aaaaatattgaagcttcataaagatggaaaggcagaaatataaatcagttcatttatcttattctgaataaatttcacttttgtgcaaggtattaagagagattttcaatttgctcagatattggtgatgcttttaaaaaggtggggtaatgagataagtggatacaacaacatataggttcaggagcttaatgtcaattcacagccaaattgtaggacaaatamtcaaatagatagagtgcttatgagctcatggagaaagaagaagtcatactagaagtatcaattttgctatttctttttttaaaatttggcttcgaatagtcaaaaacattgtaaacagttatatctggatgcaagtaagagtttagatgaagttacccaagagtaaaagtaagttagaagaggatagagtcagtgaattcttaattggttgaattatccagtataaattatggattaaaatcaactggagtgttgatggtctctgtccttggtcctgacctattcactgccaccaactacttgtattat

SEQ ID NO: 158103 - DNA, 586 bp, Homo sapiens
ggaacaatgatattttaaacttggcaagatttcatttagaaaatcaggcccttgagactgctctgaaaggattgactctgctcccatctgggatttatttaatcctttcattgtttcttaggtgagttttcaaaaaacacattgacaagctgtctagtgtgccaataaagaatctattggatacttcctcttaatagaacttcataatcttacttctgtagatgtctgaaaagtggaatttgtactcgcccaaaaaattatgctgaaacttaactgtggtaattgtatactgtggtgtttaaaatggacaaataccacatggccttttgtctatgatttgtgggcatagctggaaatttttagtctgggggcataatttctasatggatctctcagcactttgtgggttacaaaataatatcttttactcttctgcaattttgaggttgtttagatatccagacccgctggagacagtaaggagtaattttatattttatgctatcaggttaaactttgaattcataggtgagaaccttgtaaaaatttagagtactgagttagagaaagacccctatataaacac

SEQ ID NO: 158104 - DNA, 517 bp, Homo sapiens
aagttcaaggatttaatcttcatattaactccatagtagaaactcaataaatgcctgtagaattgaataaatttcatccagttttcccyctccctttttgccataaggccagaaatttaggaattaaagctgtgaagtggaaagaaagaaggttggctttccattggaaagtggatcagtccatagcattacctttggctctttcttatttcctctggggccagttttgagtattatgcccttatgagaaaggattgttgactcaaaagcgctcagttgggcaagaaacaaacatcaaaagctcttccccagcaaactccacagtcactctgcagcttgagccctgctattttcaattttactgatgtgcttaaactagtcctgctttgtgccttttctgaatcttgaaaaagaggcctcttgggagcttaaagtcttatcttctactcttatcatggctgtgcctactggaagaagctctcactgggcaaccctcaataaaaagcctctccctgtc

SEQ ID NO: 158105 - DNA, 517 bp, Homo sapiens
aagttcaaggatttaatcttcatattaactccatagtagaaactcaataaatgcctgtagaattgaataaatttcatccagttttccctctccctttttgccataaggccagaaatttaggaattaaagctgtgaagtggaaagaaagaaggttggctttccattggaaagtggatcagtccatagcattacctttggctctttcttatttcctctggggccagttttgagtattatgcccttatragaaaggattgttgactcaaaagcgctcagttgggcaagaaacaaacatcaaaagctcttccccagcaaactccacagtcactctgcagcttgagccctgctattttcaattttactgatgtgcttaaactagtcctgctttgtgccttttctgaatcttgaaaaagaggcctcttgggagcttaaagtcttatcttctactcttatcatggctgtgcctactggaagaagctctcactgggcaaccctcaataaaaagcctctccctgtc

SEQ ID NO: 158106 - DNA, 439 bp, Homo sapiens
tttcctcctgaaatgcttggcttacaaatcagagacaagagaaaacacatgcagaagggagaatccacaacaaaactgaaatgagctaaataactggcaggcatctatattgaagatacagaccggcctgtggttaccaaggcctgggctggtttgggcttgactagagagggaactgtatgtttctgagtgacaatctctgatctctgctttccgttctacctttccacttaccagtagtcctgcacaaattgttctgaattcttaaggtgactgtctagctggtcaagaccaatgctggattctgaagagattcacctctgaatgatggtaaaaatctcagaaagttactggtttctagacccagtggctttccttatccttagcagagttgcaggtggagactcagyagctcttaggtatttttcagattaaactc

SEQ ID NO: 158107 - DNA, 605 bp, Homo sapiens
gtaggttatctcttcagtttgttaatagtttctttgctgtgcaaattttttttagtttaactccatttctctatttttgtttttaatgcctgagattttgaggtcttattttaaaaatttttgcccagcccaatgttacaaagtgtttctctatgttttcttctgttagtttcatagatgatggttttacacttatgtcttccttctattttaagtttatgtttgtgtatggtgagagacaggagtctaatgtcattcttctccatgtgaatatccagttttaccaacaccatttattgtctttgccccartgtgttgttcttggcatctttattgaaaatccattgactttaggtgcttgaatttatttccacactttatattttatttcactgatctctgtatctgttttatcccacgctgttttggttgctacagctttatagcatattttgaagtcaggtagtgtggtgccttcagctttattcgttttgttcaggactgctttgtcaatttggggttttttatggttccatatgaattttaggatttttttctacttctgtgaagaatgtcattgaaatttttataaggatcgtaataaa

SEQ ID NO: 158108 - DNA, 453 bp, Homo sapiens
ggaaggaagcttggaggaagagtttaatctgaaaaatacctaagagctactgagtctccacctgcaactctgctaagrataaggaaagccactgggtctagaaaccagtaactttctgagatttttaccatcattcagaggtgaatctcttcagaatccagcattggtcttgacgagctaggcagccaccttaagaactcagaacagtttatgcaggactactggtgggtaggaaaggtagaatggaaagcagaaatcagagattgtcactcagaaacatacaattctcccttctagtcaagtgcaaaccagcccagggcttgataaccacaggccagtctgtatcttcaatatagatgcctgccagttatttagctcatttcagttttgttgtggattctcccttctgcatgtgtttttcctcctctctgatttctaagccaagcttttcag

SEQ ID NO: 158109 - DNA, 454 bp, Homo sapiens
ggaaggaagcttggaggaagagtttaatctgaaaaatacctaagagctactgagtctccacctgcaactctgctaaggataaggaaagccactgggtctagaaaccagtaactttctgagatttttaccatcattcagaggtgaatctcttcagaatccagcattggtcttgacgagctaggcagccaccttaagaactcagaacagtttatgcaggactactggtgggtrggaaaggtagaatggaaagcagaaatcagagattgtcactcagaaacatacaattctcccttctagtcaagtgcaaaccagcccagggcttgataaccacaggccagtctgtatcttcaatatagatgcctgccagttatttagctcatttcagttttgttgtggattctcccttctgcatgtgtttttcctcctctctgatttctaagccaagcttttcaga

SEQ ID NO: 158110 - DNA, 576 bp, Homo sapiens
cctgccagttatttagctcatttcagttttgttgtggattctcccttctgcatgtgtttttcctcctctctgatttctaagccaagcttttcagaagcaaagaaacttcagatctctgcytcaatctccaatgcctttcagttttcaggaattccagacatgatttcctcttttctggatgctgaatggaaagaaaatctttgagagataagtgatgttggagataggtagaagagagggataaaatgagagggagacaatgttaggagagtagaaagagggacaaatgtctctttgttcccaagctgaaattatttccaataaatcacaaggaaaatcatactaggtccagtctctcttcccttctcctggatgacaccttgtgagagccgtttacctttctggccacttaaggttttaaaaatgtttaactttgatactgaagacccatttccaggtattaaaaaaccaagtccagcccaattttaaacttcagcttcactatcaattcaaagcatgggtcctaccttgtaagttcagatctgatgtgtagcttgggtcatacagtggaaaggt

SEQ ID NO: 158111 - DNA, 414 bp, Homo sapiens
gatctctgcctcaatctccaatgyctttcagttttcaggaattccagacatgatttcctcttttctggatgctgaatggaaagaaaatctttgagagataagtgatgttggagataggtagaagagagggataaaatgagagggagacaatgttaggagagtagaaagagggacaaatgtctctttgttcccaagctgaaattatttccaataaatcacaaggaaaatcatactaggtccagtctctcttcccttctcctggatgacaccttgtgagagccgtttacctttctggccacttaaggttttaaaaatgtttaactttgatactgaagacccatttccaggtattaaaaaaccaagtccagcccaattttaaacttcagcttcactatcaattcaaagcatgggtcc

SEQ ID NO: 158112 - DNA, 391 bp, Homo sapiens
tcaatctccaatgcctttcagttttcaggaattccagacatgatttcctcttttctggatgctgaatggaaagaaaatctttgagagataagtgatgttggagataggtagaagagagggataaaatgagagggagacaatgttargagagtagaaagagggacaaatgtctctttgttcccaagctgaaattatttccaataaatcacaaggaaaatcatactaggtccagtctctcttcccttctcctggatgacaccttgtgagagccgtttacctttctggccacttaaggttttaaaaatgtttaactttgatactgaagacccatttccaggtattaaaaaaccaagtccagcccaattttaaacttcagcttcactatcaattc

SEQ ID NO: 158113 - DNA, 391 bp, Homo sapiens
tcaatctccaatgcctttcagttttcaggaattccagacatgatttcctcttttctggatgctgaatggaaagaaaatctttgagagataagtgatgttggagataggtagaagagagggataaaatgagagggagacaatgttaggagagtagaaagagggacaaatgtctctttgttcccaagctgaaattatttccaataaatcacaaggaaaatcatactaggtccagtctctcttcccttctcctggatgacaccttgtgagagccgtttacctttctggccacttaaggttttaaaaatgtttaactttgatactgaagacccatttcyaggtattaaaaaaccaagtccagcccaattttaaacttcagcttcactatcaattc

SEQ ID NO: 158114 - DNA, 553 bp, Homo sapiens
tattacattctgtattgctttaacattttacaatgattaccattataggaagagggaaaaactttttaaaattttaatgaatatgaactgtcttgcctattcaaccatcatacttaagatggtaccagaattttctcagttatataaacattagttggtgaacctgggattccccatcccccagcctttcttctggttagatctagtccatatttgatagaataaggaccactagggttaaactcaggtgatttggtctaaactgatcccatccctgttggcctgtgctgaacctcttatctctggcgtgtaggtcccataggaggctggaaagtagaacttcatcagcagtgagtaacagaaaggttaatttgggccagatttagacttacatgtacattgagagtgtgcctaagaaaatgaattaggattagatttgggacacmgaacagaattgagtaagaaaatagaaagtcacaaacttttataaaaatccagacaagtctttacagaggaaatgcgtaaatctatgtctagatacttttatttccct

SEQ ID NO: 158115 - DNA, 553 bp, Homo sapiens
tattacattctgtattgctttaacattttacaatgattaccattataggaagagggaaaaactttttaaaattttaatgaatatgaactgtcttgcctattcaaccatcatacttaagatggtaccagaattttctcagttatataaacattagttggtgaacctgggattccccatcccccagcctttcttctggttagatctagtccatatttgatagaataaggaccactagggttaaactcaggtgatttggtctaaactgatcccatccctgttggcctgtgctgaacctcttatctctggcgtgtaggtcccataggaggctggaaagtagaacttcatcagcagtgagtaacagaaaggttaatttgggccagatttagacttacatgtacattgagagtgtgcctaagaaaatgaattaggattagatttgggacacagaacagaattgagtaagaaaatagaaagtcacaaacttttataaaaatccrgacaagtctttacagaggaaatgcgtaaatctatgtctagatacttttatttccct

SEQ ID NO: 158116 - DNA, 436 bp, Homo sapiens
ttgatagtgtttgagtacctgttgtaccagcagccagaccaatactgagctgacccattgaggagaataacaaagaaaacaaattagatctgaaagtcatgagctggacacaaactgtcctcacctgaattctactttgctaatgccctcctctttwgtttagtgtgttgtctgcccatcacctgccaagccaaaggacacctggcttctagttcacccacactgcatgtaagaccctgggcaagtcacgtttcctctctgggcttcagttaccttgcctttgttccctttccgtaaataaaattgcagataaccccataatcatagcaacctgatgagatggggtcacttccaatacttctgtgttttagtctcacttctaggagtctctctctttcctctaccccttgacaaaacaatatatccctgacactag

SEQ ID NO: 158117 - DNA, 436 bp, Homo sapiens
ttgatagtgtttgagtacctgttgtaccagcagccagaccaatactgagctgacccattgaggagaataacaaagaaaacaaattagatctgaaagtcatgagctggacacaaactgtcctcacctgaattctactttgctaatgccctcctcttttgtttagtgtgttgtctgcccatcacctgccaagccaaaggacacctggcttctarttcacccacactgcatgtaagaccctgggcaagtcacgtttcctctctgggcttcagttaccttgcctttgttccctttccgtaaataaaattgcagataaccccataatcatagcaacctgatgagatggggtcacttccaatacttctgtgttttagtctcacttctaggagtctctctctttcctctaccccttgacaaaacaatatatccctgacactag

SEQ ID NO: 158118 - DNA, 525 bp, Homo sapiens
gttatactaaatgtcccgtcctgatgccagcatgatatgtaaagccctggagaatttacatcacatcctggaaaaagaggggaacaaaaaggagaagaagaagggggataatgagaaaaaattttgaattgacagtttaaatcctgaatgtactatgttcaaaactgaaagygagttgctttggtttggaaaaggttcattttaccttcagtggaaaagattgaattcagttaaaatgaaattttaagaagttatttttgttgcacacctgtattaaaactgtaaattataaacctgctacgcttcccagagtttaaagcaaaaaatgccaccagggggaaagagaaccatgaaaaagttaagaggcacaaaagatagatatctgctcaataaaagttctaagagaatataaaaagaggatgataatatttaaaaagaaaaaaggaggaaatttatttgagcttaaaaacaaatcttaagccttcagatccaaagagctcaccaagattctaataccagtactga

SEQ ID NO: 158119 - DNA, 359 bp, Homo sapiens
ccatctcttgacggaggcatctatcaatatcttattgcaggaagagaacattggatgggatgtaatttggtatgagtatcttttaaaaattaagtgggctacactatgcatctgtaaatcctttcaaatctatctccagaaaatattttgaacctgacytccatcttcactgctatcattctagaccagatgactatcaaattgttttagactgtggcaattactttcaaacttgtctgtctgttatactttcaaattctcttttgtcaattcttcacacaaagccaaaatattctttccctgtgctgccaatgtccttttgaataaaattcaaagtccctgaattggacttcatgaat

SEQ ID NO: 158120 - DNA, 550 bp, Homo sapiens
tgtttctggtaaccatcattctacactcttatcttcatgagatcagcttttttagctctacaaataagtgagaacataacatgttttttttttttgtgcctggtttattttacttaacgtaatagcctccatagttccatccatattgcttcaaatgacacgatttcattcctcttccaatagctgaacagtaccccactgtgtatatatgccacattttctttatatatttatacattaatgaacacttaagttgaatccatatcttggctattgtgaatagtgctgcaataaacatgggaatgcagatatctctttgctatactgatttttttttatttttgktgtgcacccagcagtgggatttctggattatatggtagttctacttttagttttttgaggaacttccatattggctgtactaatttacatttctaccaatggtttagagtgttcccctttcccccatccttgccagtatctgtattttttctttttgataacagccattttaattggggtgagataatatctcattgtggttttg

SEQ ID NO: 158121 - DNA, 595 bp, Homo sapiens
atcctctcttcagcacctggtggttccttctcagcttcattcggtggaaactttctcttcaaaagggcaaaaggtatttccaaagtctctactttcccagggagagttttgaagagacttcatccaaacctgtggcttcaacaattacctggattctgaacctggtcttcctgctccaatctccctcctttgtctatttgtctattcatttccscaagacacacactgaaatacacattgcttttatactgaagtagttcagaggctcctccccattttctatagaatagagtccatgctccagagtccagcaggtaaagtcctctatgatctgaccacctgcttcctatatcttgcatcacaattgatgctgaaaccactctcagctccttattgctttcatgcctttactataataacttcctccttggcctggaatatccttattatgcttcattgcctttgaaaccttgcttgttgtttaaggcctgtgtcacatgccaccccttgcattgccaagtctccctgcctatttgttagaattaattgttccaacgtgctttcacagctcgatgcttgaatatttatttattta

SEQ ID NO: 158122 - DNA, 397 bp, Homo sapiens
gagggtactataaagagctgtacacagctacaaccccaggtttatgccacrtcaggcacgtgctgggcactgagcagatgggggtgaatgaaaggacagaccatgtcaatggttgctaggacgaatgcttagggatttgggaatcttcccgcagactagttttcctgcctcacatcatgccattttctttaccaaatcccacatagaacatggtcaatgccccgcacatatctcctattacgagacttttgcctgggttgctttttccattctctcagacataaatacttatagatcctttcatgcccatttcaaatgtctctacctctatgatctctgattgattccctgggcagaattaagctccctccttcccactttagttttattcttctag

SEQ ID NO: 158123 - DNA, 551 bp, Homo sapiens
acgaagattattttctgctcagttccacaaagaaaatcagtggctagggtattacatgaattatgagtgactacaatcttcaggcttattattggaatagagtgctgtgttaatttttcaatatattttctttcaaagagctatttcwcctattcccgtgcctcttccttgatactattttgacacggatgatcctggataattaggtcaataattccatagatgttattaaccttttaatttggaataattttcagaaaaattggaagcagagggtgagagactgggttctagctctgtcactaaaagctataagctttgaaaaagcccgttactgtgagactcagtttcctcacatgcagtttgttcagatgaactttgaggaccatctcaattctaggaatctaaagtctcccactaacttgtaagctccttattgtccacttgaacattgtttctgttattttttttcctggattcctgttatactcagtagctttcctagtaaaagaagacttatattctgtcatattttctgtctcactgactca

SEQ ID NO: 158124 - DNA, 586 bp, Homo sapiens
cacactttaaaacaaccagatatcaaaagaactcactatcgtgatgatagcaccaagagaggatagtgctaaaccrcgagaaaccgttcccatgatccaatgacctcccaccaggccccacctccagcactggagatgacatttctatgtgagatttgggtgggtttcttttgagaagcctatcccaagccagcaggatgggctggccactgaacatcaagactcaggtcaaatgtcctctattcagaggatttcctcgactacccaattaatctagaaaaatacttgtcaggcatttcctttcatgtttgctttgatttataaagcttaccactctttaaaatcatcttatctgcttatgtttacttgatttgaatttatctccctcttagaatgtcagtttcatgagagcaggctccctctctgtcttgttctccactgtattcttaacacttagatcagtgcctggcacataataagtgttagtccgaactgcaccattttgtaaaccacccactattttgcagaccttggtcaaagtgaaacattcatgggggttctggctgtgagaaacatcctgcctaac

SEQ ID NO: 158125 - DNA, 586 bp, Homo sapiens
cacactttaaaacaaccagatatcaaaagaactcactatcgtgatgatagcaccaagagaggatagtgctaaaccacragaaaccgttcccatgatccaatgacctcccaccaggccccacctccagcactggagatgacatttctatgtgagatttgggtgggtttcttttgagaagcctatcccaagccagcaggatgggctggccactgaacatcaagactcaggtcaaatgtcctctattcagaggatttcctcgactacccaattaatctagaaaaatacttgtcaggcatttcctttcatgtttgctttgatttataaagcttaccactctttaaaatcatcttatctgcttatgtttacttgatttgaatttatctccctcttagaatgtcagtttcatgagagcaggctccctctctgtcttgttctccactgtattcttaacacttagatcagtgcctggcacataataagtgttagtccgaactgcaccattttgtaaaccacccactattttgcagaccttggtcaaagtgaaacattcatgggggttctggctgtgagaaacatcctgcctaac

SEQ ID NO: 158126 - DNA, 610 bp, Homo sapiens
cttgtagagtttcagcttgatagagcttcttctagtctgataggcttccctttataggttacctgacctttgtctcttgctgcctttaacattttttctttcattttgaacttggagacatctgatgattatgtgtcttggggaggatcttgaggagtgtcttactggggttctctgcatttcttgcatttgaatgttggcctctctagctaggttggggaatttttcatggttgatatcctgaaatatgttttccaagttgctttcattctccttatctcttttaggaaccccaatgagtcatagattgatttatttacataatcccacatttctcagaggttttgttctgcagcagagtgctaacasatgcagaggtgcctgcctctctgcaggtgttcaccacagtggtagaccaatacagatggggggcagggggtgcctgctggagatgtgtgggtggttgcactggaggtggtgctggcttgtgggtggggtgctggtctgttcatgtctgggtgccttctctgtgccccacaagcaggaataattgctcagtttgtgggaatatctgctgtcttccatgcagtgttagtggaagggtaaggta

SEQ ID NO: 158127 - DNA, 546 bp, Homo sapiens
aaattgatgctgtattttctaatgagtattttcatttgtgccagagctcattaaatcctattaccttcatgatcatttacagaggtttaaatagtccaatatcccacctttatttatgaaaagcatatgttttggcaatttgttgtaataataaacagtatttatttcattgcttgttcactttaatagcagtaacataaacatgcaatggaagaggaaggaagtcagggaaataagaacaactgcttagaaaaatagagaacagaaccaattcagaagaaaacttgagatgttttgaattattaatgaattaaaattgaagtgaacatatcattagcctcctaaaacaaggtactttggagactgaaaggggcatggcaaataattctgtctggatcacaggtgatatgtgaactgtgccagtcaggtaragatggatgatccccctaattaaagtactcttttcaaatccctttgtttcagattattaccacttcttatcactataatctaaagtgctaattagtaggtctaggaatatctata

SEQ ID NO: 158128 - DNA, 433 bp, Homo sapiens
attacaaatgaccaccaatatctggttctcttctccttttgagcactcagaagaatagacttattagccaccttgaaactgggtagtgccatgagattagttctggccaatgtgaaaggaagcagagccatcccaaagcgtgaggtgccctggacctattttgctctatataaacaatttgatctaaaaatgtatatataattcatgggctcatgtaagttatagttatttatcagcgaagatttagaatwgcaattagagaagaggtacttaggtacctgattgctggtcaagtcagagcaagtgaagatttttttgtagtgttcaggcaccatctctttggattcaagttggggaactatcttttgccttctttattagcaaatgcaccacttttggctaattttatatttcctactggggagaaaaaggt

SEQ ID NO: 158129 - DNA, 433 bp, Homo sapiens
attacaaatgaccaccaatatctggttctcttctccttttgagcactcagaagaatagacttattagccaccttgaaactgggtagtgccatgagattagttctggccaatgtgaaaggaagcagagccatcccaaagcgtgaggtgccctggacctattttgctctatataaacaatttgatctaaaaatgtatatataattcatgggctcatgtaagttatagttatttatcagcgaagatttagaatagcaattagagaagaggtacttaggtacytgattgctggtcaagtcagagcaagtgaagatttttttgtagtgttcaggcaccatctctttggattcaagttggggaactatcttttgccttctttattagcaaatgcaccacttttggctaattttatatttcctactggggagaaaaaggt

SEQ ID NO: 158130 - DNA, 539 bp, Homo sapiens
tttaaaatggtatttcagcttgattaggaactccaaggggagagggctgatccagactagaatccagacagcttgttcacccactgtattttgcccagtagagggcacttggaactcacacataaattgcagtggcatcagtggtagcggcggcagcagcagcacttaagatatccrttttcattgccatggtgattcttttttttttttttgagaccgagtttctctcttgttgccccaggctagagtgcaatggcgcgatctcggctcactgcaacctccatctaccaggttcaaacaattctcctgcctcaacctcccaagtagctgggattacaggcacccgccaccacgcccagctaattttttgtatttttagtagagacggggtttcaccatgttggccaggctggtcgtgcactcctgacctcaggtgatctgcctgcctcggtcccccaaagtgctgggattacaggcgtgagccacagcgcccggccgccatggagattcttaattaacagataacatcaggttttcat

SEQ ID NO: 158131 - DNA, 590 bp, Homo sapiens
ttctggtgttgcgtagtatatctccaactctaaaattttattactcaggtctttcagtacagcatgtggtcaggttgtattattatttgcaaatatttactccacctttttcccaatgggaggaaaattacccatgccatcatgctgagcttggtcaatggaatgtgagaagaataacgatgccaatttcaagsaaagaccttaaatatgatttaagaataaaggcattagcctcttgcctttcccttttgccatgagaatgcatgtgttatgagaatgcatgagtggctgcctgtcagcctgggtccctgaatgtgaagctctatggaacagagccaaggttttcagagccaagtgacactcgctggcatgttacttgggcaagaaacctgtttactgttgtaagccactagagttttagggttgctttttgtgcagcaaactgactcatatagaaattgatatgacgagtggggaactactttatgaaaataaaaatggtgtcacaattgcttcaggataaagcagtaggtggtaagaaaactgtaaaggaaattgaaaaaaagtggtgatcgatgtaatatagtttt

SEQ ID NO: 158132 - DNA, 468 bp, Homo sapiens
gaatgaacaaaacctccaagaaatatagaattatgaaaagggaccaaatctatgacttgtttgtgtcctggaaactgttggggagagtgtaagcaacttggaaaatatatttcaggatatcatgcaagggaacttccccaagctagtgagagaggccaacattcaaatttaggaaatgcagagaaccccagtaatatgattcacaagaagatcatccccaagacacataatcatcaaattctccaaggtcaaaatkaaagaaaaaatgttaaaggcagctagagagaaaggtcaggtagcctataaagggaaactcatcagacgaacagcagacctcttagcagaaactctacaaggcagaagacattggggaccaatattcaatactcttaaagtaaagaaatttcaacccacatttacatatctggccaaactcatcttcataagccaaagagaaataagatcctt

SEQ ID NO: 158133 - DNA, 468 bp, Homo sapiens
gaatgaacaaaacctccaagaaatatagaattatgaaaagggaccaaatctatgacttgtttgtgtcctggaaactgttggggagagtgtaagcaacttggaaaatatatttcaggatatcatgcaagggaacttccccaagctagtgagagaggccaacattcaaatttaggaaatgcagagaaccccagtaatatgattcacaagaagatcatccccaagacacataatcatcaaattctccaaggtcaaaatgaaagaaaaaatgttaaaggcagctagagagaaaggtcaggtagcctataaagggaaactcatcagacgaacagcagacctcttagcagaaactctacaaggcagaagacattggggaccaatattcaatactcttaaagtaaagaaatttcaacccacatttacatatctggycaaactcatcttcataagccaaagagaaataagatcctt

SEQ ID NO: 158134 - DNA, 567 bp, Homo sapiens
gctagtgtcttattcatttcgrtctgctataacaatataccatagactgggtagcttataaacaacagaaatttatttctcacagttctgttggctgggaagtccaaaagcaaggagcaggcagagtcagtgcctcgtgagggcccattttctgattcatagatggcaccttcccattgtgtctttacttggtagaaggggcaaggttgttctctggacctcttttataaggacattaatcccattcataacagctccaccttcacaacctaatcacctcccaaaaggcctcacctcctaatgccatcaccttgggggttagaatttcaatgtgtaagtgtttggcgaacacaaatattcagagcatagcagccagcatttaaaataaaaagctatcattattcaatgaaaacccagtgtggtgcttcccactagctctgcagcaaattaaaggaggtgtgtggaccaaaatgtgttatcactaggaaatacaggaaagcacagaccattccctgcttttggagattcaccatgcacataagctgattaaaggctctgggaagtctt

SEQ ID NO: 158135 - DNA, 501 bp, Homo sapiens
tgagttattggttacttgcttttcaacaacaacccattataggaaaattatattctaaggtagttgtacttaatgaattttgcttaatctttgcctacatttgatttgccaaatctcacactcatggcattttcttcttttttttttttttttattgataaaagctgcagattgtcctgaaaagctattatagttcaatatggctgtcttccttgacatttacatggatctcaactttatttattttactgcatagtacctagctgcctggctggagaaatgaagatcgcacattcagcaatttatgcaatcccagtcaaaagactattttactgtctgttgaataattagcaatgtgtgtgaagaaagaatatacagtaacytgcctgactttgggcaaaaaaaaaaaaaaaagattagaatgacaaatagtcagactctagggtcaaatgctttgccagtagttgcatatgtttatgccaaaatacataaagaaatgtc

SEQ ID NO: 158136 - DNA, 589 bp, Homo sapiens
ttatatagggttttccaagaacccgagagattttgttttcctattgcaaatccatggaaagcaaactgctataagtagatgtggtgcctctgcaggtgaatgatttctgaatattggttttttaactggaaggggaattctaatcttggtggtgctgggaaaatcattttagatatttatgtctagtgttccattattggaagactaagcatgtaagagttatttatatcctactgcttaaggtcttcaccaaggtctgatcgcaaaaattcaaaaaattgcaacctctggcataaaggcgttaattttttccccattttcccatmtgctaagtcattttaacactagtgtttgaagtgaaacaaacttatcttcttagaatgagttggttttgttaaggaaggctgccacacaagaattctggtttgtgaatcagtgtaatatccaatgtaaaacatgaactgaggggtacaaacacttctttactgagcaatgtctcttttttaaatctttattattattattatactttaaattctgggatacatgtgcagaacatgcaggtttgtcacataggtatacatttgcc

SEQ ID NO: 158137 - DNA, 516 bp, Homo sapiens
ttctcagagaaggacaggagtgtgttgggatatagagggttttcagtgtgttttaaagttaaatgagcattatacaaagaatatataaataaaagatccacataagaggcagaaagttgaaatatgagagagaaataatttctctgatttttgtaaccattaacatgtggttaccttaagacttaatgagattttaattaaaacataagaactatttcaaaacattttatgttggctttaaatatctgcttccatttaattcaatgtgaggaattakgctaggtttcatggaggaataaaaagatgaatcagatggaagacatcaaggaatttataatataacaaagaaatgacagacatagaaataagcaatagacaatgcatgatttatgatttaattgaagcaaaaagactatggacacagatgttcaatagaagtttatctgcatattttgtagcaataatgcatttaagcaacaagcctagaacataggtcttgggatggcagtaaaactt

SEQ ID NO: 158138 - DNA, 458 bp, Homo sapiens
tgtacgtcatgcttcctattagttaataacaatgtattacatgttttaaaattgctgaaagagtagattttgtgttctcactaccaaaatataagtatttaatgttaaataatttgatgtagccattctacaatgtatatgcataacaaaatatgctgtacaccataaatatatacaatttttgtcaattataaaataaatttkgtcagaactgttgcttgcttgcttgttcctgcagagaagggtgatttggggtgaagaggaaggagataaggaaatgatctcttgtgagtggcacaggttgaaagttgcctacatgtgaaaaaaagcagagctgagcacggacactgaggaaataattttgtagtagtcaggtcatgatccaagttgctaaggagcccaagtaattaaatatggctgaaatcttgatagaggggcatttttttcacctccattta

SEQ ID NO: 158139 - DNA, 458 bp, Homo sapiens
tgtacgtcatgcttcctattagttaataacaatgtattacatgttttaaaattgctgaaagagtagattttgtgttctcactaccaaaatataagtatttaatgttaaataatttgatgtagccattctacaatgtatatgcataacaaaatatgctgtacaccataaatatatacaatttttgtcaattataaaataaattttgtcagaactgttgcttgcttgcttgttcctgcagagaagggtgatttggggtgaagaggaaggagataaggaaatgatytcttgtgagtggcacaggttgaaagttgcctacatgtgaaaaaaagcagagctgagcacggacactgaggaaataattttgtagtagtcaggtcatgatccaagttgctaaggagcccaagtaattaaatatggctgaaatcttgatagaggggcatttttttcacctccattta

SEQ ID NO: 158140 - DNA, 593 bp, Homo sapiens
ggggtgggctcccatggccttgagcagctcctcccctgtggctttgcagaatacaacccctgaactgctttcacaggctgttgttgaatgcctatggtttttccaggtgcatgatgcaagctatcgatggatctccctttctgggctctggaggatggtggccctctctcacagctccactaggcagagccycagtgaggaatatgtgtgtgggctccaaccccacatttcccttctgcactgacctagcagaggttctctatgagggccctacccctgcaacagacttctgcctggacatccaggtgtttccatacattctctgaaattggcaaaccgtcccaaagctcaactcttgtcttctgcgtaccacaggcccaacaccacatggaagccaccaaggcttggagcctgcaccctctgaagcaacagcctgagctgtacttggccccttttaggcatgggtggagctggagttgctgtgacacagggcaccaagtcccaaagctgcactgagcaacagggctctgggcccagctcataaagcaatttttcctcccgggcctctgggcctatgatgagcaggactacca

SEQ ID NO: 158141 - DNA, 593 bp, Homo sapiens
ggggtgggctcccatggccttgagcagctcctcccctgtggctttgcagaatacaacccctgaactgctttcacaggctgttgttgaatgcctatggtttttccaggtgcatgatgcaagctatcgatggatctccctttctgggctctggaggatggtggccctctctcacagctccactaggcagagcctcagtgaggaatatgtgtgtgggctccaaccccacatttcccttctgcactgacctagcagaggttctctatgagggccctacccctgcaacagacttctgcctggacatccaggtgtttccatacattctctgaaattggcaaaccgtcccaaagctcaactcttgtcttctgygtaccacaggcccaacaccacatggaagccaccaaggcttggagcctgcaccctctgaagcaacagcctgagctgtacttggccccttttaggcatgggtggagctggagttgctgtgacacagggcaccaagtcccaaagctgcactgagcaacagggctctgggcccagctcataaagcaatttttcctcccgggcctctgggcctatgatgagcaggactacca

SEQ ID NO: 158142 - DNA, 416 bp, Homo sapiens
ggcccttacttagtaaatgtctttgtctctctctggcgtagaggcaaaaaaagagatgaaagtgagagagagggagagagagagagagagagagagagagagagagagaatgagaattgtgtccccagctgagccagagtaaacacccagctttgcaatatatcttaggagaggcaatagtttttcatatttgaaattaaattttaagagatctacttggaataagtagttattaccagccaacatatttacttttgaattggctaagcaattttaggaaaaaatttaartattttgtactcgatcttcctaaaatttggctatacttgtcattttgctgttcaaaacctttccattaaccttctcttcctggagaagggaataaaactcttaagcctggtccctgacactcctca

SEQ ID NO: 158143 - DNA, 534 bp, Homo sapiens
ttccctaaaatgatgagattatggatagtcttgttcatctttttttctatctttcagtaatttccaacatttctaaaatatacattattatatttacagtgaaaacacaccatatgccaatttacataaaaactcagtgattttatggaacttcagcacaaagcaaaattatagctctttgccgtttagttgtcatttcagggtttcaaggcaaataaaacataaaatatttgttttactttcttgaaaatatttgtaaaatatgcctgggtgaaactgtttttcgtttttgtattttatttcccaaaccttctttagacaaaattttaaaatttttcttaactccacaagagcagagatataccttcttcatctttctatgtatatacctaattacacatattacaaaatgccctttcaataaatattgttgcctgaatatatgaattctttttgatggctcctrttctttctcacaacaactttatgtgtcctgtaacacttggggagataaatatatatctttttcatgct

SEQ ID NO: 158144 - DNA, 630 bp, Homo sapiens
gtgctgcccaactcatgaatggctgtttgctcaaataaactctttaaaatgttattatgcctgagcttaccttttaacatgtgaaagagttagaggtgaaatccatcgcctttcaaatacacagaacacactaatgatccattttcttttgaagtttgtttgtgatttcagtttttttcctctaacagtaataggactatcctaattcctgtggcatgcatttgaactcccagtaacaatatatgattttttgtttagaggacagggrtagtccctgtgtagtgtccaacagctctagttagaactgtgccttcattagaacctagtcctgaaattttttttctcaattcactggcccagacatgagcaacattttcaccaactggtaagacaggcttattcaaaaccagggctggaactcagccaatctaccagtacagaagtgctgctgctcatcacagcagaacctcctttggtaaaagatctgtggagaatgaatgacagctagatctctaagccactgctgtacagtgaaccgaagaaaagcaaaggcaggcaaagaaaaaataggaatactctaaggtttctaagctgctcaacttccaaccacctggcatgggtgggggacca

SEQ ID NO: 158145 - DNA, 630 bp, Homo sapiens
gtgctgcccaactcatgaatggctgtttgctcaaataaactctttaaaatgttattatgcctgagcttaccttttaacatgtgaaagagttagaggtgaaatccatcgcctttcaaatacacagaacacactaatgatccattttcttttgaagtttgtttgtgatttcagtttttttcctctaacagtaataggactatcctaattcctgtggcatgcatttgaactcccagtaacaatatatgattttttgtttagaggacaggggtagtccctgtgtagtgtccaacagctctagttagaactgtgccttcattagaacctagtcctgaaattttttttctcaattcactggcccagacatgagcmacattttcaccaactggtaagacaggcttattcaaaaccagggctggaactcagccaatctaccagtacagaagtgctgctgctcatcacagcagaacctcctttggtaaaagatctgtggagaatgaatgacagctagatctctaagccactgctgtacagtgaaccgaagaaaagcaaaggcaggcaaagaaaaaataggaatactctaaggtttctaagctgctcaacttccaaccacctggcatgggtgggggacca

SEQ ID NO: 158146 - DNA, 513 bp, Homo sapiens
caaatttagtaaacagactgggagaatactaagctgctctgtatctattaatttctcttggttacatacactttattccaggagatgagaagactcaaggaaatctagagaacttcctgttgtaggaaaatggtgtagatacacttttcccgatgcctcccactaagtacaactagacgcattgggcattatatataaaacaaacgtaggaagactcttttgttatagtccaacatgtctttcagattgtttgcttcttcactttttttagtttatttcctctctctggttcagattggataatttctagtgatctgtcttcaggtcactgatttttccctctgttctctccaktctcctattgaacccagtcatttttattttggttactgtattttcagttctaaaatttaactttcgcgtcttttaaaaatgtatcttctattactttgtttagtcttttgatttctttgctgaggctctcgattttttttcagttgtttccatcatttt

SEQ ID NO: 158147 - DNA, 523 bp, Homo sapiens
acaaaatgagatggaatagaataatcaacattttaatgttacatttgccagtgatcctactggttaaatgaccatttattttgtctgtgtggygtttgaagggttatacaagtaggagttaatttggttgatctagtaatgtattgtgcctatgtatgtaaatgcttttctgttctgcttgaaaatgtaagcagttggccattcagtgtgactcatcaggcttttaaaattcggggtgagaagcattagtaaaattgctgtgaaaaatgattcagcttgcacagctggatcaccttccaaaatgctattctcaagtacatttgttcagtaggagactgttgtgatctggtgcctaacttatctccctcctccttggatttacagacccaaggcaatactcacttcccttggaaaaatcctgtgttatgctgggtaaagagcagatcagaggagatgctgcagatgttcacagctaacaatgtcaatgcctaattggctttaaaaattccagaagagaggaaga

SEQ ID NO: 158148 - DNA, 413 bp, Homo sapiens
tcgtctactttgagtcgctgcttaaacacaagtgayggtggttgactcctttggcatagcaagctctgaaaaaaatagactttgcttttctcattgggacttcatttattcctgtgggagaaaaagagaaattaaaagaaaaagcaggcttataaaacaataaaaaatgaaattagcatgtcttgtcattcctcatatcatgattgccacagacacacactcaacctctcagaaatgagggtttgtagtgagattacgaagttcagtttccttttgttatatcctctacctaagcttcctaataatttatataatgaaatcttcagaattcatcattttttggggcaggggagacagggtcccactgtgttgcccaggttgaagtgcagtggtgcaatagtagctcactgcag

SEQ ID NO: 158149 - DNA, 577 bp, Homo sapiens
ccctgaaactctcccctttctatagtccaccaactgtgtctcgatcacttgccttcctgcaaagtttgggactcctgctcagacaaggcagtgatgcctcatcaacatcctagaatccgccactgccactcccaaccttctgccaagcctactgtatagatccctaaccctggataaccccgtcaagccctgtcactgctcttcttgctggactattagcaggagctgaagaaagtcacaaagctaagataattgggcccactgccatttcatgctaggtaaactcagaacttccccgctgctcagcaatcctytgatttatctatttctatatctatgggggatgcaggaaagtctcccacacagcagccattctacattactccactttattaacatcctcacatccctgtccctatgtatatcatctgaaggtcctaaccacacctattattctgggcaggattaaaatggaaaacttctgatttgagtttttctactttcttcaacatttcaaaatttatcagaggtcttcctctccccctctttgcctatcctagcattccataaaattgca

SEQ ID NO: 158150 - DNA, 572 bp, Homo sapiens
cagctggtaaatgggaatcaatttgcacctgctatactgcaaaaaattatattaaatccatattaaaagaaatagctttcatgagcatatatcttgtaccatcaagaacttttcacaaagactttgtctggaaggtaaaaggcttttccctccagtgtaaatagtatcacagacaatgatcaaaatgctcatgcttctataatttttgtgacacttttgcctctgtaaagggataaaatttttatctgaaactcctacatgatcaagagctgcctcttttgcaacaccaacaggagaaatagtgacaagctcccagtgtaargcacccatttaccttgctgaccctaagctgcaagtcattatatcgcctactttgaattaatggtgaaacatttatcttgtttcatacaatgcatgcctttttccatgctccacctttcacctgacctgtctgtatttttattatataatacttctaactatctgaaggtaggacagtcttattttctgactgatcctcctgctagcagcacataacaggtttctctttattattctatgttggtgtgctt

SEQ ID NO: 158151 - DNA, 420 bp, Homo sapiens
taaaagaaaacaaaagatcaattgtacaaaagggcaacagctggcaacttcaattggtgaamttggcaatgcaattcaaaagatattccacaatatccattgggatattcccaagtattccattgggaatactccatgccagtcattttcccaggatggtcttgttcaaaagtggcacattttagaagtgcatgtggcttacagagagcatgctgaattttattcaccatggtgtgtgctcacagcccagctcaagattcatgaacctgctggaaacgggagaaaaatgatgttaaaagctggggagctgcaggtgcttcacatgtgatgttctatctgtgtacagtaatccaggttaacaaccttccctgttaaaggcaatatggaatcgtttattaagtaaactctctctcacacaca

SEQ ID NO: 158152 - DNA, 420 bp, Homo sapiens
taaaagaaaacaaaagatcaattgtacaaaagggcaacagctggcaacttcaattggtgaacwtggcaatgcaattcaaaagatattccacaatatccattgggatattcccaagtattccattgggaatactccatgccagtcattttcccaggatggtcttgttcaaaagtggcacattttagaagtgcatgtggcttacagagagcatgctgaattttattcaccatggtgtgtgctcacagcccagctcaagattcatgaacctgctggaaacgggagaaaaatgatgttaaaagctggggagctgcaggtgcttcacatgtgatgttctatctgtgtacagtaatccaggttaacaaccttccctgttaaaggcaatatggaatcgtttattaagtaaactctctctcacacaca

SEQ ID NO: 158153 - DNA, 497 bp, Homo sapiens
gattaaatcctgttaaaatttatcagctatttttaaaaaatggatataacctagaaagaaacagatgacaacagattttacaactttcactgtggatggctaaagactgtggaatactatcatcagcatcttcaagtgaaatcacatatcgatgtaaaacatagtgaattaaatctatagtaaaaacagttaaaacaatttttcacacataaaagattgatatgytttaccaagtgcagatagatatgtttttaaatgattaatattttaataaattacaaaaaaaatatttcagcaattaactagaaaatcaaaataatcctagatctactttctgaaactaagtaatataataattgaaattatgggttaaatttataacatatagatgaacagataattggtgatattggtaatagcccagaagaaatatccagaaatgaagcactgagaaatgaataaacaaaaagaaagagagacagaagcacaagagatat

SEQ ID NO: 158154 - DNA, 569 bp, Homo sapiens
tcgtcccaccaaacaattcctgttcaatcaaaatacatcaagtgtagcttgctggacttaagtgccttgatcaccattgcaaaagtaaaaaacaaaaaacaaaaaacagcaaaggctgaacatataacagagagcgaaattagccaaactaagcaaaagaaatgacacccctcccccaaataacactaacatgaatatttcaccgtatgttctaaagtttaaaacaaagcaaaaatgaattattatttgaatatttgaataatacatgaagcagascactaatttctgaaggagattttgtactcaaagagtttaaactctactgaggaaataagatatctgtaatattgaaattaaatgaaagaagaatgtatagtagtagtaggtggtaatacagaatatatatgagacagagattaattagcaaatgagtgatacaccatgctatatgagtttataagaaggagtggacgatgattgtctggaaaagcatagaaagattattttggctttgaaagatacaatagaaacaattatatggtaaaatgatgaccctttcctaattctta

SEQ ID NO: 158155 - DNA, 569 bp, Homo sapiens
tcgtcccaccaaacaattcctgttcaatcaaaatacatcaagtgtagcttgctggacttaagtgccttgatcaccattgcaaaagtaaaaaacaaaaaacaaaaaacagcaaaggctgaacatataacagagagcgaaattagccaaactaagcaaaagaaatgacacccctcccccaaataacactaacatgaatatttcaccgtatgttctaaagtttaaaacaaagcaaaaatgaattattatttgaatatttgaataatacatgaagcagaccactaatttctgaaggagattttgtactcaaagagtttaaactctactgaggaaataagatatctgtaatattgaaattaaatgaaagaagaatgyatagtagtagtaggtggtaatacagaatatatatgagacagagattaattagcaaatgagtgatacaccatgctatatgagtttataagaaggagtggacgatgattgtctggaaaagcatagaaagattattttggctttgaaagatacaatagaaacaattatatggtaaaatgatgaccctttcctaattctta

SEQ ID NO: 158156 - DNA, 561 bp, Homo sapiens
tgataaatgtgttgtcaggcaaccaagttgttgcatgaacatcatagagtggactcacacaagcctacatggtgtggcctgctacacacctaggctatatggtatagcttattgctcctgggtcgaaaacctgtacaacatgtgagtgtactgaatactgtaggtgattggaacacaatggaaartatttgtgaatctaaacatagaaaagatactttaaaaatgcagtaatataatcttataggaccactgttatatatgagatatgttgttgactgaaatgtcatcatgtcgtgcatgtctatggttggtttgtcagcgtaaaatgattatctcttaatctccactccaacaatcaattaacttatttttaaattttcactccttttttgattttttaagttgaattctttattctttgtgaaatcatatctatacaatattttccatcattttcatcatccttgttttcatgttacatttataattatatatattaaatgctcactgtcagtcctttcaccccaaatttcacagtatcttttggttggataaagacca

SEQ ID NO: 158157 - DNA, 561 bp, Homo sapiens
tgataaatgtgttgtcaggcaaccaagttgttgcatgaacatcatagagtggactcacacaagcctacatggtgtggcctgctacacacctaggctatatggtatagcttattgctcctgggtcgaaaacctgtacaacatgtgagtgtactgaatactgtaggtgattggaacacaatggaaaatatttgtgaatctaaacatagaaaagatactttaaaaatgcagtaatataatcttataggaccactgttatatatgagatatgttgttgactgaaatgtcatcatgtcgtgcatgtctatggttggtttgtcagcgtaaaatgattatctcttaatctccactccaacaatcaattaacttatttttaaattktcactccttttttgattttttaagttgaattctttattctttgtgaaatcatatctatacaatattttccatcattttcatcatccttgttttcatgttacatttataattatatatattaaatgctcactgtcagtcctttcaccccaaatttcacagtatcttttggttggataaagacca

SEQ ID NO: 158158 - DNA, 561 bp, Homo sapiens
tgataaatgtgttgtcaggcaaccaagttgttgcatgaacatcatagagtggactcacacaagcctacatggtgtggcctgctacacacctaggctatatggtatagcttattgctcctgggtcgaaaacctgtacaacatgtgagtgtactgaatactgtaggtgattggaacacaatggaaaatatttgtgaatctaaacatagaaaagatactttaaaaatgcagtaatataatcttataggaccactgttatatatgagatatgttgttgactgaaatgtcatcatgtcgtgcatgtctatggttggtttgtcagcgtaaaatgattatctcttaatctccactccaacaatcaattaacttatttttaaattttcactccttttttgattttttaagttgaattctttattctttgtgaaatcatatctatacartattttccatcattttcatcatccttgttttcatgttacatttataattatatatattaaatgctcactgtcagtcctttcaccccaaatttcacagtatcttttggttggataaagacca

SEQ ID NO: 158159 - DNA, 498 bp, Homo sapiens
tttttacaatagatctatacattattttgaattaattttgtctatgatgtgaagttcattgaacttttttacggatggatgtccgagttgttcaagcactactggctgaaaagttaatcctttctcctatggaattaccttggtgcctttgttaaaaatcaattgctcgtaaatgtgtggatctatttctggactctcttttctgtttcactaatctaaatattttttccttaggctaaaattcactctattactcttgctttaatatctctcaaaatcaagtagtctatcaattaactgttcttccctatctagcgaattattactttctttatgttataggattttcagttatataatggcattttgtctactgatggtycttatttgttgactcacttttatcatttttcctctaattctttgaatatttatcttttaattctttgaatatatttgtaatataagctttgaagttttgatctactatatcccaca

SEQ ID NO: 158160 - DNA, 623 bp, Homo sapiens
gggccaattatgctgaatgcatagagggaaatacttgtaaaagtaattttttaatttacattttctttttgtcttaatattttattttaaaacatttcaaacatagagaaatacaaatgtgttcaatgaatacccatatatccaccacataggtgccatagttaactttaccatatttactttctcacataactattcatctatctktcccattgtttatccacaaatccacctaaatgaattaatgcatcttaaagtaggttgtatacagtaaacaaatattaaattctagttaatgatatgcatgctgaaacgttaacaacctataaatacttaagcatgtatatcattaactagtgctcaatatttatttttagtttttcaggtaaaatttttacataatgaaatgcacaatttttagcataccattcgatgggtgtgacaactgcatataactctggaaaccaagtacctttccagatatagaacatttccattaatctggaatgtttctccctgctccttccttatcaatacttaaacaggtgcaaccacttatctgatttttttccaccatagattagatttttctgttctggaactttatataagtgaaatcatac

SEQ ID NO: 158161 - DNA, 623 bp, Homo sapiens
gggccaattatgctgaatgcatagagggaaatacttgtaaaagtaattttttaatttacattttctttttgtcttaatattttattttaaaacatttcaaacatagagaaatacaaatgtgttcaatgaatacccatatatccaccacataggtgccatagttaactttaccatatttactttctcacataactattcatctatctttcccattgtttatccacaaatccacctaaatgaattaatgcatcttaaagtaggttgtatacagtaaacaaatattaaattctagttaatgatatgcatgctgaaacgttaacaacctataaatacttaagcatgtatatcattaactagtgctcaatatttatttttagtttttcaggtaaaatttttacataatgaaatgcacaatttttagcataccattcgatggrtgtgacaactgcatataactctggaaaccaagtacctttccagatatagaacatttccattaatctggaatgtttctccctgctccttccttatcaatacttaaacaggtgcaaccacttatctgatttttttccaccatagattagatttttctgttctggaactttatataagtgaaatcatac

SEQ ID NO: 158162 - DNA, 585 bp, Homo sapiens
atagtctaatgagacttccctgagacttttctcttgctgctttaacaattctttccttttctttaatgtttgaaactgattacaaccatccttggtgaaaatgtctttgggttgtatctttttgggrgcttcaagtttcgtggctatgaatgtttaaatctctcctaagacttgagaagtttttaacaattatttcattaaataagttttctgtgcctttcttgtctctacaactgtgtgaaatcaggaatgaatgttcaaatatctcccaaaacttgggaagtttttatcaattatttcattaaataagttttctgtccctttctatttctcttctcctgtgtgaaatcacataatgtgactatttgcttaatggtgtcccataagttgtataggctgtcttcactgtttttcatttttttccctctgactgagtcgtttcaaaatacctatcttcaagagacagattctttcgtctgcttgatctagtctggtgttgaagctctctattgtatttttttttttttttactttattggttaaattctttggctctaagatttctggtgggtttttgtgtgtgtg

SEQ ID NO: 158163 - DNA, 386 bp, Homo sapiens
aactgacatgatcagttctactgcttttcatgttcccttccaaaccctgtaaatttattatcattattacataaatacttttctattttttaaaaatgtaacactttctcttagttaaagttgaaaagattttaaaaaattgtacagtacaaatttcccttccaccatgtcttttgaccttctcgttcccatagtatgaarcaaccagtattactaatatcttggcatccttccagaggtactaccattgtggacttcattttgtaaaacatttttcttactgacaatattaacatacataaaagtagagataatggtataatgaacatccatgtacctaccacataacttcaccaattgtcaaattagtgctaatcttgcacctc

SEQ ID NO: 158164 - DNA, 454 bp, Homo sapiens
tttaaagaaaaccttataatagatgctttacaagtaatagacacataagcacacaaaaaaagacaagctactgattcctggctgttttgatttttgtttgttattgctgtcttgtcttaaacctggctagaaaactcttaaagagggtaaggattcagatttaaattttggagcacataactttttcctattctttacaagttaatgtttctgcaagtacttattgtggaaaattgtctagcgtgtttgaaatgaggagggagatgtagcaaaagtggtaggattaaaaagaaatcagtaatattttatagttgcttaagaaaacaaaggaaatcaaatcaacagtaatttctgcctctcagagaggcaatgtagcagcttgactstatgggaaattgtgggtttagggggaaatatttcagattcaaacattacaggaaagttacccaaggtg

SEQ ID NO: 158165 - DNA, 645 bp, Homo sapiens
cagcacccttttacctactttccctctcctgctaccattttcctatcaccagatatttagcattctccaactccaagcgggactrttctgagatcctgagctgaccttattctatatatgattagaataatctaacataattcagataagttattcacccaccatcatttgacaaagaaaacaaatcagaagatggttttcttccaattgctgccttaggaaagacattttctttttattgcatttgaaatgatttgccagtgagggtattcagattggtctgcttggatggatcagttgtctggcaggttttactgagaagatggaatacaaaaagtggatagttgaagtcagttaggttgccgatggggaagtggggaaactgaggacgagggtatgggctgagttggggaggccatctcaaggtgtgaggaagggaatagcacagggcaggcagccaaagctgcatcctgaggtgccagcataactgagagaggacgtgcagctggaggggcagccaggcctgccgcaagttcctgggaagtctcagaaggaaagagtcactgacagcaggaagctggaggggtgtgagcctgtcccatccctccccactgaggcagccttgcctcagggctaggtgtgccc

SEQ ID NO: 158166 - DNA, 645 bp, Homo sapiens
cagcacccttttacctactttccctctcctgctaccattttcctatcaccagatatttagcattctccaactccaagcgggactgttctgagatcctgagctgaccttattctatatatgattagaataatctaacataattcagataagttattcacccaccatcatttgacaaagaaaacaaatcagaagatggttttcttccaattgctgccttaggaaagacattttctttttattgcatttgaaatgatttgccagtgagggtattcagattggtctgcttggatggatcagttgtctggcaggttttactgagaagatggaatacaaaaagtggatagttgaagtcagttaggttgccgrtggggaagtggggaaactgaggacgagggtatgggctgagttggggaggccatctcaaggtgtgaggaagggaatagcacagggcaggcagccaaagctgcatcctgaggtgccagcataactgagagaggacgtgcagctggaggggcagccaggcctgccgcaagttcctgggaagtctcagaaggaaagagtcactgacagcaggaagctggaggggtgtgagcctgtcccatccctccccactgaggcagccttgcctcagggctaggtgtgccc

SEQ ID NO: 158167 - DNA, 640 bp, Homo sapiens
  misc_feature (1)...(640): n = A,T,C or G
cctatctactgtagattagtaataaaatttcctctttcccactgtttatcatgacacgtgtagtctgagaactttgctagctcagcaagtggaaggaacttcaagcatgaagtattycacaggccaaatcagtacaattcctgtacgttgtgcttgtgaaggacaattctgatttttccaaatattccagtaatttaaaatataatatggatacattttatgtcacattagattatgtaaatttgaaaatgcttttcatttgggaatataaacttttaattttaaaattcttgttccattttatgagagtataatctagatatagcaaaacatacaaatcaactctaaatacatatacccacccccatgtacttaccacccagatcaagagtagaacaattccagcactccagaagactcccctacccactacaagttactactcccctgggcaaccctacctggcccctaccactgtggattagttgtgccataaacttttattatcatgtatggggtcttctttataattaaacatttataaagaaaatgttttctttttcttactcttgttctttggcagtttgcagattcattcaactttaatccccacaaatggctattggtgnnnnnnnnnnnn

SEQ ID NO: 158168 - DNA, 626 bp, Homo sapiens
ttttgtggaacctgacaagctgattctaagatgcatatgaaaatgcaaaggacctggtcatggcaatcttaaaagtcacatctggaggatttacacaatcagataacaagatgtaagattctacagtagtaaagatagtgatggaggcacagacagagataaatggaccaatgggacaaaatacagaacccaaaaatagacccacatatagtcatcatctgatttacaataaaaacacactgtaattcagtggggagcttttaaaataaatggttctgggtcaaatggatcttcacctagaaaaaaaataaactttgagcctctacctcacattataggagaaaattaatttaaggtaccacatagactcaaatgtgaaagttaaaacaatcaagcttctggaagaaagcttaagagaatttatcagaaacttggtgtgggcaaaaactccttaaamacaaaaaacacaaactatgaaagtttgaaaaactagacttccttaatattaagaacttctgttcatcataacacaagatgaagataattaacaatcagctgtagattgggagaagatatttgtgattaatgtatctgtcaaaaaaactagcatctagaatatataaaga

SEQ ID NO: 158169 - DNA, 586 bp, Homo sapiens
ctgtcatgccactagcactgtgcctactgcctggtgagccttccaaaagcctttgccaaatgaacaggtaaatgttgccgatgtactcagcacatgactagtgtctgggctcatccttttgtgttggttctcactggcttctatttcgaagggtggcctttttgcaaactcctgccttcgttctggaatacattctcttctgagcaaacagttcccatctccacttagcatccacacccttccttcccttggagccaaggaacygcaatacattaacaggcatgcttattctcagaggtatctccctgcgatgaggtgtaaattaatgccagcctgaccactctggttcattaaagaccagatggtaatttttgcaagaggagcaaatgaaccctactggcctggcccaaatccaacctggataatttcctcctggctacacaatatcctccctctcatttcagacacagaaatgattttcacttcatcctcagaaacctcgctaggcagggccaggctggcttcttaccaccactgttgcatggatgcaggctagcaagcagcattcatctgggggatctgcgaa

SEQ ID NO: 158170 - DNA, 381 bp, Homo sapiens
gaattccattgtcctcattccacatgtgctacctcagggcccaaacttcaggacagctcgatgaatgaaatgatgacatttgccaaaaacagcagctataccacacagaaccgctgagcacgtgaaattgaatggcaatgtattgtaagattttgaacacagatccaggataaggttaacataatactcctttttaaaagtcaccaaaagagaacgctttcagtgcaaagacttccatttgcataacaccttacrcttctcagcatactctcacctcattggatacaaactaatcactagcataacaaactaatatcatctcttttacagaggagaaagttagctgctagtccaagtcaactgatctatgcaaagttatat

SEQ ID NO: 158171 - DNA, 345 bp, Homo sapiens
taagactgcagaggtgaactggaacccttcaatatgagacttgktctgtacaccatgtccacagcagcactattcacaatacccaaaacgtgaaaacaatccaagtggacatagatcaacagatgaatggataagcaaaacctggcacgttcatacaatggaatactatcccagtgaaacattactcagtcttaaaaaggaacgaagttctgacttttttggatcttactaatattgcactggaattttgcataaatctttttaagcccaatttaaaccacctatgagcccaaaacaagtctaacctcactaaattataaattgttgaagcatcctggatgaggc

SEQ ID NO: 158172 - DNA, 604 bp, Homo sapiens
gggcaccacactgaatcaggactgtgtgcagagaagcaaaccaggcctttccacatagataggaaaaaataatcataacagttcatggttatgcagcttccagtggactccattgttacctggtaatcatcagtcaattgycatcacccttaaccttaaaggtgtcactttcgtacttcaggtattctttccaaagtccctctaccccttcttctccctgtcttatctgtccctgatctctgccaccctcagttgcttacattggccaaccagcctgaaatgggagaggttgaatccttcatgctatgtgcatagccaacattccacaagatttatgtcactaaagcctgtgaaaatgacaaatggtgagaaagagggccaaaaagggaagcaaaaataaatccaactacgatttaacaaagggcggcccagtatctgtacctagtgggtactgtgatatcttgagggacatgaatttaacaagagaaataaactgctgtatgaggatctttaaaatgctcttgttttccattcaaattctctttagtaaagttgctttttgccctgaagtcataatccaattgtgtcaacgtggtaattaaac

SEQ ID NO: 158173 - DNA, 587 bp, Homo sapiens
actgagaaaatgttcaaaatggtcctctaaaactatggtgctcaatagaacaactcgcaatgatggaagtgttctcagttggcactgtccaatattgtagccattagctatatgtggctagtgagcccttgaaatgtgattattctgactcaggaactaaaatttaaatttcattttaataaatttaaaatatagtcatgtgactaatggctaccatattggacagttcaaatgcagaatattttcatcactgcagaaaattttatcagacagcactaagctaaagggtctacccctgagcaaaagcgctgagactctaccccatgtctgaccctgagctgggttcattatttgggctgagctaaaagagaggcctccaagatggcttggtgtgcaatttctgggacttaaggatacaatgagttcgggcagggtggaggcactgtattggttcctatacaatcaagctttggagtgtataatggagaagaaagcttagagacctctagttgytgcccctctttacagacaggaaaactcagtggcagtaaattagtcgcttggcaaaagttaacacaaaagttaat

SEQ ID NO: 158174 - DNA, 553 bp, Homo sapiens
tatggaacttctgagctgtctgtcttcagtttggcttagttttgaacgatattcctccaaaaggtgcaatgctctctgggtatctgagaagaaaaagcagagcctgattaaaactctctatttacaaaaaaagtatcacatactagtgcaaataattctgcatgacatctaaatagttcmgcaaatccttcaggtcaattgatgtcactatgttcatgtacacatattccttagaatgaccaaaaaataaaaaaaaaaattaaagaaatacaagaaaaatttaaacatatatcacattagaaaacggaggagagtgagcagtttggaataaatgtgtactggtagtttgccaaagtaaaagatcaaagtattagcaacagtttcagattacctgataatgcaaaagcagattatctacaatttgtcatcataatccaaatttttaacatttcaaaatacaaattcttagtatcccacagttgcttacagaatagtgcttagtaagaatgatagagtgaaatactaaaacaccaattcagggttattaaggaca

SEQ ID NO: 158175 - DNA, 461 bp, Homo sapiens
tgtaatagcaggaagaaccctcactgtaacaggcttgcctctgaatttcccaggcctcattgctgcctttcattctcctcttcccagtctggaaacgtatttccacccttcttcctttgactgctttatcagaccttcagggctcagcccagggcttcctctcttattgcctatcaagttagacttaaattatctgtttctatggacctccttcatttaactctaagtttcttgaaggcaagagctgtgccatattcatctttgtattcatctgtgaatagatggtattaaatattgcttgaactgaactgarctgattgaagaattgagcctttcttgttcttaaggctttcacatttcctacttgaaagcgagcaattttttttttttgaagtgtttctctcttgttgcccaggctggagcgcaatggcatgataagcaatcttttcattgataactaa

SEQ ID NO: 158176 - DNA, 461 bp, Homo sapiens
tgtaatagcaggaagaaccctcactgtaacaggcttgcctctgaatttcccaggcctcattgctgcctttcattctcctcttcccagtctggaaacgtatttccacccttcttcctttgactgctttatcagaccttcagggctcagcccagggcttcctctcttattgcctatcaagttagacttaaattatctgtttctatggacctccttcatttaactctaagtttcttgaaggcaagagctgtgccatattcatctttgtattcatctgtgaatagatggtattaaatattgcttgaactgaactgaactgattgaagaattgagcctttcttgttcttaaggctttcacatttcctacttgaaagcgagcaattttttttttttgaagtgtttctctcttgttgcccaggctggagygcaatggcatgataagcaatcttttcattgataactaa

SEQ ID NO: 158177 - DNA, 449 bp, Homo sapiens
atctgctagaattcttttttttttttttaacttttctgtggcccctgaactgtcgcatcttcatatgagttctgggatattcctggtaataacatcggctctgtatatttgtttttggttttctgtgagaggagtgaagccagcttgcttctgtgctgacattttggaactggaaatcctcttgattaatttttgtatgttgatttattctatattccaggaataaatcccaatcccactgggtcatggtgtgtaatccttttaatatgctgtcaatctgatttgctagtattttattgaggatttttgtatcactgttcatgaaggatattggtctgtagttttcttttctagtactatctttggccttggtatttggtagygctggcttaatgaaatgagtttaggagtgagtagtccctcctccttaattttttggaaaagtttga

SEQ ID NO: 158178 - DNA, 450 bp, Homo sapiens
ttcatgtgctatatctatcttttcaaatggattgacattctgtatggtgtctcacagatcccttaggctgtattcacttttcacttaaatctttttcctctgttgttcacattgagtctttagtgttattgtattttcagttctgtcatttccatatagttctttgtgtcttgtatttctttgcttagactttctatttctttgctgtgagtttttattatttcatttgtttcatgtatatttgtaattgttcattaattttttatatgacgcctactttaaactctgttaggtaagtctaacatctgtggtgtcttgatgttggcatctcctgattgtctttttatattcagtttgagatattcctggttctcagtgattttcaagggaaacttcgacattttttgtattrtgagacgctagatcttatttaaaccctgtgttttggct

SEQ ID NO: 158179 - DNA, 603 bp, Homo sapiens
ttgggaagaggggacttaagagttcttgacacagtttgcctaaactcacaaaacctgtttcttgggagcttttaggcaatgagatgattaccttatttttagatgaggaataagtcaaagaaatactaagatgtaattatgggcaacagccagatgccaagatacacataagcccaaacacaaaagaatgtcatcaacttgaggaactaygatgaaaaaaacatcagatgagtcccacatgcagcagccagagtttgagttttgcattaacagattttgaccaagattaattccattaatatattattcctgctcaagcctttcagatgttttaggagtggactgtttgacagatatgtctctggaggcagcattattccttcctttaaaattgattccaaagcttatgaacaagattaattgtgtatgaggaaaaaaggaaacaagaacccttttcacttacattacaatctcactcagattagtttatgtaaactaaaccaaattagtgaatattataggatatgtagaaatgaacatccttattgctttcaaatctgtatactatttagacaaattcctagttaataactttgacccaga

SEQ ID NO: 158180 - DNA, 467 bp, Homo sapiens
aagataatttctgtgtgtttaaaatgtatggggaaaaaaggaaacatttagaaattaccttcttgtaataattgttatttgatggcatgttttaatyagaagacacaataaactaaacttcatagaacatcagctggaaagggccttaaaactaatctcttgaaccaccttaattaacaaacaatggaatccatgttcagaaaagtgatatgacttaggcgtgctcaataaagttgcagagtgagggacaggacgagaaaagtgcctcattactcattattaaagttgaggactgacaaatagctattcaaagagatgtgagggtaaactatactgggcacccagaatatagagtgaagtcagaaagttttaaagctgtcttgctttatagtcctctttgcatatctctgtgcaacattcttttacagttctctaacaccctgaaattccttatcaaattgaaggat

SEQ ID NO: 158181 - DNA, 467 bp, Homo sapiens
aagataatttctgtgtgtttaaaatgtatggggaaaaaaggaaacatttagaaattaccttcttgtaataattgttatttgatggcatgttttaatcagaagacacaataaactaaacttcatagaacatcagctggaaagggccttaaaactaatctcttgaaccaccttaattaacaaacaatggaatccatgttcagaaaagtgatatgacttaggygtgctcaataaagttgcagagtgagggacaggacgagaaaagtgcctcattactcattattaaagttgaggactgacaaatagctattcaaagagatgtgagggtaaactatactgggcacccagaatatagagtgaagtcagaaagttttaaagctgtcttgctttatagtcctctttgcatatctctgtgcaacattcttttacagttctctaacaccctgaaattccttatcaaattgaaggat

SEQ ID NO: 158182 - DNA, 502 bp, Homo sapiens
gttctttttgatatatcatatatttggttttttgatatagcatgatattatatctcattaccatgtggtagacttctaattgatgttagcttttcctctaatctctgtctctctcccatcctccctctcccttttgtctactctcaataccttgatagtcatcttgtatatcacaaccactctacttttctttaaatactgcctttcacattttatacatgccacagatgctcatattcatctgtgttcctaactgcttgtaaattatgtgcaaatttcttagccytatatttaagccctttcacaatgcagcttttaccacaaccctctctagtctttttaagaccagatacttctctgatatgagggaacgttagagtggattctgtctagtcctcccatatcattggtggaaaaagtgaggcacagagaatgaagttattttccaaggtcactcagtgtatttgtagtagagtccagatgagaatgctagagttcaatg

SEQ ID NO: 158183 - DNA, 423 bp, Homo sapiens
ggcatcattttccttcatcacctacatgtgtattttttaccagacgagctctcactgtgttgcccaggctggagtgcagtgactgtacacaggcgtgattgtagccatcttcccacctcagcttccagagtagctgagactacagacatgggctactgcacccagctctcattggtattttttgaaaccagttattagatccaagtccttgattagattcakataatttttgtcttttgggtacatatacttcacaggtagtgtgtctctttctagggtatcaaggttatccaggtcctggctgtctctgccatccatctgcgtgtagtacatggccggttgttgcctactcttagcctcgtctatggtgtaggaaaagagtccatttccacttcccacaattgaacatttcagatagcaaga

SEQ ID NO: 158184 - DNA, 434 bp, Homo sapiens
tatgtccccatggcatcattttccttcatcacctacatgtgtattttttaccagacgagctctcactgtgttgcccaggctggagtgcagtgactgtacacaggcgtgattgtagccatcttcccacctcagcttccagagtagctgagactacagacatgggctactgcacccagctctcattggtattttttgaaaccagttattagatccaagtccttgattagattcagataatttttgtcttttgggtacatatacttcacaggtagtgtgtctctttctagggtatcaaggttatccaggtcctggctgtctctgccatccatctgcgtgtagtacatggccggttgttgcctactcttagcctcrtctatggtgtaggaaaagagtccatttccacttcccacaattgaacatttcagatagcaaga

SEQ ID NO: 158185 - DNA, 387 bp, Homo sapiens
cagcgctccactagccacctagtttctttgagtcttgagcatcctgtttttcccaggcagccagagtcccctgatttcttttctgcttttttttkttgttgttgttttctaatttagaaacagggttgcactgtgtcacccaggctggagcacagtggcacaatcatggctcactgcagcctggacttcctgtgctcaaacagtcctcctgcctcagccttctgaggagctaggactacaggtgcacaccaccatgcctggctaatttactaactttttgtggagatggggtcttgctttgttgcccaggctggtctcaagctcctggcacaagtgatccacctgcctcagcctcccaaagctctaggattacaggtgtgagccacc

SEQ ID NO: 158186 - DNA, 560 bp, Homo sapiens
cactattctagttggagttcaggaaaataatataaaattaatcctttgaaggtaaaccttagaaataatcattgtttctgctttggatgggaatgcaacttatatggcatcctgtggaatttattgatgcctctcatttatcctaaaagacagattcttcttttacaagacaacagatgaattcccttgaggttattcctcactttctgtgtggtgatatacagagaataggtgaagagctgatgactgggtaggagttatttctaggaaaggtctagtgttgatcactgtattagaaaaagagtaatttaagaaatgttgtaaatattcgtartatcacattagcacatacaataattgtcagctccataaccaggcatgctgttatctctctttctaggatagctaatacatcctaaaatgctctgatacgctgcggggttactaacactgtctttaatgcagcatttttctttgaaggactgaaaccaagtggtctctccagggcatcataaatcttagttttcatttagaatatagaaaccataaagaaaataaaa

SEQ ID NO: 158187 - DNA, 560 bp, Homo sapiens
cactattctagttggagttcaggaaaataatataaaattaatcctttgaaggtaaaccttagaaataatcattgtttctgctttggatgggaatgcaacttatatggcatcctgtggaatttattgatgcctctcatttatcctaaaagacagattcttcttttacaagacaacagatgaattcccttgaggttattcctcactttctgtgtggtgatatacagagaataggtgaagagctgatgactgggtaggagttatttctaggaaaggtctagtgttgatcactgtattagaaaaagagtaatttaagaaatgttgtaaatattcgtaatatcacattagcacatacaataattgtcagctccataaccaggcatgctgttatctctctttctaggatagctaatacatcctaaaatgctctgatacrctgcggggttactaacactgtctttaatgcagcatttttctttgaaggactgaaaccaagtggtctctccagggcatcataaatcttagttttcatttagaatatagaaaccataaagaaaataaaa

SEQ ID NO: 158188 - DNA, 528 bp, Homo sapiens
atgcttgagaacacatgcatttgatggtaaagacataaacaaaaaatactaattaataaaacaaaacactttctgttgtggtattaaattagacttttcattatttatgatttatagggacaatttataaacatagctaaccccatgataaaaccacccataataacagacatttagatataatatgtatttttaattggatcccatttttataaataagataataaagttatatttttcctyttgcatgtggggtgggagaaatggaaggaaattattaaagagtactattgtgttctcagtccggtatatggtcagttgtgcacataataaattttatcagctttgattttgtgttttttctgatggtagagaaaggcaggctaaaaaatttgctttttgttattcttgctataacctgactacacgtcttacttgttaataattttgagctcatttatggtgttttgattgaatattatgatattacatataaaaaaagcaaactaaaacatcacaaaatcatac

SEQ ID NO: 158189 - DNA, 528 bp, Homo sapiens
atgcttgagaacacatgcatttgatggtaaagacataaacaaaaaatactaattaataaaacaaaacactttctgttgtggtattaaattagacttttcattatttatgatttatagggacaatttataaacatagctaaccccatgataaaaccacccataataacagacatttagatataatatgtatttttaattggatcccatttttataaataagataataaagttatatttttcctcttgcatgtggggtgggagaaatggaaggaaattattaaagagtactattgtgttctcagtccggtatatggtcagttgtgcacataataaattttatcagctttgattttgtgttttttctgatggtagagaaaggcaggctaaaaaatttgctttttgttattcytgctataacctgactacacgtcttacttgttaataattttgagctcatttatggtgttttgattgaatattatgatattacatataaaaaaagcaaactaaaacatcacaaaatcatac

SEQ ID NO: 158190 - DNA, 528 bp, Homo sapiens
atgcttgagaacacatgcatttgatggtaaagacataaacaaaaaatactaattaataaaacaaaacactttctgttgtggtattaaattagacttttcattatttatgatttatagggacaatttataaacatagctaaccccatgataaaaccacccataataacagacatttagatataatatgtatttttaattggatcccatttttataaataagataataaagttatatttttcctcttgcatgtggggtgggagaaatggaaggaaattattaaagagtactattgtgttctcagtccggtatatggtcagttgtgcacataataaattttatcagctttgattttgtgttttttctgatggtagagaaaggcaggctaaaaaatttgctttttgttattcttgctataacctgactrcacgtcttacttgttaataattttgagctcatttatggtgttttgattgaatattatgatattacatataaaaaaagcaaactaaaacatcacaaaatcatac

SEQ ID NO: 158191 - DNA, 569 bp, Homo sapiens
aaaataaaattgacaaacctttaggtagaccaactaagaaaagaagagaagacaaaaatcatcaatgaaagaggagatgttacagctgccagcaaagaaacaaaaagggtataaaagagcactatgaataattatatttcaacaaatagaataatttagaagaaatgaacaaatgtctgaagacatacaacatatcaagattaccatgaagaaatagaaaatatgaacaaattaaagagatgagtacacttctaaatacattttatgaggccagcactacccttatgccaaagccagacaaagacactacaagcaaatgaaattacaggccaatatctytagtaaacttatatgcaaaacattaacaacagaaattaaacaagacacaaacagataaaggtatatcccatgttcatggattggaaggctacataatgttaaactgcctgtactacccaattttatatacaaatttgatgcaatctatatcaaaacaccaatgacatttttcacataaatagaaaaaacgtctaaaattaattggaacaacaaaagatccaaatagccaa

SEQ ID NO: 158192 - DNA, 609 bp, Homo sapiens
tttgagacaccaacaaactactttccatagcagctgtattttgcattttcaccagcaatgtttgaggattccaatttcagcacattttcatcaactgcagaaaagaagaaaatatttgcgaatcaaagatctcataaaaatctactatccagaatatataagaactcttaaaacttgacaaccaaagacaaagaaccaaattttttaaacgggaataaaatcttggatagctgtttctccaaagagatgtacaaatggctaaaagttgctcaacatcattagtcactggggaaatacaaatcaaaatctcagtaagataccacttcacacacactaatatggcaayaataataatgacaacaataaaaagagaatataatgtattttttaaatgatccaccgtagagtcaatggaaggacagaacattcattttgctgcttaagttctgaaaaaatctgagatggtttaaatgctgaagttaagattgaaggaatgggagtattttatacaaatattggatatagatattgcaataattaggctgttggggatgactatgggtgttagaatttaaaatctttgaatcaaagaatagttcagggtgatgt

SEQ ID NO: 158193 - DNA, 453 bp, Homo sapiens
tcactctgacaccgaggctggagtgcagtgatgcaatcatggcttattgcagcctcaatctcctgacctcaagcaatcctccctttttggcctctcaaagtactgggattacagtgatcctccaagtttgtttcaaatatttgactacagattttttaatcttacatgataagtagacaatttagtgatttacaaaaagagactagaaaaaaaggagctgtagactgaattgccaactatttcaaaaatataatctttgaagacctaagccagtgattctcaaactgtagttaagtaatcaactacttaaaatgcatatatccctgaaccctcaaggaccacttaacaatgtgtatatcccttaactcacctcatggatttgaattcagtagatcttgattatttttaggaatatgtattcttacatataaccsaaagaaatttgagctgatc

SEQ ID NO: 158194 - DNA, 628 bp, Homo sapiens
tagtgatttacaaaaagagactagaaaaaaaggagctgtagactgaattgccaactatttcaaaaatataatctttgaagacctaagccagtgattctcaaactgtagttaagtaatcaactacttaaaatgcatatatccctgaaccctcaaggaccacttaacaatgtgtatatcccttaactcacctcatggatttgaattcagtagatcttgattatttttaggaatatgtattcttacatataaccgaaagaaatttgagctgatcactctcagtttgcactttaaaacattgcattaaattccccctccctccctccatttttagccccatgaagtaagcttcacctcatgagtcaatggagtcattatatcttcataagtttgtaagtcagtcattcaccgacttatgttttgagaagatgragacccatgatatacaacttaactgtggcagttacataaaaattcaacatatacatgtataaagaattataacacatagcaattatttactcaagcaagatgcagagacatttgttttgatagatgagctttctcagtagctttttctacttggcaagccaggtgtatttttagtagagccaaagcacctggtttagca

SEQ ID NO: 158195 - DNA, 628 bp, Homo sapiens
tagtgatttacaaaaagagactagaaaaaaaggagctgtagactgaattgccaactatttcaaaaatataatctttgaagacctaagccagtgattctcaaactgtagttaagtaatcaactacttaaaatgcatatatccctgaaccctcaaggaccacttaacaatgtgtatatcccttaactcacctcatggatttgaattcagtagatcttgattatttttaggaatatgtattcttacatataaccgaaagaaatttgagctgatcactctcagtttgcactttaaaacattgcattaaattccccctccctccctccatttttagccccatgaagtaagcttcacctcatgagtcaatggagtcattatatcttcataagtttgtaagtcagtcattcaccgacttatgttttgagaagatggagacccatgatatacaacttaactgtggcagttacataaaaattcaacatatacatgtataaagaattataacacatagcaattatttactcaagcaagatgcakagacatttgttttgatagatgagctttctcagtagctttttctacttggcaagccaggtgtatttttagtagagccaaagcacctggtttagca

SEQ ID NO: 158196 - DNA, 562 bp, Homo sapiens
ctctctcttcttgacagtcattaatctttgagacatatacacttggatggaggatagttccacatcttttcttttccattagtctttttcagtactttctgttgcagaaattatctacattgtcatcarctttcagatatatttgttataccgttttcacatagctctatattttctgtctttaccagtttgcccaaatatgagtgtgcctagcatattctttttacataaaataagtcatcagaaaccttgagtctttagggtattaacattgccatttgctggtggcaaaattttttatggaaaataatttataacatttaaattttattaactccaattaatggcagaaaatgagaaaagtaaacaaaataactgagtgcctacaggtgaagtggttctctgctgataactattgaaatattggcattaaattttcaccctaaaatgggataatagtcaatgtgatctatttaaaaactatataggatcatgacttcataattaaattaaatataattctattgcattcaaatttgtaaattgacttattcagccaatt

SEQ ID NO: 158197 - DNA, 562 bp, Homo sapiens
ctctctcttcttgacagtcattaatctttgagacatatacacttggatggaggatagttccacatcttttcttttccattagtctttttcagtactttctgttgcagaaattatctacattgtcatcagctttcagatatatttgttataccgttttcacatagctctatattttctgtctttaccagtttgcccaaatatgagtgtgcctagcatattctttttacataaaataagtcatcagaaaccttgagtctttagggtattaacattgccatttgstggtggcaaaattttttatggaaaataatttataacatttaaattttattaactccaattaatggcagaaaatgagaaaagtaaacaaaataactgagtgcctacaggtgaagtggttctctgctgataactattgaaatattggcattaaattttcaccctaaaatgggataatagtcaatgtgatctatttaaaaactatataggatcatgacttcataattaaattaaatataattctattgcattcaaatttgtaaattgacttattcagccaatt

SEQ ID NO: 158198 - DNA, 616 bp, Homo sapiens
ccttgagtctttagggtattaacattgccatttgctggtggcaaaattttttatggaaaataatttataacatttaaattttattaactccaattaatggcagaaaatgagaaaagtaaacaaaataactgagtgcctacaggtgaagtggttctctgctgataactattgaaatattggcattaaattttcaccctaaaatgggataatagtcaatgtgatctatttaaaaactatataggatcawgacttcataattaaattaaatataattctattgcattcaaatttgtaaattgacttattcagccaattcctcattatttgctgctacagtcatttgagttaattaggtaaaaagtcaacgagatgctaccattgatttaataaaatctttgaagacattttttattgctagattgctatggcagaatatttacctcagaaaaattccttcatgtgactctgtgaacgaggtataccacgtatgtctcttaatgtttataatactgggagagaacataaataactgaattatttcttcaactactagacatcaaccactggatttggatccactgcactctaaaggaggccattttgccatcagacctta

SEQ ID NO: 158199 - DNA, 556 bp, Homo sapiens
tcatcaggctccagcttacaaaggcaggagtgggctgtgaaaatgaagaggctgctgacacccaaggtgtgaagcagcccctcactactgctgaggagggatggatatgctggttttctcgyaggcttctgctgataccaccctactgggcaccttattgccgatactatggagtcagcagttgccttgttatctctagctagagatgaaagccctgagcctcctttccacatgcctcctctgatacgacccacttataatgataagcttcactatattcttgatacctaggaaacagttcaatgggaatattttctactataatataaatttgtcaatttcttcctgtcattctgtcaaataatacgcaatgaggtgtatttcaatttaacattatattatttttcctggtaatttttttttatcataatgaaggtagtgaccttcatgagatactacccacttggagtaggtggcaccttgttcctgccgggtggagcgtggacgtccaggtcctccgtgtagtctccgacactgtggaaaatgatttctagtt

SEQ ID NO: 158200 - DNA, 556 bp, Homo sapiens
tcatcaggctccagcttacaaaggcaggagtgggctgtgaaaatgaagaggctgctgacacccaaggtgtgaagcagcccctcactactgctgaggagggatggatatgctggttttctcgcaggcttctgctgataccaccctactgggcaccttattgccgatactatggagtcagcagttgccttgttatctctagctagagatgaaagccctgagcctcctttccacatgcctcctctgatacgacccacttataatgataagcttcactatattcttgatacctaggaaacagttcaatgggaatattttctactataatataaatttgtcaatttcttcctgtcattctgtcaaataatacgcaatgaggtgtatttcaatttaacattatattatttttcctggtaatttttttttatcataatgaaggtagtgaccttcatgagatactacccacttggagtaggtggcaccttgttcctgccgggtggagcgtkgacgtccaggtcctccgtgtagtctccgacactgtggaaaatgatttctagtt

SEQ ID NO: 158201 - DNA, 541 bp, Homo sapiens
tcatttcttctccatgtctctccaattttcttatattttctttatttctcgatctttccttctaagcaaagcttgtgaaaattaatgctattctctttcatgggctcttaccctgggatgtcagttatatagaaaaaaaaagcaatattcaagaacgagaatctattcttggtctttggagatcaagtcagtgttaatttaaatatgagtttattggccctattttccttcagatttagagggatctgtgattcttttcaatgctgcrgcaatgtgtaactttcctagccggaaaacagtgcacttttccctgaaaatgataactcaactctccataatgtctctttctagtatcaaaattacatggtatataagttccacagaagggtaaatatgtaagtaatagcatacaatcttaatgattttaatcttattgaaacacttatacaagttaaaattttagttttgctcttgcttgtaattttgtggcaaattttctccatttttttctagatttgaatggaatttaaaaatatcccta

SEQ ID NO: 158202 - DNA, 541 bp, Homo sapiens
tcatttcttctccatgtctctccaattttcttatattttctttatttctcgatctttccttctaagcaaagcttgtgaaaattaatgctattctctttcatgggctcttaccctgggatgtcagttatatagaaaaaaaaagcaatattcaagaacgagaatctattcttggtctttggagatcaagtcagtgttaatttaaatatgagtttattggccctattttccttcagatttagagggatctgtgattcttttcaatgctgcagcaatgtgtaactttcctagccggaaaacagtgcacttttccctgaaaatgataactcaactctccataatgtctctttctagtatcaaaattacatggtatataagttccacagaagggtaaatatgtaagtaatagcatacaatcttaatgattttaatcttattgaaacacttatrcaagttaaaattttagttttgctcttgcttgtaattttgtggcaaattttctccatttttttctagatttgaatggaatttaaaaatatcccta

SEQ ID NO: 158203 - DNA, 584 bp, Homo sapiens
tatcctgccgttcttaggacgctggtaatcaagttcctcattattgagttctagtcgtcacatgcagaaactacaatgtccagaaaagacaaacacattcctttctgtatgtacctgttttatcaatgagaaaatctytcccagatgccctccagcagacctcacctgattcccattggctaggtttaggtcacatgtgcatgtgatcttatccagtaatgatccaactcctagtgggacggttttcctgtgcacatggatcagtagatggcaattaatcacacaaaaccaggactattgccaataaaaagaagagggctggggaggcttctaatcagaaacctgactatacctgccataacccccgagcatttttctaaaattaagtaaaataatccaaaagagaaaatagaaattcataaaacttaattaatactatttccaccattggtcactgtatagtctcctaaggcattactgttcatttattctttatttactcacagctctaacatgtggtaaattgatgtcttaaaacttttaacatttgaaacagcaatatgaagatgagatgaaacagacta

SEQ ID NO: 158204 - DNA, 584 bp, Homo sapiens
tatcctgccgttcttaggacgctggtaatcaagttcctcattattgagttctagtcgtcacatgcagaaactacaatgtccagaaaagacaaacacattcctttctgtatgtacctgttttatcaatgagaaaatctttcccagatgccctccagcagacctcacctgattcccattggctaggtttaggtcacatgtgcatgtgatcttatccagtaatgatccaactcctagtgggacggttttcctgtgcacatggatcagtagatggcaattaatcacacaaaaccaggactattgccaataaaaagaagagggctggggargcttctaatcagaaacctgactatacctgccataacccccgagcatttttctaaaattaagtaaaataatccaaaagagaaaatagaaattcataaaacttaattaatactatttccaccattggtcactgtatagtctcctaaggcattactgttcatttattctttatttactcacagctctaacatgtggtaaattgatgtcttaaaacttttaacatttgaaacagcaatatgaagatgagatgaaacagacta

SEQ ID NO: 158205 - DNA, 613 bp, Homo sapiens
ttataaatgttttctttttttcaatactttgcacattaaagattcaataacgtgtgggttagggaaaccctataataataaagagaatacaatgaatttatatagcattttttataagatgctcacagtactttcagtatattatctcatttgtcctcactgacttttattaaaaaattgtgggggtgacatctcatttattctcgcaacatgtttattgaaaagcttttgtatttctcctgtaaactagtaagttttgttacccttgaaaaccaattttygtcaatattgttggatagattgaccagttttcaatcaatatttttacataaatatacataccatgtcagaaacaggaagcaattaaaaagtaactgttttgacgctatgtctttctgttcttaaaatttttcttctctttcatttagcatcttcactctttctctaaatagttgccaacataatctgaaatacagtgtacttctctatcagcccgaatatattctttaacctaccccattttcctcttttcatctttcaaagcccttcctccagaagataaatatcttttggtaaggagtctattcctgtacggtattctcctcagccctct

SEQ ID NO: 158206 - DNA, 613 bp, Homo sapiens
ttataaatgttttctttttttcaatactttgcacattaaagattcaataacgtgtgggttagggaaaccctataataataaagagaatacaatgaatttatatagcattttttataagatgctcacagtactttcagtatattatctcatttgtcctcactgacttttattaaaaaattgtgggggtgacatctcatttattctcgcaacatgtttattgaaaagcttttgtatttctcctgtaaactagtaagttttgttacccttgaaaaccaatttttgtcaatattgttggayagattgaccagttttcaatcaatatttttacataaatatacataccatgtcagaaacaggaagcaattaaaaagtaactgttttgacgctatgtctttctgttcttaaaatttttcttctctttcatttagcatcttcactctttctctaaatagttgccaacataatctgaaatacagtgtacttctctatcagcccgaatatattctttaacctaccccattttcctcttttcatctttcaaagcccttcctccagaagataaatatcttttggtaaggagtctattcctgtacggtattctcctcagccctct

SEQ ID NO: 158207 - DNA, 487 bp, Homo sapiens
actagagtgaaggtcatagtagcagtataatgaggagttagtgaaagtctaaaataattgcaattcatgatctggagtgttaatttgacacaagtagcagttgtggatgagtaataggaacacttgcccatatgaaataggttctgcttttctgtacttaacagtgattgtcatgaagcctaatctgaaaaataaaaaaatggaaagaaaaagcaaagtacattgaaaatatcctgtggatgactcattaacactattgatttccttctactagccacaccctaattaatttctccacacagtttcagcacttattctcatggttgaattgtcttatccataacagaggacacaatttggccattttaaaattaaaattgtataataaaatccctaatgcactacttcaccaatgtcwttcctaataacttttgtattccattcactgggctatttgggagagtaatccatcttcttataatggttt

SEQ ID NO: 158208 - DNA, 474 bp, Homo sapiens
catgtcaaggagtttttcatcctaccagatcatagaaaatgaaagacagaaaaacaaaaacctaaaaagcagctatagtcaaataagatgaaaatcaagcattgagtattgaatttagcaacatggaaggcattcgtgatctgaaaatcagtagtttgggtggtgatgcgggggtaaaattctcaatgaatttgattttataaagaatgagagacgagaagagaaatgtctatcatcattaaaaccttttaggagtttccttgcaaattgaaattaaaaatgagtcatttcatgacaggaatagtggcattcactaagggctattttttttttattttaaaagacaggatctcactctgttgcccaggctggagtgcagtggcatgatcatagtgcactgtagactctacytccttggctcaaatgatcctcccacctcagtctcctgagcaacttggactacaggcatgtgct

SEQ ID NO: 158209 - DNA, 645 bp, Homo sapiens
ggggtagatgaagtggttataagaaagaaggaaagaagaaaccactctttcaggtcctgccaaactagcccatccttcctggcacagttaaccaagagcaaaactctgagtatggctgaattattttatccctacycactcctgaccctgccatagtcacatccccatttggtctaattaaatagcctggtcctaactatccagtaggaaaggaaacgcagaccaagacagaagttatttcctaagtgataatgtataaagtcttagacaatatgatatcttacgagatggcacagatctgtgctctctttgggagtttatgagagaaactaagatactcttcaaataacaggatctccgcgtctccttacattgagccagacctgtcctcacattcccatgttccttataaagtaggagaaatgatctatcctctgtactacttagtaaattaatggttagatctaaggaagaacccacaaaattcttcacttggtctcaattccaataagaacaatactcatccatcatctatcattccttttagaaagaggtaactagagacaattcaagcaatatcttcctgttaagaaatgagaaaggatttctaactttgattacaattattctgtaaaagcatgctaa

SEQ ID NO: 158210 - DNA, 645 bp, Homo sapiens
ggggtagatgaagtggttataagaaagaaggaaagaagaaaccactctttcaggtcctgccaaactagcccatccttcctggcacagttaaccaagagcaaaactctgagtatggctgaattattttatccctacccactcctgaccctgccatagtcacatccccatttggtctaattaaatagcctggtcctaactatccagtaggaaaggaaacgcagaccaagacagaagttatttcctaagtgataatgtataaagtcttagacaatatgatatcttacgagatggcacagatctgtgctctctttgggagtttatgagagaaactaagatactcttcaaataacaggatctccgcgtctccttacattgagccagacctgtcctcacattcccatgttccttataaagtaggagaaatgatctatcctctgtactacttagtaaattaatggttagwtctaaggaagaacccacaaaattcttcacttggtctcaattccaataagaacaatactcatccatcatctatcattccttttagaaagaggtaactagagacaattcaagcaatatcttcctgttaagaaatgagaaaggatttctaactttgattacaattattctgtaaaagcatgctaa

SEQ ID NO: 158211 - DNA, 452 bp, Homo sapiens
ttatattcctaaaaattgttatataaaacagtagtgcatatgttattctcttcctaaaaaattaggtgtgatttttaaagatgatatcaaagacagatggtatgtgattaagttcattttagttgtctaataatagtaatcttatttggatcatgatagayagcagataggtagatatatagatagatagacacataaatggatttagatcaagatgtgtccggagttggttctttctggtgtgttcctggtctcaccgacttcaagaatgaagctgcagacctttgcagtgaatgttacagctcttaaaggtggcacagctgatttattgtgagcagcagacagtgagcagcagcaagatttattgtgaagagcaaaagaacaaagcttccacagcgtaaaaagtggcccaagcaggttgctgctgcaggctggggtggccagcttttatt

SEQ ID NO: 158212 - DNA, 580 bp, Homo sapiens
ggaaaccgccccccgtatttcaacatgatattttgtctaagtgttggcggtctgagaaagagaaagagtacaaagagtggaattttacagctgggctgctaaggggtgacgtcacatagtggtaggactgtgatgcccacctgagccacaaaacctgcaggtttttattaaggacttcaaaaggggaggaggtgtacaaacagggagtaggtcacagagatcacatgcatcatagggcaaaaaggagaacaaagatcacatgcttctgaggccaataaagatcacaaggcaaagggcaaagcaaagatcacaaggcaaagrgcaaaatcaaaaactcctgataagggtctatgttcagctgtgcacatattgtcttgataaacatcttaaacaacagaaaacagggtttgagagcagagaaccaatctgacctcaaatttaccagggagcagttttttccccaccctaataagcctgagggtactgcaggagaccagggcatatttcagtccttatcttgactgcataagacagatactctcagagcggccatttatagacctccccccaggaatgcaat

SEQ ID NO: 158213 - DNA, 580 bp, Homo sapiens
ggaaaccgccccccgtatttcaacatgatattttgtctaagtgttggcggtctgagaaagagaaagagtacaaagagtggaattttacagctgggctgctaaggggtgacgtcacatagtggtaggactgtgatgcccacctgagccacaaaacctgcaggtttttattaaggacttcaaaaggggaggaggtgtacaaacagggagtaggtcacagagatcacatgcatcatagggcaaaaaggagaacaaagatcacatgcttctgaggccaataaagatcacaaggcaaagggcaaagcaaagatcacaaggcaaagggcaaaatcaaaaactcctgataagggtctatgttcagctgtgcacatattgtcttgataaacatcttaaacaacagaaaacagggtttgagagcagagaaccartctgacctcaaatttaccagggagcagttttttccccaccctaataagcctgagggtactgcaggagaccagggcatatttcagtccttatcttgactgcataagacagatactctcagagcggccatttatagacctccccccaggaatgcaat

SEQ ID NO: 158214 - DNA, 600 bp, Homo sapiens
aaattactacaatcagatccttttcctacaacacatttgggtgggggaagatggaagacagtatgaggcaggtagaagagtgacaaaaggaatggcaagggacactgaatatggaacttttctatattccaagtttctttaaagagtcgataaagaaaacatgtaaaattcaagaacccagcttttgctgtaacaggtccagtaaataactaatgactgcacagcaaaacaatcaatacaataaaaaattcaacctataaaatgggagaaaatatttgcaartgatatatctgataaagggttaatattcaaaatacataaggaacctatataatttgataccaaaaaaacaagtaatctgacttttttaacaggcaaaacacctgaatagacatatttccaaagaagacaaacaaatggtgaacaggtgtatgaaaaggtgctcaacattactaatcatcagagaaatgcaaatcaaaactacagtgaaaaacaatgtcacacctgttagaatggctattaccagaaagacataaaataacaagtgtcattgaggacatggagaaaagggaacctctgtgcactgttggtgggaatgtg

SEQ ID NO: 158215 - DNA, 497 bp, Homo sapiens
tacagtctcctgagctttctaaaaaagaaatgcgtaattaaaaatatctgatcaggagagtcccaatttgtgggtaacaataaaaaggttgtggtttgttttaaaactgtgatttgtccatttaggggaatatatttggattaagatcttaaagcgataataaggggagacaggaaagtggctaaaattttatttaygataacacttttttttagactttactgctaaagcaaaagtcacaaatgacccacatttaggacctcaatattttcagtactaaattaagtattgaggaaagaaaagaactttcatctgaggattgtgagcccttacgaattgttaggcccagagaggcattaaaatgagatcacagttgtgccctattacccactctgagctatgtatttatctcctgcaactgcttagctattgtcacagtagctataaattaacctaataatgccacaccagacactataacccacaccctatagctt

SEQ ID NO: 158216 - DNA, 441 bp, Homo sapiens
gattatattgaaccaagagcatgttgacttgaaggaagtaaaatggagaattgtcatttaaagtgagacacattaaatcttgactgggcaataaataataaggagctgagctctttcgcttaggtgacactaactttcaccttaaaaatatgatagtgccacagctagtaaagaagatatatttattggcattttgggactaaaagtactagtttggttctagagatagaagataaytcaggaagcttagaagaggtcaacctgggaagacaggattctttctccccacccgtggctctgcaggaagcaataccctcccctctgggcaaggtcgaccctccaagtccagatgagaagagttccctctgtctgctctttcctctgcctgatgacccagaggctttgcagctgtgatcctggcagcccctggccacctcaggg

SEQ ID NO: 158217 - DNA, 501 bp, Homo sapiens
agtggcattgcattgtgctttcaatatgcatttttctgctgactaatgcactcctttttatatgcctattattcacatatctccttttatgaagtaggtattcaagtcttttattcacattttatgttttgttatggccacatctcacttccagaatctgtattggttatctatcgcgcattaaaaaagtactctaaagcttgacagctaaaaacaacaaacattcattctctcacacagtctctgcaggtcaggaacctgggtgcagcttcatggggtggttctggctcagggtctcaggttgcatttgagctgctgtctgaggttacagccctacctatcaaagctgaaccagagccagactccatgtctaaactcacttatgtgagcttcagtgtgagaaatgtatgaattttgtttgatsaaatattgaaaagcttaacaacttcctcctactctcattggcctcttggtgcccagtatctgagtctgaaaaatctc

SEQ ID NO: 158218 - DNA, 617 bp, Homo sapiens
attcaaagcatgactttgttcttcctattctcttgtcctttcagagtcatgaatcackgttatttggacttagtacttattcttactttgccttaggatgttccaatttttttttttaaacaatggtctcttccacatctacactaagaaatatgctctatgccctaggtaattcctttttcttacttcacattaaatgcaaaagggaaaaaatgatataaaatcctccatttccttataacttctctttaattctctacccttcaattttactagggccactttgctttcatgtatgtttcaaatgcacttgcaatatcttttccttagtaagaatcctgtctgaatgaaatatttttcttttccagtccctgtccttttaacttgtttcttctattcactttcaaaccatctcttttcctatcaaccttcttagattaaaaataaaagttattcatcaatttcaatcagatcattttagtttcctatgctcttcagctaacattcagattgaacccaatttaagaaaatttgcatctcttctagttgaagaaatgtgcttaggggtttaaagtgattttgaagatatttcacttttgaaaatagatttcctacaa

SEQ ID NO: 158219 - DNA, 601 bp, Homo sapiens
gtgaaaatattaacctgtayttgcaaatgtatccatttctctgcttctgtgtcatgcattttgaggctctgttatcaggtgtatgcacatgtttaatcttttttttgtcttcgtgatagttgtttctttcagcattacaaaatgtttctctttgtggtaatacttcttatgttgaagattatttaattgatgtgaatactgtcaattagctttcttataactaatttttgcatggaatgtttcatccatttactttcaatcaatgtgtgcctttatatgtaaagtgtatcctctaagtaatataaagtaatgtcttgggctttttaaaccagcctagttttcctttaatttggggtgtgtagtctattatttgtatggagtgtatacggttgggcttaagtctatcatcttgccatgtgttttccatttttcccttcttttcttattttacagttgatccttcattttgcttttttggggagtgcatcaaatatttttagttttccattttatttttcttttgactttataacaccttcattacttttcttttcattgtcactatagaaattgcgttatgcattcttatatcttactactt

SEQ ID NO: 158220 - DNA, 488 bp, Homo sapiens
tgacatggttatctcatctgtagagcaaggtatagtggtgggtatggaatgttagggttgctgagggatatgcttcttggcttccaaggagtatggaaacaggagcgtgtatggatacctttgkatgtgtgttcctggctcctgcctctcaggaccctggaacgctcccctggacaggtcctggcccagccaagatggtgttttacacagcagtgtctccacttaattcctaagagtggttgcatattcttgattaggttgtgcaatataaacatccttattttttaatttaaggggggccagctttttctaatttatagaaaagcactttctgaactgtgacagctcaccttgtaggatatgcctagaattttgaactgcagcttatacatgttgtaggaaattcaattcctctttgaacaacagttttattgtagcgaaaaaagtggaaaccaaattgtagtggataaaaaattgagaaaaaggag

SEQ ID NO: 158221 - DNA, 488 bp, Homo sapiens
tgacatggttatctcatctgtagagcaaggtatagtggtgggtatggaatgttagggttgctgagggatatgcttcttggcttccaaggagtatggaaacaggagcgtgtatggatacctttggatgtgtgttcctggctcctgcctctcaggaccctggaacgctcccctggacaggtcctggcccagccaagatggtgttttacacagcagtgtctccacttaattcctaagagtggttkcatattcttgattaggttgtgcaatataaacatccttattttttaatttaaggggggccagctttttctaatttatagaaaagcactttctgaactgtgacagctcaccttgtaggatatgcctagaattttgaactgcagcttatacatgttgtaggaaattcaattcctctttgaacaacagttttattgtagcgaaaaaagtggaaaccaaattgtagtggataaaaaattgagaaaaaggag

SEQ ID NO: 158222 - DNA, 407 bp, Homo sapiens
actttctgaactgtgacagctcaccttgtaggatatgcctagaattttgaactgcagcttatacatgttgtaggaaattcaattcctctttgaasaacagttttattgtagcgaaaaaagtggaaaccaaattgtagtggataaaaaattgagaaaaaggaggaataagggaagattgtcttctaaagttgttttgctggtcatagagaatgactaaagtccattagattagtttttttttttctgtttgctttgtttgggtttagacagaaagtaaccaaagagcaagatatgatgggaaaatagttgacttagagaaaagtgataagaaaacagttttgtaagtgttggagggaatcagatgatgctgacaataatggtgatgcctttgactattaaaatggtgt

SEQ ID NO: 158223 - DNA, 407 bp, Homo sapiens
actttctgaactgtgacagctcaccttgtaggatatgcctagaattttgaactgcagcttatacatgttgtaggaaattcaattcctctttgaacaacagttttattgtagcgaaaaaagtggaaaccaaattgtagtggataaaaaattgagaaaaaggaggaataagggaagaytgtcttctaaagttgttttgctggtcatagagaatgactaaagtccattagattagtttttttttttctgtttgctttgtttgggtttagacagaaagtaaccaaagagcaagatatgatgggaaaatagttgacttagagaaaagtgataagaaaacagttttgtaagtgttggagggaatcagatgatgctgacaataatggtgatgcctttgactattaaaatggtgt

SEQ ID NO: 158224 - DNA, 553 bp, Homo sapiens
gccattcgtgtctaaaattaatgctccaaaaagaaatattaagtaatttttacaaggttttggtgatttaagggctggaatctctgttgatttacacctaattatcagaattctgaggtttatttatttcctcattttgctcatagaaggagttatatcatttatgattgacctctgaactatctcacatagtgtctttccttcctaacacaatcatctatcatgtcacaagttatttcctgcgtctcttctaaaccatgccacttcagaaggtttttctcctaagcataccacctttggaaagagttatatgcagtacatttttyctctagctatttcacttctgacctccagtttccattattcttgctaatctgtcttttcaaataattctttgttgaatgctatcagtggtggagatgacattagaagaattcagaaaactactccctaaaggactaatgagaacaccctagtacttttgaactcttttttacagtcttttttaatgcaaaataaaaatgcaccattcattctcactagtgacttatac

SEQ ID NO: 158225 - DNA, 605 bp, Homo sapiens
catagactaaggtggagtaaaagaaaattaaaagcagcacaagggtccagctgaaagtgaaactgttaaacctttgatgacatcaatttgaatttgcaacgttttaaaattgtctagtttgagccatggtagagcaaatgacaagtttctgaaagatttgagagccctggctagagtagctatggaagactatgaggaaaagataagagccacggaggcatagagcaggatggccaggtggggacccaggtaagcacaattcattctgcttaaatggggaaatgaggctttgagtttctttgatatggatgtcastgtgcaagctggatgatatttgggcagagaataaaatgggtttaatacactgtccaggaaaaacgtttgtctgggtctgtccctaccctctatctgacaggtagctggttgttgttatctcctgtagcttcttgtactatccaggctcagaaggactcctcaccatggttagaaatcaataaaggcatctgaagttagttgagaatagcctgtgaataccttctcagtatcctttccttttggttagatttgtcctaactcacgcattacatcacacattcactgagcaa

SEQ ID NO: 158226 - DNA, 456 bp, Homo sapiens
ccatatttaagcaggaaaaaggagaatcagttgtttgtttgctttccttcagaaggcaagaaaagctttctcaaaatctctcagataaacttgttacttggacagcaagggaatgtcaaaattgagaagcccattgttctaacattgccaaatacaaaggactgcaccaagaccaaccagagttttattaatcaggaagaagtgagaggattaatgtcttttagaaagttctctttttcagaatggtgtgmccatatgacagcaaaaaagtgttatgatttgtaatacttaaagtcagaagcaagatgcatgttctaatgttataaatagtgcattgttgtagcatggtatagctgttggagtcagacactcttgaactgtatcacctttgtcaatctaatcaatctctcagaaccatagtttttatagaaataaaagtatttggctcacaaaata

SEQ ID NO: 158227 - DNA, 451 bp, Homo sapiens
taaacctggcaatctgcaaaaactwcatggggaacttgctgggattttcagtgttattggatagtagtattttgtttttgtttttgtttttgttttgctttttggttgttgtttttgtttttgttttgctttttgagacaggtccttgctctgtcagccaggctggagtgcagtggctgtatctgagctcacaacagtctcaaacacctggcctcaattgatcctctcaccttagcctaccaagtagctgaaactacagggtttcaccaccatagccagctaatttttttaaatttttatagagatagggtctcactatgttgcccaggctggtcttgaactctgggttcaagagatccccccaccttggcttcccaaagtgctgggattacaggtgtgagccagtgcccctgacgttagtataataatttgaatttattgattggtgatt

SEQ ID NO: 158228 - DNA, 433 bp, Homo sapiens
ctggcaatctgcaaaaacttcatggggaacttgctgggattttcagtgttattggatagtagtattttgtttttgtttttgtttttgttttgctttttggttgttgtttttgtttttgttttgctttttgagacaggtccttgctctgtcagccaggctggagtgcagtggctgtatctgagctcacaacagtctcaaacacctggcctcaattgatcctctcaccttagcctaccaagtagctgaaactacagggtttcaccaccatagccagctaattttttwaaatttttatagagatagggtctcactatgttgcccaggctggtcttgaactctgggttcaagagatccccccaccttggcttcccaaagtgctgggattacaggtgtgagccagtgcccctgacgttagtataataatttgaattta

SEQ ID NO: 158229 - DNA, 433 bp, Homo sapiens
ctggcaatctgcaaaaacttcatggggaacttgctgggattttcagtgttattggatagtagtattttgtttttgtttttgtttttgttttgctttttggttgttgtttttgtttttgttttgctttttgagacaggtccttgctctgtcagccaggctggagtgcagtggctgtatctgagctcacaacagtctcaaacacctggcctcaattgatcctctcaccttagcctaccaagtagctgaaactacagggtttcaccaccatagccagctaatttttttaartttttatagagatagggtctcactatgttgcccaggctggtcttgaactctgggttcaagagatccccccaccttggcttcccaaagtgctgggattacaggtgtgagccagtgcccctgacgttagtataataatttgaattta

SEQ ID NO: 158230 - DNA, 450 bp, Homo sapiens
aaacctggcaatctgcaaaaacttcatggggaacttgctgggattttcagtgttattggatagtagtattttgtttttgtttttgtttttgttttgctttttggttgttgtttttgtttttgttttgctttttgagacaggtccttgctctgtcagccaggctggagtgcagtggctgtatctgagctcacaacagtctcaaacacctggcctcaattgatcctctcaccttagcctaccaagtagctgaaactacagggtttcaccaccatagccagctaatttttttaaatttttatagagatagggtctcactatgttgcccaggctggtcttgaactctgggttcaagagatccccccaccttggcttcccaaagtgctgggaktacaggtgtgagccagtgcccctgacgttagtataataatttgaatttattgattggtgatt

SEQ ID NO: 158231 - DNA, 561 bp, Homo sapiens
ccttagcctaccaagtagctgaaactacagggtttcaccaccatagccagctaatttttttaaatttttatagagatagggtctcactatgttgcccaggctggtcttgaactctgggttcaagagatccccccaccttggcttcccaaagtgctgggattacaggtgtgagccagtgcccctgacsttagtataataatttgaatttattgattggtgatttggttcaagtttctagatggatgaagattcagtatataataaaatatctgcagtcttttctaagatttgagagaaaaggaaaatgattaagactagttgagttaatacagctaatatgtgcatttttggtgggaataggaatatagtatgtatttattaacagtgagcacaattattctggaagagagtctaatattttaaaatgtttttgaaattgtattagtccattcttgtgctgctatagagaaatacccgagactgggcacagtgggtcatgcctgtaatcccagcactttgggaggccgagaccagtggatcatgagggcaggagttctagac

SEQ ID NO: 158232 - DNA, 430 bp, Homo sapiens
caaatatactttcttttgaaatagtggccagccagcgctgtttggagtttgaagagtaccatgtagagacttttttcttttaattgtgaggaattgatattgccacccaagacaaaaggactgaaggttgtttacttttcaggcttatgatgtgtgtgtgtgtgtgtgtgtgtgtgtgtgtgygcgcgcatgtgcataatttggaaagataccaatatcatacttctctgtcaagcatagtctatgagaagtgggaggaaatggtaatgatctgttgcaatctctgagcagccttggatttttttttcatagctcatctttacaggaaggcttacagccttgactgagtactagaaagcatgtaattgtggttgtcataatgaagctctgaaagaaagtacaagtctatgagcctgcctgacttttgaca

SEQ ID NO: 158233 - DNA, 675 bp, Homo sapiens
tgtctttttaactaagttgctattccaaagtaacccatgctatatttgaaaaagtcagtaaataggattatctgagaatctgaaaatcattgcaaggttgttttgatgagaatgttaaatgttactcaatttcattaaattcacaggcattcttcaagactgtattttccaggcgagacttcacagcattgtaatctctgggtctggaggactgcacacttgtttttctgatgtctgagaccgagtgarctcaaagatctcttctatttctttgtgggcatgaagggtatactgcccacttagcaattcctatcctcccttgacattccacagctcctttttattcacggagtgatgcaggtgtcattacttctcagtttctgtcttttgtgaatactggagatcctcccgaggcatgccatcttatcaccacaagtcgatattcatttgctttcttcaaggtccatagcaccagcctatagtgctcatcagagacagtctcattgtcaaagtggttaaggaggaagtataattcctggcctaaaaatcatttggcctccagcccctgtgtgtctacatcctaaagaaaataaataacaattttccaaatggctatttgccacttaaaacgaaatcagctcttgacaataaaccaatttaacacgagccatctga

SEQ ID NO: 158234 - DNA, 675 bp, Homo sapiens
tgtctttttaactaagttgctattccaaagtaacccatgctatatttgaaaaagtcagtaaataggattatctgagaatctgaaaatcattgcaaggttgttttgatgagaatgttaaatgttactcaatttcattaaattcacaggcattcttcaagactgtattttccaggcgagacttcacagcattgtaatctctgggtctggaggactgcacacttgtttttctgatgtctgagaccgagtgagctcaaagatctcttctatttctttgtgggcatgaagggtatactgcccacttagcaattcctatcctcccttgacattccacagctcctttttattcacggagtgatgcaggtgtcattacttctcagtttctgtcttttgtgaatactggagatcctccygaggcatgccatcttatcaccacaagtcgatattcatttgctttcttcaaggtccatagcaccagcctatagtgctcatcagagacagtctcattgtcaaagtggttaaggaggaagtataattcctggcctaaaaatcatttggcctccagcccctgtgtgtctacatcctaaagaaaataaataacaattttccaaatggctatttgccacttaaaacgaaatcagctcttgacaataaaccaatttaacacgagccatctga

SEQ ID NO: 158235 - DNA, 615 bp, Homo sapiens
tctatttattttgaacctatttgtgtcttttgttttttgagacagagtctcaaaaaaggttttttctaagtctgtgaaaaatgagactggtagtttgataggaatagcattaaatctgtcgattactttggaaagtatgtccatttcaatgttattgattcttccaatcaatgagcattaaatggttttgcatttgtttgtgtcatctgatttgttttagcattgttagagtactccttgtaggatctttcacctccttggttaactgtattcctagatattttagtttttgtttccatggctattaaaaatgtgattccattcttgttttggctctcagcttgaatccttttggtatacagaaatgctatggatttttgtacattggtttttgtaccytaaaaacttacggaaaatttttatcaattctaggatctttttgttggagtttctagggttttctgagtaaagcgtcatattgttagtgaagagagataatttgacttccttttgtcctatttggatgacttttatttctttctctggactgatttcccttgctaggatatccagtactgtgttgaacgggactggtgggagtgggcatacttgtcc

SEQ ID NO: 158236 - DNA, 409 bp, Homo sapiens
gtaaggccattctcagtgaaagcagcataggaaggatatgcagattccttgtacctcagtcccaaagctgcctgcaacagtggcagtgggatttgtcctcagagcatgggaaggtgcttagccttccctctcccttctaggctcagtggtggcagcggcagtagyggtgtcctcagggaaggatacagtcctttgtccaaaggcttggtcccttgtaggtttggctatcagaatggtaccaatagcagctgctcaatactcagaagcttatgggattccacatgtgttccctctctgcagcaatgcctctgtgcaatctctaggtagctccctatgttagacttaaggccaacctgggtagaggagttctcccatagctaggattgtgaaatactgtgggaggagtgtg

SEQ ID NO: 158237 - DNA, 549 bp, Homo sapiens
caaggtatagaatgttattggaagctttccagaagctttcctcataggtcaggttttatgatcaaaactacacatctgcatcacttacaagaaatgaacttgaagccaggtccagtggctcacacctgtaaccccagcactttgggaggccgaggtgggcagatcacttgaggtaaacatatggataaattaaaaaccaccttttcttgtttttataatctctttgaaacataattgattatttaaaataaaaattacaatgtactatgggttttataatatatgtaaaagttaaattatgagaacagtggtacaaagaccagagtagggaaaatggaagtatactgttttaagcttaaaaggtatatatgaaagtatatattactacttaaagtagacttgataggctcacgcctgtaatcccagcactttgggaggccarggcgggcagatcacgaggtcaggagatcgagaccatcctcgctaacctggtgaaaccccatacaaaaaattagctgggcgtggtggtgggcgcctgtagtcccagct

SEQ ID NO: 158238 - DNA, 362 bp, Homo sapiens
tttgtgtttatgtgtgggagacagctgcatcaaactttatacaacaaattataataggtttgatattaggaagaktaattttctggagtcataataagagatttttctcaagacagacatttcaaatgagataggactctaaaccctaggaaagctctaatggatccaaattcttccagctgagggtagtcttttatgtttcttatccctttcaaattgattctccagtaagacctaatgtaattttttaatccatttaaaaatggatacatactagaagcttaactttgcgcaattttattttccaatttcttaggaaataggttggtgccatggtgcctattctaaaagctctctgcttc

SEQ ID NO: 158239 - DNA, 362 bp, Homo sapiens
tttgtgtttatgtgtgggagacagctgcatcaaactttatacaacaaattataataggtttgatattaggaagagtaattttctggagtcataataagagatttttctcaagasagacatttcaaatgagataggactctaaaccctaggaaagctctaatggatccaaattcttccagctgagggtagtcttttatgtttcttatccctttcaaattgattctccagtaagacctaatgtaattttttaatccatttaaaaatggatacatactagaagcttaactttgcgcaattttattttccaatttcttaggaaataggttggtgccatggtgcctattctaaaagctctctgcttc

SEQ ID NO: 158240 - DNA, 635 bp, Homo sapiens
tgaatcttttcttacacactggctcacaattacaaccacaaaacccaaccaaaacatctaataatcactgtgacagaatatccaatctggaacagggaaaatagattgtagcaatcatagaaaatctgttttatgttacttatttctttatcaagacactactaagtagtccctctcataaaaaaaagagaagcaattgaaaattaatcaactacacctataaatacctactgcttatctgatctgtgcagatccttcaccaggtgctatgcaggataaaggaatcatgtgatgatccacaccttcaagaactaagctaacttaaggcgtgaatgcacagatgtgcttcttggagtcatttccaaaatggggtttttctctgaagctccatctgtataagatgttactaaaaacatttaagctctcacactgtcttccttcctgcaatagctacctcataaccaatgtcacaattttgtaaggcagtgatactattcaattatagtggacaaaagggcatgggcaaaacaaacaaaaatgtacttatttaagtgaaaaagaagaaaaaagccctgttatttccttaaaggtaatatcagcaggaatgacagyggtgataaaaacgttatcatttc

SEQ ID NO: 158241 - DNA, 401 bp, Homo sapiens
actatattatttcattttacacaaataaataaatatatatgccgggggaaaagtttgaatgtccttacaccaaactgttaacaacagggtctgtaagtggagcataatattgttctacccatataaatttgttcagacaaattatgctaaatccactactcaaaatatgatgtttcttctttttagaaggttctaccctgctttctatgctggtaaaatatttttgttttgagaactaatgcaagtgtcatctcccctataaaatctaagtgttttttacccaagcagtgatccgtttatcccctttatttgttagcayagattacctttattttagcacttacttgctattcaaaaattatctgttgctgtatttgttcctcccagcagactatgagctg

SEQ ID NO: 158242 - DNA, 319 bp, Homo sapiens
ctcctgctaacgtttccccatccacttatattgatttggttaagtatatatgtgaaaaggagacaaacatttccaacaaaygtaaaagccctaaattttctttagttaattacatgtacagtagaactacagaatcttcaacatttgattgaaatgccctctgtcattttccaaaatagtttaataatctatttggtatgatttccttttatctcagttttgctttgtatttatttaagaagtttgtcagcagtctccaaaaatttttgctcaagaaaagaagaaaatatttgtaaaactacccttgagatttgttata

SEQ ID NO: 158243 - DNA, 319 bp, Homo sapiens
ctcctgctaacgtttccccatccacttatattgatttggttaagtatatatgtgaaaaggagacaaacatttccaacaaacgtaaaagccctamattttctttagttaattacatgtacagtagaactacagaatcttcaacatttgattgaaatgccctctgtcattttccaaaatagtttaataatctatttggtatgatttccttttatctcagttttgctttgtatttatttaagaagtttgtcagcagtctccaaaaatttttgctcaagaaaagaagaaaatatttgtaaaactacccttgagatttgttata

SEQ ID NO: 158244 - DNA, 319 bp, Homo sapiens
ctcctgctaacgtttccccatccacttatattgatttggttaagtatatatgtgaaaaggagacaaacatttccaacaaacgtaaaagccctaaattttctttagttaattacatgtacagtagaactacagaatcttcaacatttgattgaaatgccctctgtcattttccraaatagtttaataatctatttggtatgatttccttttatctcagttttgctttgtatttatttaagaagtttgtcagcagtctccaaaaatttttgctcaagaaaagaagaaaatatttgtaaaactacccttgagatttgttata

SEQ ID NO: 158245 - DNA, 587 bp, Homo sapiens
agctatgtacagaagtgagattctatctaaatctatcagattagagaaatgttcccttcctctgtttgggctgaataacagcattcattgcattaattttctcagactstctttatatttctcctcataataatcaattattcacagcaattttgattcatttgaactaatcattattaggtcctgtggaagcttggcaatttaacattctcattttcgatgagattttttttaacaagagtgattagactgtatatgatcaaagttccccaattgcctataacattacttttttttccccattcttcaaagccacaggtcattttactcagtgagggttgaaaagacttattattcttagcatgggccaacggatgcaacttattatttggatcacattttcttagttacaaaagacacatccttggttattttaatgtaatcagaatactgcaacttgaagagaggtaaagtaataagatctagtctcattatccagacatttttgaaaaagaggaaaagaagtaaacaattttgtccttattttttttctttcaaagatgctaggcttcaattaattgccctgt

SEQ ID NO: 158246 - DNA, 549 bp, Homo sapiens
atctattaagtgttgctattgggaatgataaatgaatatttacaatttacaataaataaacccaaaataccaacaagtttccccaaagatagagaagtttctaaaagtttcsacttttcagcgactactgcacattgtgaagaagtagagacattctaggtcgagttcactttaactagctaggtttcatgggccactaaaacccctaaatattctaggttttggtggaacgtaagagaaagagaatcagacaagcaaattataaaacctggttttgacacttatttacagagaagcctcaactccttggatatcctcatctgtaaaatgtctaccttagtgtgttcttgcaatgataaaaatcagagaatataacacacctagaacactgcccaccacagtaataatgttttaaataaatgttacctcccttattttcttattttaataacagttcacaatagtttaaagaggatcaaagcagataaaatgtgggcacataagcagtttaacataaatatttgctattacaatatagtaaagggtgga

SEQ ID NO: 158247 - DNA, 575 bp, Homo sapiens
ttcctctctcattccactgacccttgacaatcatgcttctgatagaacccaaaggtaatctcctcttttcaggcctaagcttatctcttctgagtcactctggatcctcctctcctcatacaggagagatgttagaccattatcatactttagtgccatgacattggcctgccctttgacatcttctaggcttcctttgagtctgactgctctgactgcagcccactgtaagcattcccaggcccacttctacaaagaagaccgggttgataagaggttttatctcagtgccacagcaggcatcctgcctggcgkggtaacacttaagaagtgctagatactttttcaatgggacagcagagagattcaaaaaaatgacctttggtgactttgctattatagactatcttccagaatgagataatgcaggatggatcatggtcaatggtatgagtcagttctagactacagctgttcaaagtttatcatggttttatatttcttattctttgggggtgtagatgatgaagctctgtagaatggtaagaatacttgagaatagtgtaagacccaag

SEQ ID NO: 158248 - DNA, 512 bp, Homo sapiens
tcaaacttaagaagagtggagggatctttcgtgctctgcaacagaagttcagtgccattgaactatggaaacacggggtttttaggtcctcttatgaggaaatgccttcctatcactggttctgtttttgcccttgctgtgattttatatgcaaagtagctattcagcagacacagtcaaatacctyaaatgtctatcagtcactttatcagaaacacggaccaagaaaatataatagaaaatatggaaacaggccaaagtacatgtggtaatttaatattataaagaatataatctcaaattaaggatgaggaaagagaacattttaagaaattgtattagaacaaagagatagtcatttgagaaaaaaagatacatttggattttataccacacacattgtaccatatgctgggtaaatgcaaattgatcagaaatctaaatgtaaaaacaaaaccatacaaaaagtgaaaaaaatcagtgtattagttttacaatattgaagtgatgaa

SEQ ID NO: 158249 - DNA, 512 bp, Homo sapiens
tcaaacttaagaagagtggagggatctttcgtgctctgcaacagaagttcagtgccattgaactatggaaacacggggtttttaggtcctcttatgaggaaatgccttcctatcactggttctgtttttgcccttgctgtgattttatatgcaaagtagctattcagcagacacagtcaaatacctcaaatgtctatcagtcactttatcagaaacacggaccaagaaaatataatagaaaatatggaaacaggccaaagtacatgtggtaatttaatattataaagaatataatctcaaattaaggatgaggaaagagaacattttaagaaattgtattagaacaaagagatagtcatttgagaaaaaaagatacatttgrattttataccacacacattgtaccatatgctgggtaaatgcaaattgatcagaaatctaaatgtaaaaacaaaaccatacaaaaagtgaaaaaaatcagtgtattagttttacaatattgaagtgatgaa

SEQ ID NO: 158250 - DNA, 602 bp, Homo sapiens
tcttgtgacattcttctaattaataaaatgcagaaaatgcaatggaatgtcatttccttgattaggttccaaaacattttgacttctgtattactggtaatttttctatcttgttgtcactctcacttgcttgctttcttgcttgcttgttctgacttgaatgttatatggaaaggcaggtggggcaggagtggaaggagtccactagccaacaacaagtgagaagttaactccttaattcaacactctttaagmaggtgaattttgccaacaaccatttaagtaagctaaaaaggagattcttcccagttgacccttgagacgactattatcctagccaacaccttgatgcagcctaatgagagaccttgaagtagaagccccagataagccatgaccagattctaaacacacagaaaccgaggtaacaaaatgatgtagttttaagttactgattttggggtcatttgttatatagcaatagataactaatatgcacctagtctctgttctaattatctacagttgtatagcaaattattccaaaatcttagtggcttaataaacaaccatcacttattttgctccagaattttcaatgt

SEQ ID NO: 158251 - DNA, 612 bp, Homo sapiens
taaaaatactttagagtcaggctttacaattccattaacttagcacctggtaggtgcttaataaaaaagcattgattaaatgttcactacttaccctttgcactattcatctagcattatttattcattgtcttgtcctcccgtgaaggataagcatttagtggaagtgatcatgccttgtaagtaactcttaaagtctccatcaacagcccctaggccttgttcaaagtgttcgttaatggaagtctataaaacaaattttaatatctactgtctattaacacattcacttattcctttgacaggaactttcctcgttctggcaggaagcagcagggaaaagtgggaaaagacagtagaatagaggttaggcactcatacatggtggccggaccacctggttttgaacaagattcaggcagttactacatatagaccttagaaataacttattatctgtaagccttcttgtgtcatttgtaaaatggagaaaatagtttttccttatagggcrgttttgggaataaaatgggataatgtgtatgtaacatgcagcacaatgcttatacaaagtaagtgcatagtaaaccttcactttcattaaatgtcacc

SEQ ID NO: 158252 - DNA, 612 bp, Homo sapiens
taaaaatactttagagtcaggctttacaattccattaacttagcacctggtaggtgcttaataaaaaagcattgattaaatgttcactacttaccctttgcactattcatctagcattatttattcattgtcttgtcctcccgtgaaggataagcatttagtggaagtgatcatgccttgtaagtaactcttaaagtctccatcaacagcccctaggccttgttcaaagtgttcgttaatggaagtctataaaacaaattttaatatctactgtctattaacacattcacttattcctttgacaggaactttcctcgttctggcaggaagcagcagggaaaagtgggaaaagacagtagaatagaggttaggcactcatacatggtggccggaccacctggttttgaacaagattcaggcagttactacatatagaccttagaaataacttattatctgtaagccttcttgtgtcatttgtaaaatggagaaaatagtttttccttatagggcggttttgggaataaaatgggataatgtgtatgtaacatgcagcacaatgcttatacaaagtaagtgcwtagtaaaccttcactttcattaaatgtcacc

SEQ ID NO: 158253 - DNA, 543 bp, Homo sapiens
acatttatataatggaatactgttcagacaaaaaaataaaataaaatcatgtcttttgcatctacatggatggaactggaggccactgtcttaagtgaaacaacacagaaagtcaaacatagcgtgttctcacttataagtggaagctaaaacatgtctacacatagacgtagagagtggaaaaagtgaacattaaagatttggaaagatgggagagtgggaggagggtgagaggtaagaagtaagttaatggatacaatgaacgttattccagtgatagttaacagtaaaagcccagatgtcatcactatccaatatagccatggaatgaaactgcacttgtaccccttaagtttatacaaataaaaagagatttgttcctggtgttagaaaaaaagtaaagggggaaggtgctaggaraggaactcatatttattaagcactgtgagagctacttgatataaacctttcatttacctacttattaactatttctagatgttagactctgtgctaaataagcactgggaaacaggaacaagg

SEQ ID NO: 158254 - DNA, 543 bp, Homo sapiens
acatttatataatggaatactgttcagacaaaaaaataaaataaaatcatgtcttttgcatctacatggatggaactggaggccactgtcttaagtgaaacaacacagaaagtcaaacatagcgtgttctcacttataagtggaagctaaaacatgtctacacatagacgtagagagtggaaaaagtgaacattaaagatttggaaagatgggagagtgggaggagggtgagaggtaagaagtaagttaatggatacaatgaacgttattccagtgatagttaacagtaaaagcccagatgtcatcactatccaatatagccatggaatgaaactgcacttgtaccccttaagtttatacaaataaaaagagatttgttcctggtgttagaaaaaaagtaaagggggaaggtgctaggaaaggaactcatatttattaagcactgtgagagctacttgatataaacctttcatytacctacttattaactatttctagatgttagactctgtgctaaataagcactgggaaacaggaacaagg

SEQ ID NO: 158255 - DNA, 595 bp, Homo sapiens
aatagtacatgtcctgtattcagggacatacacacacaaataaacacaaatcacttacgatgacatctggtcctttgatttcataatgcaaatgccaaagggttattttgttttttccaatgtcatctcataaaggcaatatattccctgaggcaggctttggacccgagtatgaacagggtcattattgttgaattttaggattctccctgggaatttaggtgtcactaaagcagcsatgttgtcttcggccttaagcaaccaattgatacccatacaccagttctttttgtcattatgaccagtatatcggctctaatattattgatattttcatcacccaaattagttttcaggatttactgccagactggaaatactgggttagagactgggagttccattgtagtattttaacatagtcgactattaataataataaaaataataatacctgtactatttatttagtctgtgcaggcattgggataagagctttataagcatcatctaatgttatggcaaccttatatgttaagtactattattttttctttaatttatatatggagaaacttaggtttagagaggagaa

SEQ ID NO: 158256 - DNA, 601 bp, Homo sapiens
atatcaatatctacatcatagagttgatataggaataaatgaggaaatccaccggaaaacctagcacagtgacttgcacaaaatcataacctaaaaatatcatcatcattgttattattaccatcaacattttcatagttacatacttggattctgtagttattaagatactgcttcagaatacagagattttggtaaatggaatagaatttcaaacaacaacaacaataaataaagcctttgaaaagttcaaggatcttgaataaggccagtgtaaactaaagtaccaagcaaatgagaaagtgctgatgaggtggtagatgtagcagaaggctaatcaggcatgccttgcaattctaatgaaaaattcagttttattccaatggcagcataatcatcaataaactaggttccttccccaaaggggcaggtgggcaaataagtggatatgtcagtgcactatgatagctgtgctaaaaattaaaacaggagttttagtgcaaagagaawggaaacttcactcagccttcaaggagccttccgcaccttgaaagagagagggaaaatatgtctatagccacaattccataaaaggaaagaa

SEQ ID NO: 158257 - DNA, 473 bp, Homo sapiens
cctggggttgatggggaactattccctctggatcacagctcatgaagctgtctggtaacattcctgttatcactttcccacaggaaaaacaatcaatctataaaataaagttttctctcgctttctatagcttaaccagatgtgttagggagttgaactgtatgtttattaatttcaacgtgttgaattgtcttatgttttaccttctttatatataaagcmcattaaaatatgaaattttttttctctgccacaaacattgtttaactagtgtagagtccttgaagaatgtcttctatgcatgagaattatttaatatgcaaagattctatactctgtcaattctggatatggctaactagttctttaaagggctagacagtaaatattttgaatatgtagctatagcatctctgtcataactatttaactctgccatcatagcagcattgaaatcagaatcagatagacct

SEQ ID NO: 158258 - DNA, 508 bp, Homo sapiens
ttccatacagactcttacatgctttggtccagaggtgatatgcattactcagatttacagcccttgcccagagtcacttgacctctcctcattacaaagaaagtcaaaaaacaatgcggagtaagggaactgagactaacgtgtggaaattcagtcagccataaatgtctctgctagagatgagcctgctgtcagtgcaatggaagtaaacctttttctgaatacaaaaccattcagtgttcttcatatcaactttaaattccaataggggactacagtgtatracgaaatgctattgagtaactcattatggcaaacaagaatcgccttaggcatggctgaattttccctaactcttcttttttgcccaatgccttaatacctgagaggtggcatgtttgtgttgttccatgaggcagaagcaagaccaatgatattactggggataggctttgcctttatgtccgtgaagaaagtctactttgagcctaattcatgttttgattga

SEQ ID NO: 158259 - DNA, 591 bp, Homo sapiens
ccacacttctaaaattttcctatggcttaccatggccttcaagataaagtttgagctgctttgcagatagcctgtatattctaccacctgaatctgggtttatctcccatcattaccaatataattatacccttaaaatactgaatttgctgtggtgtccgacacatcactatgtttcttgggtctttacatattgtgcactaactttcaattgtctaggatgcccttcattccccaaccccaaacatttatttgcctaggtaactcctgttctttcctcaagactcagcttggttctcatagaagactttaccttaaccttcacactagcgtcagttcatcagaccgctatcacttcacttaatagatttattctcacataaagtatccatatgatcagtttctttgtcagtctcttccctggattgaaaatttattgaagtcaagtaccttataatttttgcattcccagtgcctaacatataatgtgagcataaaattatttattaaactgaactkaatgtgtacttttatttcttcagaatgtcatatgcaacaggggattcaggtttttacctagggcatccttaa

SEQ ID NO: 158260 - DNA, 518 bp, Homo sapiens
tctatacgataggaattccagaaagaggggacagaaagaacaagaggatacaaaataaagaacaaaataattcaagaatatttcccrgaactgagtgacttaaaagacacactgaggacataccaatctcaatggatgaaaacaggtgcacaccaaggcctatcattgtgaaatttctacacactaggaacagaggaaatgttacaagctttcagagggagaaagagagagacatcaaaattctgaagtaaaaatatttccaattctatatccaggcagagaaagcaataaagaatagaataaagacgtttgcaggaatccaacctccccaccctgcaataaagtgccatctctgcaaatgataaaagaaacctataaaaaggatgttaggtgataaatataactggagattcaatacaggagcgcttaatgagacatcttagaatgacaatggtgcacatcagggcagagcaactgcagaaacaccaacacatactgagggctgtcatcactcataa

SEQ ID NO: 158261 - DNA, 520 bp, Homo sapiens
attttttctgccagatattctagttcactgctcttaaattctgccttccatagagccrtaagacatggacacaattcagccaagatctttgcaacttcataacaagaacaatcttcattccaatttttaatatttctcatttccatcagagacctcatcagacttgcttttaccatctaaatttctaccaatattctgataaaaacctcttaagtaatctctaaaaagttttatactttccctgaagttcttttcttcttctgagccctcactaggattgtccttaactctttatttacagaaatactggctttttctagcctgcttctccaacctctttcagcctctgcccactacccagttccaaagccactttcacattttcaagtatttgttacagcaacaccccacttctgcagtaccaatttcctgtcttagtttattttgtattgctataacagaatatcacaaatggtaatttgcaatgaacaggaatttattggcttatagttttggaggc

SEQ ID NO: 158262 - DNA, 520 bp, Homo sapiens
attttttctgccagatattctagttcactgctcttaaattctgccttccatagagccgtaagacatggacacaattcagccaagatctttgcaacttcataacaagaacaatcttcattccaatttttaatatttctcatttccatcagagacctcatcagacttgcttttaccatcyaaatttctaccaatattctgataaaaacctcttaagtaatctctaaaaagttttatactttccctgaagttcttttcttcttctgagccctcactaggattgtccttaactctttatttacagaaatactggctttttctagcctgcttctccaacctctttcagcctctgcccactacccagttccaaagccactttcacattttcaagtatttgttacagcaacaccccacttctgcagtaccaatttcctgtcttagtttattttgtattgctataacagaatatcacaaatggtaatttgcaatgaacaggaatttattggcttatagttttggaggc

SEQ ID NO: 158263 - DNA, 339 bp, Homo sapiens
acccccaatgaccgaacgccttacataagcccctccccttgagtgrgagaggagcccactgattgcttctagctgatagaatatggcaatggggttgaatagtcactcccttggttaggctatgttatatgacaaaggtgatgggtagtcactcctgtgattacattacattatataagactccactttagcagcctggaggaagagatttctctgctggttttgaaaaagtaagttgccatattgtgagggaagacaatgggtaggctgtgtagcaagaaattgcagggccttctgggagctaagagaagctccgagtcagcaaggcagcaggagcct

SEQ ID NO: 158264 - DNA, 520 bp, Homo sapiens
gaattccaatggctttttaaatgtaggtgaagccaggcatctttgaggagccaggrgttccaagattagtcctaatgggaagtcaatgaacgggacaaagtacattcttaaattataacaaggaaatccaaaaatactggatagattgtatagatccaatctatctctgtgatagcaaacattcactccctgccccctattaaacaaattacttttccctaccccattggatactatgttcagctatatgacctgctttagcaaagggaatatgggtggaagttacagtgttccagcccttaatgggcatggacccactaagctttctgtcagcctttaccttgagaaaaacttgtcccagatatcaactgctcctaggttcccaaattagatatacggagcacagctatcccatctgtctccttgacccaagcctaaaacagagccaccccagcgaacctgtaattatgagaataaaaacttaccgttgtatgccactgagattctatggttgtttgtt

SEQ ID NO: 158265 - DNA, 583 bp, Homo sapiens
aaactgtacaaatatatattaagcatatttctgcatggagattacattttgcaataaatgtaattcttttttttaaagaatgtcattatggggtattcaaaggaagactgtctcaaagggttaattattgggaaaatgactatctagttccctaaagtgttcatttgaaagctggtggtcagaagtcagtctctatttcatctccaaagtaaataaaataaatgtaatttttcaggattttaactacacaaatgtctgtttttgtcaaaatgtgttgctccttagatagtgagatgatgatacatggcatttttttttattaacaccaagcactaatataaactgagctcatgatatrataaaacagagctctccaatagaattttctgcaataatgaaaatgttgtacatctatgttgctcaatctggtagacattcacacatgtatagggttgccttatttagcaaaacaaaacaaaacaaaattttaaaaagcaggacacctaaatttgaatttctgataaacaacatatcatttttagtatacatgtgccctgtgcaatatttggctcaataaatgtta

SEQ ID NO: 158266 - DNA, 404 bp, Homo sapiens
ccttgctattctatcagtttttggtctcaaaactgtttttgttctcttgttagatgcatctacattaaggattgttatgtcttcttggagaattgccacttttataattatatttctcttgatccctgaatatcttatttgttttaaagtctgctttgcctgaaatgtagtgactcccacttttttttttgactggtgttagcatgatatatctttcttcattccyttactttgaatctgtctattttacatgagtttcttgtagacaatatatagttgagtctatttatctatctactttgacagtctgtcccttggtatatttagaccattcatatttaagaggattattgatatatactatggaccccatacatgacaatggttccatataattgtaatgg

SEQ ID NO: 158267 - DNA, 520 bp, Homo sapiens
cccggtcttctcaccaatgggctgctgtgcaaagatttgatgaccacatcttgatatggaaacctcccagagtttccaggagatggcattagatctgtaaagtagtgggtaacaaagaaaaggaggagaaaaagtgttctagaggaagaggtggtgggaggttgttttgttctgttttgtgtctgatcaagcttctttctgtgctgaatgacaccatgcccaaggaagcacatgttctgtttcttggaaaaattccttggctcagagccatcaccacagaccttcttagacacccaaaatgggcaaagaatayttgcttgaaagaatatttgtaatccttcccttgaaaagtcaagggtggtagaaggtgaagaaaaagggagcggttgtaagggggaagatatgagtgcagatgtagcaaataaggggcagatgagacatgaagatgagttctggcttcccaaatatggcatgccctgtatggtttgagagagacacacactctctccaaactcaagaa

SEQ ID NO: 158268 - DNA, 417 bp, Homo sapiens
tgggcatatgaccaagggattcactgtccctctcacatacacattatcaggaaactgccacctattagagctgtagaatggcctttatttatttttaatagtcttgttgagatataattgacatgtagtaaactgtayatgtttaaagtatacaattttataagtttagacgtatgtatacaatcaggaaaacatcacaattataattgtgatgattataaataataaattataaataaataataaagataatcataaataaagataataaacagataataacatccaaaaattttcttgtgccactttgcaatctctccctcctacccttcctgccctccaaacaaccactgatctgcatcttgtcactatatgttagtttgtattatctagagttttatgtaaatggaatcatac

SEQ ID NO: 158269 - DNA, 598 bp, Homo sapiens
tgccccattcataatcacaacacctaacaatgaactagctgttcaaagctgttttaaattcaaatgagaagattaacgaacatctccaaagcattcctaacccccaatctcttttaaaaattaattgttttcaaaacccctccttatgtttctctagcaaacagctgcacaagataaacaaagtgaacaatcatacagtatagaatgctctgtgcagagcctaaataaagcaagctacaaaattgaygaattccttcacaaaccatttctaacacataatgcaggacaagcggaaatcagaccatgtgttacaccacaaactcccttagctgtgcaaatcattagaatttgatcttgatcccagggtgtttacaatagtgtgatatagtctttccaccatattactcaaactatccttgtgttatatactttgtatactatgtctgctttgactactcatgcaaggtatagcatgataaattggagaaatttaattgcaattgggcgtaattgattcaaaattttctaataaactcaaatgaatgataatttcctgatacattctttcttttttaaatcagcagtgagagaagcatat

SEQ ID NO: 158270 - DNA, 598 bp, Homo sapiens
tgccccattcataatcacaacacctaacaatgaactagctgttcaaagctgttttaaattcaaatgagaagattaacgaacatctccaaagcattcctaacccccaatctcttttaaaaattaattgttttcaaaacccctccttatgtttctctagcaaacagctgcacaagataaacaaagtgaacaatcatacagtatagaatgctctgtgcagagcctaaataaagcaagctacaaaattgatgaattccttcacaaaccatttctaacacataatgcaggacaagcggaaatcagaccatgtgttacaccacaaactcccttagctgtgcaaatcattagaatttgatcttgatcccagggtgtttacaatagtgtgatatagtctttccaccatattactcaaactatccttgtgttatatactttgtatactatgtcygctttgactactcatgcaaggtatagcatgataaattggagaaatttaattgcaattgggcgtaattgattcaaaattttctaataaactcaaatgaatgataatttcctgatacattctttcttttttaaatcagcagtgagagaagcatat

SEQ ID NO: 158271 - DNA, 575 bp, Homo sapiens
cttattgaaactgtaatttctcttggcttgaaacaatcaaactacaaaactcagtgctgtttgagatagtacttataagctaaaagagcccttccaggctgggcatggtggctcacacctgtaatcctagtgctttgggaggccgaggcgggcaggtcacaaggttagcggttcaagaccagcctagccaacatggtgaaaccccgtccccactaaaaatacaaaaaaaattacccaggcgtggtggcrcacccctgtaatcccaggttctcaggaggctgagacaggagaatcgcttgaacccaggaggcagaggttgcagtgagctgagatcacaccactgcactccagcctgggtgacagagcaaagcgctgagactccgtttcaaaaaaaaaaaaaaaaagcccttcccatctttagtcatatacttactatttttctttctcttgtcattcttttttattttttcatctacttatttagctctttatcattttttcctcctcttgtgactatgtcttaagatcacctgccagagaattctcaagcatgatagtctcccttgtggccatct

SEQ ID NO: 158272 - DNA, 575 bp, Homo sapiens
cttattgaaactgtaatttctcttggcttgaaacaatcaaactacaaaactcagtgctgtttgagatagtacttataagctaaaagagcccttccaggctgggcatggtggctcacacctgtaatcctagtgctttgggaggccgaggcgggcaggtcacaaggttagcggttcaagaccagcctagccaacatggtgaaaccccgtccccactaaaaatacaaaaaaaattacccaggcgtggtggcacacscctgtaatcccaggttctcaggaggctgagacaggagaatcgcttgaacccaggaggcagaggttgcagtgagctgagatcacaccactgcactccagcctgggtgacagagcaaagcgctgagactccgtttcaaaaaaaaaaaaaaaaagcccttcccatctttagtcatatacttactatttttctttctcttgtcattcttttttattttttcatctacttatttagctctttatcattttttcctcctcttgtgactatgtcttaagatcacctgccagagaattctcaagcatgatagtctcccttgtggccatct

SEQ ID NO: 158273 - DNA, 285 bp, Homo sapiens
ccatgcatgttgtccacattttccactagaacttttaatacagtaatttattttaaattctttgtctgackgtttcaacaattggatcacatctcctttgcttcttaacagtgggttttttttttttatagtcttataatttttggttgattgaaaccaggcattgtgtttaggacaatagagacgctggtaaattgtatttatgcctgagtaatgggcatgcctctctattgttgtggtggggtacgttaagtcagtgtaggcagaagttgaaatgggtttgtt

SEQ ID NO: 158274 - DNA, 285 bp, Homo sapiens
ccatgcatgttgtccacattttccactagaacttttaatacagtaatttattttaaattctttgtctgacggtttcaacaattggatcacatctcctttgcttcttaacagtgggttttttttttttatagtcttataatttttggttgattgaaaccaggcattgtgtttaggacaatagagaygctggtaaattgtatttatgcctgagtaatgggcatgcctctctattgttgtggtggggtacgttaagtcagtgtaggcagaagttgaaatgggtttgtt

SEQ ID NO: 158275 - DNA, 595 bp, Homo sapiens
taatatatatatagtagcatttcattaattccttttcatttatgcacttcactctgtgcaggttactgacagttgacttaaaatatgtattgctttagctggtaagcgtacataaaatcactaaatcaaatttgccaggaacatcaactcagaaaaattaaacatgtggacagtcaccaaggacaaaaggccagcacacttccatatattttctcttcttgagtttttgctaagctacgaattcttccaactttaaacacaactgtgaagtttctgttggaatcagctctcatttttagtggctgcttccttgtgcatcagaggaaccaaagtaaatttttataggaaaagaartgtttaaaaatctcttttaaaaaggtacacggaaatcaacagtgtattttataacaaaaataatcaatgggcttcttgtgtttttttgtgtatcttgcctgagccaccacattttacttctgacaagactctttggcagtcaaaaagggggtgccagtattcacatattaacaaactgtgaaatgtccttttcatccctagttttcttgcaatgtcactgcctctcttttttacctttgta

SEQ ID NO: 158276 - DNA, 200 bp, Homo sapiens
ttaatacagtataaagtcaacatattttgatcagcatttgtatgccatggatggcttggaaattcagttcaaattttaagtttttacccttgatttttgtctgtgtttacctagtttctttatttctcgggcttaatcattttttagagaagtagatgagtgsttgcagagggcagaagtgttagggagaagtggtgagt

SEQ ID NO: 158277 - DNA, 532 bp, Homo sapiens
ttcctccttccttagggactttgttgtctaggagattccctggtagtcctccgtacccaaatgccctatttggaacattgaatacrtaacaatatttttaaggcatttaaattattccttaatagtttttttgtccaatatgtgtattttcttttctaagttaacatgatttttttcaacctacaaagctgaatttcataatagtgagtgatgaccttttctgaaagaattttggcatatattttataggtgtccagctctttacatacatggctgatcttttcatcttccttgaaaagatgctcttctatttttccaggataaattctctgtaagttggatatttagttaaatttcatttcctcagtgcagttcagaagggaattgacatttttgctttccctttctgactgcagctaagctttctgagtttggagacttaatatgttccttaagtgcatcagttatttattttattcagttaatttagtatacatttgatttctgttatctctgagttcttacaaattta

SEQ ID NO: 158278 - DNA, 557 bp, Homo sapiens
atgggtaggcaactttctatatattccatacaatgtataaaatatttcatacaggcatttcatgcaatgaaatactacttagcaataaaaaaggaatgagcttctgatttacacaacatggatgaatttcaaaagcattacgttggctgaaagaagccaaacacaagagtmtatattataccattcaataagctcaagaacaggcaaaacaaatctgtgatagtagaaatcagaatagcgagtacctgcacaggagggttgggtgacagagtatgagctggtagctctttctggggtgaaggaaaccatctataacttgattgtggtcacatgggattttacattgctttcatatctcattgaattgtacatttgtacattttaccttactaaaaaaagtggacagggattacttttgctgagagggtgcagtcaaagcattctaaagccatgtgactgcatctggatgagaacttgcttcttaaggatgctttgatgtctggggaagagcaattgaggaagtattaacagagcttgagcactcttgctttcaagaa

SEQ ID NO: 158279 - DNA, 553 bp, Homo sapiens
gtactaaaaaataaaatccttcctttgtcagcattcttagggtgtgggctctggagccagactgcctggcaccaccatttaagtaactgggtgaccttgtgcaagttagttaacctctctttgcctcaatttccttatctgaaaaatggggctgtaccaacaacttatggtcagcatgaggatgaaagcayctagtatggtgcccaaaagagagaaggcatgcaataattgatctggctccagcttaactccctactttgtccgtctctgccttcccactcccaactgctttccctgaatcttgccaccaaggtttcttcaaacatgctctcccttgcctctcctggattactttcttctttcctcctggctaacccacactcctctgctaggtctcgatgcagactgtacttcctccagcctgagttaggtggtcctcacctatgtacccacagctgcctgggctccttctattgctgtgtgtctaacacagcattttaatacttaatggtttcccccattggactccgaggaaaagactgatctgtcttgt

SEQ ID NO: 158280 - DNA, 595 bp, Homo sapiens
tagtttatgaatagcagaactgagactgaaaccaaaattttctgattcctggaccaaagcccttcccatctcggcagatggctttcctacgtaatacgactgaggtctcccatagttagaagcaacacccaaagcttatgctattaaataaagaagatataacagacaagttgaatgctatgttaaaatacagcttcctgcaagggatctgagagacaaggcyagattagatgagaggtcaaagaaatgcctgttttgtggggcctcaagcacaagagagcctaataatagagacagggtgatttaaaaccctgcttatggaagtaattaattaatttcaggaaaatgtccatatcactgccaatggccaccatctgatcacaactaattatctttcataaaatatagatattctttctgtgggtttttgtttatttgttttcaaaaattttgctggagacatgccactgtactcatttctactttggtttgctccctgggagcaactgagttgaatctccaatccctggtaaaacaaaattgacatttttcttccagtttctaatttcccaccacaatagtagacgcaaatata

SEQ ID NO: 158281 - DNA, 183 bp, Homo sapiens
actggttattctagtcagcaattcctctagccttttatcaaggttcttagcttctttgcattgggttagaacatgctcctttagctcatcrtagttttttattacccatcttctgaagcctacttctgtcaacttgtccatctgatcctccttctagttctgtacccttgatgatgaaaagac

SEQ ID NO: 158282 - DNA, 474 bp, Homo sapiens
tcgcacagctcatacatgggagaagaaatgttcaaattcagyggcctggcttcagagtctctgcttttaaagatgagtgaactgagacagaaaggagtgaagcagattggttaagagccagcacttccttctagtatcggtatgattgaccaccaccacgcactttggccacttgatcactataatctcagaagcagtatgattctgcaaaacaaaacaagttatgttcctcattcaaccaatatttattgattgctcccttcatcttagggtctgtgttaggctccaagaattcaaagaaaaataaggttttcctgccttctgagagttcccagtctatagaggagaaagtaacaaataagttcaacacaagacatgatagttaagtctaggtaggtctttcacaaaagaagtgaaataaagacacagggataatttcgattggaaggggaaaaggaaggaagcttcagtgat

SEQ ID NO: 158283 - DNA, 474 bp, Homo sapiens
tcgcacagctcatacatgggagaagaaatgttcaaattcagcggcctggcttcagagtctctgcttttaaagatgagtgaactgagacagaaaggagtgaagcagattggttaagagccagcacttccttctagtatcggtatgattgaccaccaccacgcactttggccacttgatcactataatctcagaagcagtatgattctgcaaaacaaaacaagttatgttcctcattcaaccaatatttattgattgctcccttcatcttagggtctgtgttaggctccaagaattcaaagawaaataaggttttcctgccttctgagagttcccagtctatagaggagaaagtaacaaataagttcaacacaagacatgatagttaagtctaggtaggtctttcacaaaagaagtgaaataaagacacagggataatttcgattggaaggggaaaaggaaggaagcttcagtgat

SEQ ID NO: 158284 - DNA, 552 bp, Homo sapiens
agcaacaaaattgaagttcagaaagtgaatgtctccagttgtattccttgtaagcagaccctgagatgagggcttgcgcaaaagtgatttttttaggaagcacccctgggaaaaccaggcaggatgggtggggaagtgaaaccaagaagggaaggagggtcagggagggtatgctgcgtagacaggtggcattgagcacaacctctctctcccctctcctcatcaatgcattggtactatcttaggttcctggaaataagcatgacctcaggaagagggaagaaccccagattaaaatgccattgagtttccaaaaacctagtggatgggggtgaggtggagtttgaaacagaaattaagatgggtggacaggtaaggacagttacatttcttgcacagcctattcatgtagagtccctccggawtaactttggctcagttactcaggggagatctggagatggtgtaggtcacacctcagacaacatttcttaataattttacagaattaagtcctaatttccgaggccatccactgtggggagtgaatta

SEQ ID NO: 158285 - DNA, 590 bp, Homo sapiens
aagcttcttgattttggttcaagcacagaaatatcaagacagatccaagaaatgctgtcattgaatgctaacctgcggcggcaaagcccaactgaggaagcggatgaggctcccactgcactcctgcctgagatcctatcatggagckggggacaggggatggtgccaagggggaagtctgcacagctctccccaggctgggcctgtttctggggaaaagaacttgcagccactcaaaacacagtttagaagaatgaaaatgttcctcaccggaggcaagactcagccattcataggccctgtggcccccagaggcaggaaagcacgggggagcaataaccatgtgaaatcaagtcccaccccagagccagtgaggcggtttactgaacttcttgcatctttaatgctctgtgaggcacagggaagctgaccgctacccttcttgcccaatgctttggaacaaggaagaacaaggaaggaagggcagggaggaaaagacagctgtctcgttagccttcagattcaccaaaggcaaggactcactcaagagcctcccaagttgcaaggacagcaaatcagcaaggaggcca

SEQ ID NO: 158286 - DNA, 282 bp, Homo sapiens
tagttatatttaatcctcaaagcaaccagcaagatagatatttccctcattttaaaaaggaactgatgctatgaaatttgaaccctgatccaactggcttcaaaacctaatcattctttttcttctacaccgtcaaagactaaaactgcttaccttctgttatcctgaaatatcccaattgcctttacaagaaaayacccaaagatcaaactactccacaaagcaaaaacctacgccaatctaaaagatctggaagcaagagtggtgagggcttagcacctc

SEQ ID NO: 158287 - DNA, 487 bp, Homo sapiens
tggccacagggaaatatctcagctggaaggaaattcagatmtgcaagttctagtggagtgggtctaccgaaataatctttatggttgagagtttgcttaaaattttaatttttctaacaaatactttaaatctgtgacttagggggacaagctgacagccacactgtgaagtccacagccatgggcacaggtcctcacagcttactgaggactgaatgaagctgaagatgccacacatgatagcacagtgtggtcctgatacaggaatgagtgatccctgggtgctgaataggctctactccttcacagggtgcccagctcaagccacaggccagattttcatttttacagtttatcaggcttatgtaggcttcaccttcccttcccagggaagaggtgataaacctggtgcctggggatggctgagtgccctggaaactgtgcatctgcccgaagtgggccttccttcctccttaggtcccgcagc

SEQ ID NO: 158288 - DNA, 487 bp, Homo sapiens
tggccacagggaaatatctcagctggaaggaaattcagatctgcaagttctagtggagtgggtctacygaaataatctttatggttgagagtttgcttaaaattttaatttttctaacaaatactttaaatctgtgacttagggggacaagctgacagccacactgtgaagtccacagccatgggcacaggtcctcacagcttactgaggactgaatgaagctgaagatgccacacatgatagcacagtgtggtcctgatacaggaatgagtgatccctgggtgctgaataggctctactccttcacagggtgcccagctcaagccacaggccagattttcatttttacagtttatcaggcttatgtaggcttcaccttcccttcccagggaagaggtgataaacctggtgcctggggatggctgagtgccctggaaactgtgcatctgcccgaagtgggccttccttcctccttaggtcccgcagc

SEQ ID NO: 158289 - DNA, 600 bp, Homo sapiens
ctctctctctctctctctccagaactttgaggttcaagactatatctaacgatccaccaattcccaaagcatacctaagtaggtgacacaaagcagggacccagagatgattgtttaccataggggaggaaaaacttcttccaccctcttagtgtctctggctgggtctaaaaactgaactgacaaagtgaaattaacaggaaaaaaatcacacaaatgtatttaatgtaagttttatgtgacatggaaccttygtaaggaaataaaaacccaaagaaactgttaaacctgagcagtcctttctgtacctgctgtttctcaaattccttcggcttaaaacattgaacatgccaaggtgccatattttggggatagtgtgttctgaactccatcatcgcataatattaaatgaatcattaggcatctatttaattcatagatcaaatatatttgtgtttgagggacacaaatcttttacgaattgtggtactctgagatataactgaacgatcttgaaaattttttgaaaactgtagagcattatattacttttgatttttagtaattatcatcatcattgagagtttgtattattattat

SEQ ID NO: 158290 - DNA, 355 bp, Homo sapiens
agctactgagcacttacaatgtagctagttcaaatttaaatatgctgtgagtggaaaatacacatcagatttcaaactctaagcattaaaaattaggtaaaatattctattaaaaatttttatattgactgcatattaaaatgacaatgtcttggatatgttgggttaaattaagtatattattaaaattaatttcacttattcttttttyaatgtggctattgggaaatgtttgttattaaattttttattgatacatagtagatgtacatattttgagggtacacgtgacaatttaataattcatataattcacataatttgtaaagatcaaattcatgtaattgagatatcc

SEQ ID NO: 158291 - DNA, 332 bp, Homo sapiens
ccattgagaggtggggcctatggtccctccaaatctgagctggcctttgtgagtctctcatttccagtaraatgtggcagaagggacgccacatgatttccaaggctaggtcagaaaagtccatgcaacatttgcctgagaccaccacgccaaaggggccatgtgtaggcactccggttggcatagcagcccagttgagttcacggctgacagctgctgtcaatgtgccatcttggacgctcagccacttgagccttcagatgatacctgattgtactcacttaagacaccccaagcagcaacaactgctcagctgagaccttcctgaattc

SEQ ID NO: 158292 - DNA, 378 bp, Homo sapiens
cagaattggagacgggctcagctgggaagttcttgcttagagtctctcaatgactggctcagctgaactggacatccaaaatgacttactcatgtggctggcagtttggttattggttggaagttcagctgggctgactactggagcacttccatatggtactaatagcatggcctgaaaggtttcagggtagttggacctcttatgtagcacctgctttccccaccacatgtgtccccgagagaaccaggtggaaamtacgtggccttctatgaactagcctcaaaaattatgcagaccacttctgctgattctattggttacaaataagtcactgaggtcagcccaggttcagggggagcagccataggacccacc

SEQ ID NO: 158293 - DNA, 597 bp, Homo sapiens
ttttttctgtttttatcagtgaataaaaataatggattttctaaaatttaattaactttaccttcccgggataagcacagcttagttttaatgttttctgtctcttcattgctggattcagtttgtatatattttgtttaggtttttatatctgcattggtgagtgaaattgttctgtagtattctttgcttatacttttctgtttttgctatggaggttgtatataacacagctctcaaagcagttggagagctagagagttttctttctatttctattccctggaagaatgtttataatattggaatgatttcttycttaaatgcttagtagaacttgacaacaaaataatcggggcatgatgcttttacatattgattttattccctcattgtttataggactactcaagattgctatttttctttgagtcagttagggttggttatatttcctaggagttttgcctttttcaagtcctaaatatattggcattaaaattttcatagtattatctcttcaatacaccagtttttgactttgttgatcctctttgttgtctgtcttttgtttttttggcttgttttcagagacag

SEQ ID NO: 158294 - DNA, 597 bp, Homo sapiens
ttttttctgtttttatcagtgaataaaaataatggattttctaaaatttaattaactttaccttcccgggataagcacagcttagttttaatgttttctgtctcttcattgctggattcagtttgtatatattttgtttaggtttttatatctgcattggtgagtgaaattgttctgtagtattctttgcttatacttttctgtttttgctatggaggttgtatataacacagctctcaaagcagttggagagctagagagttttctttctatttctattccctggaagaatgtttataatattggaatgatttctttcttaaatgcttagtagaacttgacaacaaaataatcggggcatgatgcttttacatattgattttattccctcattgtttataggactactcaagattgctrtttttctttgagtcagttagggttggttatatttcctaggagttttgcctttttcaagtcctaaatatattggcattaaaattttcatagtattatctcttcaatacaccagtttttgactttgttgatcctctttgttgtctgtcttttgtttttttggcttgttttcagagacag

SEQ ID NO: 158295 - DNA, 340 bp, Homo sapiens
cagatctgcatgaacacccactgtaccgggccggacacctcattctgcaggacagggtaggcaagaggaatagaaaagggaagaatgtgtaggcacgggaagggcctagcctggggtctctgtttaccyggcccctgtgttctgcctgccaggccagctgtctcccagccatgctgctggacccctgccaggctcccatgtcatcgatgcctgtgccgccccaggcaataagaccagtcacttggctgctcttctgaagaaccaagggtgagtgccacaggaggaggaggaggaggacatggggtttgattttgtgcctttcagtgggtaataaaggctg

SEQ ID NO: 158296 - DNA, 340 bp, Homo sapiens
cagatctgcatgaacacccactgtaccgggccggacacctcattctgcaggacagggtaggcaagaggaatagaaaagggaagaatgtgtaggcacgggaagggcctagcctggggtctctgtttacccggcycctgtgttctgcctgccaggccagctgtctcccagccatgctgctggacccctgccaggctcccatgtcatcgatgcctgtgccgccccaggcaataagaccagtcacttggctgctcttctgaagaaccaagggtgagtgccacaggaggaggaggaggaggacatggggtttgattttgtgcctttcagtgggtaataaaggctg

SEQ ID NO: 158297 - DNA, 340 bp, Homo sapiens
cagatctgcatgaacacccactgtaccgggccggacacctcattctgcaggacagggtaggcaagaggaatagaaaagggaagaatgtgtaggcacgggaagggcctagcctggggtctctgtttacccggcccctgtgytctgcctgccaggccagctgtctcccagccatgctgctggacccctgccaggctcccatgtcatcgatgcctgtgccgccccaggcaataagaccagtcacttggctgctcttctgaagaaccaagggtgagtgccacaggaggaggaggaggaggacatggggtttgattttgtgcctttcagtgggtaataaaggctg

SEQ ID NO: 158298 - DNA, 580 bp, Homo sapiens
gcatgaacacccactgtaccgggccggacacctcattctgcaggacagggtaggcaagaggaatagaaaagggaagaatgtgtaggcacgggaagggcctagcctggggtctctgtttacccggcccctgtgttctgcctgccaggccagctgtctcccagccatgctgctggaccccygccaggctcccatgtcatcgatgcctgtgccgccccaggcaataagaccagtcacttggctgctcttctgaagaaccaagggtgagtgccacaggaggaggaggaggaggacatggggtttgattttgtgcctttcagtgggtaataaaggctgaaaggatgactttcgcttaactctttcctgctgtaccaaagtagttcacggtatttgccccaagctaagctttccccactgcaggtgtgagatgtggatcccttagcccttggggcagagaccccaggccagttacctctgaccctgggccctttaaatataggccgtttcaatattgtgtgtcctggcttaacctgcatgttctggttgtctgtgtcagctgtgacaggcccttagctgctccatg

SEQ ID NO: 158299 - DNA, 580 bp, Homo sapiens
gcatgaacacccactgtaccgggccggacacctcattctgcaggacagggtaggcaagaggaatagaaaagggaagaatgtgtaggcacgggaagggcctagcctggggtctctgtttacccggcccctgtgttctgcctgccaggccagctgtctcccagccatgctgctggacccctgccaggctcccatgtcatsgatgcctgtgccgccccaggcaataagaccagtcacttggctgctcttctgaagaaccaagggtgagtgccacaggaggaggaggaggaggacatggggtttgattttgtgcctttcagtgggtaataaaggctgaaaggatgactttcgcttaactctttcctgctgtaccaaagtagttcacggtatttgccccaagctaagctttccccactgcaggtgtgagatgtggatcccttagcccttggggcagagaccccaggccagttacctctgaccctgggccctttaaatataggccgtttcaatattgtgtgtcctggcttaacctgcatgttctggttgtctgtgtcagctgtgacaggcccttagctgctccatg

SEQ ID NO: 158300 - DNA, 340 bp, Homo sapiens
cagatctgcatgaacacccactgtaccgggccggacacctcattctgcaggacagggtaggcaagaggaatagaaaagggaagaatgtgtaggcacgggaagggcctagcctggggtctctgtttacccggcccctgtgttctgcctgccaggccagctgtctcccagccatgctgctggacccctgccaggctcccatgtcatcgatgcctgtgccgccccaggcaataagaccagtcacttggctgctcttctgaagaaccaagggtgagtgccacaggaggaggaggaggaggacatggggtttgattytgtgcctttcagtgggtaataaaggctg

SEQ ID NO: 158301 - DNA, 580 bp, Homo sapiens
gcatgaacacccactgtaccgggccggacacctcattctgcaggacagggtaggcaagaggaatagaaaagggaagaatgtgtaggcacgggaagggcctagcctggggtctctgtttacccggcccctgtgttctgcctgccaggccagctgtctcccagccatgctgctggacccctgccaggctcccatgtcatcgatgcctgtgccgccccaggcaataagaccagtcacttggctgctcttctgaagaaccaagggtgagtgccacaggaggaggaggaggaggacatggggtttgattttgtgcctttcagtgggtaataaaggctgaaaggatgactttcgcttaactctttcctgctgyaccaaagtagttcacggtatttgccccaagctaagctttccccactgcaggtgtgagatgtggatcccttagcccttggggcagagaccccaggccagttacctctgaccctgggccctttaaatataggccgtttcaatattgtgtgtcctggcttaacctgcatgttctggttgtctgtgtcagctgtgacaggcccttagctgctccatg

SEQ ID NO: 158302 - DNA, 601 bp, Homo sapiens
ccggacacctcattctgcaggacagggtaggcaagaggaatagaaaagggaagaatgtgtaggcacgggaagggcctagcctggggtctctgtttacccggcccctgtgttctgcctgccaggccagctgtctcccagccatgctgctggacccctgccaggctcccatgtcatcgatgcctgtgccgccccaggcaataagaccagtcacttggctgctcttctgaagaaccaagggtgagtgccacaggaggaggaggaggaggacatggggtttgattttgtgcctttcagtgggtaataaaggctgaaaggatgactttcgcttaactctttcctgctgtaccaaagtagytcacggtatttgccccaagctaagctttccccactgcaggtgtgagatgtggatcccttagcccttggggcagagaccccaggccagttacctctgaccctgggccctttaaatataggccgtttcaatattgtgtgtcctggcttaacctgcatgttctggttgtctgtgtcagctgtgacaggcccttagctgctccatgcatgctcagctcacccctgctctgccctctgccctaggaagatc

SEQ ID NO: 158303 - DNA, 575 bp, Homo sapiens
ccggacacctcattctgcaggacagggtaggcaagaggaatagaaaagggaagaatgtgtaggcacgggaagggcctagcctggggtctctgtttacccggcccctgtgttctgcctgccaggccagctgtctcccagccatgctgctggacccctgccaggctcccatgtcatcgatgcctgtgccgccccaggcaataagaccagtcacttggctgctcttctgaagaaccaagggtgagtgccacaggaggaggaggaggaggacatggggtttgattttgtgcctttcagtgggtaataaaggctgaaaggatgactttcgcttaactctttcctgctgtaccaaagtagttcacggtatttgccccaagctaagctttccccactgcaggtgtgagatgtggatcccttagcccttggggcagagaccccaggccagttacctctgaccctgggccctttaaatataggccgtttcaatattgtgtgtcctggcttaacctgcatgttctggttgtctgtgtcagctgtgacaggcccttagctgctccrtgcatgctcagctcacccct

SEQ ID NO: 158304 - DNA, 420 bp, Homo sapiens
ctaaacagcaaataaaaatttcwatcaccagaattatgttttttttgtggtggggaactaccaatagctataaatagaagagattattatggaagtatcatagataaaaagagtgctcgcttcaggagcacatataataatacagaaagaaatttaaagataataaaatatttaggataaaaagaattgtctcttaaaaatgaaaagaaaattatctttatgtatatataacaactataactctcatcaaaaaactacaggaacagcatgttttcaaaagtacaacaatttccaaactatttgaaataaatctatgaataattcaatggccaacattttccaaacaaaccaataaaatgcagagtgtgcatgaagctatctgttacaatctgtggcactgatatttcacagaagaaatct

SEQ ID NO: 158305 - DNA, 447 bp, Homo sapiens
ctcatttcgtctgttcactggggccctcttctccctgtgactcgcctcagccttttcactccttgctggacatggagtaggactattgggaggatgaaatagacgaatgygtggcaagcatgtaggagagcctgtggcacagaagcagcactcggtacatggtgcttgttgttatatccctagttttgacatagcctcagcctcaagtaaaagataacccaaactcccaccaaagtacaagagtcagattcctgttcacttctgtttataaatgaactttctatttttttaagagcagggttgtactctgtcacccaggctggagtgcagtggagcgatcatacctcactgcagcgttgacttcctgggttcaagggatcctcctgcctcagcctcctgagtagctgggactacaggttcacgccaccatgcccagctagttgttgt

SEQ ID NO: 158306 - DNA, 447 bp, Homo sapiens
atttcgtctgttcactggggccctcttctccctgtgactcgcctcagccttttcactccttgctggacatggagtaggactattgggaggatgaaatagacgaatgtgtggcaagcatgtaggagagcctgtggcacagaagcagcactcggtacatggtgcttgttgttayatccctagttttgacatagcctcagcctcaagtaaaagataacccaaactcccaccaaagtacaagagtcagattcctgttcacttctgtttataaatgaactttctatttttttaagagcagggttgtactctgtcacccaggctggagtgcagtggagcgatcatacctcactgcagcgttgacttcctgggttcaagggatcctcctgcctcagcctcctgagtagctgggactacaggttcacgccaccatgcccagctagttgttgttgt

SEQ ID NO: 158307 - DNA, 447 bp, Homo sapiens
ctcatttcgtctgttcactggggccctcttctccctgtgactcgcctcagccttttcactccttgctggacatggagtaggactattgggaggatgaaatagacgaatgtgtggcaagcatgtaggagagcctgtggcacagaagcagcactcggtacatggtgcttgttgttatatccctagttttgacatarcctcagcctcaagtaaaagataacccaaactcccaccaaagtacaagagtcagattcctgttcacttctgtttataaatgaactttctatttttttaagagcagggttgtactctgtcacccaggctggagtgcagtggagcgatcatacctcactgcagcgttgacttcctgggttcaagggatcctcctgcctcagcctcctgagtagctgggactacaggttcacgccaccatgcccagctagttgttgt

SEQ ID NO: 158308 - DNA, 442 bp, Homo sapiens
gggccctcttctccctgtgactcgcctcagccttttcactccttgctggacatggagtaggactattgggaggatgaaatagacgaatgtgtggcaagcatgtaggagagcctgtggcacagaagcagcactcggtacatggtgcttgttgttatatccctagttttgacatagcctcagcctcaagtaaaagataacccaaactcccaccaaagtacaagagtcagattcctgttcacttctgtttataaatgaactttctatttttttaagagcagggttgyactctgtcacccaggctggagtgcagtggagcgatcatacctcactgcagcgttgacttcctgggttcaagggatcctcctgcctcagcctcctgagtagctgggactacaggttcacgccaccatgcccagctagttgttgttgttgttttggtaca

SEQ ID NO: 158309 - DNA, 442 bp, Homo sapiens
gggccctcttctccctgtgactcgcctcagccttttcactccttgctggacatggagtaggactattgggaggatgaaatagacgaatgtgtggcaagcatgtaggagagcctgtggcacagaagcagcactcggtacatggtgcttgttgttatatccctagttttgacatagcctcagcctcaagtaaaagataacccaaactcccaccaaagtacaagagtcagattcctgttcacttctgtttataaatgaactttctatttttttaagagcagggttgtactctgtcacccaggctggagtgcagtggagcgatcatacctcactgcagcgttgacttcctgggttcaagggatcctcctgcctcagcctcctgagtagctgggactacaggttcacgcyaccatgcccagctagttgttgttgttgttttggtaca

SEQ ID NO: 158310 - DNA, 311 bp, Homo sapiens
gggtttcatcatgttggccaggctgatctcgaaagcctgacctcaagtgatccgcccaccttagsctcccaaagtgtggggagcaccgtcccggtgtattattacttttagagacgaggtcttgctttgttttccaggctggagtacagtggctcaatcatagctcactgcagcctcaaactcctggccttaagcaatcctcctacttcagcctcccaaagtgctgagattataggtgtgagccactgcacctggcctctctattctctacttcctctttctagaatttctattaggcggatgttgaatct

SEQ ID NO: 158311 - DNA, 311 bp, Homo sapiens
gggtttcatcatgttggccaggctgatctcgaaagcctgacctcaagtgatccgcccaccttaggctcccaaagtgtggggagcaccgtcccggygtattattacttttagagacgaggtcttgctttgttttccaggctggagtacagtggctcaatcatagctcactgcagcctcaaactcctggccttaagcaatcctcctacttcagcctcccaaagtgctgagattataggtgtgagccactgcacctggcctctctattctctacttcctctttctagaatttctattaggcggatgttgaatct

SEQ ID NO: 158312 - DNA, 311 bp, Homo sapiens
gggtttcatcatgttggccaggctgatctcgaaagcctgacctcaagtgatccgcccaccttaggctcccaaagtgtggggagcaccgtcccggtrtattattacttttagagacgaggtcttgctttgttttccaggctggagtacagtggctcaatcatagctcactgcagcctcaaactcctggccttaagcaatcctcctacttcagcctcccaaagtgctgagattataggtgtgagccactgcacctggcctctctattctctacttcctctttctagaatttctattaggcggatgttgaatct

SEQ ID NO: 158313 - DNA, 430 bp, Homo sapiens
agcgattctcctgtctcagcctcccaggtagctggggttacaggtgtgcagcaccacacctggctaatttttttatttttagtggagattgggtttcatcatgttggccaggctgatctcgaaagcctgacctcaagtgatccgcccaccttaggctcccaaagtgtggggagcaccgtcccggtgtattattacttttagagacgaggtcttgctttgttttccaggctggagtacagtggctcaatcatagctcactgcagcctcaaactcctggccttaagcaatcctcctacttcagcctcccaaagtgctgagattataggtgtgagccactgcacctggcctctctattctctmcttcctctttctagaatttctattaggcggatgttgaatctcctgaattaatctctaattttcttccctt

SEQ ID NO: 158314 - DNA, 507 bp, Homo sapiens
gatggaccgcccagaaacaccaactccaaagggatggagtcggtgttgcaatgtagggaagttaagatttcatgtatatgggtggagacagaggagtttttggtgggattacattattcatacaaggttggcacatagttacagaaattaggttttaggcaatgtttcttttgagaagggtatattttaacatctttttgcagagggtatgatagtcacagattttctgtcatctggtttaagcaaagcaggacaacaaaagggaagttaatctttagcamgtgctattcattaaaaaggcgggaagtttttgtctctgattttgtttaattctctctagtcattgtacagaacaagaaaaataagaaagcaagttaatccatagtctgagaaccataaattgtaaccatatgtggctcagatcacagtcatctctatctaggcttaatttttttgggggggcgctgggaagcaggtcccaacagctttaaaactgtatttattttc

SEQ ID NO: 158315 - DNA, 357 bp, Homo sapiens
ctaaactattgaagcattcgttataggctgaattgtttcccccagtgcctcagattcatatgctgaatccctaactcccaatgtgactgtatttggagacaggatctttgcaaaggcatttaagcttaaatgaagttgtaacggtagggccctaatctaacaggacttgtattctcataagaagagtcaaagaggaagtctctctgagcctactcaacctcaggaggctgcccatttttttttttttaagaggaagagagasagaaatgcaggtgcacagaggaaagggcatgagaacgcatagtggggccagagccatctgtaagccaaggagagaggctgcaggagaaaccaaga

SEQ ID NO: 158316 - DNA, 465 bp, Homo sapiens
cacacaacatttattgataactttcgctcttatatgggtgtggttcagggcaccctgaaacaattactgtaatagtaacatttaagatctcccatcacaggtcaccattaacagatacagtaataactaaaaagtttggaaattttatgagaattactgaaatgtgaccctgaaacacaaagtgagcacatattgttggaaaaatggcgtcgatagacttgctcaacacagagttgccacaaatcttcaatttgtaaaaaatgyagtatccacaaattgcagtaaaacaaggtatgcctttacatatcagtgaaatgaaccacagggttttttgaaagagacagcatgtgtgtgtgtgcacacacatggacttacacacacacgcacatacttacctgggaattcaaaatatactaaattcctttatatagataggccctttcaaaacagtgaagaaagataggt

SEQ ID NO: 158317 - DNA, 591 bp, Homo sapiens
actttacatttccagttctgcctgacacaaggtctcttctttttatgcggctcttccacctacatgtgcctacctgccaactggacaagcacatgtactctagtcttccttacccccaaaatccagtttgcagrtgggaatgaacaactgcgggtccccctcatgacgccaacacgaccaaaaagagtcatccgactaatccctttacttgtgggtctacgactttctgcttccactattgtacttggaacttgaatagcaggcatttcaacctctgtcacaacattctgcagcctctctaatgacttctccactagcattacagatgtatcacaaactttatctgttcctcaagcccaggttgaccctttagctgcagttgtcctccagaaccgccaaagccttgatttactcactgctgaaaaaggaggactctgtatatttttaaatgaagagtgttgtttttacctaaatcaatctggtctggtatatgacaacataaaaaaactcaaggatagagcccaaaaactcaccaaccaagcaaacaataacattgaacccccttggacactctttaattggatgtcctgg

SEQ ID NO: 158318 - DNA, 591 bp, Homo sapiens
actttacatttccagttctgcctgacacaaggtctcttctttttatgcggctcttccacctacatgtgcctacctgccaactggacaagcacatgtactctagtcttccttacccccaaaatccagtttgcagatgggaatgaacaactgcgggtccccctcatgacgccaacacgaccaaaaagagtcatccgactaatccctttacttgtgggtctacgactttctgcttccactattgtacttggaacttgaatagcaggcatttcaacctctgtcacaacattctgcagcctctctaatgacttctccactagcattacagatgtatcacaaactttatctgttcctcaagcccaggttgaccctttagctgcagttgtcctccagaaccgccaaagccttgatttactcactgctgaaaaaggaggactctgtatatttttaaatgaagagtgttgtttttacctaaatcaatctggtctggtatatgacaacataaaaaaactcaaggatagagcccaaaaactcaccaaccaagcaaacaataacattgaacccccttggayactctttaattggatgtcctgg

SEQ ID NO: 158319 - DNA, 461 bp, Homo sapiens
gtggtttgcactaaggactttctgaaaagggaaaaataaagtagataaaataatatattagactaccccatacatagaaaatggggttatcaagtacgacctttggacctgacaaataatagttgaagcatccttctgaatgatccaggcatcccataaatctggcagtggaactcatacaacaagcctttgttcttgggtcaaggrttacttggagtaatgaaaaccaaaaacctaaaagaaagacctaaaatggggctcctctcaccactgtatccaacagtctatagttattagcctctgtgcaacattccaatgactgtttcctatttcagtgacatatgttgacatatgttgctacttttgcttttgctgttttttttttccaagtcaattagggtgctttctattatcattcaacaaagtttagaagtaaacattgttagagtgctccatttcct

SEQ ID NO: 158320 - DNA, 461 bp, Homo sapiens
gtggtttgcactaaggactttctgaaaagggaaaaataaagtagataaaataatatattagactaccccatacatagaaaatggggttatcaagtacgacctttggacctgacaaataatagttgaagcatccttctgaatgatccaggcatcccataaatctggcagtggaactcatacaacaagcctttgttcttgggtcaaggaytacttggagtaatgaaaaccaaaaacctaaaagaaagacctaaaatggggctcctctcaccactgtatccaacagtctatagttattagcctctgtgcaacattccaatgactgtttcctatttcagtgacatatgttgacatatgttgctacttttgcttttgctgttttttttttccaagtcaattagggtgctttctattatcattcaacaaagtttagaagtaaacattgttagagtgctccatttcct

SEQ ID NO: 158321 - DNA, 538 bp, Homo sapiens
ggcagctatttttaaaagcacaggtacattttctaatcatttttggcctgctttaggataactgtttgcataatgctagcaaggaaggagttacagagagtggatgccaggagaagcctaagacaaggctgttcttctccttatttgaacctgcactgcccaatggggagctatgctttaactgtacaatgtggagtttaactgtaccctgtgacttttagtgtagaaacaataacacctgtgatttttgaaaagttaatttgagtctcactaataaaggaaacgagacaaaaggagaaaaacaagagakaaaaaaataaagactagtcaggcacggtggttcacgtctgtaatcccagcactttgggacagccaggtgggaggactgtttgagcccaggaattcaagagcagcctgggtaacatagcaagaccccaactctacaaaaaaaaaaaaaattagctgggcgtggtggtacatgcctgtagtcccagctactagggaggctaaggagggaagattgcttgagcccaggaga

SEQ ID NO: 158322 - DNA, 587 bp, Homo sapiens
taagcccttgagccagaatcaatatatcttctgtaaacacgagggccattggaaaagggactgccccagtttccaaagggagccttggttacccaaacccatcatttgcagaggatttaaacagcccaatatcccccatgactcccattagacaccttaccatctctacagaggaaccytgcgcaacccttagtgtggcaggtaaaaatactaagttacaatgtgctctttttgtgaaagactgtttttgcccaacttaaaagtacttaaaggttaattaaaattatggacatgagaaggtgacttatgaaataaggtagaaattaactagtaagtaggcaagagatatatgaagaaagataaggatatgaaggtatatttttggtaaaggatgatataaatgtaaaagaatgttgtatgagaaaggatcttgtaagataaattattgtcctacagtaaagtgactggttatttataaaagaggtggtataggactagtcagaaagttcaagcatgttgtagatggtctgtgtaagtcatgatgaggttcatgatgggggatttatgaaggaattttgtgtatgatt

SEQ ID NO: 158323 - DNA, 587 bp, Homo sapiens
taagcccttgagccagaatcaatatatcttctgtaaacacgagggccattggaaaagggactgccccagtttccaaagggagccttggttacccaaacccatcatttgcagaggatttaaacagcccaatatcccccatgactcccattagacaccttaccatctctacagaggaaccttgsgcaacccttagtgtggcaggtaaaaatactaagttacaatgtgctctttttgtgaaagactgtttttgcccaacttaaaagtacttaaaggttaattaaaattatggacatgagaaggtgacttatgaaataaggtagaaattaactagtaagtaggcaagagatatatgaagaaagataaggatatgaaggtatatttttggtaaaggatgatataaatgtaaaagaatgttgtatgagaaaggatcttgtaagataaattattgtcctacagtaaagtgactggttatttataaaagaggtggtataggactagtcagaaagttcaagcatgttgtagatggtctgtgtaagtcatgatgaggttcatgatgggggatttatgaaggaattttgtgtatgatt

SEQ ID NO: 158324 - DNA, 530 bp, Homo sapiens
attccatcttcattaagagacaaaatttaaaagaagatacattctttttttgtatgttgctgaagggtcttgttgctagttttgttctccctcaaactgagttcagggttatatactggtgcagtattcattcaatcctatgatccatgaggaacacatgggaaartatttacaaccacaactgccgcgataacaaaaaataataacctgatattcatggtgacaggaataagtcttcaagagcagcttcatttacatttatcatgttctttaaaaaatagtgtggtacctttttttttttaacagaaagattatcaggcaaaaatgactaccttaaaagcatgcaacttttaggatttagaagtctaaaattcatgtcattcattgcaaatatttcaatctgttgattattcacagtaagggatgcgttcatgtaattatccaagaatctcataaacaaagatacttgaagctttgccctatgtttgatggatctgacaatcaaaaaatcaaaaaagggaaaaaattat

SEQ ID NO: 158325 - DNA, 530 bp, Homo sapiens
attccatcttcattaagagacaaaatttaaaagaagatacattctttttttgtatgttgctgaagggtcttgttgctagttttgttctccctcaaactgagttcagggttatatactggtgcagtattcattcaatcctatgatccatgaggaacacatgggaaaatatytacaaccacaactgccgcgataacaaaaaataataacctgatattcatggtgacaggaataagtcttcaagagcagcttcatttacatttatcatgttctttaaaaaatagtgtggtacctttttttttttaacagaaagattatcaggcaaaaatgactaccttaaaagcatgcaacttttaggatttagaagtctaaaattcatgtcattcattgcaaatatttcaatctgttgattattcacagtaagggatgcgttcatgtaattatccaagaatctcataaacaaagatacttgaagctttgccctatgtttgatggatctgacaatcaaaaaatcaaaaaagggaaaaaattat

SEQ ID NO: 158326 - DNA, 303 bp, Homo sapiens
atcaaaatggctcaacaaacatcaagcaagatggactcaaagagattgacaccaagacatattgtagtcaaattatgtagacagtcttgaaaacaacaacaacaaaaatgacttttcatgtacaaaggatctttaatgagattaacagctgatttctcatcagaaatcatggagtccagaaggcarcaggatgataaagtgctggggaaacaacaaccaaaagcctgtcaaccaagaaatttatatctggcaaaattactgtatcctttaagaaagagggagatattaagacagtaccagatg

SEQ ID NO: 158327 - DNA, 590 bp, Homo sapiens
ccagcctgcatctgtttcagccattctagtgatggcatcttcagataggtggttgaagaagccatcttgaatatcccagtcctagcatgtagcagagtagaactgccctgacaagccctgtccgaactgcagaatcatgaacaaataaataccgaattataaagccaccaagttttcggtgatttataatagcaatagataattgaatgagattctcaatgtctgaaaagagacagcccaatagacttgactacttgtgatcccttcgtttatgttagtcagacaattcattctgcaytgcgaaagttcccattttgaaaattaaaagaccaaaaacaaacaaaagagaaaaactagagtccagaaaagttaagctagaaatagaatttaagtctaatcattcctgccagtatctgctttattttgactctagcggtctctaacactttcatggaagtagatcatgatgaacaacatctggaacatagtaaatgctaagttagtatgaattaatttattatcattattgtactttttcttctaatgttcatctaaagccatcagatccatgattatatccacatcagagc

SEQ ID NO: 158328 - DNA, 561 bp, Homo sapiens
gtatttttttccagttttctaggaagcctttatttgcttcttaaatgtactaattttctctttcttgacaaaactcccattagtgccacatttttttctgagtagttttcaaatgctttagaagcaatcattgcagtctttttacctctctctcactcacctacttaggatgagaccaaattagtataagggaagtggagagaagggtccatgatgggggtataaattagctggaggcaggtatccagccctacgtatgtraaaacaattccagagaaatttcaagtagctaggtaggggagatttcagtgggggtgtgaaaatggaacagaagttagggcaccattgatcttctcacacatataaacacagggccaaaacaaaacaaaacaaaaaacagcactgaaaagaaactgacagaagtatgtaaaacaaataacagtaacttcccctctccacaaaaaaaaaacaaaaaaacaaaaaaacagatttttgagaaactgagattgctggccttcggcaatagaaaaaatctgcttgcatgctaactaaatattcatt

SEQ ID NO: 158329 - DNA, 560 bp, Homo sapiens
aaattgaccaatatccttcccctgtctcttattaataaaagagtttacacagactctctttaggaaatcatgtgagagattcrcaaggatcattaaatctctgctagacattcactttcactttgtaaaattggctataccctcaaaatggtatcacgtagaaatggactttctggggctcttatctatgaatgggttctagctgcacagtgatgccattcattttatttggcccatttattgcaagtacattctaaatttggccttaattatttttcctttcacaaaaatattttgtgggatctttttgaaccctgactacttccttcttgccccttaaaacagaagccaggagcattatttttgttctcttctaattaaaataattgcttggctccttttaactagattcatgcagttattagcctaatacatggatgggtgccatggagtgcttgagaaacaaaatgaaaagtgatcatgtagcttcacatgaaaaagattctgtggtgccaaggagcattatttcctttcagccagtattttataagggctttcgt

SEQ ID NO: 158330 - DNA, 560 bp, Homo sapiens
aaattgaccaatatccttcccctgtctcttattaataaaagagtttacacagactctctttaggaaatcatgtgagagattcacaaggatcattaaatctctgctagacattcactttcactttgtaaaattggctataccctcaaaatggtatcacgtagaaayggactttctggggctcttatctatgaatgggttctagctgcacagtgatgccattcattttatttggcccatttattgcaagtacattctaaatttggccttaattatttttcctttcacaaaaatattttgtgggatctttttgaaccctgactacttccttcttgccccttaaaacagaagccaggagcattatttttgttctcttctaattaaaataattgcttggctccttttaactagattcatgcagttattagcctaatacatggatgggtgccatggagtgcttgagaaacaaaatgaaaagtgatcatgtagcttcacatgaaaaagattctgtggtgccaaggagcattatttcctttcagccagtattttataagggctttcgt

SEQ ID NO: 158331 - DNA, 608 bp, Homo sapiens
aaggtaagtggagggggtgccaggttctaggagacaaatagcttctggtattgtgccccagtcctacttgtgcagttcctcatgcactttgggagagctctggaactccctgtaggacagctggacaggatcacagagtcaataaacccagagccagcaccaccaccagcccttcagrcttctttgcctctgacaccagaaaggggaacaactgattgtcttttccctgttcagggactctgcctctccaccgcccctcgctcccccccacctcccagccaggcttggtggtgggcagatcccaagctgaacttgtttgctgggagtccttgctgggagttataagatgagccttgtggcagcctcttgccccctccttcaaggggtgtccagggtcagcagggaatttgcttgaggggagcctctgggtcctctgagttctcagggtgcctcttggtgccctggaacagaaaagaaattgttgtggacacctcaggctctcctctttagaactgcctcttgggtcgactgtccacttacagaaagtgactagcttcaccttcaggactcagggccatcatacataagctgcccacagtctaggccag

SEQ ID NO: 158332 - DNA, 468 bp, Homo sapiens
ttgcaacattatatattatagaaaaatttggaaacggtatgtacaattggtgaacagctaaattgaatactaatatttgatgggatataacgcagccactaaacatttccatgttactactggaatatacctttatcatctcacaaatttttttgtgaaaaaaatgatcagaaaacaaggtaacatttagactgattgaaatcatgcaacaaacatgtacataaatgaaaactggatgaaaacatatacaaaagaaaaacagaatataagatatagtagtgtgcctactggcattttaatattccttttattatttcccttgttgttctggctttcatataataaaaatcctaatagttcactgtcaccaacaagttctttctccaagatgaacctgaaagtcaatrtaaattttgatgaagattttagtgaacattccatgaacaaagtgtttccttcaaaggtgat

SEQ ID NO: 158333 - DNA, 598 bp, Homo sapiens
cccaaacaaatgatcagatttcattgagacaaggtacttttcttctactgcttccagaaaataactttcttttgggagtgataggcaaaggagtactgagaattgtatgataactttcttctcctaagctgtgagaagtctaggctgtgcaggcaggtttaaaagagaacatctgtttctgtttcttcaggagagaaatcagtgtgaagattggatgctgttctatcctaaagccatttrggtctctagcacaatgcctggcacaaagcaggcattcgaatatttgctgaattaaaatttctctactaaaataatccatgaaccagaaaagtaaaaatagcattgtaaatattaagttccaatagtggctgttgtaggaagaagacaaaatgattaatttcaatgtgtgttcatagattcagaatgtttatatacagcttgcaaagactttctacctctttaatgctgtgattgggtaaaatgtcagacaccatgttaagtgctagaaatacaaagatgatttagatacaatttgtattttctaggagctcactggtagggaggataaattactagaatataggatccatgagagcag

SEQ ID NO: 158334 - DNA, 552 bp, Homo sapiens
acaagcagagtttaacgcctcctcccaacttctcaaatccagtgggaaagaaaaggtgtacttctagccacagagaggagatcatttcttctcaacattccaagcagggtgtggcccacgctgatgactgaggagtcatgttggggaatgggtccagctcagtggccagagggccttgagaaactggcttctttatcatcagtccagctcagggaagtcctttcatcagaaaaacctaggagatgcaatgcagcagcatgggtcaaatatttgtcccactgtctaatgctcctcagaaagacaccaggaggcccctcttcaaataaggcagctgattttagtcttacttatcgggaatgtccaggcaaacggcaagtagcctagacacactgagaagccagcctccaagcatagcrgggtggtcaggaagacaggagctgaagtttttcaaggacatggggtgggtggggagaaaggaatgaacaagcatttttaaatgcacaattaaaagccaattagaccattttgcttcaaaaatcaaagtagggccag

SEQ ID NO: 158335 - DNA, 556 bp, Homo sapiens
gaaaatgcttggtagatttgtgagaagtcattacagatagtggagctaaaaaaattggccaaagggaataagcccactataaggtgaccagaattacttcccgttatgggccagaggcatgacaatcaccaggctaaatggatttactgtgtttttcaatcatccacacagactaccactggacctacatcattgagaataagccaagatcaaaccattatgggaagacaccctagatttagttacagcaacaccaaggaatggtgagaaatcctaacaagggaaacaaattaccatggttttccaacccgcaggacccccaagccacaagttcagcaatatgttctcagcacagagaaacaaaagcaaacaaacatagaatcaaatctctgcattgaggaaaactagtcataaagctctaagctcagtggcgcaaatcactgtcgcattgagacccgccrtaacctcctaggtgagtagttctctgggaaagtacttacaaacttgtctgggaatttcaagcatgttttaaccccataagttcctttaattactt

SEQ ID NO: 158336 - DNA, 545 bp, Homo sapiens
aatcagtcaagagaaagaaataaaaggcatccaaataggaagtcaggaagtcaaattatctctgtttgcagactatctgactttatacctagaaaaccccacacatagtctctgctcaaaagctcctagatttgacaaacaacttcagcaaagtctcaagatacaaaatcaatgtacaaaaatcaagatcatttctgtacactaatactctccaagctgagtgccaaatcaagaatkcaatctcattcacaatagccacaaaaaattaaaataaaatacctaggaacacagctaaccagggaggtgaaagaactctacaacaactctacaaagcactgctcaaagatatcagaaataacacaaatgaatggaaaaactttccatgttaatggatagtaagaatcaacattattaaattggccacactgcccaaagcaatttatagattcagtgctattcctatcaaactaccaatgacatttttcacagaattggaaaaaaaaattttaattcatatggaatcaaaaaaagagcctgaatagcca

SEQ ID NO: 158337 - DNA, 472 bp, Homo sapiens
gctattgtttactgttccattattttctcactcatttttgacaagaaatctgctagtaatccatttctgctcctctgcacgtcttttttctctagttgctgttaaggttttatcactgattttaagtaatttgattattgccttggtatagtcttcatgtttcttgtgctgggggttcatgaaatttctttaatctttgggtgtccaattgtcatcctatttggattttttttttggacataatttcgtcaaatattttttttctgccctccttctcctctggagacttcaattgtgtatatttgccactgaagttgtgccgtggttaactgatgctctgtttgaattttttcaggttttgtctttaagatgtgttaggcagggcmtgagaagcatttattctagagttgattttttttttctctgctactgagccaaaaccttcttagtacgctaaacaatgccctgtgaa

SEQ ID NO: 158338 - DNA, 395 bp, Homo sapiens
tgacctttcatattagccctagggatctcctttaatattttttatactgctagtggtaaattctctcagttttctctgtgtcttaatttctctattatttttgaaaaatagttttgctagacacagaagtcttagttgatagtgtttttcttttcatggtttctgctgagaagtcttttgttaatctcactgagtactgattacacatgatgacttgcttttctcatgctgctttcaagggtctttatttttcaacagtttgactgtaatgtgtctcagtgtggatctccttagtttattctacayggtgttcattgaactaattggatatgtagattaatgtttgtcataaaatttggtaagtttttgaccattatgtcctcaaatatttttat

SEQ ID NO: 158339 - DNA, 577 bp, Homo sapiens
ttgggggttcacatagggaatcattctcatcctttacttctttacacaaggtttcctttagttatttgaatatatttctaatagtgaatgtcagttctttatctagtaagtctgacatctaggctttctcagggaccatttctattgacttttctcatatgtataggcctattttcttgtttctttgagtgtctcatctttattattgaaaactggacatttaaaatgatgtaatttttaaattatagaaagaagatgatcacccccacacacctgggcttgttgttactgctgtttgttcgtttattgacttatctggactattatgtaaagtctgtattctttgttgtgtgtggtctatgatatttctatttggttaccttcttggtcagytaatgattggttagagaacatcttaaatgctttgaaccaatatgtgttgggtacatttcagtgctttggtaggcagtttaaaaccctgccttagacttctctttttgctgtctacagccttaaggtctgatagcaatgagagcttagtgtctactcaaatcttacctgatataggccatgagca

SEQ ID NO: 158340 - DNA, 577 bp, Homo sapiens
ttgggggttcacatagggaatcattctcatcctttacttctttacacaaggtttcctttagttatttgaatatatttctaatagtgaatgtcagttctttatctagtaagtctgacatctaggctttctcagggaccatttctattgacttttctcatatgtataggcctattttcttgtttctttgagtgtctcatctttattattgaaaactggacatttaaaatgatgtaatttttaaattatagaaagaagatgatcacccccacacacctgggcttgttgttactgctgtttgttcgtttattgacttatctggactattatgtaaagtctgtattctttgttgtgtgtggtctatgatatttctatttggttaccttcttggtcagttaatgattggttagagaacatcttaaatgctttgaaccaatatktgttgggtacatttcagtgctttggtaggcagtttaaaaccctgccttagacttctctttttgctgtctacagccttaaggtctgatagcaatgagagcttagtgtctactcaaatcttacctgatataggccatgagca

SEQ ID NO: 158341 - DNA, 560 bp, Homo sapiens
tttgttgtgtgtggtctatgatatttctatttggttaccttcttggtcagttaatgattggttagagaacatcttaaatgctttgaaccaatatgtgttgggtacatttcagtgctttggtaggcagtttaaaaccctgccttagacttctctttttgctgtctacagccttaaggtctgatagcaatgagagcttagtgtctactcaaatcttacctgatataggccatgagcacagccctgcatacaygaatgacttctaattcccaggaatatgtgaaagctttgcaaagtttcctatggatatttcacttttcagtgctttaaaaaaaaatcagcctcttatcctcaactggcaatgctgcatcaggcagctataatgttaatcagttgtcattatttattttttctataaatgcccttctagtatggctgtttgcactaagctaactctgagtctggtcaaataaagacagtgagctgtcataaatagtgaacattctttgggaatgaggcatgtgatggatgtgatgggctaaattcagttctacctcttccaa

SEQ ID NO: 158342 - DNA, 490 bp, Homo sapiens
ctcaaaaaaaaagaaaaagaaaaattcaattatatattgaactcactaagggataaaaatactttggacatattagaatgattccaaaaaataaaacaacaaactcttgactggttaaaccagaattcctgcatgtatacttcacatattagaaaacaggaaacacataatgctgtgtcagaccgtaaatgtgaaatataataactcccagttacattaatggctatggttaagtgagtgtgtactatgtgctagtctttgtgttaagattgttatttgtcacayggaggcctgccaagaggcctgttataatttccatttcacagacagcactccagcctgggtgacagagcgagacactgtctgaaaaaaatcaaaattaaaaaagtaaaacatatcaagctcttgattccatcttatcagagatcctgtgagaacacatttctaagtcctcagataggaatgctttaaaccttccagagctgatgaa

SEQ ID NO: 158343 - DNA, 490 bp, Homo sapiens
ctcaaaaaaaaagaaaaagaaaaattcaattatatattgaactcactaagggataaaaatactttggacatattagaatgattccaaaaaataaaacaacaaactcttgactggttaaaccagaattcctgcatgtatacttcacatattagaaaacaggaaacacataatgctgtgtcagaccgtaaatgtgaaatataataactcccagttacattaatggctatggttaagtgagtgtgtactatgtgctagtctttgtgttaagattgttatttgtcacacggaggcctgccaagaggcctgttataatttccatttcacagacagcactccagcctgggtgacagagcgagacactgtctgaaaaaaatcaaaattaaaaaagtaaaacatatsaagctcttgattccatcttatcagagatcctgtgagaacacatttctaagtcctcagataggaatgctttaaaccttccagagctgatgaa

SEQ ID NO: 158344 - DNA, 557 bp, Homo sapiens
ttattttaaatctgctatacttttatcaaatctttgagttaatgttgcaagaatgatttgaccaaggaaaaaatcttggggctataggaaacatcacatatcaacctttcaagcagaggaaacacagccataactcagtgtctgagtgctttctctagagtctgcactccactcactcacactgcagtaaatttttccawtgttgtttattctatatcgatatcatgttccatctctctgatgtctcctcaactctatgatttcagcaaggtaaccactctgagctgagaagcccatcttcatttataggaccttcttttgtaccataccatctcacacagcctgcacttatagtgcatttacagtagtcagtgtctttgcttcaaccctggactcatttatttattccgtcccaatgtataaccctgacctccagctgcttcaggatggtcaagtttgtaaaactagtaggaaccatattgcaaatgttgcctaatgggaagaaataatattacagtctattagagttgccaactttgcaaaactgcttactgacc

SEQ ID NO: 158345 - DNA, 508 bp, Homo sapiens
gaggagttctttaaaatgctatttcataagtacaataacaggatttttttgtgtatgtattactacataataaatacctcaaaacttaatggcttaaaacaacaaatattttattatatctcacttttttaaatcaggaatttattcaggactcagctggccatttgttttgatgtggtgtttacagaggtcactctgtggtgtatcagtgggcagataggatggtctggaatgtccaaracagctttacttacatgtctgcaactttggtggggatggatggaaggttggactcatctggtgctattgaccagagtacctacatgtgacttttatagcatggaattttcagagtaaattagatttttttcagagacatcctggggtctcagaaagagtcctccaaaagatagcaagtgaaagctataagtcttattaggcctgggcccagaaactctattctactggttaagcaatcacaaaggcctcccaatttcaagtgaaggtg

SEQ ID NO: 158346 - DNA, 508 bp, Homo sapiens
gaggagttctttaaaatgctatttcataagtacaataacaggatttttttgtgtatgtattactacataataaatacctcaaaacttaatggcttaaaacaacaaatattttattatatctcacttttttaaatcaggaatttattcaggactcagctggccatttgttttgatgtggtgtttacagaggtcactctgtggtgtatcagtgggcagataggatggtctggaatgtccaaaacagctttacttacatgtctgcaactttggtggggatggatggaaggttggactcatctggtgctattgaccagagtacctacatgtgacttttatagcatggaattttcagagtaaattagatttttttcagagacatcctggggtctcagaaagagtcctccaaaagatagcaagtgaaagctataagtctyattaggcctgggcccagaaactctattctactggttaagcaatcacaaaggcctcccaatttcaagtgaaggtg

SEQ ID NO: 158347 - DNA, 591 bp, Homo sapiens
cctcatagctgaagaaaatttgatataaaggtatgttatccctggatcttggtggcacccaggacattttgtttattatgtttctaaaggttctattaagagttaaaataaccttacttcagaagtgccagaaaacacacaaatgatctcttctttgcatattggtatatgagtcctaacattatacatgtggtatccacttatgatttgctagttgaaatgaagaaggaaaaggaagtggatatggcagtaacgtagaaaggaaggggaaggaaaaatttatgggagaagtaagagtctgggatacattcccagctctggaaccaatgcgctggagggtattctctcttggccattgctgtgtggtgattcagtattttactggccctttggtaaaaggaaaggagaatccttatttttaatgytaagtacactactatttttattataaacagaaatagatatgctatgtttgcttgtttgttgtttgttttctgaaggaagactgagactacaatacaaagacctagtccttagggactcatttctagagctgaatacacctggcaactcagtaacagccatccatat

SEQ ID NO: 158348 - DNA, 426 bp, Homo sapiens
gaattcattgctctgtgtcttcaaaaatgaaatcctttttaaattcctaaaggaacagataattttgtkgagtaataaacctttactagatacttgagaggaaaatgaagggaaaatacagaataggacagttctacatctgacatcatttgtcttaaattccatcagcctcatcctgtcacttttctaatgccctgcctttctggggctccctttctcaaaacttaccaaaactccttaatgtctttgctttttataatatataaggtttccttaaggcagatctttttattctgtcttcaaaacaccaaggaccatttcattttaagtcagtctcttcattttttttttaatgcagaacagtttagctccctttgtgttccttgatccatgttttcaatattttcctcaatcaaggagcagttt

SEQ ID NO: 158349 - DNA, 465 bp, Homo sapiens
cagggcctaggtggttggagcccatctagcagtttaggacataagtcaagaaccagttctgaacaggacaatgtccattgcaatgcaaattcatacacacatccacactcacccagatgaggacaatgtagacagccaattcacctaatrtgtacatctgtgggatgtgggaggaaaccggagtagtatgtaaaaacccactcagacatggggagaatgtgcaaactccacaaacaatggttccagctgagagttagttttatttctcaacaaaggaaaacaacattgaacaaaacactactcaaggacttactatgctatgttgtaactgacttgaatgataattttttcaagtgattgccaaatgtgttcaagtgtgaggatccttttaggatcaaaacaaaaatcttacagatctgcagattctgctagtttcaagtgattgagaaattacattataacaaa

SEQ ID NO: 158350 - DNA, 606 bp, Homo sapiens
actaagcactggggattcaaagatgattttaatccagtccatgctctcaagttgtgatttagctaaggagttagacataaatgtataattaaaatacaacacagtgagttatatgatacaggcaaaatcaaaatattgtgagtacaaaaatatcctgtgggagaaaatgtttttaatgaggagttaaatgatatttgtttccattcaataacatataataacaaaagaagttctataggtcataatgtctcatctttaatatttattcctgtagctacagaccctcattgctttattcttgaactagtttaattgtgtctcatctggtcttatccccttcaaatattttctatattggttctagatattcattgaactaaaggtcataagtgatacatgatttaaagtgtattatgaaataaattgcaaactctttatcttctatttaattttgyatatgatcagaccacaaagtatccctataaattatacacttttttgagaacagtaatctttgtatttcttttatttccagcatctattctagcatcttgcacataatatatgctcaaaaatactagtaaaaagcactggataaatgaattc

SEQ ID NO: 158351 - DNA, 635 bp, Homo sapiens
gtataatgatcttttgtctctttttactgcttttgactcaaagtctgttttacctaatatataagtatagttatttctgcttgtttttttatctctgtttatatgaaatatctttgtccatcttttcaatttcagtctatatgtctttatgggttaggtgagtttcttgtagacagcaaatacttgggccttttttcattcattcagctagtttatatctcttaggtggagatttaaatctgatttcattaaaagtcattatcgataggtaaggactaaggacttattcctgacattttgttaactgacatttttattgtttttgtttatcttttgttcctttctcttttattatttatcattggagtgttttttttttttttttgtagtggtaaaattggagtcatttctctttctcatttgtgtgactgctctaccagggtaatacttatgtgtgttttcatgatggtagatatcatcctgttactgtcaaatgcaggatgtttttaagcatttcttgtagggctggactagtggtgatgaattccctccgttttttttgttttgttttgttttawaaatattatttcatttttgagggttagctagtatagtattattgactggctgggttt

SEQ ID NO: 158352 - DNA, 614 bp, Homo sapiens
atatctgtttaggaatctttgaacttcctgtgtttgaatagctgtctcttgtgagactggggaagttttcagctattattccattaaataggttttctatgacmttttccttctctacattttatggaacaccaaaaatttgaatatttgctcactttctcgtgtcccatatgtcacatagcctgactttattcttttttattcttttctttcttatttttgtctgactgagttacttcaaaagacttgtgttcaagttttgaaattgttttttcttcttgatccagtctattattgaagctcttaattgcacttttttttcatttattgaattcttcagttctataatttctgtttggttcttttcttttcttttttttttgagacagagtctcattctgttgcccaggctgaagtgcactggcgtgatcgcggatcactgcaacctccacctcccaggttcaagtgattctcctgcctcaggctcctgaggagctggaactacaggcatgcaccaccacacccagctaatttttatatttttagtagagatggggtttcaccatattggccaggatggtctcgatctcttgaccttgttatctgcctgcctc

SEQ ID NO: 158353 - DNA, 594 bp, Homo sapiens
aacctacctattaagtactacgctctctgcctgggtgacagaattatttctactccaaaccttagtgtcatgcaatatacccatataataaacctgcatatgtaccaccgacatctaaattagaagttgaaattagtttttcaaaaaaaaaatatttctcccgtgtcaaagtaygatgtattcttgctgactctgaacacaaacacacacacacacacatacactcacacacacacacacacttccattccttttgcttaaggaatgtcatatttttctatttataatcatattcttttggctcttctctgagaattgcaggtgttgtcatttgttacaaaggcaatactcaataatatattttaattatagatcagctttgcagttgagaataatgccaatataatatcagaaaaatcaccatctggatggtaaagagaagaaatagactggatgtattttccaagataatgattaaacaattaagacaaaaatacacaattttattggatattaatttgttttttatttacatagaccctaacatcaaatattacactggtgacattaaggcccaagagttccacaagaaag

SEQ ID NO: 158354 - DNA, 577 bp, Homo sapiens
gcaagcagaaaagaaaacaagaagttacaatataaagcttgacagcattaaaataaacatttattttcaattgagtccttaatcttttctctcaggtatttgagattattaatagtctaatttttcaaatttcctggaactcttgtacctttaagagcatcacgctttcaaataagttttaattttctctatgatcttgaagtggctataaaatttctcataaattttctgttatctaacatataattatcacatgaagctaactgatatataaaaatctgaaacattcttacactgtgtgccaacattgatttaagatactaaaagtctacacacttttttgtttcctgtttgcaaaataagactttattttccctgcactttttctatcaataaggaagaaatttcctctataggacattcccatccattttatgtctttaactctgtctttcaaacactagctggagtgtagagaaggtataaatctttagtagacgtaatgatgtctgaagtcatacatattagaaaataccaaagacataccaaagcatrgaagtattagatgcacacttaa

SEQ ID NO: 158355 - DNA, 609 bp, Homo sapiens
caaggtgcaaaatagaattggcctaaatttcccactctgtatttcttttctactggagttttctctggtttcacctggccccaatccaagcagaaggaacctctaggacctatcttatcccattagcttcaagacacaaaacacccacaagaagtagagacacaatttacttacttaccacaaactcaatgcaatgctgataggatgactaattgtatgtcatttagttcgtcccagactagaggttgcaaaatggtggctcatgagccaagttcagctaatagatctgtttgtttgtctagcccagtgtttgtaaaaagtaattttgaatatgttgtcacaattttaaaattgggttgttttatrtagaaatctggattctagatttctcctgaaaaattaaagatccgaaagagtggactcaaattccttaaggtaataataagttgaaattgaatagagctgccttctttacttggggaatactttcttcattttgtccaattgccccgtcaactatattcatttacattatctttctagtgtgggtggccttttggttttgtgaccctgacgtaacacaacagcatagttctttctcttgggata

SEQ ID NO: 158356 - DNA, 490 bp, Homo sapiens
cagccaggtcactgggcaggagcaaggcagagcccccgggaaaggaatgatactggccattctagccccacgtgtgttagatatcggagtgcgggcacctcatggagtgtggaccaactcagggaacaggatgggagayagtcatcccagaaaggagctgaggtctacaaggcacttcacttctcaggacaggattattctgggtagtgggatgagtctgagccagcaggccttgaggttatggggtcaggagaaggggagctgggcaggaggaggcagagaaagagaagcgtggctgggctgtctgtggccttacaaaatagccaagagtcttaaaaaaggcatttctgtattcgaaaatgagcggtttataactgatgagtacagcagcacttcctgaaggtggaatggtgtatgctgttggtggatagggaagttagtcattaaacttcagccagaaagcagagtggcatcacatcttcatgcctgc

SEQ ID NO: 158357 - DNA, 540 bp, Homo sapiens
gtatagtagccactaatcacatgtagctatttaaatttaaacataaattaattaaaactaaatagaattaaaatccagttcctcagttccattagcccacatttcaagttctcagtagccacatgtcgttagtgactacctgtcttattctatttgtgctgctataacaaagtttaaaaagaacagatgttgtttattcttctgtaaytcataaagaacaggtgtttatttgcttgcagttctggcggctgagaagcccaagatcataatgctggcagatttggtttctggtgagggccctgatctctgctttaagatagcactttgaatgctgtgtcctcacatggcagaaagcatggaagagcataaaagggacaaataactatcttcacaaggtggaagagcagaagagcaaaaaagggcataagctagttccctccagacttgttgtaaggcacaaatccattcatgagggcagagccctcattgcttgatcattaatttccccaaaggccccacctcttaatgtcaccacaatgg

SEQ ID NO: 158358 - DNA, 589 bp, Homo sapiens
gagttcatgatcactaccctatattcaatgtatgaatctagaatagatgtttaaagtttctttgtccatcatttcttttttgtttgtttgagacagagtcttcatcccatcacccaggctagagtgcagtagcacagcctcagctcattgaaacctctgcctccccaggttctggtgattctcatgtctcagccttcccagtagctggaattgcaggcacacgccaccactcccggctaatttttgtatttttagcagagacagggtttcaccttgttggccaggctggtcttgaactcctgcccaccttggccttccaaagtgctgggattacaggygtgagccacagtgcctaggctgtccatcatttctgatgacttaagtaaccatagaggtagtcaaagattctaatttttaccttgggtgattgggaatggaacccaagcaggttccattctagaaaaatacaagtagtcttggatctggaaggagccacagagacccttcagctgacacagaccacagatatcaatgtaacacaaaaaatagaagcagctttgaatctaagtacgacatgaaagcctagctc

SEQ ID NO: 158359 - DNA, 448 bp, Homo sapiens
tatttctggactttctattttgttccatttgtctgtgtatctgtccttatgtcagtaccacactgttttgattactgtagttgtgttgtaacttttgaaatcaaaacgtgtgagtcttccaactttgttctttttcaagattgttttggttattcagtgtctcttaagattccatgtgacttttaggatgggtttttctgtttccccaagaaatayagtatgatattgagtatgatattatcatttgctaatgtattgaaactcaactgatttttacatgtgaattttgtgtctagcagctttgctgaattaatttgttttaacaagtgagagagagagaaggtgtgtgtatgtaatttgggggcattttctcatgtataagatcatgtcatctatgaacagagaaatgtcattgggattttaacagggattacattgaattgtaaat

SEQ ID NO: 158360 - DNA, 621 bp, Homo sapiens
ctgtagttgtgttgtaacttttgaaatcaaaacgtgtgagtcttccaactttgttctttttcaagattgttttggttattcagtgtctcttaagattccatgtgacttttaggatgggtttttctgtttccccaagaaatatagtatgatattgagtatgatattatcatttgctaatgtattgaaactcaactgatttttacatgtgaattttgtgtctagcagctttgctgaattaatttgttttaacaagtgagagagagagaaggtgtgtgtatgtaatttgggggcattttctcaygtataagatcatgtcatctatgaacagagaaatgtcattgggattttaacagggattacattgaattgtaaatcactttggatagcattgacatcttaacaattttaagtcatcttatccatgaacaccggatttttttcatttagttagatcttatttaatatctttcaacagttttgtgtggttttcagcataacaatttttggcccatttgctcaagtttattcttaattcttttagatgttgttgtaaacggaattgcttttttaaatttcctcttcaatttgctcatttactaatgtattaaaacacaactgatt

SEQ ID NO: 158361 - DNA, 671 bp, Homo sapiens
acgaagaaagttaaggacacggacacacatgaggagtttaggagtggcggtttaatatgcagaagaaagagaaaggagaacagctctgtctctagtgagagaaaggggcttctgaaagggaaagactggctggaggtggatgtgccggattttgtaggcaggtttaaggaggtggtgtctgattacatagggcccacagattggttcagtcaggtttgatgtttacatagcacgccagaaaggctggccacccsaccctaatcttattatgcaaatgggctttctacttgactggcaccatcctgtgtgcttcttactgtacatgtggctggcaaggcgagaagggaggatggagccgccattttgaacaggattggcgcaactgccggcatctgtgtctgcagctcaattttataggctactctttgttagaaaatgatttgggggctgcttttcactgaaaaggaaaaccttgccgaggactccttcctgtattctcactctctgcctaagtaatttcttttttttgtttttgttttttttttgagatggagtctcactgtgtgcccctggctagagtgcagtggcatgatcttggctgactgcaacgtgcacctcccaggttcaagcaattcttctggctcagcctcccaagtagctgggattacttg

SEQ ID NO: 158362 - DNA, 592 bp, Homo sapiens
ccacctagctagcccaagagggaaggccggaagagagtgtgcggtgatgacagggctgattcccagatcatcctgtgtgatggtggagccaacaccatgtccttgcccatcagtgcttctcatcagctttacagttctccacccttttactcttaattgtgagaagacaatgaagatttaccagacrttgagaagatcctccaaccagaaacaaaggtaccaaagtaaaaagaatcaggtaacttggaggaaacagggactatatagaacgggggggaacaaaagaaaatgaaaccattatgaatgccctgaaagagatcaaagaggatattgcagccttgaaatgggaataaattgcaacaaaaagcaacataggattcaaatagagtgaaagaaaataagatatattttcagaaaaataaagttggagagactttaccattcacagactcttatggaatgaattactaaatggatgcacttcacaaagaataactttgaaaaaaatcaacggatgaagtagaatgcaaaaacatgatgagcaagtaaatttgtaagcaaacggctaatatatatacataaagttttataa

SEQ ID NO: 158363 - DNA, 592 bp, Homo sapiens
ccacctagctagcccaagagggaaggccggaagagagtgtgcggtgatgacagggctgattcccagatcatcctgtgtgatggtggagccaacaccatgtccttgcccatcagtgcttctcatcagctttacagttctccacccttttactcttaattgtgagaagacaatgaagatttaccagacgttgagaagatcctccaaccagaaacaaaggtaccaaagtaaaaagaatcaggtaacttggaggaaacagggactrtatagaacgggggggaacaaaagaaaatgaaaccattatgaatgccctgaaagagatcaaagaggatattgcagccttgaaatgggaataaattgcaacaaaaagcaacataggattcaaatagagtgaaagaaaataagatatattttcagaaaaataaagttggagagactttaccattcacagactcttatggaatgaattactaaatggatgcacttcacaaagaataactttgaaaaaaatcaacggatgaagtagaatgcaaaaacatgatgagcaagtaaatttgtaagcaaacggctaatatatatacataaagttttataa

SEQ ID NO: 158364 - DNA, 592 bp, Homo sapiens
ccacctagctagcccaagagggaaggccggaagagagtgtgcggtgatgacagggctgattcccagatcatcctgtgtgatggtggagccaacaccatgtccttgcccatcagtgcttctcatcagctttacagttctccacccttttactcttaattgtgagaagacaatgaagatttaccagacgttgagaagatcctccaaccagaaacaaaggtaccaaagtaaaaagaatcaggtaacttggaggaaacagggactatatagaacgggggggaacaaaagaaaatgaaaccattatgaatgccctsaaagagatcaaagaggatattgcagccttgaaatgggaataaattgcaacaaaaagcaacataggattcaaatagagtgaaagaaaataagatatattttcagaaaaataaagttggagagactttaccattcacagactcttatggaatgaattactaaatggatgcacttcacaaagaataactttgaaaaaaatcaacggatgaagtagaatgcaaaaacatgatgagcaagtaaatttgtaagcaaacggctaatatatatacataaagttttataa

SEQ ID NO: 158365 - DNA, 592 bp, Homo sapiens
ccacctagctagcccaagagggaaggccggaagagagtgtgcggtgatgacagggctgattcccagatcatcctgtgtgatggtggagccaacaccatgtccttgcccatcagtgcttctcatcagctttacagttctccacccttttactcttaattgtgagaagacaatgaagatttaccagacgttgagaagatcctccaaccagaaacaaaggtaccaaagtaaaaagaatcaggtaacttggaggaaacagggactatatagaacgggggggaacaaaagaaaatgaaaccattatgaatgccctgaaagagatcaaagaggatattgcagccttgaaatgggaataaattgcaacaaaaagcaacataggattcaaatagagtgaaagaaaataagatatattttcagaaaaataaagttggagagactttaccattcacagactcttatggaatgaattactaaatggatgcacttcacaaagaataactttgaaaaaaatcaacggatgaagtagaatgcaaaaacatgatgagcaartaaatttgtaagcaaacggctaatatatatacataaagttttataa

SEQ ID NO: 158366 - DNA, 335 bp, Homo sapiens
tatctggagctctggccttagagcagaaagtggaatcacaaatgagatacacatttcattgtggtcctacctaccattatattgacgactacaatcagtgtgttcctaaaaggtactattgcactattggtgggtggctcagatgagagttttgacacacagaccaaaatgagtttatatagagatttacataaaatctatgctataaaatttcttttaaaataaatttatgtaaatataaattatttaaagaaaaatattaaatttattgcatgttaatatgtcaaartatgtcaaaaattgtgtgaaaattgtgactttggtctctgaatgat

SEQ ID NO: 158367 - DNA, 547 bp, Homo sapiens
  misc_feature (1)...(547): n = A,T,C or G
gggcctctgcaggctcatctgtaatttggaaatagtaccacacggcttacagagttcattcacaacgttgctgtaatggccagataagccgctggttctctaaagccctttagaaaggtctcaggggccagatcaatgggaaactctgcaacctttgagtagttttcagtagaagggtagcccaggagagaragtgttaataagaatgtcctgagggtacagatggtgcttatgaagacaaatcctatttttccatttgcagagatgattagctaggatcctactgagttcactgcatgggccactgctagttttaattgtaccaataggatggagggatggactttaatgaggatctgtgtttnctaatcatgggcaatgttcgaggaagtggaagagggggcagggaggtggcagataattgggagattcagaagatggggctgtttcttggggatggatggatgctttgctaccttccaaagctagaatcctattgtagtgattctcacctggctgaagatgggggtggggaaatcatcattat

SEQ ID NO: 158368 - DNA, 645 bp, Homo sapiens
tttagtgtcatctccctgtattggacaaaacaaatagataaataaaagcaaataagggtatcaagaattaaataaaacaaccacattgcaaatagaaagtcttaccctgaaaaataaagcaccataccctgcaaatggaaaataaacattcattcaaatacacatgaaacatattctcatatatgatggcttaaaaaagagctcagtaaattataaccatattcttcaagtgcaggcagccaaaaaaatacaaattaaayataaattagactaccatagaatctattaacttgggaagttttacactgtcttttaaataactattgagttgaaaaggcaatataaaaagcaatctggttagaaagggagcttcaaaactctatttgtaaagcactttatttaagaaggagaaaaatctctgcctatgtcaaatagaaggtttgaagaccctgaaggggtttacgggaatctagatttctgctctctcttacactttccatcacatatgctctaaaaccaaacaaataaaacccccaaaactaacctatgataatcaactactgatcagctttgaagaaaggaacacttttatgcactaatgataagactttacattggtaattctttaagaaggtcaactctgta

SEQ ID NO: 158369 - DNA, 604 bp, Homo sapiens
tatacacagaaagtaaatggcaaataacatacggaagggagatcccagtttgcaaaagctttatgttgcaccttggtgctgagatgttgagatcctttgccatggagctgcatcttcttgacatgtttacatggagaatagattaccagcagaaaagatattagtgtcagagtgcagggtgtgacgtttgctggcatggttacagtcaagtttgaaagctgtattgcattcctcaatttgatcatccaagacaaatttccttcatattcttttgtccacacactctcacccgtggttatcagagcaagattacaaatgaaaaataccaagggccccaacagcatcaccaaaccaacattcttaatcctyttctttaggtggagaaaaataaggttggagaaattggcagtcttgagcaaatgaaatatgctgaggctagtaacacccacatgctgaaatgcttggttattgctgagacattagaaccaaaaattcttacttctaatctatatgaagccaaattaaacacagttgcataccaatgtaataatatgacccagagtaaaccaattctggacaccaccagagcagtgagaaatttggt

SEQ ID NO: 158370 - DNA, 604 bp, Homo sapiens
tatacacagaaagtaaatggcaaataacatacggaagggagatcccagtttgcaaaagctttatgttgcaccttggtgctgagatgttgagatcctttgccatggagctgcatcttcttgacatgtttacatggagaatagattaccagcagaaaagatattagtgtcagagtgcagggtgtgacgtttgctggcatggttacagtcaagtttgaaagctgtattgcattcctcaatttgatcatccaagacaaatttccttcatattcttttgtccacacactctcacccgtggttatcagagcaagattacaaatgaaaaataccaagggccccaacagcatcaccaaaccaacattcttaatcctcttctttaggtggagaaaaataaggttggagaaattggcagtcttgagcaaatgaaatatgctgaggctagtaacacccasatgctgaaatgcttggttattgctgagacattagaaccaaaaattcttacttctaatctatatgaagccaaattaaacacagttgcataccaatgtaataatatgacccagagtaaaccaattctggacaccaccagagcagtgagaaatttggt

SEQ ID NO: 158371 - DNA, 604 bp, Homo sapiens
tatacacagaaagtaaatggcaaataacatacggaagggagatcccagtttgcaaaagctttatgttgcaccttggtgctgagatgttgagatcctttgccatggagctgcatcttcttgacatgtttacatggagaatagattaccagcagaaaagatattagtgtcagagtgcagggtgtgacgtttgctggcatggttacagtcaagtttgaaagctgtattgcattcctcaatttgatcatccaagacaaatttccttcatattcttttgtccacacactctcacccgtggttatcagagcaagattacaaatgaaaaataccaagggccccaacagcatcaccaaaccaacattcttaatcctcttctttaggtggagaaaaataaggttggagaaattggcagtcttgagcaaatgaaatatgctgaggctagtaacacccacatgctgaaatgcttggttattgctgagacattagaaccaaaaattcttacttctaatctatrtgaagccaaattaaacacagttgcataccaatgtaataatatgacccagagtaaaccaattctggacaccaccagagcagtgagaaatttggt

SEQ ID NO: 158372 - DNA, 382 bp, Homo sapiens
cccacacgcttggcttagcagaatacctatatcacttaagtttttctgcaagagaaaatcctccaaaactgcattagatatttgtgtctcatrtgtctttggatttcatttttgtcagctaggtttggtggatggctgtggtgattggagatgggccacattctgcatcttgaagctactttggctgatttaggctggataaagcagtggcattctgactccattagtttctcattcttcttctgggaacagtgtactcaccagatgatgttctcatggtgaatggaaaagagcaagaaactccaatatggaaaccgtcttaaatctctgtgtaaagtctactaatttgctgttcactgaagcaaattacatgagtgaattc

SEQ ID NO: 158373 - DNA, 418 bp, Homo sapiens
caagctcaagttttagcagtagattctttgtagctctgagtcctgaacttgtcttacatcgataagagagtcggccaacatctgctgcttgttggttccattctgaaaactcagtcttgtgtggtcccacaaaaagaaattctgtgctgacattgggagttaccactcttcagtctgctctcttggattagaggtcaggcaggggtctcaggacaatcccatccgcatgagccctagggttccatgggcatttggtagaacccakgtcctggaaagttggttggagaaataccttagtggagaaatggagaatgaagaccttgtgttttatgatctgagcttggagaaccctgattggatggcactgctggtctagccactaccaggcatagaggaagctacagaaaatgtagagaaa

SEQ ID NO: 158374 - DNA, 451 bp, Homo sapiens
ttaaaagaaaagcaaagttgmacctaaacagatatgatatgcaatacacacaagatacatagtgttatagaaacataataactgcttttaatgatctgtctcaaggaggaagcacatttataaagattttcagatcatgaggtcttcttagataatctgaatcctggttatgctacatcccagctgtgtggattgggcaatttatataaagtcttcagtctctgttttcttatctgtaaaacaaagatgataatacatatctcatttgattgttacagtgtctggcacatataaggtgctcagaaatagtatctatgattaatatctcatctatactattttaggcacttaaggtgttctaaccaaatatcttatttagcataatgagtccaaaaactttattaagttatagtatttactgggtatttactacctgtagagataaataagg

SEQ ID NO: 158375 - DNA, 622 bp, Homo sapiens
aaattctcccccaaaagagttttgttagttgtatttctaccagtaacgcatgagactgtctatttctccattacctagccaaaagatgttgtcacacttttacattttatttaatctcatatttgagaaatggtatcagtgtagttttaatttacatatctaattatgagtgaggttgacaactttattctatacttataggccatttttatatatagtaaataaattttctgtgctctatcttttgtacattttcctatgaaattctttttttaactttcttccatccatttttaagwtttttacatattaggaataatagctctttactatgttgcaaatagcttcttctagtgtcagttgtattttgaatatgtttatgggctttttgacatttagatttttaaaattttatatagccacatttattaattttatattttatggtctctagatttccaatcacagttagaatacatttctcacatgagggttaaagaaattcacctgcattttcttttagtacttatgctgtttgttttttccttttcctttcttgttttttttcacatgtagtttcttgattcatttagagtttcttcttgaatatagtctgaggtat

SEQ ID NO: 158376 - DNA, 572 bp, Homo sapiens
cagctgggctagcccttagcccctcattcatccctcagggctcctgatgctgctggagaaaattacacaatgttgtgatttctagtctacaaatcatgggcatcatctcagctacctacgtaccactgcccatgatcctcctgtctgtccttagtcccttggtgttcagaatttgtttctaccagtcttcatcatcatctccaagcctccaayatcaccaccttgtcttcgctgtgggaaggtggctttgccatctgcttcacatggaaaataaaggtgacccctccagctacctgcacttcctattagcttctacccttggctcattctctgttatctaggttaaatcatgagattattgatatttacttaggacattttataagctagctactatggaatgtctacctgcattagctcatccaagccttaaaaccgactcatgagagaggagctacttattattatttatttttaattgacaaaatcatatatacttatggtgtacaacatgatgtttaaaaatatgtacacatagtagaatggctaaatcaagcaacatgtacattacc

SEQ ID NO: 158377 - DNA, 572 bp, Homo sapiens
cagctgggctagcccttagcccctcattcatccctcagggctcctgatgctgctggagaaaattacacaatgttgtgatttctagtctacaaatcatgggcatcatctcagctacctacgtaccactgcccatgatcctcctgtctgtccttagtcccttggtgttcagaatttgtttctaccagtcttcatcatcatctccaagcctccaatatcaccaccttgtcttcgctgtgggaaggtggctttgccatctgcttcacatggaaaataaaggtgacccctccagctacctgcacttcctattagcttctacccttggctcattctctgttatctaggttaaatcatgagattattgatatttacttaggacattttataagctagctactatggaatgtctacctgcattagctcatccaagccttaaaaccgactcatgagagaggagctacttattattatttatttttaattgacaaaatcatatatacttatggtgtacaacatgatgtttaaaaatatgtacacatrgtagaatggctaaatcaagcaacatgtacattacc

SEQ ID NO: 158378 - DNA, 578 bp, Homo sapiens
accacaacctggtacaggtttgtggtctgggagttggcagcccctgctttagatcatgcatttcttaagcacagaattcgttgctgtttcatccctgaggctgactgaaacattcattcatttaacatctagctatattgcacccagtacatattgtggagattctggtgccaaaatgactgtgtgtgaatccccattctgtctctttccagctgagtttcccagggcaaaaaatataacttctctaagcctcattctctagttgtaaaatggaatagaaagtttcttcttcaaagggttacttgagttctaactgaggttatagatatgagatgcttagcaaaaagctgagcacagaatacatgatcagtaaaaactagttataattggttgttgctggggctgggaatgtaaaagtgagtaagacctggtctccaccctcaagaacttctcagtgtaataggagacagataagtaaagaaytgattccaaaaagtgggagtagtgtgaagtgagaagtgcatataggctgcaatggaaagggaccccaaatccatacttgggggtaagaaaagcct

SEQ ID NO: 158379 - DNA, 571 bp, Homo sapiens
gttgtaaaatggaatagaaagtttcttcttcaaagggttacttgagttctaactgaggttatagatatgagatgcttagcaaaaagctgagcacagaatacatgatcagtaaaaactagttataattggttgttgctggggctgggaatgtaaaagtgagtaagacctggtctccaccctcaagaacttctcagtgtaataggagacagataagtaaagaattgattccaaaaagtgggagtagtgtgaagtgagaagtgcatataggctgcaatggaaagggaccccaaatccatacttgggggtaagaaaagccttccagaaggtgacatctaatcttagaagaccagaagggtgagtaagaaacagtacagaaacctggaggcaagaagcaagagactggcaccttgggtaaatgacattctgaatggaacagagagcgtgagaagagaagttgaagaacatagggttggagcggatatcagggaccagatcacagctcctagtaccatgccttgaattcratcatggctcaataagtgtttgttcatgtagcaaatgaatctgccca

SEQ ID NO: 158380 - DNA, 534 bp, Homo sapiens
tagatcttgtctccattttgtagatgagtacactaagcacaaaggaagccaaatgtttgctaggggttgcatagctaataaacarcaattaggattgctgccatttttcaagaaacctttgtgggaaaggaatattgggaccacaattctctcagttgttttcttagtccttaatattttctcaccgccttttctcagagactggctccagaaggatgcccaggtccccagatagggcactcagtgctgtggtgggaagaaggggaagaggaatggccttctgctcactgatatcactagaacgtaagccccacttgttagcaaccatgtgttttcttgctttagcatgcctaaagtctgcactctgtaaaattgtttgaactatcctgttatgtcccaagtacattttaaagattcagaagagaggaaaacttttaaatttaaaaatatatatattagcaaaatgacaaaaggtgaaaagcacagtttggttgaatgtatttttttttttcctttgagacggagatttgctct

SEQ ID NO: 158381 - DNA, 549 bp, Homo sapiens
tgatctcgcctatgtgcagaggaggccaggccctcccaggcaggacacacacatacatagttgtgctcatagatacaactccactttgcacaaccccacagggcagctctcattcacactccgggaaaataataatagaagtagctgatgtttgttcagcatttgccgacagcagacggccaccgtgggaggkggggtgatgttatccccagtttccagatgaaggcactgaggcttagagaggataggtgacttgcccaacgtcacacactcaggaagtgtaagagctaggctggaatttcaggcagactccagagtcccagctctcagccagcacctccccccacacatacactgctcaccccctgccacctcctgcccctccaatcccacagttaagtgcagacaaagtctaggcaagcatcccggagacacggaggcaggtacaatcagacacagtcctatactcagatgcgcacagccagacctcgcaatgacacaaagcacgcactcagaccacactgtcatatcatcagccattcactagac

SEQ ID NO: 158382 - DNA, 564 bp, Homo sapiens
atctcgcctatgtgcagaggaggccaggccctcccaggcaggacacacacatacatagttgtgctcatagatacaactccactttgcacaaccccacagggcagctctcattcacactccgggaaaataataatagaagtagctgatgtttgttcagcatttgccgacagcagacggccaccgtgggaggtggggtgatgttatccccagtttccagatgaaggcactgaggcttagagaggataggtgacttgcccaacgtcacacactcaggaagtgtaagagctaggctggaatttcaggcagactccagagtcccagctctcagccagcacctccccccacacatacactgctcaccccctgccacstcctgcccctccaatcccacagttaagtgcagacaaagtctaggcaagcatcccggagacacggaggcaggtacaatcagacacagtcctatactcagatgcgcacagccagacctcgcaatgacacaaagcacgcactcagaccacactgtcatatcatcagccattcactagacacccacaggacagaccc

SEQ ID NO: 158383 - DNA, 537 bp, Homo sapiens
gccatttgcatgtcttcttttgggaaatctctattaagatccactgcccattttttaatcaagatattattatttgctactgacttgtataaaattttttgtacattttggatattaacttcttatcagatatatggtttgcaaatattttctcccattccatgggatgcctttcactctgttaattgtttcctttgcttgtagaagctttttagtttgatacaatccaactcaactattctttttttattttgttacttgtgcagttgatgttatatccaaaagatcactgccatgaaaaacgtcaagaagattttttcctattttcttctagtagctttatggtttcaggtctgacatttacatttttaatccatttttagttgatggtgtgagrtaagtgtccagtttcattcttctccactgcatatgggtatccagtttttccaccatcatttattgaagagattgtcctttccccattgtgttttcttggcacccttttcaaaattgattgactgtagatgcatggattta

SEQ ID NO: 158384 - DNA, 537 bp, Homo sapiens
gccatttgcatgtcttcttttgggaaatctctattaagatccactgcccattttttaatcaagatattattatttgctactgacttgtataaaattttttgtacattttggatattaacttcttatcagatatatggtttgcaaatattttctcccattccatgggatgcctttcactctgttaattgtttcctttgcttgtagaagctttttagtttgatacaatccaactcaactattctttttttattttgttacttgtgcagttgatgttatatccaaaagatcactgccatgaaaaacgtcaagaagattttttcctattttcttctagtagctttatggtttcaggtctgacatttacatttttaatccatttttagttgatggtgtgagataagtgtccagtttcattcttctccactgcatatgggtatccagtttttccaccatcatttattgaagagattgtcctttccccattgtgtkttcttggcacccttttcaaaattgattgactgtagatgcatggattta

SEQ ID NO: 158385 - DNA, 523 bp, Homo sapiens
tggtgtcatattattctgtatttgtttacatatttaccattaccagtgagatttatgctaccatatactttcacattgctgtttagcatgttttcattgcaatttgaataattmtcttaactatttcttgcaaggcaggtctagtggtgatgaactccctcagtttttgtttgtctgatgaaggctttatttcaccttcattttgaaagggcaattttgcttggtatagtattctttgttggcagttttttctctttcagtactttgaatatatcatgccactgtctcctggcctgcaaggtttctgctgagcaatccactgatagtgttagaaggcttcccttgtatgtgatgagctgtttttttcctgatgctttcaaaattctcttctctctttgactttcagagtttgattacaatatgtcttggtgtagtcttctctgaattgatctgtttcagagttctttcagcttcatgaatctagatgtcaattttccacataagattttaaaagttttcagcc

SEQ ID NO: 158386 - DNA, 564 bp, Homo sapiens
agcagattccagctgagaggctataagaatctgcacgttctggggttgggacactaggcgccggtggtgtgggttcgcgagcgggatcttccaatctgtgggtcacacagttccacagcaaaagcgcagtttctcctgctgggtggcacgctcactcactgcctcccttggctggaggagggtkttccctttcctgtgtggctctcagttgggccctctgcaccacactgttcttccttctctccatggatcatgccagccttctagtcaattttgatgagagaacctcgataccttggttgctgctgaaagcttgacatgcttattatggttttttttcgatggggagcctcctaacgctgctgcttctaaatacatatatattcttcagtgcaaggcagtggaaagtgagaaaaataggtttgtaagaggaaaaagagtgatggaggttgtctctatttcagtaggtggtgacatattaaactacattcttaaatattctgtataagtacagcttttaagggaatacttctgtgtatttctaaatcatatttatagcaacag

SEQ ID NO: 158387 - DNA, 564 bp, Homo sapiens
agcagattccagctgagaggctataagaatctgcacgttctggggttgggacactaggcgccggtggtgtgggttcgcgagcgggatcttccaatctgtgggtcacacagttccacagcaaaagcgcagtttctcctgctgggtggcacgctcactcactgcctcccttggctggaggagggtgttccctttcctgtgtggctctcagttgggccctctgcaccacactgttcttccttctctccatggrtcatgccagccttctagtcaattttgatgagagaacctcgataccttggttgctgctgaaagcttgacatgcttattatggttttttttcgatggggagcctcctaacgctgctgcttctaaatacatatatattcttcagtgcaaggcagtggaaagtgagaaaaataggtttgtaagaggaaaaagagtgatggaggttgtctctatttcagtaggtggtgacatattaaactacattcttaaatattctgtataagtacagcttttaagggaatacttctgtgtatttctaaatcatatttatagcaacag

SEQ ID NO: 158388 - DNA, 570 bp, Homo sapiens
gttgactagaaggaaagaaaatgtgatgcaaaactcacaaacccttggactacctgagctgtacataatggtgccagtagaaaacacgataggcaaagagcatgaacctgattcacagagcacacaggatctgtaaacactatgaattgattacctaaattattttaaataagatctcctagagtattctgcttaaacaactccaagacacttacctgggtcttccatcatgacagatcaataaaggaatatatatatgtctatatacatatatacttacttgyatatacacttgtgtgtaaatatgtataaatatatatacttgtatccacatacatatatatgtacatatattatacataaatatatacataaattaaaaatggaaatatgtcaaatgataaagaaaattgggtaaaatattaacaatatgtcaatcaatctgtgatgttcttaatgctataaatgtaatgtccttgcaacttttctctgtgaaaaaatttctaaataaaatatttttaaaaataagaaaagaataaatctattcagattcagcctgttacaaataat

SEQ ID NO: 158389 - DNA, 551 bp, Homo sapiens
tatgacaggctatcatgtatgtatacagaattaaatttttcacctaaaggaatgccaagctgagatgttgacaaacaaataaaaaatacaacgagttgaagttgtattaaattactggagcacaagcaatttaccagatttaaaaagaaacagtaatacagtaccataactaggagaaactacaaaaatagaaacggatgcataaatgacagagatggaagtagtagacaaaacataaattcagcttataaacatgctcaagaattaaaataaaatcatgaaaatataaaaagaaatggaaactcttaaaataaaaattttaaatktaaaatctcaaaattaaatcatttaagatcaaatattcactgtctggtcttaaaagcagattagacactgtcagagaaaagatcagtgaactaggtgacataataaacttcacaaactgaatcactcaggaatctgtgggcaaaaatcaagccatttgatgtacattaaaatgaagtaaaaaatgaagtaacaagttacatatacatatgtatagatggatgaga

SEQ ID NO: 158390 - DNA, 460 bp, Homo sapiens
gtacactctcttttacctgctgctgccatgtgaagagggacatgtttgctcccacttctgccatgattataggtttcctgggactccccagccataaagaactatgagtctattaaacctctttcctatatagattacctagtcaagggtaatctattagcagtgtgagaatggactaatacagtaaattgttaccgggtagtgggaagctgctaaggaatrcccaaaatttggaagcaactttggaactgggtaatgggcagaggttggaacaatttaaaggactcagaagaagagagaaaaatgtggaaaagtttggaacttcctagagacttgttgaatggcattgaccaaaatgctgatagtgatatggacaataaggtccaggctgaggtggcctcagatggagatgaggaacttgttgggaactgaagcaaagctgactcttgttatgcaaaga

SEQ ID NO: 158391 - DNA, 566 bp, Homo sapiens
gaattcactagtgagttggcaccagcaccactgggaaacttagtgtggtggtcacctataggacaggtgtgacctaggggagataatgtagataaatgagcaccccaaccatagcaaccaggaagataaaagataactaggaggctaatggaagttgcttctgaaaaaaaaagttacaaacacttgcccaatttctggatctggagcaatttttagacctaaaatccattatgtgagggagatgctatgtatccaggcagaaagatcctgcaactcccgaagaagtacatatgccactaatgccccagtcttttcccaaaggtacctatggtcacatacttggataatagtacagaaagggaaagaaaatattcagatattttaaggactattggacatgttcttgagttgctatagattctcttggatctaaagtgtcaccatgaactccctgttagagtgaacaagyaattaataaagtcttaatgcaaatccagctcagtgtggtctactgggctgatgggtaaagtcagtggtcacttctctcactgccaatggattgttgg

SEQ ID NO: 158392 - DNA, 523 bp, Homo sapiens
tcagtgtttgtgtttctgcattaattcacttggagtaatgaccttcagctgcatccacgttgctgcaaaggacataatttcattctcctttatggctgtgtagtattccatggtgtctatgtgccacattttctctatccaatccaccattgatgggcacctaggttgattctatttctttgctattatgaatagtgctacaatgaaaatatgagtccatgtgtctttttggtagaacaatttgttttcttttgataagtaagcagtaataggattgttgggctgaatgagttctaagatctttgagaaatctccaaactgctttccacaatatcygaactaatttatgttcccaccaacaatgtataagtatttccttttctctatagtctcaccaacatctgttgttctttgatttattaataatagttattttgactggtgtgaaatgatatctcattgtggttttgatgtatctcttttatgataagttatgtggagctttttctatgtttgttggctg

SEQ ID NO: 158393 - DNA, 611 bp, Homo sapiens
cagaaattcaaacctagacacatcatagtcaaactgttgggaaccaaagacaaagcttcaaagcagcaaaagaaaagatactcatcatgcattcagagtcctcattaacactaacagttgatttttatcagcaactatggaatccagaagacagtgagacaacacatctgaagagctaaaagaaaaagttkgttaaactagaatctataaactgcaaatctatcttaataaagggtagttaggacattccaagaaaaacaaaagcagaaagaatttatttcacatagacctattctacaaaaattaataaaggatgcattcaactgaaaaaaagacatctgaaagcaacttgattccacacaaagagcattgataaagttaactatacaggtgaatatacaaggcagtataaaagtttttctaaatttgtaactcttttactatctaatttaaaagacaatctaataaggtagtaattattaaactgtattgatggacctataatatataaagacatgagttgtgtggcaattttagcactaaggagaggggagttatctaagctacattagggcagaaattttgtatattattgcaaaccagtttgtatt

SEQ ID NO: 158394 - DNA, 589 bp, Homo sapiens
ttgaagtgacaagatcgtgtcactaatttttgaaaaaatatctgctctgaaaatacccatgtctgaaaaactgtagcttgtttttcatttgttatctcagggaaaatgatatgctgtgaagaaaacagctaattcagttcacagctcatacaactttatggtggacatatgtcactcatttgatttctgacatctttttatggtaaaaaaatcccccagttatataagattcattggggagcaaaaaactccctctccatacagtagctggaaatggtagacattttcttttccacacactcaatctccctttcagctagaccagagacaattaacttatagttttctaatcaactgwcctgttccagattttgattgtgcagctagtaacagaaaaatcagggagcttgttcagggacagtgaacacactgctgctagtgaagcttcaaagtagtgttcctggcacagatgttaaaggacttgagtgctgatataggtaaatttgcaaaaagaaaattccaaaaagaatatctggcattaaagttgctgatgtataatttatagcttctaatacctggctatagcaat

SEQ ID NO: 158395 - DNA, 589 bp, Homo sapiens
ttgaagtgacaagatcgtgtcactaatttttgaaaaaatatctgctctgaaaatacccatgtctgaaaaactgtagcttgtttttcatttgttatctcagggaaaatgatatgctgtgaagaaaacagctaattcagttcacagctcatacaactttatggtggacatatgtcactcatttgatttctgacatctttttatggtaaaaaaatcccccagttatataagattcattggggagcaaaaaactccctctccatacagtagctggaaatggtagacattttcttttccacacactcaatctccctttcagctagaccagagacaattaacttatagttttctaatcaactgtcctgttccagattttgattgtgcagctagtracagaaaaatcagggagcttgttcagggacagtgaacacactgctgctagtgaagcttcaaagtagtgttcctggcacagatgttaaaggacttgagtgctgatataggtaaatttgcaaaaagaaaattccaaaaagaatatctggcattaaagttgctgatgtataatttatagcttctaatacctggctatagcaat

SEQ ID NO: 158396 - DNA, 595 bp, Homo sapiens
taataattacccaacctaccagcttttacaatatttaaaacaacctatagcccagctacagaatttaattacaccactaggcacaccaaagtgaaggcctcagcctctatttattgtattttagtgaatataaagacaactcaagaaagtttatttaaacacatacttatccctgmtatgttggtcttttctgatgccaaaagacaagtcatattcggcttttctattttgctttgaaatcaatcatttagcctagctcaaggcagcctgcttttgaaatggaaattatcaacctaattccttatctagttactctacttagaaaacacattattttagacatatctaccaaagtatagcttatctttaaacataaatggacagcattcacatatattttcctcatttcatgccactgcttctccgcaatagaacatagcactctttaacatcttactttaagttacacataaataaaaatgatatatatgttgcttgccttttgtaatacagcagatgacgcatattaattgggttttgaattcatagcaatagcagcatgaataaaacacatcttttagagtcttagatgaat

SEQ ID NO: 158397 - DNA, 559 bp, Homo sapiens
gtctaaactacactcttcttttaaaaccctagagtagcctctgttgcaatagttattaatgaagaaaacagaattcagtcaacggagaagaaaacaaacttttgctcaaaaggaagacaaggtcctgggagagaaaaaaacaaacatgaaggtcttttaaatacaaacatgcacagatacacacacaaacacacacacacatcttggatgttagcttttaattaagctgacttttaaccattgagctcctttttttaaaaaacgtcttttaaaatctcattactatatttcagctaggacaaattgctgctatttcagaagtaccaagtatcaaaccraaaagggcttgattgaggaatcaaagccagactgttttggtggaacagagggaaggcagaaccttagctatcgaactgcagtgtggggtgacagccattcctttcagtttggtctggctagcaaaaaggtggccttgttatataaataaaacccctttaggagtcaaaataaaaaaatatgtcctcttttctttttcgcctagcacaccacctaccaccct

SEQ ID NO: 158398 - DNA, 489 bp, Homo sapiens
taattcagtttcttacctagggatgggactcaggctgtagacagctctccaccatcctagaagtggaggaaaaaaaaaaaaaactcatcttccctgttggaaktgagctcaaactccataatggagttacctgtcttctttcttcatggaaacaggaaatcttgccttccttttggaaacaagtaaaactccaaaaaaaagaggaattgtacagcaaagtaaacattaggtctcaaccaaattttgggatttcatggattctctggagtgggtgctctcagaccttggcaaattgtcctattggtttgagccatatggctaactcatgctggtaccaagcactgataggagatttgtcaaaggtcagggacatctccactcaggatcccttcatagttaccaaaatgtgaaccccaaaaatctgagacaggtctcagttaacttataaaatttattttgccaaggttgagaatgcatgcccatgacaca

SEQ ID NO: 158399 - DNA, 489 bp, Homo sapiens
taattcagtttcttacctagggatgggactcaggctgtagacagctctccaccatcctagaagtggaggaaaaaaaaaaaaaactcatcttccctgttggaagtgagctcaaactccataatggagttacctgycttctttcttcatggaaacaggaaatcttgccttccttttggaaacaagtaaaactccaaaaaaaagaggaattgtacagcaaagtaaacattaggtctcaaccaaattttgggatttcatggattctctggagtgggtgctctcagaccttggcaaattgtcctattggtttgagccatatggctaactcatgctggtaccaagcactgataggagatttgtcaaaggtcagggacatctccactcaggatcccttcatagttaccaaaatgtgaaccccaaaaatctgagacaggtctcagttaacttataaaatttattttgccaaggttgagaatgcatgcccatgacaca

SEQ ID NO: 158400 - DNA, 657 bp, Homo sapiens
acttccaaatctaaaatcttgatttactgaattgtttttccctggaactcatcaaatttggtctctgtgctttgttatttctgagcgaaatcataaggctatttacatgtacatgaaatgtgcaactggtcccagagctatcaatggtatctaaacctttgttcctacatgattcatcccatgagtctttcacctcttgtaaaaaacacagctcttgccttttgctactttctgtggtttttaaaatttctttttgattcccactaatttctgaggattctaatcattcacaagacttgccagcacatgtttgcacaaactccattttgtagcagcaaccttattttcctctgagaggcagaattgtttacccaaatactcatcgtaggccactttaaaaaatatgttgtctaggtgaatcagaagcttaaattgttccagttrcaatgttaactcttacttaaataaaagcactgtttttcaccaagtagaaatattttttttcctttggacatggaatctctaattaagattcccggagattaagaaatctttttcaagtgggaaagtatatgtaataaaagagaaatattgttcattgactttaagcatacacagcactctatagggtagcctcccagtttcatatagttgaat

SEQ ID NO: 158401 - DNA, 596 bp, Homo sapiens
aggactgagtacaaatgctcctggttatcttataaactttaaactatttaagtgaaatttccaagcctcaatttctctcattgaaaaatgggaataatgagagtatctacaacagagattggaaattctttcttctcaagtcaacttatttcaaatttagatatttgtgctcctaaattatttccataatttaatattttataatctaattgaatacattggtaacaatttaaatgtaatacataaatctgaaaacaaaatggcagaggatgatatcaaataaaaagtacaagtcttctttcctttcctgtgcacagacccagcctgatcccaattttcagggggtttctattttacacatttctgtcatattcttttccagtgcttcccttccaaaccatagatacaatgcttatrtctctagtcatgatttatcagcttcaacaatatatgttgcctccacctatgaaatatgaggattccggttcgcataaactgacttttgccatatccttcactctctgctagttatatttttacttttagtttctctcttgcttaaatttgttgatctacttgatgtgtttaatcttctg

SEQ ID NO: 158402 - DNA, 592 bp, Homo sapiens
aaagtagaatttctgaatatctcgtggggcaagattagattatattagctacattgtttaaactggcagcctttccacaccgcttctttgtatggatagtttcactttttgtaaacaaatatgtgtgtttgtttttcctagaatttattttgtattttgctccattttacrgaactcatgctaattaaaagaaaagcaaaccaactttgtcaaatttaattagaacttgtaaacatttgagggctctgtttctcatgaattgcacaatttctgcccagaaatacaagacaaagagacaagagttgagagacactatgactgcttcctcaataagcatttctcacttctctgataactgaactttgaatttgtctatgaattaggcagcaatcaggattctataaatctgacttctatcgtgggcactggatatgtgacaaaggtctgctcttagtttaagaattctgttaagtcttttgttttctgattataaacaaacccaaaatacaatgggtgacaaaagcttgctggttctaccccttccgaatacgtcttctagggatgctcttgagacacccagagtgacaaaagt

SEQ ID NO: 158403 - DNA, 592 bp, Homo sapiens
gaggaggaaagaaaatggtttccagcttgggtagaatgagaatcagcggtccgtgggcttccagatgctggggccaagtctgcaaagccatggtcaaccaccccatctctaaattcagggattcattttgtctaagaagacagagtctcatgarttctaatacttaagtcattatcagtcacagataacttggtgtgagcttgtacaagacactcagttctcagaacttcagttgtattaccagtaaatttgggtaaatggcgattcctccccaatcctgctcacagggagagtcatggggatgaagtgagagccgtgtataaaagtgatttatgggttgaaaagtgtggtatacacgaaaggtgctatcaatataacaaataatataaattatagttgtatgaataatgaagcatttttgaatgagttttcttaaagaatacaggacctggataagtcataataatgttaattaatctccagcgtctatttgacactttattgtttggcacactgcttccacgtttcttatctgaggagatacttacctgtgtactgaataggctgataatcattttgcagatgaggaaac

SEQ ID NO: 158404 - DNA, 614 bp, Homo sapiens
agatctaagagaaacgggcaaggaggaggaaagaaaatggtttccagcttgggtagaatgagaatcagcggtccgtgggcttccagatgctggggccaagtctgcaaagccatggtcaaccaccccatctctaaattcagggattcattttgtctaagaagacagagtctcatgagttctaatacttaagycattatcagtcacagataacttggtgtgagcttgtacaagacactcagttctcagaacttcagttgtattaccagtaaatttgggtaaatggcgattcctccccaatcctgctcacagggagagtcatggggatgaagtgagagccgtgtataaaagtgatttatgggttgaaaagtgtggtatacacgaaaggtgctatcaatataacaaataatataaattatagttgtatgaataatgaagcatttttgaatgagttttcttaaagaatacaggacctggataagtcataataatgttaattaatctccagcgtctatttgacactttattgtttggcacactgcttccacgtttcttatctgaggagatacttacctgtgtactgaataggctgataatcattttgcagatgaggaaac

SEQ ID NO: 158405 - DNA, 592 bp, Homo sapiens
gaggaggaaagaaaatggtttccagcttgggtagaatgagaatcagcggtccgtgggcttccagatgctggggccaagtctgcaaagccatggtcaaccaccccatctctaaattcagggattcattttgtctaagaagacagagtctcatgagttctaatacttaagtcattatcagtcacagataacttggtgtgagcttgtacaagacactcagttctcagaacttcagttgtattaccagtaaatttgggtaaatggcgattcctccccaatcctgctcacagggagagtcatggggatgaagtgagakccgtgtataaaagtgatttatgggttgaaaagtgtggtatacacgaaaggtgctatcaatataacaaataatataaattatagttgtatgaataatgaagcatttttgaatgagttttcttaaagaatacaggacctggataagtcataataatgttaattaatctccagcgtctatttgacactttattgtttggcacactgcttccacgtttcttatctgaggagatacttacctgtgtactgaataggctgataatcattttgcagatgaggaaac

SEQ ID NO: 158406 - DNA, 592 bp, Homo sapiens
gaggaggaaagaaaatggtttccagcttgggtagaatgagaatcagcggtccgtgggcttccagatgctggggccaagtctgcaaagccatggtcaaccaccccatctctaaattcagggattcattttgtctaagaagacagagtctcatgagttctaatacttaagtcattatcagtcacagataacttggtgtgagcttgtacaagacactcagttctcagaacttcagttgtattaccagtaaatttgggtaaatggcgattcctccccaatcctgctcacagggagagtcatggggatgaagtgagagccgtgtataaaagtgatttatgggttgaaaagtgtggtatacacgaaaggtgctatcaatataacaaataatataaattatagttgtatgaataatgaagcatttttgaatgagttttcttaaagaatacaggacctggataagtcataataatgttaattaatctccagcrtctatttgacactttattgtttggcacactgcttccacgtttcttatctgaggagatacttacctgtgtactgaataggctgataatcattttgcagatgaggaaac

SEQ ID NO: 158407 - DNA, 402 bp, Homo sapiens
tcaaaacttatctgttgtgtgcaccmtctttgctgggcacagttagacagccggcttgctacccgaatcaacatgagctaaggagctaggattcactggcttcccattccagctccagttcccattgccctccttacccttccaagtccttaccctccagctgtgccaaatcccctgccttggattcttcatgtccttcaataagtccagacacttgcaccagcagccccttcaacctggagtgtcctcctcatcccttcacttcttctgcagcccattcccagcgttctctgctcattttaaatgacccattttgagcatcacctcccacgagaaggcctctctaatcccttagcatcactatccgcttttgatgtcacagagtcccccaaatgcactgct

SEQ ID NO: 158408 - DNA, 604 bp, Homo sapiens
tattccatgttgtactggttcttaacccacatcatgaggattaaatgagataatgcatgtgaaatcttcatgcctgacccataagcactaaataaacagcaattgtctttaacccgtgcttattccactctgtcacactgcctgccaacttaacgcacttggtcttttttcaaggtatatgkgctgtcagcttatcttcactgtactgttagctcctcaattgtgggatctgggaatgttaatctttgtatcatagtgacttttaagttagattatttaaacatgtcattctaatcataatgcagagacacatgcatgctttcagagagcagcagaaattcagttttaatttatcattgcattgaagctggaagaaaacctgagggtattgttctcagaagttttaacgagaacaacattctctttgcattatcaatgttcctcagtcgccacttggctggagcaactacctctggcttcagttagctatttacattcctctatttttatataaattgtgctatattagcatatatttcacactgtgacctagtgtttcccagatcctttaagccaggctatttgtacattagtcaacgtcaat

SEQ ID NO: 158409 - DNA, 577 bp, Homo sapiens
aagcttgataaatattgactacttgaaccacacaatagctgccacatcttgggctgaatgacttctgcaaagtgcctgagtcccttgccatattccactccatgttgagtttcttagcctgttctagaagagaaattagtaaccctggctctgaagtagtggtagggagagctcacaatcaagaaggagctgtttcctyaatcctgcagtcttgggcctgaggctaacctcttgcctgtctttgggccatctaagtgagacggaaatccatgtctgtttttaacagctccagaggcaattcctcaacatctcttggtagtctgttctatagtctctgaaaacccttgccaaggtcaactagaaaataggcccttgtgacccagagtttctaaaaagctcacttgacaaattgagtaatgagtcaatcaagaggaaaaataaagtcagagatcaccctgcttctggaaggaccgagtcatctacagctaaaggagtggattgtaaaggggacacagaggccaacatcctggagagtgcacagcacagctctaactcagggaactgaggagctctgtca

SEQ ID NO: 158410 - DNA, 262 bp, Homo sapiens
taagaaacataactacattccccaatgaaatgctttccttttggtctattgcctggaacctaataaccactgaaactcaaactctgaccccaccctgccccccaaatacctccaagaacctcgaacttaacatgacatcacccacagtcccaagctgcttccccttctatcaccttgttcagttrccaagtaaatacatttacctcctaagtgattcttaaatgcaaatgcagccaggcctctccagccccacagcactgcc

SEQ ID NO: 158411 - DNA, 350 bp, Homo sapiens
agcctgaaggcttcctcccgccacccttcccacccccgggtggtgatcatggcagaggtggccctggtggcatgtggggaggaagaggtggcctcatggatcatggtggtcccggtggaatgttcagaggtggctgtggtagagacagaagtggcttcygtggtggctgggcatggaccgaggtggctttggtggaggaagacaaggtggccctggggggcccccggacctttgatgtaaccaatgggaggaagaagaggaggacgtgaaggacctggaaaaacggataaaggcgagcactgtcaggagcgcagagatcagccctactagatgcagagaacccgcagagc

SEQ ID NO: 158412 - DNA, 360 bp, Homo sapiens
ggtccctttcatgatttttgttttctttataaggggacctctcataattaacctyacaataatcatgaaacatgtaggacaacagttattcctatttcagataagcaagctgaggcctaaggagattaaattatgtgcccaaggtcatcctggcaagcactggtagactcaggcctgatgctcaggcatcccacctcctctcccagtgccctccatactgagtccatgatcagccaaccaagaatgggagtcagggatgggagaggtcatcctcagagccatgtgcattgggcacctctggctcagacagcatgtggacacttttaagggcatcatttatgatgtctgaagacaagagag

SEQ ID NO: 158413 - DNA, 608 bp, Homo sapiens
tacctgtggggttgcgtaatcacaattgaaaagtctttcagagatgggactgttgtataattaggctgagagttgggcccggggtaaagttaagtactggtatggatttagtgctaatgggctcattccttctactgggccgtcaaagttgaacagwaggggagaggtagcatttgtctacatgataaagtttttgcggaaaccctatctgttgaacttgaaccttgggatctgtacatagttactttttcatgaagcagctaattctctttagccgaatggttgaacagttgagtgggtctggcacttgaagcagagacatttgggtacagctcctactgaggagtatttgtgaacacctggaagctaagatggtttcttgtccacttacatctggccatggtttctgtggctgtatcaatgacttcagattgagggatcctaggccaacaattggacaaactcactgctgagccaagaaaagcaggatgcttctggatcagaacccaggaatgtttagggctttattctaagagggagagtcttccttggatgctgggagggttttttcaagatttaccttcaacatctggtgcttcctgaaacgt

SEQ ID NO: 158414 - DNA, 436 bp, Homo sapiens
caggaattcgagaccagcctgacccacatagtgaaaccctgtctctactgaaaatacaaaaatttgccgggtgtggtggygtggctgtaatcctagctactcaggaggctgaggcaggataatggcttgaatctgggaagtggaggttgcagtgagccaagggagtgccactgcactctagcctgggcaagaaggcaagattctgtctcaaaaaaataaaaataaaaaaacagggggaggagccaagatggccaaataggaacacctccagtctacagctcccagcatgagcaacgcagcagatgggtgatttctgcatttccaactgaggtaccgggttcatctcactggggagtgccagatagtaggtgcaggacagtgggtgcagcgcaccatgtgcaagccaaagcagggcgaggaatcacctcacccggga

SEQ ID NO: 158415 - DNA, 424 bp, Homo sapiens
gaaaccctgtctctactgaaaatacaaaaatttgccgggtgtggtggtgtggctgtaatcctagctactcaggaggctgaggcaggataatggcttgaatctgggaagtggaggttgcagtgagccaagggagtgccactgcactctagcctgggcaagarggcaagattctgtctcaaaaaaataaaaataaaaaaacagggggaggagccaagatggccaaataggaacacctccagtctacagctcccagcatgagcaacgcagcagatgggtgatttctgcatttccaactgaggtaccgggttcatctcactggggagtgccagatagtaggtgcaggacagtgggtgcagcgcaccatgtgcaagccaaagcagggcgaggaatcacctcacccgggaagcacaagaggtcagggaat

SEQ ID NO: 158416 - DNA, 433 bp, Homo sapiens
gaattcgagaccagcctgacccacatagtgaaaccctgtctctactgaaaatacaaaaatttgccgggtgtggtggtgtggctgtaatcctagctactcaggaggctgaggcaggataatggcttgaatctgggaagtggaggttgcagtgagccaagggagtgccactgcactctagcctgggcaagaaggcaagattctgtctcaaaaaaawaaaaataaaaaaacagggggaggagccaagatggccaaataggaacacctccagtctacagctcccagcatgagcaacgcagcagatgggtgatttctgcatttccaactgaggtaccgggttcatctcactggggagtgccagatagtaggtgcaggacagtgggtgcagcgcaccatgtgcaagccaaagcagggcgaggaatcacctcacccggga

SEQ ID NO: 158417 - DNA, 424 bp, Homo sapiens
gaaaccctgtctctactgaaaatacaaaaatttgccgggtgtggtggtgtggctgtaatcctagctactcaggaggctgaggcaggataatggcttgaatctgggaagtggaggttgcagtgagccaagggagtgccactgcactctagcctgggcaagaaggcaagattctgtctcaaaaaaataaaaataaaaaaacagggggaggagccaagatggccaaataggaacacctccagtctacagctcccagcatgagcaacgcagcagatgggtgatttctgcatttccaactgaggtaccgggttcatctcactggggagtgccagatagtaggtgcaggacagtgggtgcagygcaccatgtgcaagccaaagcagggcgaggaatcacctcacccgggaagcacaagaggtcagggaat

SEQ ID NO: 158418 - DNA, 511 bp, Homo sapiens
gatttatagctgaattccatctgatktataaagaactgatattattcctactgaaactattccaaaagattgaggaggagggacttctctctgacccactctatgaggtcagcattatcctgataccaaaacctggcacagacacaacaagaaaagaaaacttcaggccaatatctttgatgaacataaatgcaaaaatgcacaataaaatactagcaaacaaaatccagcagcacatgaaaaagctaatccaccatgattaagtaggctttatctctggtatgcaaggttggttcaacatacacaaatcaataaatgtgattcaccagataaacagaaccaaagaaaaagccacatctcaatagatgtagaaaggctttaaataaaattcaacaccctttcataaaaaaaaaaaaaaacctcaactaactaggcattgaaggaatggacttcaaaataataacagccatctgaaacacacacacacatacatgcacacacgcacacacac

SEQ ID NO: 158419 - DNA, 486 bp, Homo sapiens
caatacagtgatgaaagaaatcatagatgacacaatttttttaattccatgatcatgagttggaagaatcaataaaattatcatgctgcccaaagcaatctacagattcaacacaatccctatcaaattaccaatatcattttccacagaattagaaaaaacaattctaaaatttgtatacaaccaaaatagagcccaaatagccaaagcaatcctaagcaaaaagagcaaagctggagatatcacattacctgacttcaaattacagtacaaggctatactaaccaaaacacgtggcaccagtataaaaatggatacacagatcagtgtaaaaaaatagagaacccaaaaataaagctgtatatctaaaaccaactgatattcaataaaatcaacaaaaacagrcactaaggaaaggacactctattcaataaacggtgctgagaaaattggatagccatatgcagaatggaattggacccgtac

SEQ ID NO: 158420 - DNA, 628 bp, Homo sapiens
tgttgatggatatttgggttgtttcaagttttgcgcagtataaataaagcttctaggacattcatatatgagtctttgagtgacatatgcttcatttctcttgaatagaacccgaagagtgaatgattagaccacatagtaggtatatgtttaacttgtaactgccaaattatctttcaaagtggttgtaccattttatacttccagcctcgatgcataaaagttccatttccttgacatgcttgccaattggttggtctttttttattttaacccatgtaatagctatattgcaatatctcattttttgttttaatttgcatttttaacatgactaatgatgtttagtactttgttgtgtatatatttgtcaccactatgtcttatttggtgaagtgtctgttcaaatattttgctgattacattttttattattaaatttttaggttttattattgagttttatatattctggatacaagtcctttacagatacatgatttgatatattttctcccagaccgttgctatgtattgtaattcttttaacaatgtcttytaaagagcagaaggtattaattttgatgaaatacaaattatcagtttgttctcttgtggatcgtgcttc

SEQ ID NO: 158421 - DNA, 535 bp, Homo sapiens
agatatccttgaggattccagctatttcacagtctccttttcctagaagagatgactttagaacaggctgggaggagagagccaggtaaagaaagatatgcatctatgcaaaggctgcaagggccacaaatacagggcatcggagaagcaagcagtgcaggggctggaataggaagtgctggaaaaggagtggtcaggagatgagcagggccagatgaacrtgggccctgaatgccaagaaaagaaatgtagactccagccagaggccacagggaggggatggagtgggtggtagcttgatcagagttccagcacagtgcctggcacatagtaagggctcagtcaatatttatccaatgaataaatgaagaataaatagcagccatgtaggaagccagttaggaaactccagtttcctaagtgttcctaagtttgttaaggtctgaagtaaagttctcaaaaatatagataatcaaggtacaatgggttacaagaaagttaaataagattcctgtctcttaccaagtttccccct

SEQ ID NO: 158422 - DNA, 535 bp, Homo sapiens
agatatccttgaggattccagctatttcacagtctccttttcctagaagagatgactttagaacaggctgggaggagagagccaggtaaagaaagatatgcatctatgcaaaggctgcaagggccacaaatacagggcatcggagaagcaagcagtgcaggggctggaataggaagtgctggaaaaggagtggtcaggagatgagcagggccagatgaacatgggccctgaatgccaagaaaagaaatgtrgactccagccagaggccacagggaggggatggagtgggtggtagcttgatcagagttccagcacagtgcctggcacatagtaagggctcagtcaatatttatccaatgaataaatgaagaataaatagcagccatgtaggaagccagttaggaaactccagtttcctaagtgttcctaagtttgttaaggtctgaagtaaagttctcaaaaatatagataatcaaggtacaatgggttacaagaaagttaaataagattcctgtctcttaccaagtttccccct

SEQ ID NO: 158423 - DNA, 610 bp, Homo sapiens
tgcaagtgatacatgaggtctgagtttaaatatctccaaagcacgggcattcaaaaaaagtaaccatgtgctgcaaattctacattctaacaattgcaactggaagaaagcctaatcaaaaacaaagaaaaaaaaagtctcatctttattccagcacagtgccagtttccatttgcaagttgatgacaaaaacttaaatttttttgtggcgattggccttcacttctcaatttctcttctctctctctctcactcttctaaacacacacacatatatacatacacatgtacatatacacataaatatgtagacacaaatatatatatatacacatacatattcatgcattctttagtgaccaaaaaattttattctgatatattgtgtttaaataaattcagctcctgacaacatggatattcttttgaacacttttaaataactcatgttctctttgattccttgtattatttagtaatttaattttatgttctggatttcttcaaagcctcagagcctgcatctataagtaatacattcgaaacaataagarcgagcctgttattttctaatagaagtatcatttaatccagcaattccactactagc

SEQ ID NO: 158424 - DNA, 610 bp, Homo sapiens
tgcaagtgatacatgaggtctgagtttaaatatctccaaagcacgggcattcaaaaaaagtaaccatgtgctgcaaattctacattctaacaattgcaactggaagaaagcctaatcaaaaacaaagaaaaaaaaagtctcatctttattccagcacagtgccagtttccatttgcaagttgatgacaaaaacttaaatttttttgtggcgattggccttcacttctcaatttctcttctctctctctctcactcttctaaacacacacacatatatacatacacatgtacatatacacataaatatgtagacacaaatatatatatatacacatacatattcatgcattctttagtgaccaaaaaattttattctgatatattgtgtttaaataaattcagctcctgacaacatggatattcttttgaacacttttaaataactcatgttctctttgattccttgtattatttagtaatttaattttatgttctggatttcttcaaagcctcagagcctgcatctataagtaatacattcgaaacaataagagmgagcctgttattttctaatagaagtatcatttaatccagcaattccactactagc

SEQ ID NO: 158425 - DNA, 555 bp, Homo sapiens
atgctcagctattactttgctggatcatgatacactatgcccacctacctcacccaggcactaactcactgggaatctttagccaaaatttagaatcatgttactgtccctatttgtgccccagaaacttcagcagctatgttccatcaacttagaagatgcctcctttaaatatctatacttcctggatcatactactrtatttccctggaatccataaattgaactgtgacttccttttattctataccaacttacatctgaagtggtagattacttcatatgggtagatttagaacactgtgtttcatttggctcttccattttactttctccaagaaaaagaatggaagataataggaagcaatatgtataagactgaattaagacagaattattatcaaattgaaagacagtgagttatgttattggctttcaacatatatcagacagaccatgcctccttgtctaataataaagacttcatttggaggtcccagaacactaaatgatatgaagctatgggttaggggatggtcaatttacagaggcatg

SEQ ID NO: 158426 - DNA, 566 bp, Homo sapiens
ctgttacatagaacttatgcctactattattttgtgtaacatagtattttattatctgaatttagtaatgattacactgaatatgccatcaaagagaagtctcaaaatatatataattattcccctatagttgggcatttggggtatgtacacctttcccctttaatggatctgtaatctagtgagttgttagtgtctacacataaatcgttgaggatgctaagaagaaaattagggatgggatcccagagatgtttcctacaaatcctcttaccacacagacagaccctagtgaagaaacagctatgttaataccttctgcttcttgtgtacctcctataagccaaacactttgcatttgcatctcttttaattgtcacagtaacagtacagtactagtatccttattttaccagtgagaaaagagaattcagaaasattttgtaaggaggaaatgactcaccatcacttcaaaaagtctcctcttattagtgcctccttcaactcaggaacttgattaatgcttacataatcatcacatttaatcttcctacaactccagtcag

SEQ ID NO: 158427 - DNA, 437 bp, Homo sapiens
tttggtcttcactataatgaaggcaaattctgaaaatactcaaggatcttttttgaaatacaagtattcttcagtgcaacagaaattactccaatttgccaatctcctttaatattgtatctaataatatttatcatttaataatagtttaaacctacctagaaataactttaattcttttatagacagggacaattcaaaaaactcatttatgcttctgaaaaaaacacccaacactttggaaacacaaatatttacaaaagatttgctagataaattatgacaaatattgtagctatagttactttttgatcactgggcagattaaatacaaatacatatgaagatttttcaggtcacaaggacattcatttgttacctatttatcatgagctctcagtgggttcagcaccacrcaaaataatttaaaaatggtc

SEQ ID NO: 158428 - DNA, 579 bp, Homo sapiens
actttatttaaaattatgattttagtaggtttacaaaataccagtgctacatttgaatatgtataaattatgtttaaaatttacattttggtaagtatgactaaattcttaatttattttcattattactaccactttatttctaaatgttgccatagtcatttggctttgttctaaatctgtgggaaagatacagagattacacattttgttttcttgcagttactatgctgtccttcctatcactacctgttggctgaggtagtgataggcctaaatgattcattatcttaaaggtactaaatatgttgagtaattttttcttctaaactaacagaaagagagaacctaggagttactcccttaggctggttaaagtgaaaggtagccaagtcaacccagcttgtttccttctctcattaggaaagaactattgttcattctcataacacactttttccaattgcaaacatactcagggttaaaatagtttagcacaaattgcagcccatttcatttgttcttcacaagctggaacttttcttgtaagctaratattaaatggttcaagtaaattgg

SEQ ID NO: 158429 - DNA, 544 bp, Homo sapiens
cttaaatttattttttccttaacgaaatcatttatataaaccatactgcaggggagaaataatccccaagagtgtttcatggttaaatgtgacacaaattagcacaaacacaattttagctcttttatacgtgaatatgtccaatagagactattttatcctttttctttttattcaagttcaccaaaatatttgtagggtttttttatataataagtgaaagttggccgggcacggtggctcacgcctgtaatcccagcactttgggaggccgaggcgggcagatcacraggtcaggagatcgagaccatcctggttaacacggtgaaaccccgtctctactaaaaatacaaaaaaattagccgggggtggtggtgggcacctgtagtcccagctactcgggaggctgaggcaggagaatggcgtgaacccgggaggcggagcttgcagtgaaccgagatggcgccactgcactccaggctgggagacagcgagactcagtctcaaaaaaaaaaaaaaaaaaaaaaaaaaaagaagtgaaagc

SEQ ID NO: 158430 - DNA, 573 bp, Homo sapiens
agaaggcagctaagaggaaagcaggtggaaggaagaaggaagaaatctgactatcaagacattgtkatttgtgcctattttaattgattcaggtgaatttcaagtgacagattccttatccccataaagaactcttatggggccaggcatgggggctcactcctataactccagcactttgggaggccaagacaggtgcattgtttgacctcaggagttctagaccatactgggcaaaatggcgaaaacttttctctacaaaaaaatacaaaaattagatggacatgggggcaagagcctgtagttccagctacttggggaactgaggcaggaggattccctgaactcaggaggtggaggttgcagtgagccgagatcgtgccactgcattccagcctgggtgagatagtgagattctgtctaaaaaaaaaaaaaaaaaaaaagtcttatggaagggaagagggattataaacttatagaaggaaaaatgttaaattgaggtatcttggaagattgagaagtttcttggtcccagacaatgtcctttgaataagattactaaagataaaatat

SEQ ID NO: 158431 - DNA, 573 bp, Homo sapiens
agaaggcagctaagaggaaagcaggtggaaggaagaaggaagaaatctgactatcaagacattgtgatttgtgcctattttaattgattcaggtgaatttcaagtgacagattccttatccccataaagaactcttatggggccaggcatgggggctcactcctataactccagcactttgggaggccaagacaggtgcattgtttgacctcaggagttctagaccatactgggcaaaatggcgaaaacttttctctacaaaaaaatacaaaaattagatggacatggkggcaagagcctgtagttccagctacttggggaactgaggcaggaggattccctgaactcaggaggtggaggttgcagtgagccgagatcgtgccactgcattccagcctgggtgagatagtgagattctgtctaaaaaaaaaaaaaaaaaaaaagtcttatggaagggaagagggattataaacttatagaaggaaaaatgttaaattgaggtatcttggaagattgagaagtttcttggtcccagacaatgtcctttgaataagattactaaagataaaatat

SEQ ID NO: 158432 - DNA, 443 bp, Homo sapiens
agtataacacctatttctagccactgttgcaactacaggtggctgtgtacagaataactctattcctctatatcctgtttggacaaaccatctttccactgatttaagcacaccttcagaatgaaacataatttcttatctcaggaattccaaagtctaattgaagaggcaagcttatattgaataatttggcaaagcagattgtgattggcaataataaagtaattcaatatataaaaaataagaaaagaaggaaatatctgtttcatagttgtaataaattagaactttaccatgcasaatagatagagaggcattcctcaaaaattaagagaggtgtaaagtaaatgtaaatgtaaactataggggttttctaaagcagagagtcatgcttcacgataatgaaagtaatgctggtatttatattcctttggagaaagcaa

SEQ ID NO: 158433 - DNA, 610 bp, Homo sapiens
tttacattatcaattattatctaagggctgtgcctaaagtgacataaattattaggcagaataccacacctggtattccaaccctctatttgtgcaggtagactaagctcaacattttaagtacagccctatgaccaagagatgcaggttttggctgctggaattagagtgaatggaattggtaaggtcattccagggaatgtgtgtgaagcgcagacagtgtctgctgtaatctaaccatttcaatggtcaggtccatccagccttcacaaaaatttattgtactgatgtttcagtatgacacctggtaacatttctagaaaaaatagactcaaaataagaattagcaaatgatagcctccactatagcataacctcttctatagttgtcctgagacttagacaaaatgcttcatctccttcctctaccattgattctagatttttctcacccttagccaacacttstgttgctctgggtcaattaaatagtggggcgactcatacttttatatatagagtgactgagcccttgtttgactatggtctgttgatagttaaaataaggcttgagaacactaaggatgccatagtatctctgcagagtttc

SEQ ID NO: 158434 - DNA, 561 bp, Homo sapiens
ctgcttgctgctttgactctgctgtccattatggtgaccacattcaacttgcctttggtgactgaatgccaccacttggctcctgccagctcaggatccaattactcccaatgcgttcaggttttctaattgaccagctgtagttcctaccataaggtctgatctacaaagaagggtagtcgtagagctcttcaagaaagctgagcctccctttaaaaatttatttctcacagtacacggaagtgtatcttcaagaccctgcagtgtgagtaagtaggtcttacattataaatctactccaaagttccaatctccccaaattattttatttatttagagacaaagccttactacatccccagtgctaaaacagtgaccagtacatatgaattagtgatccacaaatgttcaatcaacatacatttctaaaaggaagtctgcaatggaacacacacacacacacacacacacacacacacacacacacacacacamacagtgattgcagcataagagaggaaagagggaaattctaggctgatgataaaagaagcgtctaac

SEQ ID NO: 158435 - DNA, 596 bp, Homo sapiens
ttaaaatttaaccagaatttwaaaaaaaaaatccagcttggtgtggtggctcataactgtaatcctagcactttgggaggctgaggcggacagatcacttgaggtcaggaatttgagaccagcctggccaacatggtgaaaccccgtctctactaaaaatacaaaaattagctgggcatggtggtgcgtgcctgcagtcccagcaacttgggaggctgaggcaagagaatggattgaacctgggagggggaggttgcagttaactgagattgcaccccagcaccccagactgggtgacagagaagacgctgtctcaaaaaaaaaaaattccaacacaagcacataggcagaattttaatgttttggtagtttacgttaagttgataaaggaaaaaataactagtaaccatatgaattttacagaaagtgaaaaccatgtaaactaaagggtatcttttgaattcagtttacaaggttagaggttgcttctaggttattttatttgcatcatttctttagaaatgacatttccaaggtccagtgaagacaaacacaaagtggatagaaattgcagagctacaaaacatctacagtgc

SEQ ID NO: 158436 - DNA, 596 bp, Homo sapiens
ttaaaatttaaccagaattttaaaaaaaaaatccagcttggtgtggtggctcataactgtaatcctagcactttgggaggctgaggcggacagatcacttgaggtcaggaatttgagaccagcctggccaacatggtgaaaccccgtctctactaaaaatacaaaaattagctgggcatggtggtgcgtgcctgcagtcccagcaacttgggaggctgaggcaagagaatggattgaacctgggagggggaggttgcagttaactgagattgcaccccagcaccccagactgggtgacagagaagacrctgtctcaaaaaaaaaaaattccaacacaagcacataggcagaattttaatgttttggtagtttacgttaagttgataaaggaaaaaataactagtaaccatatgaattttacagaaagtgaaaaccatgtaaactaaagggtatcttttgaattcagtttacaaggttagaggttgcttctaggttattttatttgcatcatttctttagaaatgacatttccaaggtccagtgaagacaaacacaaagtggatagaaattgcagagctacaaaacatctacagtgc

SEQ ID NO: 158437 - DNA, 596 bp, Homo sapiens
ttaaaatttaaccagaattttaaaaaaaaaatccagcttggtgtggtggctcataactgtaatcctagcactttgggaggctgaggcggacagatcacttgaggtcaggaatttgagaccagcctggccaacatggtgaaaccccgtctctactaaaaatacaaaaattagctgggcatggtggtgcgtgcctgcagtcccagcaacttgggaggctgaggcaagagaatggattgaacctgggagggggaggttgcagttaactgagattgcaccccagcaccccagactgggtgacagagaagacgctgtctcaaaaaaaaaaaattccaacacaagcacataggcagaattttaatgttttggtagtttacgttaagttgataaaggaaaaaataactagtaaccatatgaattttacagaaaktgaaaaccatgtaaactaaagggtatcttttgaattcagtttacaaggttagaggttgcttctaggttattttatttgcatcatttctttagaaatgacatttccaaggtccagtgaagacaaacacaaagtggatagaaattgcagagctacaaaacatctacagtgc

SEQ ID NO: 158438 - DNA, 389 bp, Homo sapiens
gtttccatgatcatggaggtcagcttgttgcaaaggaaggtcaaaggcacggaggggagaggggctgtgcccagagccacgttcctgatcaggcagcggaaggccgtgggacccacacgcaagtggtggcataagcctaaggcaggagggaggtgggaatatggatgggattggcgtggaagcaggtgcatttgtaggtttgagggctcaaatttaagtagccagtgtgagaascagagggaaacctggcagttacgtactgtaacgcactagggaaggcggctcccacagcagccaagtgacccagcagactctaactccagcgctggagcagagcgtgcagaccacaggggccgtggatcagagcctgccgcaccagctgtgcagcc

SEQ ID NO: 158439 - DNA, 607 bp, Homo sapiens
ttatcaacacctttcctaaaaaaatttaagtttttagtacagctttaaaattttacatcttaagtgactggttcactcttaagtaactgcatgtgtttatggccttcatctctgcatacatagagggggttaaagttaccgaaaagtgaaagacgtgattaggcagtgttactctttttgagacagcctcactgtcaccctgtcctagagtacagtggtataattcaattacagatcactgcagcctcaaactcctggactcagatgatcctcctgtctcagccttccaagtagctgggactataggggtgtgccaccacacctggttaacttttaaatttttttgtagaggcaggatctcatgttcaccggggtggtctcaaactcctggactcaagaagtgatcctcccacctcagcctcccaaagtgttgggattacaggagtgagccacygtgccctgcaattcttgtaaagtgtattgtaatggaaggaatgatagccttgtctctacagctagattatgaattaccagaatattgtgcttccagcttctagcatggtgtctggtgttattgtgataatagaaataaacatttaagtgctta

SEQ ID NO: 158440 - DNA, 562 bp, Homo sapiens
gccagccctagaaacaattattaaacaaagtcccataaaaccgcagagtcgagattagaaggaccttggcggtgacttgctccagcctcctgtttaatataaaaggaagcaggttcagrgagtgaggtgaacctcctaggattatccagacagcaggtggtggagccgggacaagtgcccagttctcctgccaccagggaaagcttgccttgggaccttgatctgcccattgtaagctcattctgtgccatagggcactgctcattcctgccaagggttaacagagaacagagatggaagggtcagttctaactcttcaggttcggtttaattagtatgtttctttgtttttaatattagccagatataatcattcatttatagacctcttgagactcagccaatgtgccaaaggtcttgatgacattgccaatagatattgtgatctgaaggaattccacggtctcccaggactgagcacgtagcatcccatacatctccacccctgcctccctgcaaaggcccaaggaggggatctctcacatgactgaggggcagtggc

SEQ ID NO: 158441 - DNA, 430 bp, Homo sapiens
gtgcaagggtttggtttaaaaaaaaacagaaaaacaaaaacagaacaaaacaaaaaaacrgagaggcaagatgtggtaggagaatcctcaggtcagtacatctgtcagcaatgagagtggacagagtagctatttctaaaatgaactattctaaccctcacatctattccttaagctctgctggggttgactgtctgccacaggccagctacagggagacgaagggcaggttgcacaccatcccaccagctcttatcagatggtcaggcctcaactgagatgcattcaggaaatttgcctcattcccttgaccaaaggccaggttttcccggttctgagagccagaaagaaacccaaagtgaacttcagagtccctgcacactgagaactgaaatcataactgaaagttcaagagcctggggaggtttga

SEQ ID NO: 158442 - DNA, 368 bp, Homo sapiens
tggaatattttttaaataacaaatacaatttaaaatcagatatttgtaaagattttcagctgtatcttcgacaaaatggaaaatttaaatgttactaggcctgacgcagtggctcaggactttttaaccccagctctttggaagtccgaggctggaggatcgcttgaacctaggaggttgaggctgcagtgagccatgattgtgccactgccctccagcctgggcaacagagaccctacaaaaaaaaaaaaaaaaaaaaaaaaaaaaaaaaaargaaagaaggaaggaaggaaagaaagaaatagaaaatgtaaaagttactataagattcttatggtgaataacatcttacgtccacccatttactt

SEQ ID NO: 158443 - DNA, 506 bp, Homo sapiens
cgaggtttcaccatgttggccaggctggtctcgaactcctgaccttgagccatccacctgcctcagcctcccaaagtgctgggattgcaggagtgaactgccrtgcctggcttttttttttttttttttttttaatggtcccagtatgtccctcaatcagttgcccagactggagtgcagtggtgcaatctcagctcactgcaacttctgcctcccagattcaagtgattctctgcctcagcctcccaagtagctggaattacaggtgcgtgccaccatgcccagctaatttttgtatcattctcccttcttcaatatgtgtctcattttctttgtctggcttggcaactcctgtggcctccgtaggcccttggcatggacttttcaatgcttttcccttttccttcttcatcccttggttcaacatggtccttccagatattcaagtacatcagcttcaacaaaaccatgacccagctctcctccacgctggcccgctgtgccaa

SEQ ID NO: 158444 - DNA, 506 bp, Homo sapiens
cgaggtttcaccatgttggccaggctggtctcgaactcctgaccttgagccatccacctgcctcagcctcccaaagtgctgggattgcaggagtgaactgccgtgcctggcttttttttttttttttttttttaatggtcccagtatgtccctcaatcagttgcccagactggagtgcagtggtgcaatctcagctcactgcaacttctgcctcccagattcaagtgattctctgcctcagcctcccaagtagctggaattacaggtgcgtgccaccatgcccagctaatttttgtatcattctcccttcttcaatatgtgtctcattttctttgtctggcttggcaactcctgtggcctccrtaggcccttggcatggacttttcaatgcttttcccttttccttcttcatcccttggttcaacatggtccttccagatattcaagtacatcagcttcaacaaaaccatgacccagctctcctccacgctggcccgctgtgccaa

SEQ ID NO: 158445 - DNA, 554 bp, Homo sapiens
ttctgaaaactgaacaatttccttttctacaatagatgttagttccaacaataaaatttcaaagttaagaaattttcaaaattaagaaaaatcccaatttgaaagaacaagttatttatttatttatttatttatttatttwttttttttttgagacggagtctcgctctgtcgcccaggctggagtgcagtggcgggatctcggctcactgcaagctccgcctcccgggttcacgccattctcctgcctcagcctcccaagtagctgggactacaggcgcccgccactacgcccggctaattttttgtatttttagtagagacggggtttcaccgttttagccgggatggtctcgatctcctgacctcatgatccgcccgcctcggcctcccaaagtgctgggattacaggcgtgagccaccgcgcccggcctaagttatttattttgaaaaaaacattatcatagaccgaaaaggaaacattccaattcatgaagtgcctaacagaagacaaccacaggcataaaccactttcacataacatccccaataat

SEQ ID NO: 158446 - DNA, 554 bp, Homo sapiens
ttctgaaaactgaacaatttccttttctacaatagatgttagttccaacaataaaatttcaaagttaagaaattttcaaaattaagaaaaatcccaatttgaaagaacaagttatttatttatttatttatttatttattttttttttttttgagacggagtctcgctctgtcgcccaggctggagtgcagtggcgggatctcggctcactgcaagctccgcctcccgggttcacgccattctcctgcctcagcctcccaagtagctgggactacaggcgcccgccactacgcccggctaattttttgtatttttagtagagacggggtttcaccgttttagccgggatggtctcgatctcctgacctcrtgatccgcccgcctcggcctcccaaagtgctgggattacaggcgtgagccaccgcgcccggcctaagttatttattttgaaaaaaacattatcatagaccgaaaaggaaacattccaattcatgaagtgcctaacagaagacaaccacaggcataaaccactttcacataacatccccaataat

SEQ ID NO: 158447 - DNA, 399 bp, Homo sapiens
gaattccctttttctttgcattrctgggttcagactttctgaccaccttaccagtggggagaatccgagactacagttcccatgagccctcagggcaccacgtggtgcctgcccgtgctaccaacgcgcagcgaggactccatttcccagcgtgcctcaggaagggcgccaggactgcattttgctccggagcgtccagagtcctggccctgagcgggaatcgcagtggccgaggctgagcggcaggtagaaggggcgtctccggggcttcacagggaacacaggggcttcggcccaaccacaagtacgcagttgcacatgccctacttttgcccattctttgcaaatcccctaaggaacgaacgcgcctcgcgtgcgggcctttctaatcttcgcttg

SEQ ID NO: 158448 - DNA, 399 bp, Homo sapiens
gaattccctttttctttgcattgctgggttcagactttctgaccaccttaccagtggggagaatccgagactacagttcccatgakccctcagggcaccacgtggtgcctgcccgtgctaccaacgcgcagcgaggactccatttcccagcgtgcctcaggaagggcgccaggactgcattttgctccggagcgtccagagtcctggccctgagcgggaatcgcagtggccgaggctgagcggcaggtagaaggggcgtctccggggcttcacagggaacacaggggcttcggcccaaccacaagtacgcagttgcacatgccctacttttgcccattctttgcaaatcccctaaggaacgaacgcgcctcgcgtgcgggcctttctaatcttcgcttg

SEQ ID NO: 158449 - DNA, 399 bp, Homo sapiens
gaattccctttttctttgcattgctgggttcagactttctgaccaccttaccagtggggagaatccgagactacagttcccatgagccctcarggcaccacgtggtgcctgcccgtgctaccaacgcgcagcgaggactccatttcccagcgtgcctcaggaagggcgccaggactgcattttgctccggagcgtccagagtcctggccctgagcgggaatcgcagtggccgaggctgagcggcaggtagaaggggcgtctccggggcttcacagggaacacaggggcttcggcccaaccacaagtacgcagttgcacatgccctacttttgcccattctttgcaaatcccctaaggaacgaacgcgcctcgcgtgcgggcctttctaatcttcgcttg

SEQ ID NO: 158450 - DNA, 627 bp, Homo sapiens
aaacaaatggaaaacaaaagagaataggagttgctattcttatttcagacaaaatagactttaaaccaagaatcatcaggaaggacaaggaagggcattacataatgataaaggtttcaattcagaaagaagatttacctatcctaaatatgtatgcacccaagactggagtataaagattcataaaacaaggctttagagacctatgaagagacttagataaccatacaataatagtgggtgacctcacatcccactaacaatgttagatcatgagacagaaaactaacaaagatattcaggaccaaaacttgacacttgaccaaatgaacctaagagatatctacagaataatccacccagcaacaacagaatacatattattctcatctgcacatggcacatactctaagatcaaccacatgcttggtggaaaagcaattcttaactaatttaaaagaaatgaaatcataccaacaacattctcagaccacaggacaataaaaatgtatagcaatagcagataaacaactcaaaaccatataattgcatgggaattaaacaacctgcttctgaatgacttttgggttaaaaaaatgaaattaagrcagaaataaaaaaaaaatt

SEQ ID NO: 158451 - DNA, 275 bp, Homo sapiens
tctccctctgtgtttcccttccagccctaaaacctccaactttgaatcgcttgacatcagattatataaagaacatctgctccttgtttcagttattcttgactcctgtgtgctcccttaatattttccctccagcttgtgtcyggccctccacacaactcttactcattgatttttttttcctacacatgtaaagacattctccacactcagaattcaattccttgagctttttccctcactggttttgttcttcactctacctcagcctctac

SEQ ID NO: 158452 - DNA, 568 bp, Homo sapiens
cattagtgtttaacttacctagattttttttgttgtaaaatgggatatgtcagagctaaaattagaartccctgtttgtttgtttgtttttgtttttaagagccaaggaccctacatcctgccctctcttatagagtggttaagagcgatgagtgatgactacaattttaaagaaaacaatcagagacaatatatttctcacctgagctgtgcctgccttctatacctgtggctggagggtcgtaccaataactttccttaacttggttttgccctggagatatttctttttaaaaagatgctcaagcacacaagagaatgggagtcttcatggattggctctatttaatgatatataaaataaataaatttttctctacactcacacagaacccttctgacaccaaatgtctggtggtttttcccacaccaaccaattctccaatgtttggtggacaatttaactcaattctgacattaaatgcacatagtttgtatagactccacaagctaagagctcagtggcacaagacttacccccaacttcagatgccagttgaaagtctgg

SEQ ID NO: 158453 - DNA, 568 bp, Homo sapiens
cattagtgtttaacttacctagattttttttgttgtaaaatgggatatgtcagagctaaaattagaagtccctgtttgtttgtttgtttttgtttttaagagccaaggaccctacatcctgccctctcttatagagtggttaagagcgatgagtgatgactacaattttaaagaaaacaatcagagacaatatatttctcacctgagctgtgcctgccttctatacctgtggctggagggtcgtaccaataactttccttaacttggttttgccctggagatatttctttttaaaaagatgctcaagcacacaagagaatgggagtcttcatggattggctctatttaatgatatataaaataaataaatttttctctacactcacacagaacccttctgacrccaaatgtctggtggtttttcccacaccaaccaattctccaatgtttggtggacaatttaactcaattctgacattaaatgcacatagtttgtatagactccacaagctaagagctcagtggcacaagacttacccccaacttcagatgccagttgaaagtctgg

SEQ ID NO: 158454 - DNA, 568 bp, Homo sapiens
cattagtgtttaacttacctagattttttttgttgtaaaatgggatatgtcagagctaaaattagaagtccctgtttgtttgtttgtttttgtttttaagagccaaggaccctacatcctgccctctcttatagagtggttaagagcgatgagtgatgactacaattttaaagaaaacaatcagagacaatatatttctcacctgagctgtgcctgccttctatacctgtggctggagggtcgtaccaataactttccttaacttggttttgccctggagatatttctttttaaaaagatgctcaagcacacaagagaatgggagtcttcatggattggctctatttaatgatatataaaataaataaatttttctctacactcacacagaacccttctgacaccaaatgtctggtggyttttcccacaccaaccaattctccaatgtttggtggacaatttaactcaattctgacattaaatgcacatagtttgtatagactccacaagctaagagctcagtggcacaagacttacccccaacttcagatgccagttgaaagtctgg

SEQ ID NO: 158455 - DNA, 568 bp, Homo sapiens
cattagtgtttaacttacctagattttttttgttgtaaaatgggatatgtcagagctaaaattagaagtccctgtttgtttgtttgtttttgtttttaagagccaaggaccctacatcctgccctctcttatagagtggttaagagcgatgagtgatgactacaattttaaagaaaacaatcagagacaatatatttctcacctgagctgtgcctgccttctatacctgtggctggagggtcgtaccaataactttccttaacttggttttgccctggagatatttctttttaaaaagatgctcaagcacacaagagaatgggagtcttcatggattggctctatttaatgatatataaaataaataaatttttctctacactcacacagaacccttctgacaccaaatgtctggtggtttttcccacaccaaccaattctccaatgtttggtggacaatttaactcaattctgacattaaatgcacatagtttgtatagactccacaagctaagagctcagtgscacaagacttacccccaacttcagatgccagttgaaagtctgg

SEQ ID NO: 158456 - DNA, 448 bp, Homo sapiens
agtggctcacacctgtaatcccagcattttgggaggccgaggtgggcagatcacgagatcaggagttcaagactggcctgaccartatgatgaaacctcgtctctacaaaaattcaaaaattagctgggcgtggtggcgcatgcctgcagtcccagctactcaggaggctgaggtaggaaaattgcttgaacctgggaggtggaggttgcaatgagccaatattgggccactgtgctccagcctgggtgacagagtgagactctgtctcaaaaaaaaaaaaaaaaatgtggcttcagaaagcagcacagtatcttagacaaggggagccactgggactcccttggaggtgcagtccagtctggctgcagctccagtaagctcaggagaagcctaatacaacttcccacaatatcccggtaatgtggggactagcgctttcaagaattc

SEQ ID NO: 158457 - DNA, 621 bp, Homo sapiens
ctgggtgcagcacaccaacacggcacatgtacacatatgtaacaaacctgcacgttgtgcacatgtaccctgaatcttaaagtayaataaaaaaagaaaaagaagaccttgtcttttgctaggcattcagcatgggtattgatcaatctagtcaggagttgagatggtttaggctttgttgttgttataatgatcctgaataaaccacatgtttaatggcctctagtgttactctcttagtctatttctactgttataacaaaatgcctgagactggacaatttataaataatagaaacttattcctcacagtttttgagcctggaacgtgcaaaatcaaggtgcttgcaggtttggcatctggtgagggcctagtctgttcttccaagatgccaccttgaacactgtatcttcacaagacaaaagaaacagaagagcaaaaagggcctaggctagttccctccagccctttgataagttcactaattccatgtaggaaggctctgctctcacgacttaatcacttcctaaaagccttgcctcttaatattatcacattggtggttgagttttaacatatgaattttggggaatatcttcagaccataactttccatcctt

SEQ ID NO: 158458 - DNA, 621 bp, Homo sapiens
ctgggtgcagcacaccaacacggcacatgtacacatatgtaacaaacctgcacgttgtgcacatgtaccctgaatcttaaagtataataaaraaagaaaaagaagaccttgtcttttgctaggcattcagcatgggtattgatcaatctagtcaggagttgagatggtttaggctttgttgttgttataatgatcctgaataaaccacatgtttaatggcctctagtgttactctcttagtctatttctactgttataacaaaatgcctgagactggacaatttataaataatagaaacttattcctcacagtttttgagcctggaacgtgcaaaatcaaggtgcttgcaggtttggcatctggtgagggcctagtctgttcttccaagatgccaccttgaacactgtatcttcacaagacaaaagaaacagaagagcaaaaagggcctaggctagttccctccagccctttgataagttcactaattccatgtaggaaggctctgctctcacgacttaatcacttcctaaaagccttgcctcttaatattatcacattggtggttgagttttaacatatgaattttggggaatatcttcagaccataactttccatcctt

SEQ ID NO: 158459 - DNA, 533 bp, Homo sapiens
agttaaggcaaggacaggccattttgttttcttttgtggtggaatgtcatcagttaaggcaggaagaggccatttaaatatcacttcttttgtgattcttcagttgcttcaggccctctggatgtatwcatgcaggtcacaggggatatgatggcttagcttgggctcagaggcctgacactgagaatgctacaagctcccactacctttcaacttggtctttgttgcacatgccaggactaagcaaatgctctgaggacaaaagcagaggcaaatgtggggcttgcatagctgcactagtgtacattctttccagcaatcttcccttcaagtcccacttggattgtttttttctttaacaactttggttgctttaagtattttacctagcttctatgcttactattgattggaaggttagtacaagctcctccattttgctcagatgttggatgtagtttctgcttatccacaagtgtcccaaagccccaagggactggtttaggatttatcctctgtcacctggatgatca

SEQ ID NO: 158460 - DNA, 597 bp, Homo sapiens
tcacttcttttgtgattcttcagttgcttcaggccctctggatgtatacatgcaggtcacaggggatatgatggcttagcttgggctcagaggcctgacactgagaatgctacaagctcccactacctttcaacttggtctttgttgcacatgccaggactaagcaaatgctctgaggacaaaagcagaggcaaatgtggggcttgcatagctgcactagtgtacattctttccagcaatcttcccttcaagtcccacttggattgtttttttctttaacaactttggttgctttaagtattttacctagcttctatgyttactattgattggaaggttagtacaagctcctccattttgctcagatgttggatgtagtttctgcttatccacaagtgtcccaaagccccaagggactggtttaggatttatcctctgtcacctggatgatcacaccagacttctaactggtctctgcttataggcttaccctttccaatccatgctaactcaggaaaatgatacatcggttgtatttttccaaaatttcttatagtatacatttctcagataataaactatggcttctggcttccc

SEQ ID NO: 158461 - DNA, 597 bp, Homo sapiens
tcacttcttttgtgattcttcagttgcttcaggccctctggatgtatacatgcaggtcacaggggatatgatggcttagcttgggctcagaggcctgacactgagaatgctacaagctcccactacctttcaacttggtctttgttgcacatgccaggactaagcaaatgctctgaggacaaaagcagaggcaaatgtggggcttgcatagctgcactagtgtacattctttccagcaatcttcccttcaagtcccacttggattgtttttttctttaacaactttggttgctttaagtattttacctagcttctatgcttactattgattggaaggttagtacaagctcctccattttgctcagatgttggatgtagtttctgcttatccacaagtgtcccaaagccccaagggactggtttaggatttatcctctgtcacctggatgatcacaccagacttctaactggtctctgcttataggcttaccctttccaatccatgctaactcaggaaaatgatacatckgttgtatttttccaaaatttcttatagtatacatttctcagataataaactatggcttctggcttccc

SEQ ID NO: 158462 - DNA, 261 bp, Homo sapiens
caacttggatgaaaagtaaattctattaaaaaaaatgtgaggggccaacactttctgagaccaaaacacgatttctcttatcaacaatttagtgagtgaattgagatccaaatttgatttgacwaatacttcaaaacaaaaagcagaaatataagaaaccacgagaaaaaagaagggatgtggcagataaatcaagaataacaaaatgtaaattactagaatttcacaaggagtaaaaggtattcgtggaagtaagacaat

SEQ ID NO: 158463 - DNA, 551 bp, Homo sapiens
ggcccactgttttgtatataacatgtcacttaaaccgctccagattgttttagtatctcaattttatagagtggaaactgatactttagaggctcagtatctattctggggccacttggctaataaggagttttagttctgtctgatttcatatccagttaactacaatgctggcaagacttttatgtctatatatttaaggctaacacatcctcaaagtctccaataccatcctctcttacacaaagtcttatttctctgttattggctagggtgtagtgtaatgtagcarttcagttttcacatatggtttactgtgttttagggtcatagctgcttgagaacagaattggtacctggttaacctctaagtaaagcacagtgcataaagaaaccccaattttgtgaaccactgaaaagactattgaaaatgtagattttagaatgaagaaaacacactgggactgcagtgaaacagagagaactgcagagttccaggacatctgtaactgagcctttcacctgtaggctaccctctctatgttggagat

SEQ ID NO: 158464 - DNA, 551 bp, Homo sapiens
ggcccactgttttgtatataacatgtcacttaaaccgctccagattgttttagtatctcaattttatagagtggaaactgatactttagaggctcagtatctattctggggccacttggctaataaggagttttagttctgtctgatttcatatccagttaactacaatgctggcaagacttttatgtctatatatttaaggctaacacatcctcaaagtctccaataccatcctctcttacacaaagtcttatttctctgttattggctagggtgtagtgtaatgtagcaattcagttttcacatatggtttactgtgttttagggtcatagctgcttgagaacagaattggtacctggttaayctctaagtaaagcacagtgcataaagaaaccccaattttgtgaaccactgaaaagactattgaaaatgtagattttagaatgaagaaaacacactgggactgcagtgaaacagagagaactgcagagttccaggacatctgtaactgagcctttcacctgtaggctaccctctctatgttggagat

SEQ ID NO: 158465 - DNA, 551 bp, Homo sapiens
ggcccactgttttgtatataacatgtcacttaaaccgctccagattgttttagtatctcaattttatagagtggaaactgatactttagaggctcagtatctattctggggccacttggctaataaggagttttagttctgtctgatttcatatccagttaactacaatgctggcaagacttttatgtctatatatttaaggctaacacatcctcaaagtctccaataccatcctctcttacacaaagtcttatttctctgttattggctagggtgtagtgtaatgtagcaattcagttttcacatatggtttactgtgttttagggtcatagctgcttgagaacagaattggtacctggttaacctctaagtaaagcacagtgcataaagaaaccccaattttgtgaaccactgaaaagactattgaaaatgtagattttagaatgaagaaaacacactgggactgcagtgaaasagagagaactgcagagttccaggacatctgtaactgagcctttcacctgtaggctaccctctctatgttggagat

SEQ ID NO: 158466 - DNA, 551 bp, Homo sapiens
ggcccactgttttgtatataacatgtcacttaaaccgctccagattgttttagtatctcaattttatagagtggaaactgatactttagaggctcagtatctattctggggccacttggctaataaggagttttagttctgtctgatttcatatccagttaactacaatgctggcaagacttttatgtctatatatttaaggctaacacatcctcaaagtctccaataccatcctctcttacacaaagtcttatttctctgttattggctagggtgtagtgtaatgtagcaattcagttttcacatatggtttactgtgttttagggtcatagctgcttgagaacagaattggtacctggttaacctctaagtaaagcacagtgcataaagaaaccccaattttgtgaaccactgaaaagactattgaaaatgtagattttagaatgaagaaaacacactgggactgcagtgaaacagagagaactgcagagttccaggacatctgtaactgagcctttcacstgtaggctaccctctctatgttggagat

SEQ ID NO: 158467 - DNA, 574 bp, Homo sapiens
ctgttatttccctacctccatcaagaggattataaagtgttgacttttactgacacagcaagaattactttcacagagaaacagatgagaggagatacaagctctggaggtgtggtragttcaggggctagagtgtcaaatctggggtctgggctggggagcctgagctctgaggccttggaccactggcctgaatggaatctgtttagggtgggcagcttcgggtccttccataacctgagaagagagagttacttaaggcctttactgatcctccttcttataaaataatgagtttgggtgggtatttgtgatggactgttatcacaacattaccttttttgggctggactattccttgatgatccaggaacatggtcatctcatgattaaaggcaacgatgttcctcttcaatcctcaaccaactggtcaaatatgagaaaaacaatgtatctatggtcctccaggttcatctgcggtggctgctcgtagcataggctgaatttgataggtgtcctgaatcctactgtgggacttctgcttgtgggacagaaacaggcctacagtatggac

SEQ ID NO: 158468 - DNA, 562 bp, Homo sapiens
attaaccctggggttctggaagtttatgatgctctgcctgacccttcaggggatgcgcctcaagatatgtcagcctccaccttctgcccccaatgtgggagtacttcagagtacttggccctatcataacaagtttcatagtaggagggctgaagaagagatatttaagaggaaagttccttctaattgagtttatggccacaggactgttttgaaggtagggccagaataaaayatgcaagctttaagcagcttataaagtgaaagtagagttggtaaagaagcagattaacaaaattgaatgtgtctggtaaactactatcttgtttaccagttcttaatatcaagaactattgactacttcctttaagccagttcatcttcataggaaataaatttcatcattaagcacatttaaagaacctgttttgggccccaaaggcatttctagaaaagaaatacagaaaatattggttctatgaccgcactagaggaatatgcaaccagccttctaagaggatggttttgaaaatacctcatttgtttgagtttggcttttatg

SEQ ID NO: 158469 - DNA, 562 bp, Homo sapiens
attaaccctggggttctggaagtttatgatgctctgcctgacccttcaggggatgcgcctcaagatatgtcagcctccaccttctgcccccaatgtgggagtacttcagagtacttggccctatcataacaagtttcatagtaggagggctgaagaagagatatttaagaggaaagttccttctaattgagtttatggccacaggactgttttgaaggtagggccagaataaaacatgcaagctttaagcagcttataaagtgaaagtagagttggtaaagaagsagattaacaaaattgaatgtgtctggtaaactactatcttgtttaccagttcttaatatcaagaactattgactacttcctttaagccagttcatcttcataggaaataaatttcatcattaagcacatttaaagaacctgttttgggccccaaaggcatttctagaaaagaaatacagaaaatattggttctatgaccgcactagaggaatatgcaaccagccttctaagaggatggttttgaaaatacctcatttgtttgagtttggcttttatg

SEQ ID NO: 158470 - DNA, 597 bp, Homo sapiens
ttgataatcttctcattgctctgattagagctgaactatctcaaactcatatatgctgtaatatcttcttatccagagggcttaaccaaaccgagagaatgtgtgtgtgtatctacctgtacaggcacctctctccttccctcccctcccctggatttttctttctcatttgatttataagcctaaggaagagctatagtaaactatattcaccttaatactggccytcttttcccaaatttaattttaaccagctcatataacaagaatcagaaaaagggtggtgggtggtagggaaacatgtatggcaacagtgtacatgccaaatttatttgcagttatttacagattaaggagtggtagtttcctcttgattctttatgcatttctgatcgtgcattacagaaagtttggcattgccaagcctagggaagttgctcactataatttctggatagtgctagtttctcaggtaccaatgataagggtggactagtagtccactttcacagttgatgatctgctaggatgtcagctccatgagtccagggatgcagggctattttgtgcactgatatattcccagctccaagttca

SEQ ID NO: 158471 - DNA, 597 bp, Homo sapiens
ttgataatcttctcattgctctgattagagctgaactatctcaaactcatatatgctgtaatatcttcttatccagagggcttaaccaaaccgagagaatgtgtgtgtgtatctacctgtacaggcacctctctccttccctcccctcccctggatttttctttctcatttgatttataagcctaaggaagagctatagtaaactatattcaccttaatactggccttcttttcccaaatttaattttaaccagctcatataacaagaatcagaaaaagggtggtgggtggtagggaaacaygtatggcaacagtgtacatgccaaatttatttgcagttatttacagattaaggagtggtagtttcctcttgattctttatgcatttctgatcgtgcattacagaaagtttggcattgccaagcctagggaagttgctcactataatttctggatagtgctagtttctcaggtaccaatgataagggtggactagtagtccactttcacagttgatgatctgctaggatgtcagctccatgagtccagggatgcagggctattttgtgcactgatatattcccagctccaagttca

SEQ ID NO: 158472 - DNA, 597 bp, Homo sapiens
ttgataatcttctcattgctctgattagagctgaactatctcaaactcatatatgctgtaatatcttcttatccagagggcttaaccaaaccgagagaatgtgtgtgtgtatctacctgtacaggcacctctctccttccctcccctcccctggatttttctttctcatttgatttataagcctaaggaagagctatagtaaactatattcaccttaatactggccttcttttcccaaatttaattttaaccagctcatataacaagaatcagaaaaagggtggtgggtggtagggaaacatgtatggcaacagtgtacatgccaaatttatttgcagttatttacagattaaggagtggtagtttcctcttgattctttatgcatttctgatcgtgcattacagaaagtttggcattgccaagcctagggaagttgctcactataayttctggatagtgctagtttctcaggtaccaatgataagggtggactagtagtccactttcacagttgatgatctgctaggatgtcagctccatgagtccagggatgcagggctattttgtgcactgatatattcccagctccaagttca

SEQ ID NO: 158473 - DNA, 570 bp, Homo sapiens
tgtctgcttcacttaccaccccaataacaaagtttctgatcagggagccagcatgtccatctcactgaggttccctccaacctctatcagaaaccttaggctgatatgatggtattcaagaccacaggcatccttcacagttaaaagaatacagagccctgagctcaggctggacaattcccattcagaggattaccagaataaagcttggatattagatatccgatctagcattgtagggatcttgggcrttgtcatatttgtcttttatccacaacagctctgagcttggacactgctcccacccacccttaatctctatccccatgcatgaccattttccttgctggccatttcatgactgcattgacctcaagagctggaagggatatgggggtctatgcctctacaactttactttcagtgtgcaggcatctcggcatgtctcataatgccttcttttgcctcacaggccaaatagctacagtactgtagtatctgagagtgacacaaagggagtcctgagatggtctctaaaaagctttgctactagtttacccagttaaagat

SEQ ID NO: 158474 - DNA, 481 bp, Homo sapiens
attctacaaaacacttaaagaagaaagaaaaccagtccttctcaaacactttmaaaaaactgaagagggcaaaattccaaactcatttcatgaggctaggactatctgatgcgaaagacagacaaggaccatacaataaaagaaaataactctgagagcagtggctcacacctataatcctgatacattgagaggctgaggcaggaggaccacttgagccccgaagtttgagaccaacctaggcaacatagcgagaccatgtttctacaaaaaatagaaaaagatagctagacaaggtggtgcatgcctgtaatcccagctacttgggaggctgaggtaagaggattgctggagcccaggagttgaggctgaagtgagccatgatcacaccactgcattccagcctgggcagcagagtgagatactgtctcaaaaaaattacacgcaaacatcctcaacaaatataaacatagatgcaaaa

SEQ ID NO: 158475 - DNA, 472 bp, Homo sapiens
aacacttaaagaagaaagaaaaccagtccttctcaaacactttcaaaaaactgaagagggcaaaattccaaactcatttcatgaggctaggactatctgatgcgaaagacagacaaggaccatacaataaaagaaaataactctgagagcagtggctcacacctataatcctratacattgagaggctgaggcaggaggaccacttgagccccgaagtttgagaccaacctaggcaacatagcgagaccatgtttctacaaaaaatagaaaaagatagctagacaaggtggtgcatgcctgtaatcccagctacttgggaggctgaggtaagaggattgctggagcccaggagttgaggctgaagtgagccatgatcacaccactgcattccagcctgggcagcagagtgagatactgtctcaaaaaaattacacgcaaacatcctcaacaaatataaacatagatgcaaaa

SEQ ID NO: 158476 - DNA, 481 bp, Homo sapiens
attctacaaaacacttaaagaagaaagaaaaccagtccttctcaaacactttcaaaaaactgaagagggcaaaattccaaactcatttcatgaggctaggactatctgatgcgaaagacagacaaggaccatacaataaaagaaaataactctgagagcagtggctcacacctataatcctgatacattgagaggctgaggcaggaggaccacttgagccccgaagtttgagaccaacctaggcaacatagcgagaccawgtttctacaaaaaatagaaaaagatagctagacaaggtggtgcatgcctgtaatcccagctacttgggaggctgaggtaagaggattgctggagcccaggagttgaggctgaagtgagccatgatcacaccactgcattccagcctgggcagcagagtgagatactgtctcaaaaaaattacacgcaaacatcctcaacaaatataaacatagatgcaaaa

SEQ ID NO: 158477 - DNA, 472 bp, Homo sapiens
aacacttaaagaagaaagaaaaccagtccttctcaaacactttcaaaaaactgaagagggcaaaattccaaactcatttcatgaggctaggactatctgatgcgaaagacagacaaggaccatacaataaaagaaaataactctgagagcagtggctcacacctataatcctgatacattgagaggctgaggcaggaggaccacttgagccccgaagtttgagaccaacctaggcaacatagcgagaccatgtttctacaaaaaatagaaaaagatagctagacaaggtggtgcatgcctgtaatcccagctacttgggaggctgaggtaagaggattgctggagcccaggagttgaggctgaagtgagccatgatcacaccactgcattccagcctgggcwgcagagtgagatactgtctcaaaaaaattacacgcaaacatcctcaacaaatataaacatagatgcaaaa

SEQ ID NO: 158478 - DNA, 405 bp, Homo sapiens
cgtctcctcggctccgagaccctgcagcagctgaggtgcctgtgtctctctggttcccagtggccgccatcatgctctcctccacactcagggtggctgtggtgtgcgtgagcaatgtcaacaggagcatggaggcccacagcatcctcaggaraaaagggctaagtgtccggtcttttggaactgaatctcatgtgaggctaccaggaccaagacccaatcgtcctgtagtttatgattttgcaacaacatataaggagatgtacaatgacctcctcaggaaagatagagaatgctacacccgcaacggaatcttacacatcttgggaagaaatgagagaatcaagcccggtccagaaagatttcaggagtgcactgatttctttgatgtcatcttcacctgtg

SEQ ID NO: 158479 - DNA, 405 bp, Homo sapiens
cgtctcctcggctccgagaccctgcagcagctgaggtgcctgtgtctctctggttcccagtggccgccatcatgctctcctccacactcagggtggctgtggtgtgcgtgagcaatgtcaacaggagcatggaggcccacagcatcctcaggaaaaaagggctaagtgtccggtcttttggaactgaatctcatgtgaggctaccaggaccaagacccaatcgtcctgtagtttaygattttgcaacaacatataaggagatgtacaatgacctcctcaggaaagatagagaatgctacacccgcaacggaatcttacacatcttgggaagaaatgagagaatcaagcccggtccagaaagatttcaggagtgcactgatttctttgatgtcatcttcacctgtg

SEQ ID NO: 158480 - DNA, 405 bp, Homo sapiens
cgtctcctcggctccgagaccctgcagcagctgaggtgcctgtgtctctctggttcccagtggccgccatcatgctctcctccacactcagggtggctgtggtgtgcgtgagcaatgtcaacaggagcatggaggcccacagcatcctcaggaaaaaagggctaagtgtccggtcttttggaactgaatctcatgtgaggctaccaggaccaagacccaatcgtcctgtagtttatgattttgcaacaacatataaggagatgtacaatgacctcctcaggaaagatagagaaygctacacccgcaacggaatcttacacatcttgggaagaaatgagagaatcaagcccggtccagaaagatttcaggagtgcactgatttctttgatgtcatcttcacctgtg

SEQ ID NO: 158481 - DNA, 441 bp, Homo sapiens
tttccttctcacacacaaaatacgttcattccatcttaatagccccaaaaagttataactcattccagtaccaattcaaaattctaaggtctagagtctcatctaaatcasatatgagtgagacccaaggtacaattcatcctgaggcaaatttctctccagctgtgagcctgtgaaatcaaataagttatgtgtttccaaaatacaatggtgagacaagcatagactagacactttcattctaaaagggagaaatagccaagaaaaaaaaggggggtaatgggtcccaagtaagcccaaatccaaacaaggtaaataacattaaaactttaagcttgagaataatttttgactccatgccctgccttccagacacactggggtggcggggtgggtcccaaggcttcaggggacccgacctccatgtctttgccggatgca

SEQ ID NO: 158482 - DNA, 573 bp, Homo sapiens
acttcttttgtgattcttcagttgcttcaggccctctggatgtatacatgcaggtcacaggggatatgatggcttagcttgggctcagaggcctgacactgagaatgctacaagctcccactacctttcaacttggtctttgttgcacatgccaggactaagcaaatgctctgaggrcaaaagcagaggcaaatgtggggcttgcatagctgcactagtgtacattctttccagcaatcttcccttcaagtcccacttggattgtttttttctttaacaactttggttgctttaagtattttacctagcttctatgtttactattgattggaaggttagtacaagctcctccattgtgctcagatgttggagatgtagcttctgcttatccacaagtgtcccaaagccccaagggactggtttaggatttatcctctgtcacctggatgatcacaccagacttctaactggtctctgcttataggcttaccctttccaatccatgctaactcaggaaaatgatacatctgttgtatttttccaaaatttcttatagtatacatttctcagata

SEQ ID NO: 158483 - DNA, 307 bp, Homo sapiens
aaaatatcctggcaaaacttggaagttaggaataggggatcagtcaaaagtgaaaaagaattaagagcattgcaaaactcttgttttcaaataagtactagagaaacgtgttctratcaggaaggcagagaaagcgcaggtaaccatttaatggggtgggtaatccaagtagaatttcaagttaggtacaaaatggagtatataacaacttgataaaaaccaagggcagaaataacaatataaaataaagaagatgcgaggaatgtacagtaaaaaagtcattacaccaaatgtgtatagactaaat

SEQ ID NO: 158484 - DNA, 595 bp, Homo sapiens
tagttatcccatgtaatgcacctagcacaatgccaagcatttttcagtgcttttaaaaatgttagtccttctcatttcccataaaatattttcttggtaatagtctctttccaggtgatgtgtacaaaagtcacacaaacagtactcagtggaaggtctttgcagatgcttctcacaataaatccggactaaagtcccatgcctaagttcttactgaggaaggggacaaagccagcycagatgttcagtagaagcagacggtgtgaagaaagctttttcctgccttctcctccatttgcaacagcagctcctccagattgtcttctatgtcgtctgactgctgcaggcactggcaaatctcacagatgaggaaagctcccagggtggcatcttccagggtatcttggatgtccatgttgatcacgtgcacaggctgaaaggtctgctgttctctggaacacagatcttccaccactgtgtcatagacactctcctcacaggtgaagatgacatcaaaggaatcagtgcactcctgaaatctttctggaccgggcttgattctctcatttcttcccaagatgtgtaagattccgtt

SEQ ID NO: 158485 - DNA, 463 bp, Homo sapiens
ttgttgaggatttttgcatctatgtttatatttgttgaggatgtttgygtgtaatttttttgagacagtatctcgctctgctgcccaggctggaatgcagtggtgtgatcatggctcacttcagcctcaactcctgggctccagcaatcctcttacctcagcctcccaagtagctgggattacaggcatgcaccaccttgtctagctacctttttctattttttgtaaaaacacggtctcactatgttgcctaggttggtctcaaactgcggggctcaagtggtcctcctgcctcagcctctcaatgtaccgggattataggtgtgagccactgctctcagagtaattttcttttattgtatggtccttgtctgtctttcgtatcagatagtcctagcctcatgaaataagtttgggattttgccctcttcttcagttttttgaaagagtttgagaaggactg

SEQ ID NO: 158486 - DNA, 529 bp, Homo sapiens
gtccatgagctcggttgttttgatttttagatccagcataaatgagaacatgcaatgtttttctttctttgcaagctttatttcagttaacatagtgatctgcagttatattcatgttgtcacaaacaacagaatctcattctttgcatgctgaatattagtactgattattagaataatagtaatccattgtgtacattaccagattttctttattcattcatctgttgatggacacttaggttgcttccaaatcttggctattgtgaatagtgctgcaataaacataggagtgcaratatctcttccatttcctttttttgggtgtatacccagcaataggattgctggatcccatggtagctctcttttcagtattttgaggaacctccaaactgttctccatagtggttatactagtttgcattcccaccaacagtgtacaagagattgcttctcttcacatcctcaccagcatttgttattgcctgtctcttggataaaagccattttaactggggtgaggtgg

SEQ ID NO: 158487 - DNA, 529 bp, Homo sapiens
gtccatgagctcggttgttttgatttttagatccagcataaatgagaacatgcaatgtttttctttctttgcaagctttatttcagttaacatagtgatctgcagttatattcatgttgtcacaaacaacagaatctcattctttgcatgctgaatattagtactgattattagaataatagtaatccattgtgtacattaccagattttctttattcattcatctgttgatggacacttaggttgcttccaaatcttggctattgtgaatagtgctgcaataaacataggagtgcaaatatctcttccatttcctttttttgggtgtatacccagcartaggattgctggatcccatggtagctctcttttcagtattttgaggaacctccaaactgttctccatagtggttatactagtttgcattcccaccaacagtgtacaagagattgcttctcttcacatcctcaccagcatttgttattgcctgtctcttggataaaagccattttaactggggtgaggtgg

SEQ ID NO: 158488 - DNA, 529 bp, Homo sapiens
gtccatgagctcggttgttttgatttttagatccagcataaatgagaacatgcaatgtttttctttctttgcaagctttatttcagttaacatagtgatctgcagttatattcatgttgtcacaaacaacagaatctcattctttgcatgctgaatattagtactgattattagaataatagtaatccattgtgtacattaccagattttctttattcattcatctgttgatggacacttaggttgcttccaaatcttggctattgtgaatagtgctgcaataaacataggagtgcaaatatctcttccatttcctttttttgggtgtatacccagcaataggattgctggatcccatggtagctctcttttcagtattttgaggaacctccaaactgttctccayagtggttatactagtttgcattcccaccaacagtgtacaagagattgcttctcttcacatcctcaccagcatttgttattgcctgtctcttggataaaagccattttaactggggtgaggtgg

SEQ ID NO: 158489 - DNA, 593 bp, Homo sapiens
ctgttacttttgagcatcacgtcctaccaaaaagagggagaacaacttttcaatgaggcaggactcctatcattatgacactagagtgtaggggaaagttactattttagcccacacacttcagttccatacacgacattctattccggtaggaggctgattgagtgaaagttacatcttcgtttccctgttaaagaagayccggtgtctgcaaaaagtcaatagtaattgagtggctttggaaacaataaatatttagtgcaagtagagtcagaaaagaagaatctgtagcaacattttgaagtcctagggaaaagcatcacttccagagatatgggaaagacgggtacaattcgctgtgtgctcacccacatccttagcccaaatttctgcactgccacagtttctgcttatttcagtgtcaggtgccaaatcctaaagaggaatgcgttattataatctaagaatacactgtacattggggcctattaacagttttgtcatacaaaccaggaagagggaaacgttttctgccctcctaatccaggctagaaagtttacaattcttggtggatatgacttgttgcgttatg

SEQ ID NO: 158490 - DNA, 593 bp, Homo sapiens
ctgttacttttgagcatcacgtcctaccaaaaagagggagaacaacttttcaatgaggcaggactcctatcattatgacactagagtgtaggggaaagttactattttagcccacacacttcagttccatacacgacattctattccggtaggaggctgattgagtgaaagttacatcttcgtttccctgttaaagaagacccggtgtctgcaaaaagtcaatagtaattgagkggctttggaaacaataaatatttagtgcaagtagagtcagaaaagaagaatctgtagcaacattttgaagtcctagggaaaagcatcacttccagagatatgggaaagacgggtacaattcgctgtgtgctcacccacatccttagcccaaatttctgcactgccacagtttctgcttatttcagtgtcaggtgccaaatcctaaagaggaatgcgttattataatctaagaatacactgtacattggggcctattaacagttttgtcatacaaaccaggaagagggaaacgttttctgccctcctaatccaggctagaaagtttacaattcttggtggatatgacttgttgcgttatg

SEQ ID NO: 158491 - DNA, 593 bp, Homo sapiens
ctgttacttttgagcatcacgtcctaccaaaaagagggagaacaacttttcaatgaggcaggactcctatcattatgacactagagtgtaggggaaagttactattttagcccacacacttcagttccatacacgacattctattccggtaggaggctgattgagtgaaagttacatcttcgtttccctgttaaagaagacccggtgtctgcaaaaagtcaatagtaattgagtggctttggaaacaataaatatttagtgcaagtagagtcagaaaagaagaatctgtagcaacattttgaagtcctagggaaaagcatcacttccagagatatgggaaagacgggtacaattcgctgtgtgctcacccacatccttagcccaaatttctgcactgccacagtttctgcttatttcagtgtcaggtgccaaatsctaaagaggaatgcgttattataatctaagaatacactgtacattggggcctattaacagttttgtcatacaaaccaggaagagggaaacgttttctgccctcctaatccaggctagaaagtttacaattcttggtggatatgacttgttgcgttatg

SEQ ID NO: 158492 - DNA, 580 bp, Homo sapiens
ttctataacatttttccctgatcctcatcctctagcaaaaagaatgccattcaaagaagcctttttaacttcatagcaagatcccaggacctacagagaagaaactgccttagaggcaggcgactagattctcttattacagttgattgaaagctgcaggccaaattcaggaatcagacatgtaactttcttcatttttctagaaatgaattccatttagctttcaaagcctccatttccaccatggtagaaaatgatgatcttgcaatcacttctatgtttagatttagtcttatttaggtaagtatttattcagattcaagacccctcagccagccgtggtagcatgcacctgtagtcccagctacgcaggcagctgaggcaggagaactgcttgaacccaggaggcagaggttgcagtgagccgatatygcgccactgcactccagcctgggcaacagggcgagactccatctcagaaaaaagactctttttctccaccctgtgtagctaccctcccaaggaatgaaatagaaaggggtttacctgttgtccagcgactgggaagagatatctggct

SEQ ID NO: 158493 - DNA, 467 bp, Homo sapiens
aatgttagcaaagtgcaggcatagagtctgttatrttggtaatgttttttcaattatactaattattagtgctaataattaagagcccaaagcatgccagccactgcatagaaggtaaatacagtgcttattgtagaatattatcgtggaatctctctcattcacagatatatatactcaaacatctatgtatgtattttttatatgtactatatatgtatgtacacagagtttatagggtaggattggatgacacctcacttctttttggaaaacatcaagccaatttaaaaaaaaaaaaacttttaaagttagccgatgggcacggtagctcatgcctgtaatcccaatactttggcaggccagggcaggagtttgaaaccaacctaggaaatgtgcaaacctctttctctactaaaaatacaaaaaattggccaggcatgctgcagtatgcctgcagttccagc

SEQ ID NO: 158494 - DNA, 461 bp, Homo sapiens
ttttgtaaaggggagttctctagcacatgctctctttgcctgccaccatgtgtaatacgtgactgtgctcctcattcaccttctgccatgattgtgaggcctccccagccatgtctgtgagtcaattaaacctctttcctttataaattacccaatctcggatatgtctttattagcagcgtgagaacaggctaatacctatgctatttaattttcaacatrtctccatagagaaactggtgctttaggtcatctgctaaggttggaactgactcccaaggccgtgggatttcagaattttagaacagtgtatttaaaatcattttccttacaccaaaaagctacttcttagaagcctaaatggcagaaaaaacttcatttgtcaaatcaaaaaatcttgcctttctctgtttcattttaggaaactacaacctcatataactaactgggatgcaatggcc

SEQ ID NO: 158495 - DNA, 414 bp, Homo sapiens
gaattcagctgtataaagaactttgtcagtggaagaattatggacaactattcattttctattgctgcatatcagattacaacaaatgtagcagcttttgtgcaagagtccacacacagctgagtcctctgcttgaggtgtcataagtctcaaaacaagatgttggctctaccttgttctcatctggagaatcagctgggaatgaatcggctgccaagctcattcaggttgtcctcaggttgttcttcatttccgttggttgtggattcttgatggctctgggttctygatggctattggctgggggccacccacagttcgtagaggctgcccatagttttttgtcacatggtcttcctcagtatggctgcttacttcatggagctagcaagaagaatctctagagtgagtctc

SEQ ID NO: 158496 - DNA, 610 bp, Homo sapiens
aatataatggtgagcaaaatcagccatggtccctgtgttcctggggtttacattctattgggggatgccaacaccagtcaaataatcacaagtaaatttattatttatattttcaaacattactatgttttcaagatgccaaacatttttgttttctgaagtaaagaaacagttctacaagtgtgcataacataggaaatgtgatcagtcttggaggtcagtaattgtagtctgcaccaaacaaccagcttatatccagggactcccccatgatygtgttcatggaagatgttactacaattcttccctatcaactggtctcatatggacactgagtgaagggaaaggaaagtaacaaaatcctctatttaaaattcgtgaatatcactcagagagacatttaagtcttaatttaaagccttcttctgctttgcaaatgattttcataaacattcttatattgtgcttctgaaaatagtagatttgaagaagcaaactaacagtagattgaattgttgttagagatagccacagcaacaattctggagacatctgacaatctgataatgaaaaaggaaacaataattatcaaatatagatgtaacaaact

SEQ ID NO: 158497 - DNA, 590 bp, Homo sapiens
tatatccttgagcataattataatagctacttttaaatcctcgcattctattagctggattatctcagtattagtctctattgattgcttgttctcttgagcatgagtcacatttcctagttcctcctatgcatattaatgtaagactgcatctgaatattatgaatgatacattgtataaactttggattctcttatattcctccagaacatcgattttgaaagccggcagcaaacttaggtgaagtcaaactccaaattctgttcccctgtgatgtgtgtgtggtagcggtggtgtgggaattgggatggggcatggggggttgggaggtgtgtgtgaagcagcttgaaattgctgctcagtacttttagcttgagctaagatgtctggcgttggctccattggtacattgtttagttatcaaggacaggtttaggcagcgttagacacatacacacacacayacacacacacacacacacacacacacacacacaaacacaaaactctgattttcccctttcttgaatttttggctttactttccagtgctatggttccccagagctctctcctttggtcttcaagc
